United States Patent Application Publication US 2011/0183924 A1 - sequence listing, part 35

SEQ ID NO: 79838 - DNA, 780 bp, Homo sapiens
attttggatacttttgatatattgaatttgaactgtttgtgacatgtaactggagccatctgaaagctaattggatgtatggtttagcagctcagtagagactttgggagtgatatagcagtcttcagcttataaaggataagtccaaaggatggtggagactgggggtggaggcaggtcactctcatgcaacaaaattgcacttgcagcctgtaattacgtgctttccagatctttactgtcttattttcttttctaaagagttgtgaaaacatgacttctggcattgtctgtctttgtcattacatctgatagctataagaatatttaacaatgaattaagcaatttttacatttatactttcaatctgcgtatctgcatttttttctgctggctagggagaaagaagggtgtgccaactacattcctgcgtaaggctgtgtgaggcgctgcaccacacccctgcacactcggctcctccagtggaaacgtggagcctcagttatacaagtgaccctcactggcttgttgggtgttttagtttttaccccgtaacactgaactttgttacacagaatgtcctgtgatttcccaacacagtaggtatcttcctgagtttctcgaccggtagtttcacattggtcagaattcctctgttggccaagcttaatcttacacattgattgttttagtgacctattgatgtgaaggtggagttttgggactttactcaggtttctcagtgcggtggtagaaaatgaccttgaaagtgagacaga

SEQ ID NO: 79839 - DNA, 482 bp, Homo sapiens
gaaaaccactagcgcatcctgaatgcatcatcctatttaaaaaggaaaagcacacgtcacaaagtcaaacatcagccatttggaaacctttgcttcctgtaattagaattatgttccatctttttatgtttttgggaatttgaaataccaatttcgagatgcagaatcaaaaaaaaaaaacaaaacagcgaaacagcagcatgacacaaagaacctgggttctgatttggagtcaggttctctgggtttgagccccaactgtgccaactatgaatgcatgatttgaacatgttgcttaattttccaagtttttgcacagatatatcatctgcctccctgggagtcataaggattaagtgaaatgtttagtgcaggggtcacaaacttatttcatagagttagagtacatttttaggcttttcaagccatacagtctctatcacagctactcaactctgccactgtagcacgaaagtggccat

SEQ ID NO: 79840 - DNA, 1695 bp, Homo sapiens
  misc_feature (1)..(1): n is a, c, g, or t
  misc_feature (3)..(5): n is a, c, g, or t
ngnnngagtgtaagctgctatatgaagggatccacaagacgaataattaagggggacctctgatcaacagccagcaaggaactgaatccctcagacccacaactcacaagaaactgaagctgaagcagattcttcctcagtcaagcttcaggtgcccagctgtattggtagaggagaccaaccacaccctccacagcacagcacctggagaggaactgctgccatgaccatagaggacaccctctggatacaatgccagacttgatgtgggactgaccaacctatggaccccaggcaccaccacccagacctgctcagcacctgaaacattcacagccgtggagagagaactgttcactgctaccatccacacttctgggccccttcagcagcagggtgacaaggaagagggaaatcgacttggaaaagaggggacctctgacccaagagttcggtcaatgcatatgttggcagccagctgcacatcgcaccaaatatgaacttcaaatagaagaaagcctcatttggaagaaagctcatgcacagactgtaaatatttcagagcagattgtgtctctgtagattaacaaacagtttatttttccagtatgacaatgttgtgacaagatcagaagccagctttctcaccattaaatcaaagtcttatcaatatatggagacttttatggaaagaaacctgaaattacgcagaaatgccttccgcaagaagtggctagtatggtggcttcaagaacagtgacatttttcagtatgtccgttgttctaagacgttagtacatcacaattacctagaaaacttgttaaaacacagaagtctgggctccccctcttggccaacccccattcccagagggtttctgtttccatgggtctgaaataccacctaacgattggcatttctaacaaatttctgcatgaagctgctggtctgaggaccacactttgacaaccagtgcactacattaagctatctggagaagctgcaaatgcagatgaagaagctacaaatttttctatgtcaacaaaaattgactgatgagggtgaccttcggatcatgtttttaatgtttatgaaactggtctcattatcagaagtaaatggcttcaagaacttcagcctgaggaagaaaacatgagtcctaggcatatcaggctacaaccatgtttggaatgaatctaggtgcaaatctcagtggagaattaactgtaccaatattttaattaggattactaatgttttgttacttcctgattacaaggttctataggttttgaatgatccactgtaatcctgtttcttttccataagtcgtgtagtttttagcatgtaattatgcagaccataaggtttttcaggaatactaatatggcattagattagaaatgctatattaaaaattcttattaaatctactgatagtaaccaaaaaatagaagattcagaagaactagcaaatgtggagagaacggatgaaatggaagcagtgtgaacctagtgaatacttgccaagctgtatctcccctgaatttgtcaaaacatcatctccagcatctgagctagaccaaccctcagtgctaacattgatgtgattaaagagtctgaactgggagcagaattccttcaggtattttgttaataaaataaagctctccatctctccttaaattaaacaa

SEQ ID NO: 79841 - DNA, 643 bp, Homo sapiens
  misc_feature (1)..(1): n is a, c, g, or t
  misc_feature (3)..(5): n is a, c, g, or t
ngnnngagtgtaagctgctatatgaagggatccacaagacgaataattaagggggacctctgatcaacagccagcaaggaactgaatccctcagacccacaactcacaagaaactgaagctgaagcagattcttcctcagtcaagcttcaggtgcccagctgtattggtagaggagaccaaccacaccctccacagcacagcacctggagaggaactgctgccatgaccatagaggacaccctctggatacaatgccagacttgatgtgggactgaccaacctatggaccccaggcaccaccacccagacctgctcagcacctgaaacattcacagccgtggagagagaactgttcactgctaccatccacacttctgggccccttcagcagcagggtgacaaggaagagggaaatcgacttggaaaagaggggacctctgacccaagagttcggtcaatgcatatgttggcagccagctgcacatcgcaccaaatatgaacttcaaatagaagaaagcctcatttggaagaaagctcatgcacagactgtaaatatttcagagcagattgtgtctctgtagattaagtaagttgtgaaagtctgaacctctgccaaaattttaagaccttgacctttacaaa

SEQ ID NO: 79842 - DNA, 319 bp, Homo sapiens
attctatcctcattcaaactatcgatcaagtataaaggggagcctagattttttcttcaaatttgcaagttttcagaaagctgttgcacaatttattacaccaaaatgaaggagtaaactaaaagacagaaataataacttttcttttttaaaacttggcattttattattattattatactttaagttctgggttacatttgcagaatgtacagttttgttacataggtatacatgtgccctggttgtttgctgcacccatcaacccttcactttcattaggtatttctcctaatgttatccctcccctagcccccca

SEQ ID NO: 79843 - DNA, 542 bp, Homo sapiens
catcataagaaaatagtttcccttctgtgtttctgttacattctcaataaaaatgaaccatatagtagtcattttgaaatgataatattcttctagaaattgttaacaaatggtcgttaccaattactagatacatttttactttttttgcctgaggtgtatttttttatttttatttttattttttttttgagacggagtcttgctctgtcgcccaggctggagtgcagtggcgcaatctcggctcactgtaagctccacctcccgggttcacaccattctcctgcctcagcctcctgagtagctgggactccaggcacccgccaccacgcccggctaattttttgtatttttagtagagatggggtttcaccatgttagccaggatggtctcgatctcctgacctcgtgatccacctgcctcggcttcccaaagtgctgggattacaggcgtgagccactgcacccggccgaggtgtattttattgttgctgtttttgttgttgttgttgttttgttttgtttctttgacagggtctggc

SEQ ID NO: 79844 - DNA, 272 bp, Homo sapiens
caatcactcattcagaaaatatttgttcattgtctgctgagctccaaatacttttagtcactggggatatatcaatgaatcaatgaacaggacagaaaatataatactgtacatattaaaaataatgcacttgtatgtgtgtgtgtaaaacaagcaaaaaataaaaatatgatataatttcaggtagagacaagtgaagaacaaaaataacagcaggaatgacctttctaaggattttgacaaagaccagaatgaagcgaaagagtgagtca

SEQ ID NO: 79845 - DNA, 398 bp, Homo sapiens
gtaaatgcattttcatatggctttgcatgatgattaaagattattaaactgctggatataataaggtgccttttgctttaaggatagcttatttcattctttagaaggaagaaaataatccatatgagtaaatatagctaagtaaatagtttatttttccaggtgctatgttaaataaaagattgtgtttaaatattttgtatatattttgcttaggtaacctatatctctaatatttgtttagattctttcctaacatttttaccttacctgtaatgttgatatctgttttgtagattcagattaaactttacagaagtctggaaaatgtatttaataggtagcaaaccaatatgagttattgaaagaagcaaatgtattactttctaagagaatat

SEQ ID NO: 79846 - DNA, 493 bp, Homo sapiens
tatttatttatttagagactgagtcttgctctgtctcccagcctggagtgcaatggcacaatcttggctcactgcaacctctatctcccaggttcaagcaattctcctccctcagcctcccgagcaactgggactacaggcatgtgcaaccatgcctggctaattttttttgtatttttagtagagacaggctttcaccatgttggtcaggctggcctcgatctcctgacctcaaatgatccatcgcctcggcctcccaaagtgctgggattacaggcgtgagctgccacacccagccgtccctctcattctttaagtacttccatgttttctaaggtacaagatgttccatattattttgttatttgtcttccccagctctgaaatctgcctttccttcaaggagccttggttctttctagtgacaaattatatttagaaagaagatctgggtatttgacttgtatattgctattaattggccattgtttct

SEQ ID NO: 79847 - DNA, 714 bp, Homo sapiens
  misc_feature (12)..(12): n is a, c, g, or t
atgaggccgganccaccaagttctgggaacccacaggtgctgagaacaagagaaatcaagtgaaggaaggaggcggagtttccaagacttgggtgtcatcatttctggggacatccttgattggagattgaagtttttgaaccgaaatttagagctgattcagaagagacaaatacagaacgtccaagttagcagtcatttcccaaatttaggagacaatgatgcaggcccaggaatccctaacactggaggatgtggctgtggacttcacctgggaggagtggcagttcctgagccctgctcagaaggacctgtaccgggacgtgatgttggagaactacagcaacctggtggcagtggggtatcaagccagcaaaccagatgcactctccaaattggaacgaggagaagaaacttgcacaacagaagatgaaatctactctcgaatctgttctgattcaggaggtgcatcaggaggtgcatatgcaggtttgtctcatggatatattgcctgatgccgaggattcactagaagctcaatcctgtcacccaagtagtgaacatagtaccaaataggtggttcttcaacccttgccttcctcccttcttcctcttggagtccccagtgtctattgttcctgtcttgatgtccctgtgttcccaatgtttagctcttgcctacaagtgagaatacacagtatttggttttcaaaa

SEQ ID NO: 79848 - DNA, 752 bp, Homo sapiens
  misc_feature (12)..(12): n is a, c, g, or t
atgaggccgganccaccaagttctgggaagttctttctgacacaagtaagataacatctctgccatgcccacaggtgctgagaacaagagaaatcaagtgaaggaaggaggcggagtttccaagacttgggtgtcatcatttctggggacatccttgattggagattgaagtttttgaaccgaaatttagagctgattcagaagagacaaatacagaacgtccaagttagcagtcatttcccaaatttaggagacaatgatgcaggcccaggaatccctaacactggaggatgtggctgtggacttcacctgggaggagtggcagttcctgagccctgctcagaaggacctgtaccgggacgtgatgttggagaactacagcaacctggtggcagtggggtatcaagccagcaaaccagatgcactctccaaattggaacgaggagaagaaacttgcacaacagaagatgaaatctactctcgaatctgttctgattcaggaggtgcatcaggaggtgcatatgcaggtttgtctcatggatatattgcctgatgccgaggattcactagaagctcaatcctgtcacccaagtagtgaacatagtaccaaataggtggttcttcaacccttgccttcctcccttcttcctcttggagtccccagtgtctattgttcctgtcttgatgtccctgtgttcccaatgtttagctcttgcctacaagtgagaatacacagtatttggttttcaaaa

SEQ ID NO: 79849 - DNA, 210 bp, Homo sapiens
tggcacaaatggctatcaagatgttaaaaaaaaaaaaaagtaaatcttgaaaccaaactcacaccatgccaaaaattaatttgagattaatgacagatttaatgtaaaaactaaaactatgatgcctctaaaagacaatgtagaatatcttcctgactttggggtaagcaaagatctcttagatcaaagagataaggcagtaaccataaa

SEQ ID NO: 79850 - DNA, 1494 bp, Homo sapiens
tctgggcttacaagacccaggggcacgtcagctccttagatgggctcagcctgacacataattcttaaacctttcctgtttaagaaacttctagaggctgtgtactctcaccaatcctcttcgagaatttgttcatgtgtatttccccattatatggatgaggctcaggataacagcatagtggctaccttctactgagttttgaggtgctaataagtatgtttgtctgaggctgcacatgtgggtggctctgtgtgtatgatccaagggacaaaatgacgatgtaggaaccagcaagaacggaatctgggctgatgcttcagtctccacctgggtgatggctagcctcccgccctccaccaccgcatcccacacgtgctgcgcactgtccccgtgtctcctggagaaccaaactggagaaaacctttctgagtatctctcatagtaccccttccttaagaagatgtggtttagagcatgtgtgcaatcctgcctctgtaattaggaaacggagcccgaggctttccattgttggttgaacccaggacagctggtgctattcacaggctgaagaactgggcagttcttacttgggtctgtcctaggatgtggaggaagttcaggactaacgctaggcagagagtatgactcggtttacccagcctaggggcctctggatgggaacactccattccaagatctcagcagagcagggcttcctggcttgaggctggaagcctttgggaagaggcccagctgggacattccctgggcacctgtcttccgctgaagggagcaaggtgccctctgggactgacagccatgaccctctgtgccatcctcaatccttgagccatatatcaagagtcctctagagccggatggtcctcaaaagtctgtccaaggaatgccaacgttcaccgggctctgagaaacgacgcaaatctctgagctggggaccacttggagaaccggcttagtaacagtcctgatcttcgcaagccagcttcttctgcatctgaggggctcctggcgcccagaggaggcagacagatgtcttctagctgagtttctaaccgcatgatgagactcagaccttccgctgcactagaaaatctgcaacagtgtccctgagtcacttctccttagtgggcagactcgtgttagatttgtggaacccagctctctgatttactccttttggaaaacccatggaatttcatgtataaggctttcatttgtattttaaggtttttctgtttgttttgagtatatacatggtgctcaatagcaacatcttagcagatgaagcagtttatgattccactccctcctgtatgacaggtagccactatactgaatcaaggtgctgaactcaaatcacaaaattctggcttaccgatacaacaaccaatacatctttgttctgtaatgtaaaatttgactccttacttttataacttattaaagttaaaatgtctgtgtttttgcaaa

SEQ ID NO: 79851 - DNA, 1424 bp, Homo sapiens
gaagtcgccggtcaccgttgggagaggctgtgtactctcaccaatcctcttcgagaatttgttcatgtgtatttccccattatatggatgaggctcaggataacagcatagtggctaccttctactgagttttgaggtgctaataagtatgtttgtctgaggctgcacatgtgggtggctctgtgtgtatgatccaagggacaaaatgacgatgtaggaaccagcaagaacggaatctgggctgatgcttcagtctccacctgggtgatggctagcctcccgccctccaccaccgcatcccacacgtgctgcgcactgtccccgtgtctcctggagaaccaaactggagaaaacctttctgagtatctctcatagtaccccttccttaagaagatgtggtttagagcatgtgtgcaatcctgcctctgtaattaggaaacggagcccgaggctttccattgttggttgaacccaggacagctggtgctattcacaggctgaagaactgggcagttcttacttgggtctgtcctaggatgtggaggaagttcaggactaacgctaggcagagagtatgactcggtttacccagcctaggggcctctggatgggaacactccattccaagatctcagcagagcagggcttcctggcttgaggctggaagcctttgggaagaggcccagctgggacattccctgggcacctgtcttccgctgaagggagcaaggtgccctctgggactgacagccatgaccctctgtgccatcctcaatccttgagccatatatcaagagtcctctagagccggatggtcctcaaaagtctgtccaaggaatgccaacgttcaccgggctctgagaaacgacgcaaatctctgagctggggaccacttggagaaccggcttagtaacagtcctgatcttcgcaagccagcttcttctgcatctgaggggctcctggcgcccagaggaggcagacagatgtcttctagctgagtttctaaccgcatgatgagactcagaccttccgctgcactagaaaatctgcaacagtgtccctgagtcacttctccttagtgggcagactcgtgttagatttgtggaacccagctctctgatttactccttttggaaaacccatggaatttcatgtataaggctttcatttgtattttaaggtttttctgtttgttttgagtatatacatggtgctcaatagcaacatcttagcagatgaagcagtttatgattccactccctcctgtatgacaggtagccactatactgaatcaaggtgctgaactcaaatcacaaaattctggcttaccgatacaacaaccaatacatctttgttctgtaatgtaaaatttgactccttacttttataacttattaaagttaaaatgtctgtgtttttgcaaa

SEQ ID NO: 79852 - DNA, 218 bp, Homo sapiens
gttagtgttgttttcatttcattaagaaaatgttggttcattgtacttattttgccatgcattttctgggcctgcatttgtgtttatgctcatgtctatatagggcaaaggatgtcagtcatgtgctatactgtaagaaagcacgttccctaataatttgaacagataagataataatgggagaaagaaatcattgcacagcatggggcatccacacc

SEQ ID NO: 79853 - DNA, 526 bp, Homo sapiens
acacacaccacagacttcaacacatccacttcatgagtgttttacaacagcacttgtctgcagccccctcaggggctggaaatgttcactcccagaaagtcaagccacccacatgcagacagcacttatcccaagacaaacctccagcaggacttcagtataggttggaaagcagtagctgccagggcaacctgagataacaaacgccctcatcgcaagttaggagcaaagctgagctgcttgcagggttcgctgagccaaagcatcaggtggcgtgacatctatgggagcatctgggaaagcagagctgccagcctgttgctagaagggttgcagttatgctttctgcatgagagaagatgtcaaatggagagcctcaaactgtggccgactgacatgcgtgcatcttttgggggaggaccatccatcttattggccatatcccccactcatattgtaattacttttttcatctttggagggggaaggcaatgaaatataacataaatctctcatacctaaaaaa

SEQ ID NO: 79854 - DNA, 809 bp, Homo sapiens
gtgcccggctcgctcatgattaggctttatggttgcttccagaaatcagaattctatatgacagtttgctgtaggatagacaaaggcataatttggcatgtgacactgacctgtaggatttgggacacctttgtttctaccactgtccacttaaataagaagagaactgacccattttggtccctgggaggactggcccacagtggaatttggtcctgctgtagataaaatagcaagatcaactgatgggagaaaataatgaacaagggccattcctactggagggtttttactttacagtggcagacaaagctagaggtgaaattttttttcccattttgattcacttgctctttctaaaactggaaatactggtagttcagaaccaaccctcctcctataatgaaaacagaattctgcttctttgtaaactttcttaaatgttagaaagaaggaaccgcatataaatattgtctaaactctacagcagggtctgatatatgtagatttggggagggggcttgattatgtcatttggtggacttctataagagcatacacaatgaggcatggacacaaacatttatttataatgaaaataaacacaactaattaccttagccttggcgagcagtccctttcttctgagctttgggattttcagtttatacaaacagcttatatagaaatgcaactgggcttcctctccctaactaaaaagtgctgtcatgctgtgctgttcccagcattcacagagactgcacaagtgccattggtttggggcaaatctgcttctaccgaaaagatga

SEQ ID NO: 79855 - DNA, 453 bp, Homo sapiens
  misc_feature (408)..(408): n is a, c, g, or t
  misc_feature (410)..(410): n is a, c, g, or t
  misc_feature (414)..(417): n is a, c, g, or t
cgccacatgaaagccctctgctcagccaccactccccgagcctggctttgcctggcctgctgcaaccaacacagccagctgccagcctggctgcccagcagagcctgaatgagaggtcacccgacactggcccgggagtacacggtggccccagcagacacctccttccgtgtctgggcagggtgtgtgcagccgaggagccaaggctgcagagcacccctaccggtccctttcaccccctggcccggcccagcaggacgtacacagacccttgcatcttggtctccgcagcgccgggtggggtggggagcctagggccggattctggcagctctctcccccagacaagggtggatgtgcagaccgctcagaaggacctcctcgccctggccgaagcgcagtccgagngncgcnnnngctccacgcgcaggaagccgtcggggtcgcggtcgc

SEQ ID NO: 79856 - DNA, 286 bp, Homo sapiens
tctcaccactgcttgtctttgtacagtacaggctagtttttcttattttattaatgttttttgcacactttcttcctttcccctgaaatttcattttgcagatggcattggcttcctactgtgcttgtcatgatcccaactttatatgacattttattcccagagcctcgtcacagtctctaaagagaacctggttcttgactatccaatagattggcttccaataatcccacccctgacaattgataattcggccagggatggactgaccaaggaagcgtcgacg

SEQ ID NO: 79857 - DNA, 382 bp, Homo sapiens
actggaagttaactgagtaaaatatttcaagaagaaagtaatcaataataattacaattataatgctgagggcttcaggtgaaataataaatacttgacatctaaatcctttccaaggaagggaaagacaagagtatatacacaacacatacacataacagcatttttgcacataattgtcatgtaatcacacagctcttcaaactgcaatggagacattagcttaagaatctgatttaacacaatatttatttctactatgctgtgctagcaagaagatcctgatttgtacatttgaaataaaataaatacttttaaaaaataaaatttttggttgtgcaattattggtagtacatacgttttgaattaaactatacttcc

SEQ ID NO: 79858 - DNA, 647 bp, Homo sapiens
aataccctgggcttggcttccagtggtggcagtcttattttgtgaagagtgatgtctgaagggtctggttggcaaggtggtgtgcattgtgagagggtagggtgtggcgaaaataaggcctggagggaggaaacttttgtatatctggtggtcttatgcctcacacaggtgagatcatcccataaggtgaacattttaccattctaataactaaccctcctgttatgggcccagagttagatccatttagaattgaactccactccaaacaaacaaagcaaggcttctttcacgctctgtcaagtgacaataaataaaataattaaacagatatccataaacctcacataagaccttttaatatgttagggcaaccactatcaattaggattgatttaagtttcttttggaaaaaaaaaactatttgggccttttctccaccataaaatcactgaataatcaaactcttgctgtctttctttctcattttttaaataaaaggggactatagttattcgataaaattacattaatatgaatattcaaagggtagctataagtacacaggagagacatccagctaaacacatctcagttacctgaggataaaagtaagaaaaatctaatttaatccaatctagtaaaag

SEQ ID NO: 79859 - DNA, 556 bp, Homo sapiens
ccctgtcgtccaggctggagtgcagtggcacgatctcggctcactgcaacctctacctcccaggttcaagcgattctcctggcccagcctcctgagtagttgggattacaggcgcgtgccaccatgcccagctaatttttgtatttttagtacagatggggtttcactgtgttggccagcctggtctcgaactcttgcccttgtgatctgcctgcctcggcctcccgaagtgctggaattacaagcgtgagccactgtgcctggcctggcttccaggtttattgctagctgtgtgaccttgggaaagcctaaacttcagttttcttatctgcagaatgaggcagataacagtctggagctacacatactaggctcagtggtgataccagctggtcattttcttccatgtattctctgcctttcatgtttccacatatctgcgataggacctccctccgtagtccagagttgaagtcttcatggcttctgtttttatttgaagtgcccccctcctcttcccattgagggtagtggagtctgtccccattaggtcacc

SEQ ID NO: 79860 - DNA, 140 bp, Homo sapiens
aactactgtatactctcctaagaactttatgtgcaccaatttatctaatcctcacaatagacttgtgtggtattgtaggtagtgatattatcctgttataggtaacaagacagaagcatgtggtgatttgctcaaggtcc

SEQ ID NO: 79861 - DNA, 926 bp, Homo sapiens
agcggatttaaaattagcaccactgaactccagcctatgcaacagagtaagcccctgcctctaaaaaagaaaaaagaaaaatttcctcagagacataggaatgcaaatcaaatttaagtaggaatatagaagatggacaaatactgtagtgttatgataggtggcagacaatcctggactaggaatcagaagctgaaattgtgacctaattctcttcctctcctagttgacttggggaagtcacttctctgaggttcatttttctggtccaaaaaataaagatactaatcttgcgtctcctaccttacggagttgtaagaacttggaatactttgaggctattacaaggtaagagaaaccgtttgttgggatttaaagtggattgggttttgagcgatcaattgctattgattgacattgagaagatgaattaactgcattcgtatggactggagcaattatttggtaatttacacttttaattagaagactgtcctgggtgaatttaaatctgcatattgggttcccagaacatcagcagtttgaattggccacattgatcatcttaaagcttcattaatttttctggaaggggtgttgggtagggagggtagatggatgggtggtgacaatctctaataaattataataagtgttaaaaatcaaatgggaggcctggtgccatggctcatgcttgtaatcccaacactttgggaggtcgaggtgggtggatcatttgaggtcaggagttcgagaccagcctggccaacatggtgaaacccagcctctactaaaaatacaaaaattagccaggcgtggtggcatgcgcctgtagtcccagctactcgggaggctcaaatgggagaatcgcttgaacttgggaggcggaggttgcaatgagccgagatcacatcactgcactccag

SEQ ID NO: 79862 - DNA, 705 bp, Homo sapiens
agcggatttaaaattagcaccactgaactccagcctatgcaacagagtaagcccctgcctctaaaaaagaaaaaagaaaaatttcctcagagacataggaatgcaaatcaaatttaagtaggaatatagaagatggacaaatactgtagtgttatgataggtggcagacaatcctggactaggaatcagaagctgaaattgtgacctaattctcttcctctcctagttgacttggggaagtcacttctctgaggttcatttttctggtccaaaaaataaagaaacaaaatcaagcatacaccaaccaaacaagagataaagaacaaaaaaacaaaaaacaaatacaaaataatataaaccagaaaaaataacaaaacattattaaaagttgattgaaaatgcaatacaattgcgaatatataattaatcaaaagttaagagaaagatatcaatcaaatcgtaaagtacaataacaatataaataatgaaaattacgtaatgaatatatcaaaagaataccaaagaataagattaataacaaccaaaatatgataacccagtagacaacagtcagtgaaatagaatagccacgaaaaaacaacaaaaagaggcagcgaaaagaaatgcaaagaataaaaaaatttaataaatttaactgcaataattaataaacaattctacaaaaaaagaagaacaaagaaaaac

SEQ ID NO: 79863 - DNA, 427 bp, Homo sapiens
ttttccttcttttttacagaaaaagtccaactgtaaaatatcatagcatataaaaccatgtttaggccatatctgttggttttatagtttgtattgaacccaaacggttttgcaatagaaaatgaatttttctttaagctgaattagcctgaagggcgtcctaatggtgagttatctggaatactcatcattgtccccatgattaacaaggatttttatgcgcacaaatttttctaagcaagagggaaagtaactaggcccttgttatttttcccttttagattcccactccctgtagagaaggtttaagtataggtaagaaggcattacaaaagtggattacaagccacaaaagggcagtagaatgttgagcttaaattccacagagtgagggttgttcagagaaggcggctaaacacatggagac

SEQ ID NO: 79864 - DNA, 326 bp, Homo sapiens
agttgacctcactgtcttccatctcaaatctagtcttatcagtatccaaccagttatccaagcaagaaaaaggagttaccctattctcctctgtttcattttgtacatccaatttattaacctgtcctgtaatgcctaaaacagccctttactgtttacaattatgtcttttccttcttatttttactgccattgctttgtttgtttgtttttgagacagcgtcttgctctgttgctaaggctggagtacggagaatgatagttcactgtagccttgaactcttgggctcaagcaatcctcccacctcagcctcccaagtagctga

SEQ ID NO: 79865 - DNA, 426 bp, Homo sapiens
ggtggggtgatgtggcgagaccatgagcgacatggtagacctttcagattaccatcatgggcaagacacggatcagggaggaaacagtgcataagaggaaagtgtgattgacattaaggaggctattgatacataacttgatgacagattgtatctagggttgtagaggaaaaggggaagagagagataaaaagtgctccagaagcacgttttggagataaaaggaagtgttccagaagcaagcactttaacaggggaggtgggtcatactgactgactcaatcaggaaatattaacacagactttttgtcagtgactctcacataagagttgctcctgtggctttttggagatgtaattggtaatggagtagcaggtctacatgggcaatgacagctatatattttgtaactccttaaaatatat

SEQ ID NO: 79866 - DNA, 648 bp, Homo sapiens
taactggatcctgagacttttcattattttaggttgacatttctatgcttttgttctggctgctccatccatcctttaagagtgaagattctccaagattctgtgcttgaactttgacctcttaatatgtccctgaagatttcatcctttcctatagctaaactaccacctgcaaaataaaaataaaatcattttcaggtcttagtcatgaattctttgtctaggccaatgtctgtaagagtttttctcatgttatcttctagaatttttatggttacaggtcttagatttaagtctttgatccatcttgatttttgtataaggtgagagatgaggatccagtttcattcttctacatgtcacttgccagttttcccagcaccatctattaaatagggtgtccattccccaatttatgtttttgtttgctttgtcaaagaccagttggctgtatgtatgtgactttatttctatgttctctattttgttttgttagtctacatgcctaattttatgccagtaccatgctttttggtaactatagccttgtagtataacttgaagtccggcaatgtgatgcctccagatttgtttcttttgcttaggattgctttggctatttgggctcttttttgattccatatgaat

SEQ ID NO: 79867 - DNA, 722 bp, Homo sapiens
agcggtggatcatgagcatattatgttctttgcatttaacctacccctaaatatttgagaaaatacatcttgggtaatataaagagttgatttagtctatgcttaatatttatttagtaatgaatattgttgctatgaaaaagttgtactacttgaactttatgtctgtaatttacatgtttaatatttttaaaactccttgcctttattcatgtatccataaattcattcaaacattcttttatttatatttactgagtaactactatgtgcaagcattggtttgtatattagaaatatggtgataagtgaaacagaatgattctttcttttgtatagattatattttgcttttctttcagggtgtgcagcttcagaaaacataaaaaattttaaaaaccagtagtctttgtcagttgccatggttcttctcttagactttgttatcgtactgaataataaaatcatgcattcagatttttatgtcagtaactgctatggtagtagagatataagtattttctgatatataatctttatagttaaatgaaggtttctgagagtatggttttaaaaatattaactttgtaatcagcaggcagaaaaatcaaatgaacaaattgttctttgtgattttgtcttataaataccttttattggtttttaaagctatataattgtcccttgaagtggtttgaacttactgcaaaatagcttggtac

SEQ ID NO: 79868 - DNA, 602 bp, Homo sapiens
cattgtaaagtcattcatttagacaaagcgataactcaaagattttttttaaggcgaaaacctttattctttgagaggagacttcatttcccaaacaataagccttaataaagacaggatgaggccaattaaacttgttctccaaaattttataaacagcctataatattaaatagtttaatcatcttgaccataagatgtaatttccataagccttttttataaccttttattaaggagtgggttaacgctccaagaaaaccttgttaatctgactcagaggcccatatgctagtcttgcatcagtgccttcgacattaatggttaatttatagagaaactaaacttattttatctctcaaaattgacccttacaatgtcacacacccatgtcttccatgatagttcctgggtcttgaggagttgaatagttttaatttctggccctgtgtctcatgaacacagtttattttggattggtatcttctacagggtctgaagataaagctttaactgctgtcagtgtttaagatttagccggacttggcatcctttttagacccaggagtctaaaccctgtaacttgatggcacaaggacttt

SEQ ID NO: 79869 - DNA, 358 bp, Homo sapiens
tactggaaacatggcagcccatacaatccaaattgtcgagaataaagatttctaagctactctctgaccaactttgagagtgtgaaaatgaagctaattgttttagtcttttctgtattgattatgttggagatctaattgaatcagatagacataatatatacataaggtgctgaaccactgggataatgcagttggacttgttgcaaacactggtataattaaggatttgttaacacttgtataataaacctctattatcaaggacttttaactaagtattaaaaatttattctcagctgcaacttgccattcaaggtctcagctaggaagcaattttcttttacaaattttctac

SEQ ID NO: 79870 - DNA, 494 bp, Homo sapiens
tcaagatgccctgagggcaaagagcagaggggtgctctctggtggcccagcagttctgccccaggggagaggtttctcttttactaccgcgaaaacccacaggacgctgcttcatcccagagccaaggataccaggaaggaaggtcagagtgaggaggtgtctgagtgtttcagatcacacagtgacatactgcttgatggcttcagaaatccttcatgagctgggagacagccccagaggtgacagtttctacaagagcagtctgaaatgccacctcccaagaaacctccatgcaacttcccaagcagaatgagtcaccccctcttctgccctttcatagccccaaccatctcgaggacaacacatcagcagcagcagccacgtagatgtttgtttctgtacctggattctaagtgcctgaaggactggacatatctggtttctaagttccaggaggactggacacatccatcacccacgtgtaaacccagca

SEQ ID NO: 79871 - DNA, 1076 bp, Homo sapiens
gtgagtcaagatcgtgccactgatctccagcctgggtgacagagcaagactccatctctaaaaaaataaataaataaataaaaagctaatgtgtagatgggaattttttctttccctcctgtgcttaatgttgtatttggggtatatttgtggattgtgtgtatgatctgtatgtgttctatatgtaatcaaacattatatttgcaaagacatcaaatgtattaacatagctttcatttgagggcatacaggataactgcagtaaagtaaatgtgcttaagaaggcctagtgctattaagttttgtcttagtaacactgttgggtattattaaaatatatattatacataggaatcctgtagcagaagataaccatcacagtttaatgttagaggccaggtgctgtcaggtgaattagctcctcctttgggaatattagaattcttctaaagtcagagaactccatttggtgagtgttccatgtaacatggggaacagctcccactttttcttaatatagctatttgacagtgagggacaggtcatacacctgacatcatttggcttttaaattaaatttctaagaaagaactgttcagttcttgctgtttctggttttcccctacttgaaaactaacatttgtaaataaaacatcttttgaaaagttcagaattatattaaataacatctttagaattaaattgagttttaaagagcttgacaatgtcctttcttgctttgccactgggttcagaaatttaaatttatatggaaatagaactctgggctgggcacagtggctcatgcctgtaatccctgcacactgagaggctgagatgggaggatcacttgagcctagcagttcaagaccagcctggccaacatagtgagacctcgtctctaccaacaacaaaaaaaagaaaattagtcaggcgtagtggcaagcgcctgtagtcccagctactcgggaggctaaggtgggaggattgcttgagcctagaaggtcgaggctgcagtgagccaccatcatgacactgaattccagagcctgggcagcagagcgagaccttatctc

SEQ ID NO: 79872 - DNA, 1007 bp, Homo sapiens
gtgagtcaagatcgtgccactgatctccagcctgggtgacagagcaagactccatctctaaaaaaataaataaataaataaaaagctaatgtgtagatgggaattttttctttccctcctgtgcttaatgttgtatttggggtatatttgtggattgtgtgtatgatctgtatgtgttctatatgtaatcaaacattatatttgcaaagacatcaaatgtattaacatagctttcatttgagggcatacaggataactgcagtaaagtaaatgtgcttaagaaggcctagtgctattaagttttgtcttagtaacactgttggatattatacataggaatcctgtagcagaagataaccatcacagtttaatgttagaggccaggtgctgtcaggtgaattagctcctcctttgggaatattagaattcttctaaagtcagagaactccatttggtgagtgttccatgtaacatggggaacagctcccactttttcttaatatagctatttgacagtgagggacaggtcatacacctgacatcatttggcttttaaattaaatttctaagaaagaactgttcagttcttgctgtttctggttttcccctacttgaaaactaacatttgtaaataaaacatcttttgagcttgacaatgtcctttcttgctttgccactgggttcagaaatttaaatttatatggaaatagaactctgggctgggcacagtggctcatgcctgtaatccctgcacactgagaggctgagatgggaggatcacttgagcctagcagttcaagaccagcctggccaacatagtgagacctcgtctctaccaacaacaaaaaaaagaaaattagtcaggcgtagtggcaagcgcctgtagtcccagctactcgggaggctaaggtgggaggattgcttgagcctagaaggtcgaggctgcagtgagccaccatcatgacactgaattccagagcctgggcagcagagcgagaccttatctc

SEQ ID NO: 79873 - DNA, 519 bp, Homo sapiens
tggattgtggttatgagcagaaagtcctgaaaccaatcccccatggatactgaaggatgactgtatatagaatctataaagcactacaaaccacaaaaatgtggccaggtgcagtggctcacgcctgtaatcccaaactgctgagattacaggcatgagccactgtgcccggccctagaaatttttaatagcaatttgatataataattttatgactgctgaatctaataaaacttgagcttatgtttttgtcttcacttttctagtaattcattttttattgaattttacaaaagtatacatctagtgatttttttttaaaaaagtccttcgcagtttgagaagcacccctcaagtactcatagatattcagaatttggcccagtacaaggcagatggcaatctggaatacaatgtaagctatggcagttaagaattttggattatggtccattcagttacttagctagaaagggtaggattagtagttcagtggtctaatccaggggtggataaact

SEQ ID NO: 79874 - DNA, 704 bp, Homo sapiens
ggaaattcctgtgggatgttgtttcctgtcttgtctgaggggaggtattatatagcctagtgattaggaggttggaatgtgagatggtggttgagagtcaggatctcttttaaaagtgatcttgagcaagttatttaaactttctaattatcagtttctttatctgtaaaatggaggtaatgggaatacttacctcaaattgctgagagaattaaatgaaataattctgcaagatagttatcacagtaaagcagtaaatgctccattcagggtaccattactattgactgccttaaaaatttaatcttctagccaggtgcgataactcatgcttgtaatctcaacacttttggaggccgaggtgagatgatcatcttgagcccgagagttcaagattaaccagagtaacatagcaggatcttgtctctatttttttaaaaaagtcacctttgtaacactggtgaatttggataaggagcaaattcagattgtatgctaattttaataatgagaaatttgatttagtatttataaacaagaagtacttttcataaggtttcatgcctatttagagttcctggttcttgttcttattaattttctgtcagactgttctatctttgtgccaattagaatagaaataaaatgggttatttactgtacctttcattgtataaatgaatatttcattttctaaggtctgc

SEQ ID NO: 79875 - DNA, 684 bp, Homo sapiens
tgagacagagtcttgagtgctctgtcacccaggctggagcgcaatggcacaatctcggctcactgcagcctccgcctcccaggttcaagggattcttgtgcctcagcctcccgagtagctgggtttacaggcgtgtgccacccacctagctaatttttgtattttagttagagacgggggttttgccatgttggccaggctggtctcgaactcctgacctcaagtgtttcacccgcctcagccccccaaagtgctgggattacaggtgtgagcaaccgcgcctggactcaagttctttttaaagcttgattaaggtataactgacatataatacacttcgcatatttgaacagtacttgatacagtttgatgtatgtatatacccttgacataatcaaaatagtgaacatatctatcatccccaaaagtttcccctgcccctttgtaatccttccccatcctctatcctgaggcaaccattgatctgcttttattatttttaaaagttagcgtattttcttatatgtattgcatatgggatttttctagaaggccacgtgcatatgcaccctccccttccattaccccagtatccgccatcaagtagtaacatgttgtaacagaaagaatcccattaagtcctagttctggtagcccggtacaaattttagattttcccccaaa

SEQ ID NO: 79876 - DNA, 419 bp, Homo sapiens
  misc_feature (53)..(53): n is a, c, g, or t
tgagcttgtagtagttattaaggagtcaataaagatatgatatagaaacttgntttccaggggaaacagaaggaggatcgtgaaaactgttgactacttagaatgatcacatggtttagtggagagagcatgattctgggttttaaaagtcatggatctcaatctcagctcctattactaactagatcttttactttggggtaagtcacttcatatctttaggccttaatttcctcatctgaaaaactggaaggcctgacttgttgagctttaagatcctcaattattatatttactaggaattcaagtttctatagatgtggttcagaattgtgacttatttattgtacatcaggtgtgattcacaagtgagcttgtagtagttattaaggagtcaataaagatatgatatagagcac

SEQ ID NO: 79877 - DNA, 2742 bp, Homo sapiens
  misc_feature (1021)..(1021): n is a, c, g, or t
  misc_feature (1026)..(1026): n is a, c, g, or t
  misc_feature (1194)..(1194): n is a, c, g, or t
gacttcttcgtagctcctctctcttccctcagagccactgtctcaagactctgcccttcttcaagagaagagcccagaagaagagagaatgactgctaggccctttatggctggattcaggccatgtaaggcatgcctgcttccccttcaccttccaccatgattgtaagtttcctgaggcctccccaggtgtgcttcctgtacagcctgtggaatgttaccaaagacgttggaagaggtggctatggacatcacctgggagaagtggaagcaaatggacactgttcagaagtccatatacagaaacatgttggaaaaatatagaaacctggttttgctagatgggaagcttgaacgtggggccaagacatcaagagtagagcagcaggacatttcaaaagaagattaatctcaaagattagagatggaagaacttgcaaagagaaagtctgtaccggaagaaatctggaaatctagaggccagtttaagaatcagcagctaaacaaggagaataatctagggcaagagatagctacctgcacaaaaattcctaccagaaaaagagacatagaatctaatgaatttgtgaaaaattttactgtaagatcaatacttgttgcagaacagatagatcctatggaagagaattgtcataaatatggtacatgttgaaagatgctcaaacaaaactcagatttaattatacaaagaaagtatgatggaaaaaaaaaaaccttgtaaatatagtgaatgtgggagaaccttcagaggccacatcactcttgttcagcatcaaataactcattgtggagagagaccctgtaaatgtactgagtgtagaaagggatttaatcagagttcccacttaagaaataatcagaaaactctttcaggagaaaagccctacaaatgcagtgagtgtgggaaggccttcagttattgcttagttcttaatcaacaccagagaattcacagtggagagaaaccttatgagggtactgaatgtggcaagacattcantcgtngtacataccttactcagcatcaaagaattcacactggtgagaagccctatacatgtcttgaatgtggaaggcttttagtcagaacacacatcttactctacatcagagaatccatactggagagaaaccttatgaatgcaatgaatgtggtaggtcctttagtcagantgcacatcttactcaacatcaaagaatgtatacaggagaaaaactctatgaatgtaatgaatgtgagaaagccttccatgatcactcagctcttattcaacatcatattgtccatactgcagagaaaccctatgatatcatgactgggaaaactttcagttactgttcagacctcattcaacatcagagaatgcacactggagagaaaccatacaaatgcaatgaatgtgggaatgcctttagtgattgttcatcccttattcagcatcaaagaactcacaccggagaagagccttatgaatgtaagcaatgtggaaaagcctttagcagaagcacataccttactcaacatcagagaagtcacgcaggagagaaacagtataaatgcaatgaatgtgagaaaactttcagcctgagttcattccttacacagcatatgagggttcagactggagaaaaaccctacaaatataatgaatatggaaaagcttttagtgactgctcaggacattttcagagaactcacactggagagaagccctgtgaatgtaatgactgtgggaaacctttcagtttctgttcagccctaattcaacataagagaattcataccagaaagaagccctgactgtaccttcataccagtaaatgcactgactgtggaaaagccttcagtgattggttagcacttgttcaacatcagataactcaacactggagaaaaaccgtataaatgtactgaatgtggaaaagccttcagttggagtacagacctcaaaaatcaccagaaaactcatactagtgaaaaatcctataaatgtaatgaatgtagaaaggcctttagttactgctctggtcttattcaatgtcaggtcattcatactatagaaaaaccttatgaatacggtaaatgtggcaaagcctttaggcagaggacagaccttaaaaaacatcagaaaatgcataccgaagagaaaccctatgaatgtaatgaatgtgggaaagcctttagccagagcacatatcttacaaaacaccaaaaaattcatagtgaagagaaatcaaatatacatactgagtgtggggaaaccattagacaaaactcttcttttttacaacaataaaaacctcacactggagagattctctgaatgccttaagaatttggttaatatggagacccttcccagggaaacagaaggaggatcgtgaaaactgttgactacttagaatgatcacatggtttagtggagagagcatgattctgggttttaaaagtcatggatctcaatctcagctcctattactaactagatcttttactttggggtaagtcacttcatatctttaggccttaatttcctcatctgaaaaactggaaggcctgacttgttgagctttaagatcctcaattattatatttactaggaattcaagtttctatagatgtggttcagaattgtgacttatttattgtacatcaggtgtgattcacaagtgagcttgtagtagttattaaggagtcaataaagatatgatatagagcac

SEQ ID NO: 79878 - DNA, 462 bp, Homo sapiens
ttggagagcccaaataaattctgctcttttttcaactagaataatgagaaaacccagctattttctcaatctcaaagcccctggatgggaaaattcatgggcaggatagagagggaaataattattcctttggcatgggaattttattttatttagtatttattaaatatgaaggactcaaaacagtgcctggcacctaataaacactaaaaagtaatgataataaagtatatattccatgtgtttaggacagaagtggcccatcccagccatttgttaaataatacttaattttctaaggatgaataaatgggatagttttattttctatgagtccccagaaaagtggtagacaattttcagtgttgtaccctacccctggcacattcaattctcttgagccccattcttcagagattcactaatatagtgctagccagtcagaaccatattcaaatcact

SEQ ID NO: 79879 - DNA, 491 bp, Homo sapiens
cccaggagccctgcatgccagtcccaattaatccactggtgctggtagataagccttcagtgttaggagctctttggggaaatcccagtgtgcacctccaagggttaaggaaaaccaaatcacgtgcaaacaatatgtaatgtgtgacttgcagatggggctcatggctgtctgccaaggttcatccatgaatcttttattgatatcttttggcttaatttagaatactattagcactatcaaattattaaaaaatccataatattttattctgaccctttggaataagtttaactcacaatgtaatttagggtaaaatgactttttagcattgttgccattgtttaagcgcaagggagtcttggagtttgttcaatactgttaatcttagttggttagctttcttaatgcctctaaaccctcacatttttacttgcttgtaatcagaatctttgacagtatcctaacttatgggctttgggtttggatgt

SEQ ID NO: 79880 - DNA, 507 bp, Homo sapiens
acattgaaggagtacaggactcctccttaatgagtaggaggtacagaggatgataaagtaagctctttaggattatcccagtttgagacttttaaacagcacatacatgcatgaggcttaaaatctggtccttgatgctagggatttcacttttgtagggacttgtctagaggtaatccatgtacccaatggaccctgtgcataatatactctgccctcattaattgtggattctgtctttgtgaatttgcttactcactaaattttatttgtaaccccaaaatcaatcttaacatttttgtggtcattcgtgaacatgcacagagcagcaaaaagtaagagtcatggatgcacacattcccagctgacttcagagttttcagctcttacactgtaaacaagttcattttcagtctgggaatgccacatggttttcgccttctgttgattttaaatggcccctatgagtagtactgatgtgtctggtgttcctaatctcaggaatac

SEQ ID NO: 79881 - DNA, 328 bp, Homo sapiens
ctcttctttttttttttttttttcttcttcctaatagagacagggtcttgctctgccacccaggctggaatgcagtggcaggatcatagctaactacagccttgaactcctgggctcaagtcaccatcccacctcagcctctcgaatagctatgagcacaggtgtgcaccatcactcccagctaatttttaataattttttatagaggctggacccagtgggtcatgcctgtaacagcactttgggacgttgaggtggaaggattgcttgagcccaggaatttgagactggcctgagttacatagtgagaccctgtctctaaaaaaaa

SEQ ID NO: 79882 - DNA, 404 bp, Homo sapiens
atggttctctaagatttatggtgggatttggcaaagctacaccctttgttttgtttcatttttctgtcaatacttactgtctgcctatcaagtaccaggtgttgtggacacagaaaggtgaaacacctgcccaaatggagttgacactacaggctgttcaagaaacggagacagccttgtaactatttatacaatccctcagcatggtaagtgctctgatgaggacaaagaagaggggaccttgctggggctggagagttagagaaggcctccaggaggagagaaggcacctgcactgaaatctaaaatcatttttgtttaagtcaaaccaaaaagatgggaagggcattccaaccaaaggcagaggaacgcacaaaagcaaaagttatgaaaataacaattac

SEQ ID NO: 79883 - DNA, 790 bp, Homo sapiens
ttttcatagatacaacagagaaatgcataatgtccagtcaatttattaaagttccaaagtcggtcgcgcgcagtggctcacgcctgtaatcccaacacttcgggaggccgaggcgtgtggatcacgaggtcaggagttggagactagcctgaccaacatggtgaaaccccgtctctactaaaaatacaaaaattagcccaggcatggtggcacgcggctgtgatccccgctactcaggcggctgaggcaggagaattgcttgaacctgggaggcagaggttgcagtgagcagagatggcgccaccgcactccagcctgggagaaagagtgagtgagactccttctcaaaaaaaaaaaaaaaaaaaaagagttgcaaagtcatactcacctttcagctcttgtcggacaattaaggggtctttgcatacttcagccctaataatttgcttcctaacatacatattgcagtggttatctaattttaaatatctttttgtttcaacacctaattttttatttagatctatctgtatgtttacaatatattttgctctatgttcattctttgatttcagaacttcaacctttctgaagcatgttttcagggtttctttttagtttctttggtggaattctgctggtggcattttgttttttgtctctaaatatgttatttagccataggttgatgaatatttttcttggttgagaatttcagaatggcattattattcttaacaaataatattgtttattttacttttcattctttcagatttcaatatgatta

SEQ ID NO: 79884 - DNA, 349 bp, Homo sapiens
aagacggagtctcactctgtctccccagactggaatgtggtggcacgatcttggctcactgcaacctccgcctcccgggttcaagcagttctgcctcagcctcccgagtagccaccacacccagcctcattggcatcttagtcatcattcttcgtgacttcttccttttcttagcttctcctctcttctgatttccttttcagctttctgactttttttctcagtctccttactattttcccttattaattcatgcagcaaatatttgagcacctgctgtgggccagagtacaatcagccctccgtatctgcgcattctgcatctgcggattcaaccaactgtagatag

SEQ ID NO: 79885 - DNA, 429 bp, Homo sapiens
ttttgaatagtgcaagttcaatccctaaaacaaaaagcaagatcttttttcccctaaataatgtgctctccggcttcacctctcatcctgaggaacatgaaagagaacgtaaaagaggtgacccaaatcacagagtgcctttgataggagaaattcagctgttttgaacactcacaatcaaaggaagtggtttccctaattacatgaactatgtgaaatctctcagaatagctcttccaccccaggattccttgcactttagaagtttgcataaaagctcacatagagaatcagatgcaaagtgtttgattcagattttattaggcagaagagtgcccacatccatcctgcagtttgccagctgcttaggttaggaccactatacctggttttgatgtggttgtctttcaaacctgcaacattaagatc

SEQ ID NO: 79886 - DNA, 2604 bp, Homo sapiens
cctctggtttaaagcaaaatcgcatctggggccagctcaactgcagcaagtctggtcagattcaaccctggacgatattagaatgatattagttttggaaggaggggatggagatcttccccttctaatactcaattttgttttggtatttgattgtcacaactagaggatataacaggaggtcagtttaaaaaatagcaaacagtctaaaaatgaaaactattcaatttagtgatggcttataaaagacactccaacttgtcttgcccaaactcccttcttcacagagccagggggctagatttcttgccactttttttctgaaaggcaaatgcatgacttttattcttttgggtctcagtgtgtttcttgaactgtgtgacttcaatatctgtgacaagtttttattttcccttagttgtatgtgaagaatttattctatagtcgtgatcatgtagtcctccattgtttggaagtgcagaccatggattcctatgcagcagatgggggttgtctgtttgtgcacttttttcctaagctgctgaaattcctccgatgtgaatgggccatagtaatctttgcctcctgcgtgactgtaagcatggcctccagtggatcagagaaagcagctcagtgattgttctcatggccaaaaataaagcacaagggttaccggaattgaatgagccctgttcagggcagcacggggcatctgcaccccagctgggcagcatgatccttgtattcaactatactcttctggcagtagttggtggcaagcattcgcgtgcctctgtcacaaccatacgtagaaacacattaggtatgtctggaaagctacaaatcccacatccaagcacagtaccgtctgcttcatctgattaacacacacacaagaaagaaaaattacacccacagaaaactgagtatgtattgtagaaatgtagaggaaaaataaaaatattttttcaaatgtaattacttttaatatatgcttgtggaaggtctaatacaatgtatgctgtctctgtaatttttgctgtaaataactggagacggtgagtacactgatttttctatgtctctgtttaagcataagactttgtaacaatttttttagagggggaaaatcaacaaagagcaaatatgtacttgcttcctttctgcgtgttatgtacttctcagttttttaatggaaactggttgtaacagtttaagcatcttgacgggtcattggtgttaagtgtatgcttctttttgtaatatgactgagaaagggacagggctgtcaattaaatctgctccaaagaatttgtattgaagattggcctaagacctgcaaactccatctataactagaaaatacgaaaaaggaaaattaaaaaaaaaagttgcctgagttaagtcatctttccttgtagcaaatggctttgtccaaatcctttctgcatggaatagcttaaggaaaacaaactccgctttctgatgaacaagatatttttgtacacatttatttcttgttaataacctgaggtcagaccactcatttgctgaagccataactgaccttcaccaaataaatgttgtaaagaacctaggggagggttggggagagactgagagggaggaaaatccaaggtgtcatgagctatagcaacacaggcaggagcaagttgttgaaactgatgcttttcctgcatcccaaatatgactttaaaaggctagtattttatgatgatcgatttataatgataaaaagatatttagatttaaatgagacattccaatatttttgaaatccctaacaatgcttccttgcttttaggattgagagaaatgattttcatatacttccaacattcagagatttaatgtttttaccttagctccagcctacgcttgtaaagtgaagagtgattctaagtcccgtgaaaccgtgggctgcctggggcttggctgtgcccactaacctactgcgcctggggggcagcatgggaggggtacagtttgcatctcattagcatgcacaccactgttggcaatgcataaaagttgcattgccacaagtatgtaaaataaaaatattcactctaaaaagaataataattctacttttttaaaagaataatgtctcttatagtcaccattgatttttctggagtttaattacattattaccatgtattcttattggcctgtagaggaaaaaggcaaaccacaaataaacccagtgacatatatagttttaaaatctacaattttctgatctctctctccttgtttaatatataagccctaatttctgtgtatgtgagtaaaactgcagcctgagtcatttaggaagtaagtattgagtttttttaatcataaatatactagaataaaacagcactccctaacaattaaaaaagagttttatattactttagaatgtaataggtttttgtccttattttatgtcctgtaaattattagttcaatactgttagcattcccggataatgcacacatgatttctgaatgttttctgtaaatgacaatcaatgtttatgaagttccctcctttaatgctgaacaaaattaaaagaagaaaaagaaaaaaaa

SEQ ID NO: 79887 - DNA, 1667 bp, Homo sapiens
cctctggtttaaagcaaaatcgcatctggggccagctcaactgcagcaagtctggtcagattcaaccctggacgatattagaatgatattagttttggaaggaggggatggagatcttccccttctaatactcaattttgttttggtatttgattgtcacaactagaggatataacaggaggtcagtttaaaaaatagcaaacagtctaaaaatgaaaactattcaatttagtgatggcttataaaagacactccaacttgtcttgcccaaactcccttcttcacagagccagggggctagatttcttgccactttttttctgaaaggcaaatgcatgacttttattcttttgggtctcagtgtgtttcttgaactgtgtgacttcaatatctgtgacaagtttttattttcccttagttgtatgtgaagaatttattctatagtcgtgatcatgtagtcctccattgtttggaagtgcagaccatggattcctatgcagcagatgggggttgtctgtttgtgcacttttttcctaagctgctgaaattcctccgatgtgaatgggccatagtaatctttgcctcctgcgtgactgtaagcatggcctccagtggatcagagaaagcagctcagtgattgttctcatggccaaaaataaagcacaagggttaccggaattgaatgagccctgttcagggcagcacggggcatctgcaccccagctgggcagcatgatccttgtattcaactatactcttctggcagtagttggtggcaagcattcgcgtgcctctgtcacaaccatacgtagaaacacattaggtatgtctggaaagctacaaatcccacatccaagcacagtaccgtctgcttcatctgattaacacacacacaagaaagaaaaattacacccacagaaaactgagtatgtattgtagaaatgtagaggaaaaataaaaatattttttcaaatgtaattacttttaatatatgcttgtggaaggtctaatacaatgtatgctgtctctgtaatttttgctgtaaataactggagacggtgagtacactgatttttctatgtctctgtttaagcataagactttgtaacaatttttttagagggggaaaatcaacaaagagcaaatatgtacttgcttcctttctgcgtgttatgtacttctcagttttttaatggaaactggttgtaacagtttaagcatcttgacgggtcattggtgttaagtgtatgcttctttttgtaatatgactgagaaagggacagggctgtcaattaaatctgctccaaagaatttgtattgaagattggcctaagacctgcaaactccatctataactagaaaatacgaaaaaggaaaattaaaaaaaaaagttgcctgagttaagtcatctttccttgtagcaaatggctttgtccaaatcctttctgcatggaatagcttaaggaaaacaaactccgctttctgatgaacaagatatttttgtacacatttatttcttgttaataacctgaggtcagaccactcatttgctgaagccataactgaccttcaccaaataaatgttgtaaagaacctaggggagggttgggctcagggagaaaccaaggacaatgctaggtgttcatcggtcgccagtttatcctcaa

SEQ ID NO: 79888 - DNA, 362 bp, Homo sapiens
agagggggtttcgccatgttgcccgggctggtcttgaaatcctgaactcaagtgatacgcctgcctcagcctcccaaagtgctggaattacaggcatgagccaccacaccagtcctagcttaaaatatctttgaaaagaatattttcaagtatgttagcaagtgtttctgaatggaatatttgtgcaaagtatatcagcaaaacgaagtcacagtcttagccacattggacctcattgtcaatgaagagaaagtaaaagtcatcagtgtcctctaccaattgcaaaaataacttaaaatattttcaatgtcaaattaattgtaatttatattaagcaattaattacaattttttgttgcaat

SEQ ID NO: 79889 - DNA, 485 bp, Homo sapiens
taaaatgtgttgtattagattttttcctaaagataggtggcaaggcaacctttccttggtcaagtttattagaaacctatttcagacattgtagagaatgttgtatgtttatatagcattcctggaaagccatctgaaaatagtaatcaaaattaatatatatggcctttgatctcacagtcccacttctgataatctatcccatagaactaaaagtactgattagtaaaactgtgtgtgtgtatatatatgtatatatatgtatgtgtctgtgtgtgtatgtatatatatgtgtatgtctatatatataaatatatttatagcatcatagtatattgcatctaaacattggaaacaggccaggtgcagtggtctcacatctgtaatcccagcactttgggaggccaaggtgggaggattgcttgagcccaagagtttgagaccagtgtgggcaacatagtgagacaccattacttttttcttaa

SEQ ID NO: 79890 - DNA, 261 bp, Homo sapiens
cagggaacagcttacttccttgatgacactgggagtatttgataaaataccccatgattctataagccagactcatgtctgacatctccacattgctcttaaactccatggctacaaagaacagaatggaaaaggagaggagggagagccatccctgacacctgcctctctcaagtggtcccaggtccccactgcagccgctgttaccaaggtaccaaagctgtggctgaaatgaacaggcaatatggcaagtggaaaagg

SEQ ID NO: 79891 - DNA, 1120 bp, Homo sapiens
tggggttttgccacgttggccaagctggtctcaaactcctgaactcaagtaatttgcctgcttcggcctcccagagtcctgggattacagtcgtgagccatcgcgcctggccgtgatagaaactttcagctgaggagtctatatgccatactactctatgtggcatctttaggtctctgtgaaatcatgttgatgtaattgattaacaaaaataatttagaaaatacgtcaggcacagttgatggcttctcaatatctgctttgcatttttaaacaaatcaagaatgtaattttaacttttgcttatggtcattcttatgactacacggaaagggatggaatcatacttacttgtcttatacatggactgtttttagttaacaataacgtaactacacaaaggaaaggaaatgtttacattttaaaaaattactgtcaattacatctggtatttttcagattatgcataaaataatatgagtttgactattgtatcagaatattttaatcaaatcctgcaatttatattaacttaaaaaaacatctggtaaagactgggtgtggcagctcacacctgtaatcccagcactttgggaggccgaggctggatggatgattgcttgagcgcaggagttctagaccagcctgggcaatacagggagaccctgtctctatttcaaaaataaataaataggccccggtgtgtgatgttccccttcctgtgtccatgtgttctcaaaaaaaattaaaaaataaaaataaaaataaataaataaataaccagtaaagatgtactgtttctactgcagtttataatatttcatttattaagaaagatatcatctcagctttcaaattcaacatagccctcaatttatgacataagttttatacttagtattttataatttcttaattttgttataaacttgaaaatgtagaatatggggtccaaaatctgttgaacatttgttcagctagttaggtttcaacattaatcatatacattaatagtatctttatgtaaggatatgtgaagggtgtttttctttataagaaaattagtttaatcaggtgagctgatacttaggattatacatatatctatgataaaattgaa

SEQ ID NO: 79892 - DNA, 594 bp, Homo sapiens
cccatttcaagaagagtccaggcgtacggcttcactgatgtcttgggttgatccctatctcatcaatgtcaggggacagcctgagtcccgcacagggacttcggggaagcctagaggaaaggtggctgtgggagaaggagctacaaacctccctccagctttctccctcagagtaattgtcttacttttgttcccataaaaatctaggctcctgaggttattctcaatggaaaatatggtgtaagcgaatactcggtatgaatttcaatgaaatcatgttgtacttctgatcttacagggaaatattaagatccatgttacatagaaatgcactaggcattgctgtctccccatgaaacatgacttaagcacaggatgtttggcaacagctttataacataagtcaaaataaaattggtttccatgcctcccatatagttacataaaaatcataagtggcagaaatgtccatgttttacatttatgctttatgaagtattttgtgctttgtcctattatgtaacaacccagaaagaatatatgcaccggtcaatttttctccacttctgcatacttattttgtaccctttaaaa

SEQ ID NO: 79893 - DNA, 613 bp, Homo sapiens
gattaaggttctgataatagttgttaatggtagtatctcacatagcaaggatatgtgtatgcattcacgatttcttatagagaatcttctctgagaaatgtctttgatccaccaacttcaagttcctggagtgacctaattttgctgtttcctagtgtgcctttagaagggtacgttgttggagcaatctaggttatcctgtggtttctttgcagagagctcaagagtaccatattatacaaagcagccactttttcttaatttttgtgtaggtgacagtgacccctagactggaggttcctgggaggtaaaggacctgtcgttctagtctctgcaagaaaaatattgcctaaagttatcacaaacatttacacaattggataccttaaggttatgttatggaattttaccttaatgtttctgcttattgcagaaaataaagtaacaaaggtagaaataaaagaatataaaagatgctcaatcccagaaataaatattaattctgtaatgcgcattttaacattcttgatgttaggtaattttatggttttcaattttagaatttagcaaaacttccttgagaaagcacttaaaaattaaatttattgtttac

SEQ ID NO: 79894 - DNA, 912 bp, Homo sapiens
cgcgacgcgcgcactccctcgcgcccacccgcgcgcccggccgcgtcgcccccagcccgttggtccccggactgcggaccccgcccccgacgggggccaggtaacccgcttccgagtgtgccacggcgacccccatctcccctccccgtgtcataataaatctcacgttttctgccggctggaggcttggagcggtgaggtgacgttcatttcggccgcgtgaagttttctttcaaactgggattggtggggaggccgggggaagggagcggggcggcgatcttggcgccctgcgcggagtccgggagccgcgtcccggccgagtcggggagtgtgcgtggagcctcccacctactggtctccgccggcaactctgcggccccatttcggaaagcgcaccgcattgaccgggacctgaagcgggataagaggggtcctggggaatagactgagaaagacattcatgtctgagatgaagctcaactattactattttgaaagtgctttaacagtgcaagtttaaaaactaaagtgttgacttgctttttctcccccggggcatgtgccacgtcttccaaagtcaaaggaacggatgagtacaaaaagttgctacccttgaagtgttacctatcactatcaaccacagcttgtttatttggaaagaacttaagtgaaccgtcaagagaaaaacaaatgcatattctttctacaaatagtagcatttagtatctttcctgaccacatttgcgaaaagagggaatagagacttctataattaaagggaaaaggaaaatgaaaggagctgaaaatagtgaactgtgtagtctggatggctgaaatttgaaaacacatgaaattatcaggactgccaaacggtgttcctgagaaaccatatcacagattgtgaagaaa

SEQ ID NO: 79895 - DNA, 401 bp, Homo sapiens
gtcattcaccctaatccctctttcaccttcacagaactttcacactccaatgtacttgctgtttgtagatgctcctataaacagaaagctctgggagacaggtgtcttgttattcttgctctctgtcatatctctgggcctatcacaagtactcaaagcatagaagttcaataaatatgtgttcaatgtaagaaatgatcagtgattctcaagctgcagtggcgtcaggatcacctagacagcctgttagcacggatcactgggccccacccccagagtttcaggtctggtctggggtggggcccaataatctgtattcctaaaagtcccaagcaatgctggtgctgttcgtccaggaaccatgcttaaagaaccactggaatagactggcgaacaaaagg

SEQ ID NO: 79896 - DNA, 794 bp, Homo sapiens
ggctctgtgagacaggccctccactctcctgtagatcctgttgtaagtgatgcagaagccagagagaaggttgctctccatcggaaacatgaggagtttcggagacctccctaaaatatttggcctgaaagggtttgaagccaggaggagagatgcagtcttaggagaaacgtttcatgagctgtagcaggtaccctatcagtctttctcagaataaagaagcctatattcataagaatgctgattcttaaagggctagaaaggccagttgaagaaggccagtctgtagagatgcctgggaattctttgatctttttggaggctaaaggaagtaaaattctgctatggaaattgtcctattatatttctgctttcaagaagtggctacaagattatgaggttttgcaatgttgccctcctagtcctgtgtacattgctgtaaagactcccaggcatggaggccatcactggcactgttcctctcagcagttatttgggtgtgaagttcctcactcctgcaagactcagcctgaaggagcatgtctacatgacccacctgcacaatctccccacttgtcagtaacagctgtgaaatctgcccctgttgtctttagaaactgaaagatggaaaagatctcagatgctgtgacccccatgtaacagatggaggaattgaatccaagagatgaagtgaccactttgcctaaaatcaaatagccatgtagcagccgagctaaaacaaacattcagtcctcctgaatcctaactcagtgattttctcttaatatcatata

SEQ ID NO: 79897 - DNA, 387 bp, Homo sapiens
tggacttgagtgttgagctgaccatatgtggtctccaagcctgaccctctgcaagaacaggagcaggaaaagaagcagggggtggtgctcttccttgcccttcatgctcatttgtgttcccagctcacgtatgttaaggatatctattggcctaactagacacttgcacattattcttggctacattttttaaagtcacaggggttttaatttagttaatcttgttttgtctggttttactttgtttttaaacaccagagaggaaaaagaaagctcttagggtgaaaataccaattataaaatgagtgaatcctagagtttaattcctttacaagtttaatcattttacaagctttgatttttcccatgggcagatggaagttttgg

SEQ ID NO: 79898 - DNA, 531 bp, Homo sapiens
gtgtgtaagccatgttttcttgttcacgccagccatgggaggtgataatagcctgggtaacaatttcagtcatacttgtccaggagcctgcttccttgaaagtgactgatgttccggtgttcctttctttcccattgggtcttggacacctgattgttaccatggtgtttgtccactgctgctatggtcttgttgatgctgctccaaatatgtagctgtgttttctggatacataatttttatttaaagcttattcctggacacattttgtccatttttgaaaagatctaaactaatttgactagtagaattaggctaacaatacatggttcaaggaaaaatactgccttttgtaataaaagtttcttcttgcctagtgtctcattggtctgaatataatggctgtcttagacccggcatcctggcgcctgtcttcaactctagttctgccgtatgtgactttaggcaagtgtgtgtgtttcggaacttcattttctacattatataaaatggaattggataaaagctaca

SEQ ID NO: 79899 - DNA, 1034 bp, Homo sapiens
gcgtccgcttaaccaccgaccgggtcgcctccccgcgtttgggaccccccgtgcgcggtgtccgaactggcattctcctgggccgcccccacagatgttaaaattttctgggccggccccacaatttttttttttttttttttttttgccaaattgtatccattttgtttttttttctctcttgaaatctcagagaaagagattgttacatccttggttttaaggtgttgggttcctttcctgcccctgaaatgtgggctctgccagtgccttttctgcttttctctgggttgtcactagagggcagcatacgcccgtgtttagaagtcagagctgcttgatttacggacagagaaccgagggcgcacactgcctccttgggctttaggagcacaaaattgtaatacccacgggatatctttattttactagcaataggatctcaataaggtaggaaaactgatatgcaggccgacttcttactagaaatggcaaacttcattgaattaaggattccagaatcaaattgctgttagccatgtgaacgttaccatctcacattgaaacaccggaggcgaggctcctgttctagctcctcttttatattacttaatgtgacttgactaaatttctgtgaagttgaggataagcaaatatttgtaccattttttatagaaataaatacaactgctgaagatgcccagcgaagaagaagaatatgaactgtcctgtgctgagcccaggccctttgcacatggcctccattctccacccccgcctaacaaggtgcctgtagtcagttttgttttaagacaaggacactaaagccggccgagggacccacccaaggccacacagggaggcggcctcaggatcatgggcagctccgtctggttccttcccaggctccgggccatatcatcagcaccctcccctcatcctgccccgctgctcatcgctcgcacgccacaggcgctgccggcatgggacgcatgctggcttcctgtctgctactcagtacttgttttcagatg

SEQ ID NO: 79900 - DNA, 898 bp, Homo sapiens
cgagctggttggtatgccatttttggctttgtttttttttctctcttgaaatctcagagaaagagattgttacatccttggttttaaggtgttgggttcctttcctgcccctgaaatgtgggctctgccagtgccttttctgcttttctctgggttgtcactagagggcagcatacgcccgtgtttagaagtcagagctgcttgatttacggacagagaaccgagggcgcacactgcctccttgggctttaggagcacaaaattgtaatacccacgggatatctttattttactagcaataggatctcaataaggtaggaaaactgatatgcaggccgacttcttactagaaatggcaaacttcattgaattaaggattccagaatcaaattgctgttagccatgtgaacgttaccatctcacattgaaacaccggaggcgaggctcctgttctagctcctcttttatattacttaatgtgacttgactaaatttctgtgaagttgaggataagcaaatatttgtaccattttttatagaaataaatacaactgctgaagatgcccagcgaagaagaagaatatgaactgtcctgtgctgagcccaggccctttgcacatggcctccattctccacccccgcctaacaaggtgcctgtagtcagttttgttttaagacaaggacactaaagccggccgagggacccacccaaggccacacagggaggcggcctcaggatcatgggcagctccgtctggttccttcccaggctccgggccatatcatcagcaccctcccctcatcctgccccgctgctcatcgctcgcacgccacaggcgctgccggcatgggacgcatgctggcttcctgtctgctactcagtacttgttttcagatg

SEQ ID NO: 79901 - DNA, 774 bp, Homo sapiens
ttaaatataaatagtttcccaatcttcagtgaattctgtcttttagggattgactgtgggagtggtctctaagatatagtatttgaaatttaaagttagaagaatacttctgtaatctaccttgaataggtattttaaaatagcttaatttctgaagaaaagtttttaaatattttaatattgaaggttattttaatattttaaagtaactttagttaatctgtaatttttaaaatactttgatttggtgtgaaattaatgattttctcgtgtatagtttatctgtgtgccttataataaatggaccttgtgtccagtttattataattaagagtgtaaatccatttgttaattagtaaatcttacacatagcacacgatataggttggtacttatttaataagtactaaatttttatatagatgctttatactttaataatatttatatttacagaatttaattgatatttactgaatttaatattttaattattaattatcttagtcgagatgaaatcataagcatatgagttaaaaatattagctcctttgtgaggtggaataccatatttaaacattggtgtatgaaggcaggtaatttacttcatcattattttaacaagtgatgttgataaaagccagaggaacaaacatgggtgaaaaacatattaattaatcaaacttctagcaaataccaacccgggcatgtctttttatggttgtcttgaattaatactaattttacttccttacacaaaaatacaaacttcaa

SEQ ID NO: 79902 - DNA, 292 bp, Homo sapiens
gccacccttctctctgcaagactccagtaaacctttgcctcttcattagcatttgaatctctgagctcctataacaaggtctttgctggcctcacaccagtctgagtccctcagaacagaatttttcacagaccttcttgcttctgcctttcattattctcagatctttttggtgtttttgtttagtttggttttgtttgctcttgaataccaagagtccatctttggtagtatactaaatataatgaagctttagaagtattcagtggggaacattaatgaaaagttaaaa

SEQ ID NO: 79903 - DNA, 466 bp, Homo sapiens
tagatataggattttgcccctctacccaggatgagtccacttttctgctgctggggccatgatctgtgtcaaagggggccatgatcttcgacaaagagggcctttccgctgaaatgtaacagagtgctcctgaaaagtcatgaggagatcaagttctcattaaactatgtgagggggaaattatttaaagaaatttgcaaataatcctataattaataaatgaaactttaaatcattaatttatgtatttcacctcctaaatgatttcttttgcctgcttgcatttttgtacaccaagtcatgtttggttaaagtgactgttacgtcaggtgtgttggcatgtgcctgtactcccagctactcgggaggctgaggcgggaggactgcttgatattaggagtttgaggccagcctgagcaacatagtgatacctgtctcaaagaaaagaaagaaggaaagagaaaaa

SEQ ID NO: 79904 - DNA, 2848 bp, Homo sapiens
cctggcgaaagcaagacgtggaggttttaccaggggttagtagcttcctcttgctaactttttattgggacaaaaggcaagatggcaccattctgttctcagatatttgtctaaataaagcccttttaattttattttatttttgttgtgggattcttaagcagataagaagaaaagacaccttcctagtgagcagctgcccagctcctgctcagttttgcctcggggtagcacctccagccacagaaagcaagccggtaagtctctccaggtaggacttgctgcaacccagctgctggactgatctgaaacgggactttgcatactctccgaagtatggtgagttggtgctgacttcaaagttgcctggtgaaggaagataaggtggatcgcagagactaaggggagagggagaagccctgctcctcttctccccaccaaggcacaatgagcaacatctgtcagaggctctgggagtacctagaaccctatctcccctgtttgtccacggaggcagacaagtcaaccgtgattgaaaatccaggggccctttgctctccccagtcacagaggcatggccactactttgtggctttgtttgattaccaggctcggactgctgaggacttgagcttccgagcaggtgacaaacttcaagttctggacactttgcatgagggctggtggtttgccagacacttggagaaaagacgagatggctccagtcagcaactacaaggctatattccttctaactacgtggctgaggacagaagcctacaggcagagccgtggttctttggagcaatcggaagatcagatgcagagaaacaactattatattcagaaaacaagaccggttcctttctaatcagagaaagtgaaagccaaaaaggagaattctctctttcagttttagatggagcagttgtaaaacactacagaattaaaagactggatgaagggggattttttctcacgcgaagaagaatcttttcaacactgaacgaatttgtgagccactacaccaagacaagtgacggcctgtgtgtcaagctggggaaaccatgcttaaagatccaggtcccagctccatttgatttgtcgtataaaaccgtggaccaatgggagatagaccgcaactccatacagcttctgaagcgattgggatctggtcagtttggcgaagtatgggaaggtctgtggaacaataccactccagtagcagtgaaaacattaaaaccaggttcaatggatccaaatgacttcctgagggaggcacagataatgaagaacctaagacatccaaagcttatccagctttatgctgtttgcactttagaagatccaatttatattattacagagttgatgagacatggaagtctgcaagaatatctccaaaatgacactggatcaaaaatccatctgactcaacaggtagacatggcggcacaggttgcctctggaatggcctatctggagtctcggaactacattcacagagatctggctgccagaaatgtcctcgttggtgaacataatatctacaaagtagcagattttggacttgccagagtttttaaggtagataatgaagacatctatgaatctagacacgaaataaagctgccggtgaagtggactgcgcccgaagccattcgtagtaataaattcagcattaagtccgatgtatggtcatttggaatccttctttatgaaatcattacttatggcaaaatgccttacagtggtatgacaggtgcccaggtaatccagatgttggctcaaaactatagacttccgcaaccatccaactgtccacagcaattttacaacatcatgttggagtgctggaatgcagagcctaaggaacgacctacatttgagacactgcgttggaaacttgaagactattttgaaacagactcttcatattcagatgcaaataacttcataagatgaacactggagaagaatatcaaataataaagtagcaaaacaaattcaaataatccattccaaaatacaatgttatcaaccaactgcacaatcagtttatcctgacatattcaagtgataggataaagttggccatgtattatgaaaaagattatttgtgcattttattgactgggcaacactgcaggacagtcaaggtgatatataatttcctcactgcctggtaaaattaagcacactaaaccaagttatttttctttttaagagatacttacatttccatttattgtttgaaatgtcgatcaagagaatcaacagatgatagtccaatttttactcagtgactgttgtagcattttcctgtttactgattagagtggttattcattattcctcagattgctgaatcccatcaggctgttattatgaaggaatttgattgctttgctgcacagcaggacctgtgctttgagatttttttttctcttttaaaatatcctgtaactacaatgatggtaaagccatgttaaatgacttgattgtacttggagtaattgcacatttttttctatgcataaaaaaatgatgcagctgttgagaaaacgaagtctttttcattttgcagaaggaaatgatggaatttttctgtacttcagtatgtgtcaactgagagtcatatacattagttttaatctcttaatattgagaatcaggttgcaaaacggatgagttattatctatggaaatgtgagaaatgtctaatagcccataaagtctgagaaataggtatcaaaatagtttaggaaaatgagaggagaacagtaggattgctgtggcctagacttctgagtaattaataaagaaaaagaagtaccctttggcctac

SEQ ID NO: 79905 - DNA, 2794 bp, Homo sapiens
cctggcgaaagcaagacgtggaggttttaccaggggttagtagcttcctcttgctaactttttattgggacaaaaggcaagatggcaccattctgttctcagatatttgtctaaataaagcccttttaattttattttatttttgttgtgggattcttaagcagataagaagaaaagacaccttcctagtgagcagctgcccagctcctgctcagttttgcctcggggtagcacctccagccacagaaagcaagccggtaagtctctccaggtaggacttgctgcaacccagctgctggactgatctgaaacgggactttgcatactctccgaagtatggtgagttggtgctgacttcaaagttgcctggtgaaggaagataaggtggatcgcagagactaaggggagagggagaagccctgctcctcttctccccaccaaggcacaatgagcaacatctgtcagaggctctgggagtacctagaaccctatctcccctgtttgtccacggaggcagacaagtcaaccgtgattgaaaatccaggggccctttgctctccccagtcacagaggcatggccactactttgtggctttgtttgattaccaggctcggactgctgaggacttgagcttccgagcaggtgacaaacttcaagttctggacactttgcatgagggctggtggtttgccagacacttggagaaaagacgagatggctccagtcagcaactacaaggctatattccttctaactacgtggctgaggacagaagcctacaggcagagccgtggttctttggagcaatcggaagatcagatgcagagaaacaactattatattcagaaaacaagaccggttcctttctaatcagagaaagtgaaagccaaaaaggagaattctctctttcagttttagatggagcagttgtaaaacactacagaattaaaagactggatgaagggggattttttctcacgcgaagaagaatcttttcaacactgaacgaatttgtgagccactacaccaagacaagtgacggcctgtgtgtcaagctggggaaaccatgcttaaagatccaggtcccagctccatttgatttgtcgtataaaaccgtggaccaatgggagatagaccgcaactccatacagcttctgaagcgattgggatctggtcagtttggcgaagtatgggaaggtctgtggaacaataccactccagtagcagtgaaaacattaaaaccaggttcaatggatccaaatgacttcctgagggaggcacagataatgaagaacctaagacatccaaagcttatccagctttatgctgtttgcactttagaagatccaatttatattattacagagttgatgagacatggaagtctgcaagaatatctccaaaatgacactggatcaaaaatccatctgactcaacaggtagacatggcggcacaggttgcctctggaatggcctatctggagtctcggaactacattcacagagatctggctgccagaaatgtcctcgttggtgaacataatatctacaaagtagcagattttggacttgccagagtttttaaggtagataatgaagacatctatgaatctagacacgaaataaagctgccggtgaagtggactgcgcccgaagccattcgtagtaataaattcagcattaagtccgatgtatggtcatttggaatccttctttatgaaatcattacttatggcaaaatgccttacagtggtatgacaggtgcccaggtaatccagatgttggctcaaaactatagacttccgcaaccatccaactgtccacagcaattttacaacatcatgttggagtgctggaatgcagagcctaaggaacgacctacatttgagacactgcgttggaaacttgaagactattttgaaacagactcttcatattcagatgcaaataacttcataagatgaacactggagaagaatatcaaataataaagtagcaaaacaaattcaaataatccattccaaaatacaatgttatcaaccaactgcacaatcagtttatcctgacatattcaagtgataggataaagttggccatgtattatgaaaaagattatttgtgcattttattgactgggcaacactgcaggacagtcaaggtgatatataatttcctcactgcctgttccatttattgtttgaaatgtcgatcaagagaatcaacagatgatagtccaatttttactcagtgactgttgtagcattttcctgtttactgattagagtggttattcattattcctcagattgctgaatcccatcaggctgttattatgaaggaatttgattgctttgctgcacagcaggacctgtgctttgagatttttttttctcttttaaaatatcctgtaactacaatgatggtaaagccatgttaaatgacttgattgtacttggagtaattgcacatttttttctatgcataaaaaaatgatgcagctgttgagaaaacgaagtctttttcattttgcagaaggaaatgatggaatttttctgtacttcagtatgtgtcaactgagagtcatatacattagttttaatctcttaatattgagaatcaggttgcaaaacggatgagttattatctatggaaatgtgagaaatgtctaatagcccataaagtctgagaaataggtatcaaaatagtttaggaaaatgagaggagaacagtaggattgctgtggcctagacttctgagtaattaataaagaaaaagaagtaccctttggcctac

SEQ ID NO: 79906 - DNA, 326 bp, Homo sapiens
caggtcccagctccatttgatttgtcgtataaaaccgtggaccaatgggagatagaccgcaactccatacagcttctgaagcgattgggatctggtcagtttggcgaagtatgggaaggtctgtggaacaataccactccagtagcagtgaaaacattaaaaccaggtgcgagaacaataaaggttaaatggcatatgttgatttttatgagctcaatttaacactgtaaatatctaagaggtcatagggtggctaatactggcagcaagcaggtgttgtggtcattgtctctagcccaggtgaccccaacctatggataaggcat

SEQ ID NO: 79907 - DNA, 3106 bp, Homo sapiens
cctggcgaaagcaagacgtggaggttttaccaggggttagtagcttcctcttgctaactttttattgggacaaaaggcaagatggcaccattctgttctcagatatttgtctaaataaagcccttttaattttattttatttttgttgtgggattcttaagcagataagaagaaaagacaccttcctagtgagcagctgcccagctcctgctcagttttgcctcggggtagcacctccagccacagaaagcaagccggtaagtctctccaggtaggacttgctgcaaccccagctcctgctcagttttgcctcggggttagcaccttccagccacagaacgaagccggtagtctctcagtagacttggtgcaacccagctgctggactgatctgaaacgggactttgcatactctccgaagtatggtgagttggtgctgacttcaaagttgcctggtgaaggaagataaggtggatcgcagagactaaggggagagggagaagccctgctcctcttctccccaccaaggcacaatgagcaacatctgtcagaggctctgggagtacctagaaccctatctcccctgtttgtccacggaggcagacaagtcaaccgtgattgaaaatccaggggccctttgctctccccagtcacagaggcatggccactactttgtggctttgtttgattaccaggctcggactgctgaggacttgagcttccgagcaggtgacaaacttcaagttctggacactttgcatgagggctggtggtttgccagacacttggagaaaagacgagatggctccagtcagcaactacaaggctatattccttctaactacgtggctgaggacagaagcctacaggcagagccgtggttctttggagcaatcggaagatcagatgcagagaaacaactattatattcagaaaacaagaccggttcctttctaatcagagaaagtgaaagccaaaaaggagaattctctctttcagttttagatggagcagttgtaaaacactacagaattaaaagactggatgaagggggattttttctcacgcgaagaagaatcttttcaacactgaacgaatttgtgagccactacaccaagacaagtgacggcctgtgtgtcaagctggggaaaccatgcttaaagatccaggtcccagctccatttgatttgtcgtataaaaccgtggaccaatgggagatagaccgcaactccatacagcttctgaagcgattgggatctggtcagtttggcgaagtatgggaaggtctgtggaacaataccactccagtagcagtgaaaacattaaaaccaggttcaatggatccaaatgacttcctgagggaggcacagataatgaagaacctaagacatccaaagcttatccagctttatgctgtttgcactttagaagatccaatttatattattacagagttgatgagacatggaagtctgcaagaatatctccaaaatgacactggatcaaaaatccatctgactcaacaggtagacatggcggcacaggttgcctctggaatggcctatctggagtctcggaactacattcacagagatctggctgccagaaatgtcctcgttggtgaacataatatctacaaagtagcagattttggacttgccagagtttttaaggtagataatgaagacatctatgaatctagacacgaaataaagctgccggtgaagtggactgcgcccgaagccattcgtagtaataaattcagcattaagtccgatgtatggtcatttggaatccttctttatgaaatcattacttatggcaaaatgccttacagtggtatgacaggtgcccaggtaatccagatgttggctcaaaactatagacttccgcaaccatccaactgtccacagcaattttacaacatcatgttggagtgctggaatgcagagcctaaggaacgacctacatttgagacactgcgttggaaacttgaagactattttgaaacagactcttcatattcagatgcaaataacttcataagatgaacactggagaagaatatcaaataataaagtagcaaaacaaattcaaataatccattccaaaatacaatgttatcaaccaactgcacaatcagtttatcctgacatattcaagtgataggataaagttggccatgtattatgaaaaagattatttgtgcattttattgactgggcaacactgcaggacagtcaaggtgatatataatttcctcactgcctggtaaaattaagcacactaaaccaagttatttttctttttaagagatacttacatttccatttattgtttgaaatgtcgatcaagagaatcaacagatgatagtccaatttttactcagtgactgttgtagcattttcctgtttactgattagagtggttattcattattcctcagattgctgaatcccatcaggctgttattatgaaggaatttgattgctttgctgcacagcaggacctgtgctttgagatttttttttctcttttaaaatatcctgtaactacaatgatggtaaagccatgttaaatgacttgattgtacttggagtaattgcacatttttttctatgcataaaaaaatgatgcagctgttgagaaaacgaagtctttttcattttgcagaaggaaatgatggaatttttctgtacttcagtatgtgtcaactgagagtcatatacattagttttaatctcttaatattgagaatcaggttgcaaaacggatgagttattatctatggaaatgtgagaaatgtctaatagcccataaagtctgagaaataggtatcaaaatagtttaggaaaatgagaggagaacagtaggattgctgtggcctagacttctgagtaattaataaagaaaaagaagtaccctttggcctacagatcagagttttatttattttttattttttactttttattatagtttaagttctggggtgcatgtgcagaatgtgcagttttgttacataggtgtacaagtgccatggtggtttgctgcacccatcaacccgtcgtctacattaggcatttctcctagtgctgttcctccc

SEQ ID NO: 79908 - DNA, 814 bp, Homo sapiens
gtccactgtgtgagattaagtattgttttgtgaaacatttgtttctgttttgtacacgtgcataccggttcacgtggagtgggtgatggttgaagatgcatgtttttttgtgaggaaagcccctggctaggaaagcccctggctgacaggatagcgtcttgactcctcagtgtgacgcaggggtgtctgtggccagcttctgcctggctgtgctgcctcacctcccagccctcctgcctggaagcctgagctctagctgtaggagcggtttctcctcagtgcttggcggggacctgtccatggttccacagggctgtatgaacacatcgttaccagggcctggccatggttaggatggtccacgtgtctggccttcccttctcatcttttaactccttgaggtcagggttgaactttattcaacgctctgcccagcactggccccgtgcctgacacagagtggcagtaaccaggtattgctcgtctgtcgtgcgcaggtagtttatataagcctcatttaatcctcacagtagtccagtaagagagaggtaattaactattttccagatgaggcacagagccgtttagagcataatttgctaaaagccacccagctagtaagtggtagagctgagattcagactcaggttcatgtgacgccggagtcctcgccacccccactgcacatgcagcccagcaaatgtttgttgaatggatgtggtgatgctgcttcctttttggaagcagaatccccatctgcccaggattctagtttgtggccctttgtgtcaacatctcacgtatttacttgtgg

SEQ ID NO: 79909 - DNA, 273 bp, Homo sapiens
atcgctgagttgtgggtttaacttagctattaattgatggtgtacatggttacccatattctgtaacactttctcaaaagttgacttttcctccaaaccctgctccccatcagtaatctaagtgctttaaggtggttctgtttttcatctaattcctaaatatagtttgttttacagcctcaattaatcttgaagtttaggtataacccttactgacttactgaataactgtccttgaagtgaacactgtagtttaatttcaagaaccttcct

SEQ ID NO: 79910 - DNA, 1030 bp, Homo sapiens
  misc_feature (512)..(513): n is a, c, g, or t
gaaccggccagctcctgctctgtcccctcaggtgtcctgcaggcacagcatctcggggggcccaggccgatggcaggagttcctcatggccgaggagtctctgcctggcacgctgctgaagctggcggcacaggggctgggcatgcaggccgcctgcaccctgacgcgcctctgctgggcctgggagctcagtgacctgcacctgctgcagagcctcatggcccagagctgcagctcggccctgcgcacatccgtgccccacggggcgcttgtggaggccgcctgcgccttttgtttccatctgaccctcctgcacctgcggcacagtcctcccgcctacaagcgggcccgctgtggctctgttggtcaccgtcacggcctacacggccgggcccttcacgtctgccttcttcaaccctgccctggccgcctctgtgacctttgcctgctcgggacacaccttactggagtacgtgcaggtgtactggctgggccctctgacaggatggtcnnggctgtgctgctgcaccagggccgccttccccaccttttccagaggaaccttgttctaccggccagaagaacaagtaccgagcaccccgagggaagccggcccggcctcaggggacacccagaccctgcaaaagggggtcagtgtccgggagcctgggcgcagtggtgttgagggggccacattccagctgagtggccttgctctgtgtgagccccgtgccgagggcccctggcttggtagctgggaccctgggaaaccttctggtagctaaggagcggaactccctggggccccacgttccccccaggaaacggccagtgggggcgaacgtaaaacccaagtatcgtaacgaagaacgcacagcggcccagcagcaacagcaacacacatggcgggggcccgccctaagacatatacccgcgacgaggggggggcacgcaacagtatagccgggcacgcacaggctctcgtgtgtccaaccctggcggtccacacacacgacaccggccagcgcgc

SEQ ID NO: 79911 - DNA, 1327 bp, Homo sapiens
  misc_feature (809)..(810): n is a, c, g, or t
gaaccggccagctcctgctctgtcccctcaggtgtcctgcaggcacagcatctcggggggcccaggccgatggcaggagttcctcatggccgaggagtctctgcctggcacgctgctgaagctggcggcacaggggctgggcatgcaggccgcctgcaccctgacgcgcctctgctgggcctgggagctcagtgacctgcacctgctgcagagcctcatggcccagagctgcagctcggccctgcgcacatccgtgccccacggggcgcttgtggaggccgcctgcgccttttgtttccatctgaccctcctgcacctgcggcacagtcctcccgcctacaagcgggcccgctgtggctctgttggtcaccgtcacggcctacacggccgggcccttcacgtctgccttcttcaaccctgccctggccgcctctgtgacctttgcctgctcgggacacaccttactggagtacgtgcaggtgtactggctgggccctctgacagtctctcaggcatgtgcagggtcctaggaagcatacgaagtgcatcaggaaccccctcctgccccccgttgccgaggcagcactgccctctgctaggaacagctccgtgttggcctctctgtcccacacactgggccctgcagggcttctccgagactcttcaagttcaaggggcagcttcaggaaaccgaaaaacaggcttgtgtccttccattagcccctttatccacaagttcaggtatcacgcttgagccctggaggagctccaaggcttgcagccaggagccccgtagccagggatggtcnnggctgtgctgctgcaccagggccgccttccccaccttttccagaggaaccttgttctaccggccagaagaacaagtaccgagcaccccgagggaagccggcccggcctcaggggacacccagaccctgcaaaagggggtcagtgtccgggagcctgggcgcagtggtgttgagggggccacattccagctgagtggccttgctctgtgtgagccccgtgccgagggcccctggcttggtagctgggaccctgggaaaccttctggtagctaaggagcggaactccctggggccccacgttccccccaggaaacggccagtgggggcgaacgtaaaacccaagtatcgtaacgaagaacgcacagcggcccagcagcaacagcaacacacatggcgggggcccgccctaagacatatacccgcgacgaggggggggcacgcaacagtatagccgggcacgcacaggctctcgtgtgtccaaccctggcggtccacacacacgacaccggccagcgcgc

SEQ ID NO: 79912 - DNA, 792 bp, Homo sapiens
gaaccggccagctcctgctctgtcccctcaggtgtcctgcaggcacagcatctcggggggcccaggccgatggcaggagttcctcatggccgaggagtctctgcctggcacgctgctgaagctggcggcacaggggctgggcatgcaggccgcctgcaccctgacgcgcctctgctgggcctgggagctcagtgacctgcacctgctgcagagcctcatggcccagagctgcagctcggccctgcgcacatccgtgccccacggggcgcttgtggaggccgcctgcgccttttgtttccatctgaccctcctgcacctgcggcacagtcctcccgcctacaagcgggcccgctgtggctctgttggtcaccgtcacggcctacacggccgggcccttcacgtctgccttcttcaaccctgccctggccgcctctgtgacctttgcctgctcgggacacaccttactggagtacgtgcaggtgtactggctgggccctctgacagaggagcagcatggggaggtcatggagccccctcttggacctagatctggggattctggcccctggcttcagaggcccaggtggagcccacaccttctcctgcacctgctctcagacactcggctccacctcactgaggtaccagaagggcagctgggttcctatggaattctggaagcttttttcagcttctgctggctctacactgtggacggtctcaggggcaatgcctcagcctccccttggggggcaccgaccggagctgtgggtctctcaggccctgggcctg

SEQ ID NO: 79913 - DNA, 957 bp, Homo sapiens
ggcagccaggcgggcctccaaggccctgctcccagtgggcgcctatgaagtcttcgcccgggaggcggtgggcgcggtgcagctcggggcctgcttcctggagatgaggacgctggtcgagctcgggccctgggctggggactttgggcctgacctgctgctcaccctgctcttcctgctcttcctggcgcacggggtcaccttggacggggcctcggccaaccccaccgtgtccctgcaggagttcctcatggccgaggagtctctgcctggcacgctgctgaagctggcggcacaggggctgggcatgcaggccgcctgcaccctgacgcgcctctgctgggcctgggagctcagtgacctgcacctgctgcagagcctcatggcccagagctgcagctcggccctgcgcacatccgtgccccacggggcgcttgtggaggccgcctgcgccttttgtttccatctgaccctcctgcacctgcggcacagtcctcccgcctacaagcgggcccgctgtggctctgttggtcaccgtcacggcctacacggccgggcccttcacgtctgccttcttcaaccctgccctggccgcctctgtgacctttgcctgctcgggacacaccttactggagtacgtgcaggtgtactggctgggccctctgacagaggagcagcatggggaggtcatggagccccctcttggacctagatctggggattctggcccctggcttcagaggcccaggtggagcccacaccttctcctgcacctgctctcagacactcggctccacctcactgaggtaccagaagggcagctgggttcctatggaattctggaagcttttttcagcttctgctggctctacactgtggacggtctcaggggcaatgcctcagcctccccttggggggcaccgaccggagctgtgggtctctcaggccctgggcctg

SEQ ID NO: 79914 - DNA, 968 bp, Homo sapiens
caaaggagcttgacataattgtcctgttcctaatttggacactggtttacgaaagtgtggtgaccactggagactgttctctgacagtgtaacaggtattcgcccctttccccagggtactaagactcacgtggccctgacagccagcacagtctcttaggaggttccggagggtggcagtgggaatgagcgtagagccgtgtcatttcggagggctgagtgcgttccacacatcttcccaaagcccaccccaagaggctgtctaacgcagggggaaacaatgagaaaccagataccatggaattagcaaagaatttctcagatgaaacaggaaagggaggaaatccagaggggtttacattacacctggctcaggttgaaaggattcagggccagttgttggcaatattaaactccaggctgcgtttgaaagggtccttcactcgggcagccaaagagaggcgttcctgccaggataggttgcatcgctgcagatctccagccctacgtgcatacacacgtgcacacacacgtgtacacacacgtgcacacacatgtatgcacacacatgcatgcacacacatgtatgcacacacatgcatgcacacacgcacacacatgcacacatgcatgcatacatgcacacacgcgcgcacacgtgtgcacgcacatgcatgcacacagacacgcacacgcacacacatgcatgcacacacgcacacacatgcacacacacgcacacacgcatgcacacacacacatgcatgcacacacgtgcatcttggatatctcttgttaatgtcagccctctgccccaaactagatttgaaaacttgtaggtaatcaagttttctggttaagagaaataatcccagccaacagttagtaagctcttatgtgtcaggccttatccaaacagttcacacgaagaccagatccaaaaataaaagtgtgctttgtcaaaaaag

SEQ ID NO: 79915 - DNA, 892 bp, Homo sapiens
caaaggagcttgacataattgtcctgttcctaatttggacactggtttacgaaagtgtggtgaccactggagactgttctctgacagtgtaacaggtattcgcccctttccccagggtactaagactcacgtggccctgacagccagcacagtctcttaggaggttccggagggtggcagtgggaatgagcgtagagccgtgtcatttcggagggctgagtgcgttccacacatcttcccaaagcccaccccaagaggctgtctaacgcagggggaaacaatgagaaaccagataccatggaattagcaaagaatttctcagatgaaacaggaaagggaggaaatccagaggggtttacattacacctggctcaggttgaaaggattcagggccagttgttggcaatattaaactccaggctgcgtttgaaagggtccttcactcgggcagccaaagagaggcgttcctgccaggataggttgcatcgctgcagatctccagccctacgtgcatacacacgtgcacacacacgtgtacacacacgtgcacacacatgtatgcacacacatgcatgcacacacatgtatgcacacacatgcatgcacacacacgcacacgcacacacatgcatgcacacacgcacacacatgcacacacacgcacacacgcatgcacacacacacatgcatgcacacacgtgcatcttggatatctcttgttaatgtcagccctctgccccaaactagatttgaaaacttgtaggtaatcaagttttctggttaagagaaataatcccagccaacagttagtaagctcttatgtgtcaggccttatccaaacagttcacacgaagaccagatccaaaaataaaagtgtgctttgtcaaaaaag

SEQ ID NO: 79916 - DNA, 2137 bp, Homo sapiens
  misc_feature (158)..(158): n is a, c, g, or t
  misc_feature (585)..(585): n is a, c, g, or t
gttagcgcctgaacatgcggcagtctgcgggcgacccaggctccggacaggcagcggcggcggcgccggcggaggtggcggcggaggtggcggcggagacggccggcgcccggcgcggagcctagcgaggcagttcagcgcggcctcgggcctggtcnagaaggatgctgtcccgacagaaaaccaaaaacgaagtgtccaagccggccgaggtgcaggggaagtacgtgaagaaggagacgtcgcctctgcttcggaatcttatgccttcattcatccagcatggtccaaaaattccaggacgaactgatatctgtcttccagattcaagccctaatgccttttcaacttctggagatggagtagtttcaagaaaccagagtttccttagaactccaattcaaagaacacctcataaaataatgagaagagaaagcaacagattatctgcaccttcttatcttgccagaagtctagcagatgtccctagagagtatggttcttctcagtcatttgtaacggaagttagttttgctgttgaaaatggagactctggttcccgatattattattcagacaattttnttgatggtcagagaaagcggccacttggagatcgtgcacatgaagactacagatattatgaatacaaccatgatctcttccaaagaatgccacagaatcaggggaggcatgcttcaggtattgggagagttgctgctacatctttaggaaatttgactaaccatggttctgaagatttaccccttcctcctggctggtctgtggactggacaatgagagggagaaaatattatatagatcataacacaaatacaactcactggagccatcctcttgagcgagaaggacttcctcctggatgggaacgagttgagtcatccgaatttggaacctattatgtagatcacacaaataagaaggcccaatacaggcatccctgtgctcctagtgtacctcggtatgatcaaccacctcctgtcacataccagccacagcaaactgaaagaaatcagtcccttctggtacctgcaaatccatatcatactgcagaaattcctgactggcttcaggtttacgcacgagcccctgtgaaatatgaccacattctgaagtgggaactcttccagctggctgacctggatacataccagggaatgctaaagttgctcttcatgaaagaattggagcagattgttaaaatgtatgaagcatacagacaagcccttcttacagagttggaaaaccgaaagcagagacagcagtggtatgcccaacaacatggaaaaaatttttgagctgattttttaaaaatttaagttttgtaagagctttaaaatattttcacagataaaaaattgcaaacaagtactctggttaataaatgctgcttcctttgtggaaattataaaattctaactttacatgtattttgttattagaaattttcttttattgaatgagaaaaattagtctatcattttaagagccaatatggcaaacactttcaaatactgtatattaggaaactgttttggtattcttgatggaaaaaaatgcagcggaaatgtcattatgaacagatgttaaataggaaattattacttgttaacttcttacagcagtagtaccttctttaaaaaaaaaaaaagaatctgcggtattttttttaaaaaaaagtttactgctgtagtgtgaaatattgtctggaaagggatggtttaaatattaccatgatgtagttgaaatataaaataggatttggaaccttattgtgataaatatttatatatgatgtatgttcgtctcccctctccaaagtaaggaacccagctgggcgtggtggctcactcctgtaatcccagcattttgggaggccgaggtgggtggaccgcttgagtccacgagtttaagaccagcctgggcaacatggtgaagccccatctctacaaaaaatacaaaaaaattagccgggtatgatggtgtgtgcctctagtcccagctacttgggaggctgaggtcagaggatggcttgagccctagaggcagaggttgcagggtcaagatcgcaccacttgcactgcagcccgagagagagagagccagaccttgtcgc

SEQ ID NO: 79917 - DNA, 919 bp, Homo sapiens
ctaaaaattagggttgatttttttgctctccattttgacttgcaagaaataatacctcaagataatctgatttattagctatttttaaacatttttaatcacaagctgtattagctttgctgctatataggtgttatgtgtaaatgccacctattaatacgggactgaaaacgttagagacacactgcattgcagataaaatgcaggcagcacaatatggcctaaactgccatagttttagaatgtgaaaaaaatgcatgtttacttacctgtatacaccatatgcatgcactagaattattaactaacgaggtgaggtattgcaaatgttcaaaaaagctctcttgaatctaggtagcatgaacaaattataaaatttgtttaaaaaagcaaacttgcatgcattattgtgacttcaagtttaaaaaatcgtcttacatgtgtacaatatgcaaattagttttagattagagagtgcagccattttgtgatctggtcagtagtggaattcgattttatgcagactggatgtaatatttgtaatccctgtgcaattttgtgacgtgcggttctaattcatgtgcagtgatatagtatagataaaagaatgagtaaaagaaaatacaagaattctaaagaaagttggttttagcccctttgatagtccatggttaagacatcctttataaaccaaagatggccagcacactgctaaccagtcaccaaatgtaagacccataagaaacccatatttaaaaatctgaattttttagaagaatgcaaaactttagtaaaccctaagtaaagtcaaaatggagaaggggaaatatacagatggctagttgcataaaattaaattttacctttataagacaatggtgaaatctggcttgaacttgcttatgtgtttaacctataa

SEQ ID NO: 79918 - DNA, 301 bp, Homo sapiens
atagtttctgtgggttaggaactgaggagcagctcagctgcctcaggatcccttctgaggctgcagccagagtattggtggggaccacagccatccagaactgctagctcaggactagaatattcactcccacgttcatccactctggctgctgtcagagaccgcagctcctcatcgcgtggcttctccacaggtgagtgtctttgtgaggcggttcttggcttcccccagagcaaatgaccagaaataaggagtggcccagaaggaaactgccgtgcatttttataacccagtctccagt

SEQ ID NO: 79919 - DNA, 411 bp, Homo sapiens
tttttagtagagacggggtttcaccatgttggccaggatggtctcgatctcttgaccttgtgatccgctggcctcagcctcccaaagtgctgggattataggcgtgagccacccgcgccgggctacaaagagccttctaatgtgagcagagctggcagttaccgaggaagcccaggtggaggtggagttctgaaacagccactgtggtgaaggagtgtgtgcagctgggactgtgggggaggagggttggagtgcaggacttgcttctcccctaacattttgttgtgaaaaatttcaaaaatactgaaacattgaagaaattgtatagtgaacacctttgtatctaccaccttgattctctataggtataggcactcaattttaataaaaaaaaaatagctgaaaaaaatt

SEQ ID NO: 79920 - DNA, 913 bp, Homo sapiens
caaaacattcaaaagtcaccaaaattgttaaaggataaatacgaacgtggtgcaagatagagaaaaacaaggatgtaataccattcaagagagtggggacatctggtgaaggcaggggactgggatgagggaggggcgccgggcctggggtgtgttgctgagattaccgcctggctggctcgtgggcacatttatttttcattgatttattcatttatttttcttcctcacatctcacaagcaagtgatctgcacagaaagtaagtgtcatattgtgtgtggactccggagccagaccactcagtttaagttctgtttctggtcggtttcacttctgcttactagctatggttcttggggaaggttattttaggtctctggtgcctcagttttctcatctgggtgtattgaaatatggaccttgcagggttctggtgagaattaaatgagttctgtgttgagaattaagtgagttaatgtatgcgaaagcttagaatcgtgccctgcggcatagtagatctatataagcatcagctattgccatcatcagcatcatcattttgtaaatgtaaggcagtttgaaatcaaaaaagtaaaaagacggtatggagctgtaaagaagtgagagggagggccaggcgcagtggctcacacctgtaatcccggcactttgggaggctgaggcaggcagatcaccagggtcaggagtttgagaccagcctggccagcatgatgaaatcccatctctactaaaaatacaaaaattagccaggcatggtggtgcacgcctgtagtcccagctacttgggaggctgaggcaggagaatcacttgaacctgggaggcggaggttgcagtcagccgagatggcgccactgcactccagcctgggtgacagagtgagattccatctc

SEQ ID NO: 79921 - DNA, 272 bp, Homo sapiens
aacataacagtattttgagaatagaatttaagagcatttgtaggaatacaaaaatatagaacattcaataagataaaattcacagcatctgtgatctaattgagaattactaagcattgtgaagctggaaaatggacccatatgaggtgaaaaatcaaccaattgaaactaacccagaactagcacaaatgtgagactcagcagataaatgcattaaaacagttattatacctttatttcagatcttcaaaagtgaagtggagacatgagag

SEQ ID NO: 79922 - DNA, 399 bp, Homo sapiens
taaaagaggaaagcctctttgcagttgagataagaggaaggcatctgtctcctgctcatccctgggaatagaatgtctcggtgtaaaacctgactgtatgttctgtttactgagataggagaaaaccaccttagggctgcaggtgagacatgctggcagcaatactgctctttattgcaccgaaatgtttgtgctcgtgcacatcaaggcacagcagctttccttaaacttatttatgacacagagacctttgttcacatgttctcctgctgaccctctccccactattaccctattgtcctgccacatccccctctccgagatggtagagataatgatcaataaatactgagggaactcagagaccagggccagctgcgcaggtcctccatatgcaga

SEQ ID NO: 79923 - DNA, 988 bp, Homo sapiens
  misc_feature (282)..(283): n is a, c, g, or t
ggcgggcgcgcggcttcggcgggggcggccggggccgggggcgcggcggcggcgacggcaaggatcgcggcggcggtggacagcggcggggcggcgtggccaagagcaagagccgccgcaggaagggcgccatggtggtgtcggtggagcccgcaccggcacgagggcgtcttcatctaccgcggggcggaggacgcgctggtcacgctgaacatggtgccgggccagtctgtgtacggcgagaggcgcgtcacggtgaccgagggcggcgtgaagcagganntaccgcacgtggaacccgttccgctctaagctggccgcggccatcctgggcggggtggaccagatccacatcaagcccaagtccaaggtgctgtacctgggcgccgcgtcgggcaccaccgtctcccatgtctccgacatcattggcccagacggcctggtctacgccgtcgagttctcccaccgcgccggccgcgatctggtcaacgtggccaagaagcgcaccaacatcattccggtcctggaggacgcgcggcacccgctcaagtaccgcatgctcatcgggatggtggacgtgatcttcgccgacgtggcccagccggaccagtcccgcatcgtggccctgaacgcccacaccttcctgcgcaatgggggccactttctcatctccatcaaggccaactgcatcgactccaccgcatccgccgaggctgtgtttgcttctgaggtgaggaagttgcagcaggagaacttgaagcctcaagagcagctgaccctggagccctatgagcgggaccacgctgtggtggtcggggtctaccgacctcttcccaagagcagcagcaaatagcacccagctcaggctcgcctgccatctccccaaggctgcgttgtgtttgctattattttctgtgtgttttctttgtgagtgttttgttttgttgtttttctattaaactgcataaagaaacggcacctatctgta

SEQ ID NO: 79924 - DNA, 1400 bp, Homo sapiens
cgcggctatgaaggggcggaggctgggcggcgttgctctgcgctctgcggctgacggcgcttttgtctccggtgagttttgtggcgggaagcttctgcgctggtgcttagtaaccgactttcctccggactcctgcacgacctgctcctacagccggcgatccactcccggctgttcccccggagggtccagaggcctttcagaaggagaaggcagctctgtttctctgcagaggagtagggtcctttcagccatgaagcatgtgttgaacctctacctgttaggtgtggtactgaccctactctccatcttcgttagagtgatggagtccctagagggcttactagagagcccatcgcctgggacctcctggaccaccagaagccaactagccaacacagagcccaccaagggccttccagaccatccatccagaagcatgtgataagacctccttccatactggccatattttggaacactgacctagacatgtccagatgggagtcccattcctagcagacaagctgagcaccgttgtaaccagagaactattactaggccttgaagaacctgtctaactggatgctcattgcctgggcaaggcctgtttaggccggttgcggtggctcatgcctgtaatcctagcactttgggaggctgaggtgggtggatcacctgaggtcaggagttcgagaccagcctcgccaacatggcgaaaccccatctctactaaaaatacaaaagttagctgggtgtggtggcagaggcctgtaatcccagctccttgggaggctgaggcgggagaattgcttgaacccggggacggaggttgcagtgagccgagatcgcactgctgtacccagcctgggccacagtgcaagactccatctcaaaaaaaaaagaaaagaaaaagcctgtttaatgcacaggtgtgagtggattgcttatggctatgagataggttgatctcgcccttaccccggggtctggtgtatgctgtgctttcctcagcagtatggctctgacatctcttagatgtcccaacttcagctgttgggagatggtgatattttcaaccctacttcctaaacatctgtctggggttcctttagtcttgaatgtcttatgctcaattatttggtgttgagcctctcttccacaagagctcctccatgtttggatagcagttgaagaggttgtgtgggtgggctgttgggagtgaggatggagtgttcagtgcccatttctcattttacattttaaagtcgttcctccaacatagtgtgtattggtctgaagggggtggtgggatgccaaagcctgctcaagttatggacattgtggccaccatgtggcttaaatgattttttctaactaataaagtggaatatatattt

SEQ ID NO: 79925 - DNA, 1669 bp, Homo sapiens
cggtgtcatggccggctcctaccctgaaggtgcacctgcaatcctcgccgataagaggcagcagttcggaagccggttcctgagcgatccggcgcgcgtcttccaccacaatgcctgttgattatgagatcaatgcccacaaatactggaatgacttctacaaaatccacgaaaatgggtttttcaaggatagacattggctttttaccgaattccctgagctggcacctagccaaaatcaaaatcatttgaaggattggttcttggagaacaagagtgaagtatgtgaatgtagaaacaatgaggatggacctggtttaataatggaagaacagcacaagtgttcttcgaagagccttgaacataaaacacagacacctcctgtggaggagaatgtaactcagaaaattagtgacctggaaatttgtgctgatgagtttcctggatcctcagccacctaccgaatactggaggttggctgtggtgtgggaaacacagtctttccaattttacaaacgaacaatgacccaggactctttgtttattgctgtgatttttcttccacagctatagaactggtccagacaaattcagaatatgatccttctcggtgttttgcctttgttcacgacctgtgtgatgaagagaagagttacccagtgcccaagggcagtcttgatattatcattctcatatttgttctttcagcaattgttccagacaagatgcagaaggctatcaacaggctgagcaggcttctgaaacctggggggatggtacttctgcgagattacggccgctatgacatggctcagcttcggtttaaaaaaggtcagtgtctatctggaaatttctatgtgagaggtgatggaaccagagtttacttcttcacacaagaggaactggacacgcttttcaccactgctggactggaaaaagttcagaacctggtggaccgccgactgcaggtgaaccgagggaagcaactgacaatgtaccgggtttggattcagtgcaaatactgcaagccccttctgtccagcaccagctaagaggcacctgctgccaacacgatgcaagcccgttgtgtttccgagctttttttaaaaaaaaatttgtagcaccgggcatggtgcatgcctgtaatcccagccactcaggaggctgaggcagggaggatccattgagcccaggagtccagcctgggcaaaatagcgagagaccctgaatctgaaagtaatgataaaataaaaagaatataaatgaggtctcgttgatgctggacaattcaagaattcagacttgaaccttaaacctaggaaaagttactttgtatcaggattctaacaattatgcttcatatttgtgaagtcctttaaaacataattttctcaagttctttctttgagacctcaatctgtcttagcattttgtaactaataactgaaattttattcaaaggaattgtaaaccttaaaccaccaatttatttccatgtgaaaaagtgttatatatgacaagtgttttttgattgtaattgcgttaaatcttttgagagtgtaaatgccgggctaggcaattgcagttaatacatacaggggttagtgaagggcttattaagttgtaggggaagcaagctgggaagaatcagatcagatattttcctgac

SEQ ID NO: 79926 - DNA, 1761 bp, Homo sapiens
cggtgtcatggccggctcctaccctgaaggtgcacctgcaatcctcgccgataagaggcagcagttcggaagccggttcctgagcgatccggcgcgcgtcttccaccacaatgcctgggacaatgtggagtggtcggaagagcaagccgcggcggcggagagaaaagtccaggagaacagtatccagcgggtgtgccaggagaaacaagttgattatgagatcaatgcccacaaatactggaatgacttctacaaaatccacgaaaatgggtttttcaaggatagacattggctttttaccgaattccctgagctggcacctagccaaaatcaaaatcatttgaaggattggttcttggagaacaagagtgaagtatgtgaatgtagaaacaatgaggatggacctggtttaataatggaagaacagcacaagtgttcttcgaagagccttgaacataaaacacagacacctcctgtggaggagaatgtaactcagaaaattagtgacctggaaatttgtgctgatgagtttcctggatcctcagccacctaccgaatactggaggttggctgtggtgtgggaaacacagtctttccaattttacaaacgaacaatgacccaggactctttgtttattgctgtgatttttcttccacagctatagaactggtccagacaaattcagaatatgatccttctcggtgttttgcctttgttcacgacctgtgtgatgaagagaagagttacccagtgcccaagggcagtcttgatattatcattctcatatttgttctttcagcaattgttccagacaagatgcagaaggctatcaacaggctgagcaggcttctgaaacctggggggatggtacttctgcgagattacggccgctatgacatggctcagcttcggtttaaaaaaggtcagtgtctatctggaaatttctatgtgagaggtgatggaaccagagtttacttcttcacacaagaggaactggacacgcttttcaccactgctggactggaaaaagttcagaacctggtggaccgccgactgcaggtgaaccgagggaagcaactgacaatgtaccgggtttggattcagtgcaaatactgcaagccccttctgtccagcaccagctaagaggcacctgctgccaacacgatgcaagcccgttgtgtttccgagctttttttaaaaaaaaatttgtagcaccgggcatggtgcatgcctgtaatcccagccactcaggaggctgaggcagggaggatccattgagcccaggagtccagcctgggcaaaatagcgagagaccctgaatctgaaagtaatgataaaataaaaagaatataaatgaggtctcgttgatgctggacaattcaagaattcagacttgaaccttaaacctaggaaaagttactttgtatcaggattctaacaattatgcttcatatttgtgaagtcctttaaaacataattttctcaagttctttctttgagacctcaatctgtcttagcattttgtaactaataactgaaattttattcaaaggaattgtaaaccttaaaccaccaatttatttccatgtgaaaaagtgttatatatgacaagtgttttttgattgtaattgcgttaaatcttttgagagtgtaaatgccgggctaggcaattgcagttaatacatacaggggttagtgaagggcttattaagttgtaggggaagcaagctgggaagaatcagatcagatattttcctgac

SEQ ID NO: 79927 - DNA, 835 bp, Homo sapiens
cgcggctatgaaggggcggaggctgggcggcgttgctctgcgctctgcggctgacggcgcttttgtctccggtgaggtccagaggcctttcagaaggagaaggcagctctgtttctctgcagaggagtagggtcctttcagccatgaagcatgtgttgaacctctacctgttaggtgtggtactgaccctactctccatcttcgttagagtgatggagtccctagagggcttactagagagcccatcgcctgggacctcctggaccaccagaagccaactagccaacacagagcccaccaagggccttccagaccatccatccagaagcatgtgataagacctccttccatactggccatattttggaacactgacctagacatgtccagatgggagtcccattcctagcagacaagctgagcaccgttgtaaccagagaactattactaggccttgaagaacctgtctaactggatgctcattgcctgggcaaggcctgtttaggccggttgcggtggctcatgcctgtaatcctagcactttgggaggctgaggtgggtggatcacctgaggtcaggagttcgagaccagcctcgccaacatggcgaaaccccatctctactaaaaatacaaaagttagctgggtgtggtggcagaggcctgtaatcccagctccttgggaggctgaggcgggagaattgcttgaacccggggacggaggttgcagtgagccgagatcgcactgctgtacccagcctgggccacagtgcaagactccatctcaacacaatcaaaaaaaacccgggacactatcccgggcgggagacaagggca

SEQ ID NO: 79928 - DNA, 828 bp, Homo sapiens
cggtgtcatggccggctcctaccctgaaggtgcacctgcaatcctcgccgataagaggcagcagttcggaagccggttcctgagcgatccggcgcgcgtcttccaccacaatgcctggtaatcaccctgccccctcgcccggcctgtcgctggccgtctgtcccgccgcctcggagcattccgaaaagcccctgaccgccggccacgagtcaagctgccctacccgaggcactctccaaggggagagaaactcctaggccagcgactcaccctgctcgcagccaggacgtgaagcccctaagctgcccgtttgattttctcagggacaatgtggagtggtcggaagagcaagccgcggcggcggagagaaaagtccaggagaacagtatccagcgggtgtgccaggagaaacaagttgattatgagatcaatgcccacaaatactggaatgacttctacaaaatccacgaaaatgggtttttcaaggatagacattggctttttaccgaattccctgagctggcacctagccaaaatcaaaatcatttgaaggattggttcttggagaacaagagtgaagtatgtgaatgtagaaacaatgaggatggacctggtttaataatggaagaacagcacaagtgttcttcgaagagccttgaacataaaacacagacacctcctgtggaggagaatgtaactcagaaaattagtgacctggaaatttgtgctgatgagtttcctggatcctcagccacctaccgaatactggaggtaaccttttattgtcttggtagtgggatatgtgaagctattatatttgtgcacatg

SEQ ID NO: 79929 - DNA, 432 bp, Homo sapiens
ctctgcccggccgccctgtctaggaggcagcaaatatgaagtctatggaccctgcctcaggttattcaaataacatcctcaccattgatcaaatgctcaagaaaaagcagacttgtatagtggccgatgcaactactattaaacaacatgtgaagagagctactgatacctataatttgggaattgcccttgaacaccgaaaagaaatgctaaacctctggcagaagatccgaggggatttgattgggatagactctagaaatgaggccttttatgacaccttttctacttatacatggtcctggaatgtttgccaagaattactttctcctaaggacttaaggttatatgatgcctatgtgaatagaaattcctcccataactgcagatcctcttcctcatcagataccagtgaatgtgacacagactcag

SEQ ID NO: 79930 - DNA, 2137 bp, Homo sapiens
cgcggctatgaaggggcggaggctgggcggcgttgctctgcgctctgcggctgacggcgcttttgtctccggtgagttttgtggcgggaagcttctgcgctggtgcttagtaaccgactttcctccggactcctgcacgacctgctcctacagccggcgatccactcccggctgttcccccggagggtccagaggcctttcagaaggagaaggcagctctgtttctctgcagaggagtagggtcctttcagccatgaagcatgtgttgaacctctacctgttaggtgtggtactgaccctactctccatcttcgttagagtgatggagtccctagagggcttactagagagcccatcgcctgggacctcctggaccaccagaagccaactagccaacacagagcccaccaagggccttccagaccatccatccagaagcatgtgataagacctccttccatactggccatattttggaacactgacctagacatgtccagatgggagtcccattcctagcagacaagctgagcaccgttgtaaccagagaactattactaggccttgaagaacctgtctaactggatgctcattgcctgggcaaggcctgtttaggccggttgcggtggctcatgcctgtaatcctagcactttgggaggctgaggtgggtggatcacctgaggtcaggagttcgagaccagcctcgccaacatggcgaaaccccatctctactaaaaatacaaaagttagctgggtgtggtggcagaggcctgtaatcccagctccttgggaggctgaggcgggagaattgcttgaacccggggacggaggttgcagtgagccgagatcgcactgctgtacccagcctgggccacagtgcaagactccatctcaaaaaaaaaagaaaagaaaaagcctgtttaatgcacaggtgtgagtggattgcttatggctatgagataggttgatctcgcccttaccccggggtctggtgtatgctgtgctttcctcagcagtatggctctgacatctcttagatgtcccaacttcagctgttgggagatggtgatattttcaaccctacttcctaaacatctgtctggggttcctttagtcttgaatgtcttatgctcaattatttggtgttgagcctctcttccacaagagctcctccatgtttggatagcagttgaagaggttgtgtgggtgggctgttgggagtgaggatggagtgttcagtgcccatttctcattttacattttaaagtcgttcctccaacatagtgtgtattggtctgaagggggtggtgggatgccaaagcctgctcaagttatggacattgtggccaccatgtggcttaaatgattttttctaactaataaagtggaatatatatttctactgtgtgtcatgttgacttctgctcttgaaattcgtggtagggagggtcttaatttctagacctgaggtttaattttaacatctcaatactttggagcaggaaagtgcttaaatcactttgtttaaaacatagtatcagtagacttctgaatttgggggcagaggcagttgggtctgccatgtatcaaccagttatgtgagcctaggccacgattattgcaggcctgtcatgactagatctgtaaagaagaagaaaaatgatcaccacttccagcccctctccttgagtctctggggcaaagaggactatcagtccaggaggctgtgggctttttcttttgtactcttcagcgtgttttacttacccaccaaaaaggctgcttaattcagattgttctcaaagtcagttggtaaagtgtccacaccacacagatgattatatctgctctcccagatctaagcaacttggcctttactcaaaagttggaggggtttttttttcttgtatccatcactcttgtacttcctgtcccacgtacaattgtattcactcctttgcccttcagaatatatttatttacactcccatctgggcgtgtgcatcattttattaacttgactgacttttgctaaagcgcaacaatgaagtacagtgtcttctgttaagccagttttgcttcctgagtgttcttaaaatgtcactaccctagaagcctgtgggttaagcatcactt

SEQ ID NO: 79931 - DNA, 1685 bp, Homo sapiens
cgcggctatgaaggggcggaggctgggcggcgttgctctgcgctctgcggctgacggcgcttttgtctccggtgagttttgtggcgggaagcttctgcgctggtgcttagtaaccgactttcctccggactcctgcacgacctgctcctacagccggcgatccactcccggctgttcccccggagggtccagaggcctttcagaaggagaaggcagctctgtttctctgcagaggagtagggtcctttcagccatgaagcatgtgttgaacctctacctgttaggtgtggtactgaccctactctccatcttcgttagagtgatggagtccctagagggcttactagagagcccatcgcctgggacctcctggaccaccagaagccaactagccaacacagagcccaccaagggccttccagaccatccatccagaagcatgtgataagacctccttccatactggccatattttggaacactgacctagacatgtccagatgggagtcccattcctagcagacaagctgagcaccgttgtaaccagagaactattactaggccttgaagaacctgtctaactggatgctcattgcctgggcaaggcctgtttaggccggttgcggtggctcatgcctgtaatcctagcactttgggaggctgaggtgggtggatcacctgaggtcaggagttcgagaccagcctcgccaacatggcgaaaccccatctctactaaaaatacaaaagttagctgggtgtggtggcagaggcctgtaatcccagctccttgggaggctgaggcgggagaattgcttgaacccggggacggaggttgcagtgagccgagatcgcactgctgtacccagcctgggccacagtgcaagactccatctcaaaaaaaaaagaaaagaaaaagcctgtttaatgcacaggtgtgagtggattgcttatggctatgagataggttgatctcgcccttaccccggggtctggtgtatgctgtgctttcctcagcagtatggctctgacatctcttagatgtcccaacttcagctgttgggagatggtgatattttcaaccctacttcctaaacatctgtctggggttcctttagtcttgaatgtcttatgctcaattatttggtgttgagcctctcttccacaagagctcctccatgtttggatagcagttgaagaggttgtgtgggtgggctgttgggagtgaggatggagtgttcagtgcccatttctcattttacattttaaagtcgttcctccaacatagtgtgtattggtctgaagggggtggtgggatgccaaagcctgctcaagttatggacattgtggccaccatgtggcttaaatgattttttctaactaataaagtggaatatatatttaaaaaaacagaagaaaaaaacagagaaaacacaacacaaacagagaaaaacaaatacacaacgagcgggagcgcgcggacagaagaggcaaaacacacagaggggcgggggaacacaggaaacaccgccccggcccggagcaccgagaagcacaccgcgacacaacgaacaggaggaaccaacacacaaaaaacagccagcgagcaccgagacaggcgaaaaaaacaagacaacacaaggaacagaacaaaaacacacacagagacaacaggacggaacaacccg

SEQ ID NO: 79932 - DNA, 1330 bp, Homo sapiens
cgcggctatgaaggggcggaggctgggcggcgttgctctgcgctctgcggctgacggcgcttttgtctccggtgagttttgtggcgggaagcttctgcgctggtgcttagtaaccgactttcctccggactcctgcacgacctgctcctacagccggcgatccactcccggctgttcccccggagggtccagaggcctttcagaaggagaaggcagctctgtttctctgcagaggagtagggtcctttcagccatgaagcatgtgttgaacctctacctgttaggtgtggtactgaccctactctccatcttcgttagagtgatggagtccctagagggcttactagagagcccatcgcctgggacctcctggaccaccagaagccaactagccaacacagagcccaccaagggccttccagaccatccatccagaagcatgtgataagacctccttccatactggccatattttggaacactgacctagacatgtccagatgggagtcccattcctagcagacaagctgagcaccgttgtaaccagagaactattactaggccttgaagaacctgtctaactggatgctcattgcctgggcaaggcctgtttaggccggttgcggtggctcatgcctgtaatcctagcactttgggaggctgaggtgggtggatcacctgaggtcaggagttcgagaccagcctcgccaacatggcgaaaccccatctctactaaaaatacaaaagttagctgggtgtggtggcagaggcctgtaatcccagctccttgggaggctgaggcgggagaattgcttgaacccggggacggaggttgcagtgagccgagatcgcactgctgtacccagcctgggccacagtgcaagactccatctcaaaaaaaaaagaaaagaaaaagcctgtttaatgcacaggtgtgagtggattgcttatggctatgagataggttgatctcgcccttaccccggggtctggtgtatgctgtgctttcctcagcagtatgaacatctgtctggggttcctttagtcttgaatgtcttatgctcaattatttggtgttgagcctctcttccacaagagctcctccatgtttggatagcagttgaagaggttgtgtgggtgggctgttgggagtgaggatggagtgttcagtgcccatttctcattttacattttaaagtcgttcctccaacatagtgtgtattggtctgaagggggtggtgggatgccaaagcctgctcaagttatggacattgtggccaccatgtggcttaaatgattttttctaactaataaagtggaatatatattt

SEQ ID NO: 79933 - DNA, 1419 bp, Homo sapiens
gctacgccgaacaaccattaacgcgactagcgatcacgtacggctctgtgcggggcgtttttacaacttcagtggcaacgcagtgctgtgagcagttttgtggcgggaagcttctgcgctggtgcttagtaaccgactttcctccggactcctgcacgacctgctcctacagccggcgatccactcccggctgttcccccggagggtccagaggcctttcagaaggagaaggcagctctgtttctctgcagaggagtagggtcctttcagccatgaagcatgtgttgaacctctacctgttaggtgtggtactgaccctactctccatcttcgttagagtgatggagtccctagagggcttactagagagcccatcgcctgggacctcctggaccaccagaagccaactagccaacacagagcccaccaagggccttccagaccatccatccagaagcatgtgataagacctccttccatactggccatattttggaacactgacctagacatgtccagatgggagtcccattcctagcagacaagctgagcaccgttgtaaccagagaactattactaggccttgaagaacctgtctaactggatgctcattgcctgggcaaggcctgtttaggccggttgcggtggctcatgcctgtaatcctagcactttgggaggctgaggtgggtggatcacctgaggtcaggagttcgagaccagcctcgccaacatggcgaaaccccatctctactaaaaatacaaaagttagctgggtgtggtggcagaggcctgtaatcccagctccttgggaggctgaggcgggagaattgcttgaacccggggacggaggttgcagtgagccgagatcgcactgctgtacccagcctgggccacagtgcaagactccatctcaaaaaaaaaagaaaagaaaaagcctgtttaatgcacaggtgtgagtggattgcttatggctatgagataggttgatctcgcccttaccccggggtctggtgtatgctgtgctttcctcagcagtatggctctgacatctcttagatgtcccaacttcagctgttgggagatggtgatattttcaaccctacttcctaaacatctgtctggggttcctttagtcttgaatgtcttatgctcaattatttggtgttgagcctctcttccacaagagctcctccatgtttggatagcagttgaagaggttgtgtgggtgggctgttgggagtgaggatggagtgttcagtgcccatttctcattttacattttaaagtcgttcctccaacatagtgtgtattggtctgaagggggtggtgggatgccaaagcctgctcaagttatggacattgtggccaccatgtggcttaaatgattttttctaactaataaagtggaatatatattt

SEQ ID NO: 79934 - DNA, 1290 bp, Homo sapiens
cgcggctatgaaggggcggaggctgggcggcgttgctctgcgctctgcggctgacggcgcttttgtctccggtgaggtccagaggcctttcagaaggagaaggcagctctgtttctctgcagaggagtagggtcctttcagccatgaagcatgtgttgaacctctacctgttaggtgtggtactgaccctactctccatcttcgttagagtgatggagtccctagagggcttactagagagcccatcgcctgggacctcctggaccaccagaagccaactagccaacacagagcccaccaagggccttccagaccatccatccagaagcatgtgataagacctccttccatactggccatattttggaacactgacctagacatgtccagatgggagtcccattcctagcagacaagctgagcaccgttgtaaccagagaactattactaggccttgaagaacctgtctaactggatgctcattgcctgggcaaggcctgtttaggccggttgcggtggctcatgcctgtaatcctagcactttgggaggctgaggtgggtggatcacctgaggtcaggagttcgagaccagcctcgccaacatggcgaaaccccatctctactaaaaatacaaaagttagctgggtgtggtggcagaggcctgtaatcccagctccttgggaggctgaggcgggagaattgcttgaacccggggacggaggttgcagtgagccgagatcgcactgctgtacccagcctgggccacagtgcaagactccatctcaaaaaaaaaagaaaagaaaaagcctgtttaatgcacaggtgtgagtggattgcttatggctatgagataggttgatctcgcccttaccccggggtctggtgtatgctgtgctttcctcagcagtatggctctgacatctcttagatgtcccaacttcagctgttgggagatggtgatattttcaaccctacttcctaaacatctgtctggggttcctttagtcttgaatgtcttatgctcaattatttggtgttgagcctctcttccacaagagctcctccatgtttggatagcagttgaagaggttgtgtgggtgggctgttgggagtgaggatggagtgttcagtgcccatttctcattttacattttaaagtcgttcctccaacatagtgtgtattggtctgaagggggtggtgggatgccaaagcctgctcaagttatggacattgtggccaccatgtggcttaaatgattttttctaactaataaagtggaatatatattt

SEQ ID NO: 79935 - DNA, 1141 bp, Homo sapiens
tagttaaccgactttcctcgacgcgacgcagcggcgatccaactcccggtgtccccggaagtgatggagtccctagagggcttactagagagcccatcgcctgggacctcctggaccaccagaagccaactagccaacacagagcccaccaagggccttccagaccatccatccagaagcatgtgataagacctccttccatactggccatattttggaacactgacctagacatgtccagatgggagtcccattcctagcagacaagctgagcaccgttgtaaccagagaactattactaggccttgaagaacctgtctaactggatgctcattgcctgggcaaggcctgtttaggccggttgcggtggctcatgcctgtaatcctagcactttgggaggctgaggtgggtggatcacctgaggtcaggagttcgagaccagcctcgccaacatggcgaaaccccatctctactaaaaatacaaaagttagctgggtgtggtggcagaggcctgtaatcccagctccttgggaggctgaggcgggagaattgcttgaacccggggacggaggttgcagtgagccgagatcgcactgctgtacccagcctgggccacagtgcaagactccatctcaaaaaaaaaagaaaagaaaaagcctgtttaatgcacaggtgtgagtggattgcttatggctatgagataggttgatctcgcccttaccccggggtctggtgtatgctgtgctttcctcagcagtatggctctgacatctcttagatgtcccaacttcagctgttgggagatggtgatattttcaaccctacttcctaaacatctgtctggggttcctttagtcttgaatgtcttatgctcaattatttggtgttgagcctctcttccacaagagctcctccatgtttggatagcagttgaagaggttgtgtgggtgggctgttgggagtgaggatggagtgttcagtgcccatttctcattttacattttaaagtcgttcctccaacatagtgtgtattggtctgaagggggtggtgggatgccaaagcctgctcaagttatggacattgtggccaccatgtggcttaaatgattttttctaactaataaagtggaatatatattt

SEQ ID NO: 79936 - DNA, 2479 bp, Homo sapiens
gctacgccgaacaaccattaacgcgactagcgatcacgtacggctctgtgcggggcgtttttacaacttcagtggcaacgcagtgctgtgagcagttttgtggcgggaagcttctgcgctggtgcttagtaaccgactttcctccggactcctgcacgacctgctcctacagccggcgatccactcccggctgttcccccggaggtgagcggccctgtgggcttccccggctccccacccccatcgctagagtgctcgccgcgctagcagcctcgcgttccagggctgggggtgcgccgccgggatcctctctgatcgcccacgccccatctggggtccccattcagccgtcagccctgttttgtcctaaggtggtcctaactaggatccacgtggcccatcccacgcccacaggtgctgagttaggcatccctgccatgccctcccagagcaccttcacgatctccttgctgtcccaacacttagcgtgttgcgtgttaactaccctttgtctataaggtttgcaatgtggccctagtatcttccagggtacctaacacattgcagatattcatggtatgtttgttaaataaatgaacttgatagatttgaccctcatagagttatttggacttgcaaaaagtttgtagttaactccaatctgtgatgtgggagagacttctaggcaggttcctttctccagggcatgttcttatatttcccattacccaccacccccctgcaaaaggactgggcctatttcaggaaggtgactgatgcctgcactgtagcacaggggttgtgcattgtgccttgcaggaacaaaattttcaataaagtaaatgtttgtttgtttgtttttgagacggagttttgcttttgttgccgaggctggagtgcaatggcgcgatcttggctcactgcaacctctgcctcccgggttcaagcaattctgcctcagcctcccgagtagctgggattacaggcatgtgccactatgcccggctaatttttgtatttgtagtagagacagggtttcaccagcctcgccaacatggcgaaaccccatctctactaaaaatacaaaagttagctgggtgtggtggcagaggcctgtaatcccagctccttgggaggctgaggcgggagaattgcttgaacccggggacggaggttgcagtgagccgagatcgcactgctgtacccagcctgggccacagtgcaagactccatctcaaaaaaaaaagaaaagaaaaagcctgtttaatgcacaggtgtgagtggattgcttatggctatgagataggttgatctcgcccttaccccggggtctggtgtatgctgtgctttcctcagcagtatggctctgacatctcttagatgtcccaacttcagctgttgggagatggtgatattttcaaccctacttcctaaacatctgtctggggttcctttagtcttgaatgtcttatgctcaattatttggtgttgagcctctcttccacaagagctcctccatgtttggatagcagttgaagaggttgtgtgggtgggctgttgggagtgaggatggagtgttcagtgcccatttctcattttacattttaaagtcgttcctccaacatagtgtgtattggtctgaagggggtggtgggatgccaaagcctgctcaagttatggacattgtggccaccatgtggcttaaatgattttttctaactaataaagtggaatatatatttctactgtgtgtcatgttgacttctgctcttgaaattcgtggtagggagggtcttaatttctagacctgaggtttaattttaacatctcaatactttggagcaggaaagtgcttaaatcactttgtttaaaacatagtatcagtagacttctgaatttgggggcagaggcagttgggtctgccatgtatcaaccagttatgtgagcctaggccacgattattgcaggcctgtcatgactagatctgtaaagaagaagaaaaatgatcaccacttccagcccctctccttgagtctctggggcaaagaggactatcagtccaggaggctgtgggctttttcttttgtactcttcagcgtgttttacttacccaccaaaaaggctgcttaattcagattgttctcaaagtcagttggtaaagtgtccacaccacacagatgattatatctgctctcccagatctaagcaacttggcctttactcaaaagttggaggggtttttttttcttgtatccatcactcttgtacttcctgtcccacgtacaattgtattcactcctttgcccttcagaatatatttatttacactcccatctgggcgtgtgcatcattttattaacttgactgacttttgctaaagcgcaacaatgaagtacagtgtcttctgttaagccagttttgcttcctgagtgttcttaaaatgtcactaccctagaagcctgtgggttaagcatcactt

SEQ ID NO: 79937 - DNA, 1737 bp, Homo sapiens
cgcggctatgaaggggcggaggctgggcggcgttgctctgcgctctgcggctgacggcgcttttgtctccggtgagttttgtggcgggaagcttctgcgctggtgcttagtaaccgactttcctccggactcctgcacgacctgctcctacagccggcgatccactcccggctgttcccccggagttgattatgagatcaatgcccacaaatactggaatgacttctacaaaatccacgaaaatgggtttttcaaggatagacattggctttttaccgaattccctgagctggcacctagccaaaatcaaaatcatttgaaggattggttcttggagaacaagagtgaagtatgtgaatgtagaaacaatgaggatggacctggtttaataatggaagaacagcacaagtgttcttcgaagagccttgaacataaaacacagacacctcctgtggaggagaatgtaactcagaaaattagtgacctggaaatttgtgctgatgagtttcctggatcctcagccacctaccgaatactggaggttggctgtggtgtgggaaacacagtctttccaattttacaaacgaacaatgacccaggactctttgtttattgctgtgatttttcttccacagctatagaactggtccagacaaattcagaatatgatccttctcggtgttttgcctttgttcacgacctgtgtgatgaagagaagagttacccagtgcccaagggcagtcttgatattatcattctcatatttgttctttcagcaattgttccagacaagatgcagaaggctatcaacaggctgagcaggcttctgaaacctggggggatggtacttctgcgagattacggccgctatgacatggctcagcttcggtttaaaaaaggtcagtgtctatctggaaatttctatgtgagaggtgatggaaccagagtttacttcttcacacaagaggaactggacacgcttttcaccactgctggactggaaaaagttcagaacctggtggaccgccgactgcaggtgaaccgagggaagcaactgacaatgtaccgggtttggattcagtgcaaatactgcaagccccttctgtccagcaccagctaagaggcacctgctgccaacacgatgcaagcccgttgtgtttccgagctttttttaaaaaaaaatttgtagcaccgggcatggtgcatgcctgtaatcccagccactcaggaggctgaggcagggaggatccattgagcccaggagtccagcctgggcaaaatagcgagagaccctgaatctgaaagtaatgataaaataaaaagaatataaatgaggtctcgttgatgctggacaattcaagaattcagacttgaaccttaaacctaggaaaagttactttgtatcaggattctaacaattatgcttcatatttgtgaagtcctttaaaacataattttctcaagttctttctttgagacctcaatctgtcttagcattttgtaactaataactgaaattttattcaaaggaattgtaaaccttaaaccaccaatttatttccatgtgaaaaagtgttatatatgacaagtgttttttgattgtaattgcgttaaatcttttgagagtgtaaatgccgggctaggcaattgcagttaatacatacaggggttagtgaagggcttattaagttgtaggggaagcaagctgggaagaatcagatcagatattttcctgac

SEQ ID NO: 79938 - DNA, 1117 bp, Homo sapiens
cggtgtcatggccggctcctaccctgaaggtgcacctgcaatcctcgccgataagaggcagcagttcggaagccggttcctgagcgatccggcgcgcgtcttccaccacaatgcctgggacaatgtggagtggtcggaagagcaagccgcggcggcggagagaaaagtccaggagaacagtatccagcgggtgtgccaggagaaacaagttgattatgagatcaatgcccacaaatactggaatgacttctacaaaatccacgaaaatgggtttttcaaggatagacattggctttttaccgaattccctgagctggcacctagccaaaatcaaaatcatttgaaggattggttcttggagaacaagagtgaagtatgtgaatgtagaaacaatgaggatggacctggtttaataatggaagaacagcacaagtgttcttcgaagagccttgaacataaaacacagacacctcctgtggaggagaatgtaactcagaaaattagtgacctggaaatttgtgctgatgagtttcctggatcctcagccacctaccgaatactggaggttggctgtggtgtgggaaacacagtctttccaattttacaaacgaacaatgacccaggactctttgtttattgctgtgatttttcttccacagctatagaactggtccaggtgagtacgatgggaaattacctattggtaatttccactgattaaagggaaaaggttctcctaaaaatcaaggtctctggctgtgttcttatacggtctgtgttcttacggtctaaaagtaaaagatttactgataacgagcataccttgttttattgcagttcactttatcacactgtacagatgtcatatctgttcatatattgaaagtctgtggcaaccctgcatcaagcaagcctaccagtgccgtttctccaccaccatatgctcacttagtgtctgtgtgtcatgctttggtgattctcagaatatttcagacttttttactattatgtatgttatagtgtgtgacgttactgttgtacttggtttggggttccacaaatcacatctgtgtaagacggtcaacttaataaatgcatgtgttgtgactgccccacc

SEQ ID NO: 79939 - DNA, 2180 bp, Homo sapiens
gctacgccgaacaaccattaacgcgactagcgatcacgtacggctctgtgcggggcgtttttacaacttcagtggcaacgcagtgctgtgagcagttttgtggcgggaagcttctgcgctggtgcttagtaaccgactttcctccggactcctgcacgacctgctcctacagccggcgatccactcccggctgttcccccggaggtgagcggccctgtgggcttccccggctccccacccccatcgctagagtgctcgccgcgctagcagcctcgcgttccagggctgggggtgcgccgccgggatcctctctgatcgcccacgccccatctggggtccccattcagccgtcagccctgttttgtcctaaggtggtcctaactaggatccacgtggcccatcccacgcccacaggtgctgagttaggcatccctgccatgccctcccagagcaccttcacgatctccttgctgtcccaacacttagcgtgttgcgtgttaactaccctttgtctataaggtttgcaatgtggccctagtatcttccagggtacctaacacattgcagatattcatggtatgtttgttaaataaatgaacttgatagatttgaccctcatagagttatttggacttgcaaaaagtttgtagttaactccaatctgtgatgtgggagagacttctaggcaggttcctttctccagggcatgttcttatatttcccattacccaccacccccctgcaaaaggactgggcctatttcaggaaggtgactgatgcctgcactgtagcacaggggttgtgcattgtgccttgcaggaacaaaattttcaataaagtaaatgtttgtttgtttgtttttgagacggagttttgcttttgttgccgagatcgcactgctgtacccagcctgggccacagtgcaagactccatctcaaaaaaaaaagaaaagaaaaagcctgtttaatgcacaggtgtgagtggattgcttatggctatgagataggttgatctcgcccttaccccggggtctggtgtatgctgtgctttcctcagcagtatggctctgacatctcttagatgtcccaacttcagctgttgggagatggtgatattttcaaccctacttcctaaacatctgtctggggttcctttagtcttgaatgtcttatgctcaattatttggtgttgagcctctcttccacaagagctcctccatgtttggatagcagttgaagaggttgtgtgggtgggctgttgggagtgaggatggagtgttcagtgcccatttctcattttacattttaaagtcgttcctccaacatagtgtgtattggtctgaagggggtggtgggatgccaaagcctgctcaagttatggacattgtggccaccatgtggcttaaatgattttttctaactaataaagtggaatatatatttctactgtgtgtcatgttgacttctgctcttgaaattcgtggtagggagggtcttaatttctagacctgaggtttaattttaacatctcaatactttggagcaggaaagtgcttaaatcactttgtttaaaacatagtatcagtagacttctgaatttgggggcagaggcagttgggtctgccatgtatcaaccagttatgtgagcctaggccacgattattgcaggcctgtcatgactagatctgtaaagaagaagaaaaatgatcaccacttccagcccctctccttgagtctctggggcaaagaggactatcagtccaggaggctgtgggctttttcttttgtactcttcagcgtgttttacttacccaccaaaaaggctgcttaattcagattgttctcaaagtcagttggtaaagtgtccacaccacacagatgattatatctgctctcccagatctaagcaacttggcctttactcaaaagttggaggggtttttttttcttgtatccatcactcttgtacttcctgtcccacgtacaattgtattcactcctttgcccttcagaatatatttatttacactcccatctgggcgtgtgcatcattttattaacttgactgacttttgctaaagcgcaacaatgaagtacagtgtcttctgttaagccagttttgcttcctgagtgttcttaaaatgtcactaccctagaagcctgtgggttaagcatcactt

SEQ ID NO: 79940 - DNA, 1443 bp, Homo sapiens
gctacgccgaacaaccattaacgcgactagcgatcacgtacggctctgtgcggggcgtttttacaacttcagtggcaacgcagtgctgtgagcagttttgtggcgggaagcttctgcgctggtgcttagtaaccgactttcctccggactcctgcacgacctgctcctacagccggcgatccactcccggctgttcccccggaggtgagcggccctgtgggcttccccggctccccacccccatcgctagagtgctcgccgcgctagcagcctcgcgttccagggctgggggtgcgccgccgggatcctctctgatcgcccacgccccatctggggtccccattcagccgtcagccctgttttgtcctaaggtggtcctaactaggatccacgtggcccatcccacgcccacaggtgctgagttaggcatccctgccatgccctcccagagcaccttcacgatctccttgctgtcccaacacttagcgtgttgcgtgttaactaccctttgtctataaggtttgcaatgtggccctagtatcttccagggtacctaacacattgcagatattcatggtatgtttgttaaataaatgaacttgatagatttgaccctcatagagttatttggacttgcaaaaagtttgtagttaactccaatctgtgatgtgggagagacttctaggcaggttcctttctccagggcatgttcttatatttcccattacccaccacccccctgcaaaaggactgggcctatttcaggaaggtgactgatgcctgcactgtagcacaggggttgtgcattgtgccttgcaggaacaaaattttcaataaagtaaatgtttgtttgtttgtttttgagacggagttttgcttttgttgccgagatcgcactgctgtacccagcctgggccacagtgcaagactccatctcaaaaaaaaaagaaaagaaaaagcctgtttaatgcacaggtgtgagtggattgcttatggctatgagataggttgatctcgcccttaccccggggtctggtgtatgctgtgctttcctcagcagtatggctctgacatctcttagatgtcccaacttcagctgttgggagatggtgatattttcaaccctacttcctaaacatctgtctggggttcctttagtcttgaatgtcttatgctcaattatttggtgttgagcctctcttccacaagagctcctccatgtttggatagcagttgaagaggttgtgtgggtgggctgttgggagtgaggatggagtgttcagtgcccatttctcattttacattttaaagtcgttcctccaacatagtgtgtattggtctgaagggggtggtgggatgccaaagcctgctcaagttatggacattgtggccaccatgtggcttaaatgattttttctaactaataaagtggaatatatattt

SEQ ID NO: 79941 - DNA, 956 bp, Homo sapiens
cggtgtcatggccggctcctaccctgaaggtgcacctgcaatcctcgccgataagaggcagcagttcggaagccggttcctgagcgatccggcgcgcgtcttccaccacaatgcctgggacaatgtggagtggtcggaagagcaagccgcggcggcggagagaaaagtccaggagaacagtatccagcgggtgtgccaggagaaacaagttgattatgagatcaatgcccacaaatactggaatgacttctacaaaatccacgaaaatgggtttttcaaggatagacattggctttttaccgaattccctgagctggcacctagccaaaatcaaaatcatttgaaggattggttcttggagaacaagagtgaagtatgtgaatgtagaaacaatgaggatggacctggtttaataatggaagaacagcacaagtgttcttcgaagagccttgaacataaaacacagacacctcctgtggaggagaatgtaactcagaaaattagtgacctggaaatttgtgctgatgagtttcctggatcctcagccacctaccgaatactggaggttggctgtggtgtgggaaacacagtctttccaattttacaaacgaacaatgacccaggactctttgtttattgctgtgatttttcttccacagctatagaactggtccagttcactttatcacactgtacagatgtcatatctgttcatatattgaaagtctgtggcaaccctgcatcaagcaagcctaccagtgccgtttctccaccaccatatgctcacttagtgtctgtgtgtcatgctttggtgattctcagaatatttcagacttttttactattatgtatgttatagtgtgtgacgttactgttgtacttggtttggggttccacaaatcacatctgtgtaagacggtcaacttaataaatgcatgtgttgtgactgccccacc

SEQ ID NO: 79942 - DNA, 1016 bp, Homo sapiens
ataaaaagatattaattccactgcttcaagatcaaaaatctccatatggccaaaaaaaaatcacagttgctactcataacataaaaggctaacttcaaagaacttcaaattcataagaaaaaaataacctatataaaaatggacaaagggtatgaacagacagttctcagaaacattaaaaaatattcaacctcattcctcataaaagatccaagttaaaactctcctcagatatttatcttttcatattatattgaccaagatgaaaaaacatgggtatactcataagttacagataggtttgtaaattggttcaccctctacagaggaaatttggcaataattaccaaaagaacagacttcacaccttttgacctagcaattccagtcctagggcaccatctaggatatacagatatttttgcacatatgccaaatgccactcctgagggacccagaaaaaagtctaaacaaacaaacaaatggtttggcaataacctcataaattatatacaaatccttctataataaaatatacttatttattatgtctttttgttgtataattcaaattaaaatgtattaccttcttttttaaatatgcataaaggcagcaaatatgaagtctatggaccctgcctcaggttattcaaataacatcctcaccattgatcaaatgctcaagaaaaagcagacttgtatagtggccgatgcaactactattaaacaacatgtgaagagagctactgatacctataatttgggaattgcccttgaacaccgaaaagaaatgctaaacctctggcagaagatccgaggggatttgattgggatagactctagaaatgaggccttttatgacaccttttctacttatacatggtcctggaatgtttgccaagaattactttctcctaaggacttaaggttatatgatgcctatgtgaatagaaattcctcccataactgcagatcctcttcctcatcagataccagtgaatgtgacacagactcag

SEQ ID NO: 79943 - DNA, 983 bp, Homo sapiens
cggtgtcatggccggctcctaccctgaaggtgcacctgcaatcctcgccgataagaggcagcagttcggaagccggttcctgagcgatccggcgcgcgtcttccaccacaatgcctgggacaatgtggagtggtcggaagagcaagccgcggcggcggagagaaaagtccaggagaacagtatccagcgggtgtgccaggagaaacaagttgattatgagatcaatgcccacaaatactggaatgacttctacaaaatccacgaaaatgggtttttcaaggatagacattggctttttaccgaattccctgagctggcacctagccaaaatcaaaatcatttgaaggattggttcttggagaacaagagtgaagtatgtgaatgtagaaacaatgaggatggacctggtttaataatggaagaacagcacaagtgttcttcgaagagccttgaacataaaacacagacacctcctgtggaggagaatgtaactcagaaaattagtgacctggaaatttgtgctgatgagtttcctggatcctcagccacctaccgaatactggaggttggctgtggtgtgggaaacacagtctttccaattttacaaacgaacaaaaatttctaagaaaatggcaagtcctagtactaacactgaagaaaagagattgttctactcttgaagttacagtctgaggaacccacctcaaatgggagattgacttagcttcaagttatggccattaatcatcaatatcatcaatgaatgtaaaactgaatgtagatggcatctttgccacagcctctttatgccatttaaataagatcgctgtgttcagtatcttactagaacccacttgttcatgtaattcactggcttagaattggcatgttttctactgcctgtgaatcaggtttaaattgttgggcatagttttcaaagtcctctacaagagtgtgccctataaagtatgtcctcttatccc

SEQ ID NO: 79944 - DNA, 709 bp, Homo sapiens
gctacgccgaacaaccattaacgcgactagcgatcacgtacggctctgtgcggggcgtttttacaacttcagtggcaacgcagtgctgtgagcagttttgtggcgggaagcttctgcgctggtgcttagtaaccgactttcctccggactcctgcacgacctgctcctacagccggcgatccactcccggctgttcccccggagggtccagaggcctttcagaaggagaaggcagctctgtttctctgcagaggagtagggtcctttcagccatgaagcatgtgttgaacctctacctgttaggcagcaaatatgaagtctatggaccctgcctcaggttattcaaataacatcctcaccattgatcaaatgctcaagaaaaagcagacttgtatagtggccgatgcaactactattaaacaacatgtgaagagagctactgatacctataatttgggaattgcccttgaacaccgaaaagaaatgctaaacctctggcagaagatccgaggggatttgattgggatagactctagaaatgaggccttttatgacaccttttctacttatacatggtcctggaatgtttgccaagaattactttctcctaaggacttaaggttatatgatgcctatgtgaatagaaattcctcccataactgcagatcctcttcctcatcagataccagtgaatgtgacacagactcag

SEQ ID NO: 79945 - DNA, 547 bp, Homo sapiens
gctacgccgaacaaccattaacgcgactagcgatcacgtacggctctgtgcggggcgtttttacaacttcagtggcaacgcagtgctgtgagcagttttgtggcgggaagcttctgcgctggtgcttagtaaccgactttcctccggactcctgcacgacctgctcctacagccggcgatccactcccggctgttcccccggagttgattatgagatcaatgcccacaaatactggaatgacttctacaaaatccacgaaaatgggtttttcaaggatagacattggctttttaccgaattccctgagctggcacctagccaaaatcaaaatcatttgaaggattggttcttggagaacaagagtgaacccgtctccactcaaaatacaaaaaaaaattagccagtcgtggtggcaggcacctgtagtcccagctactcgggaggctgaggcaggagaatggcatgaacccaggaggcggagcttgcagtgagcggagatcgcaccactgcactccagcctgggcgacagagtgagactccgtctca

SEQ ID NO: 79946 - DNA, 280 bp, Homo sapiens
cagcctcccaaagtgctgggattacaggcgtgagccatggctcctggccctatagctgtttttaaaccccttgtggaaatgacattccagttctgtattcattactggaatccactgtttctcaaaggtttcatataatatatactttgccaatttagcccacagtattcattaacaggattaagtaaaacattagcctcattactaatatacatttaaatatttctacaatttgttctcagaaatttctaagaaaatggcaagtcctagtactaacact

SEQ ID NO: 79947 - DNA, 432 bp, Homo sapiens
ctactagatgcatcacaaaagaggcagcgtggatgtgggttcttaaggcagagtaggatgtttgaaaggtagagatgggggccttcctggtggaagggactgcatgagtacaggcgtaggagcaggtaatgatgaatttggaggcaaatgagtagtatttttgtctggagcacaggatttccatcagtgtcctgagaaaggagtaaagaggctacaaggccagcttcttcactcatatcatctcgtactgcttttgggacactgggcacaaacacaccgacctatttctaagatgatccatttgagcatctgcctccctcacattaatgtaggttgcaaaaaggcagggctcatctctttttttttttttttttttgagatagagttttgctctttttgcccaggctggagtgcaacggcgtgatctcggct

SEQ ID NO: 79948 - DNA, 803 bp, Homo sapiens
gtaacaatccctattttaaaattcccctaacaataatagaactgccagcatacttttctctttcagttgtagatgaatacattcgagagaatatgagctgtatttcatcctagattttaatattttcagatgtgactgtatttcctgatcattggtccaagttgtcctaaaagaaatttttctctccagacctaacagttttaactgcaagagtttactgtgggttatgttaatctgaattttaatagggccactaagaatctgagtgccttaggagattacccttatacccactgccatcacatccagtcaggcctgttgtgctctatataaatcttcccagctgaggggcaggtgcgggctaaaatccaactgcaattggctcccagacataattttatattttacagagaagcatcttattggcttatatgtgtttaaagaatggtctggcttatacatcttcagaaaatgagaattaaaaagtcaaaataattcttgacatctacagattgaacaaagaacttagaagaaataatactttatcttttcatcctggcattcctgagagaagagaaattgattgtttatcatgttggtttaatttttcaacccagacaatctgcagcaaggcacatggaccccaattttgatatcgtccatacagttttcattctatgcatggagctaattactgactttgcctgtaaagagaggattgtgtgcctaaattttgtctaacaaatgcaagcgtagaatgacatttactaatatttctatttcttccataggctaaataatag

SEQ ID NO: 79949 - DNA, 787 bp, Homo sapiens
gccaactcagtggagaaattttgggattttaggtcactctaagatttaaaaaaatagtttgattcgttaaacaaggctattgaagttaaattgatatttccttaaagatgattttagagaaaaattccttggcgagcttcgagaatgcgttcatggcttctgttgcctgtacctactgctatacttttttatgtggactaatttgtcttatttgaaaatttgattacaatatcaaatcctagatgaagcccttccattcttagggtgattctaaggagtactgataactaagctcttaaaaggcgaggaaatagtttattctactgcagattagggtaatcttaatacagacactctgatggtaattctaagcagtgttgataactaagcttttaaaagataaggaaatagtttattctacttcagagtagggtaattttaatgccctgaatatactctgaatcttttatagatagatttctggatgatttggcccaaaaaatctgataagctttggggaattttttaatttttttttctcttaaagagaaatcagaaatgtgggatttttttaaaaatttattttcagtagatattggagattatgctttgtacattaaatccagtttgatttttaagtgataattttcaattaaagactttttaataagacaactaaaaaattaaattttagtcaattacaataatattttttggagaagcattcccagatgtgcttttgacggggagttgatttcattagttgtttgggttgtttaatccagaa

SEQ ID NO: 79950 - DNA, 626 bp, Homo sapiens
gccaggagttcgagaccaggctgggcaacatagtgagatcctgtctctacaaaaaaaaaaaaaaaagaaaaaaatcagccaagcgtggtgacttggacctacaagtcacagctacttggcaggctgaggtgggaggatcacttgagcccgggagtttgaggctgcagtgagctatgatcatgccactacaccccagcctggatgacagagggagatcttgtctcaaaacaaaaccaaaagaattctggggaatggtagaaatgttctctgtgtggcctgtccagaagagtagccactaaccaaggccctgcccggctggcaggaaaaacaaaatataatttgggcagcctgggcaacatggacccccatctctacagagaataaaaaattggctgggtgtggtggtgtgtgcctgtggtttcagttatttgggaggctgaggcaggaagatctcttgatcctagaaggtggaggctgcagcgaactgtgatgattgtactccagtctgggttacagagtgagatccagagaacgaaagggagagagagagagtgagagagagagagagaggaagaaaggaagaaagaaagaaggaagaagaaagaaaaggaaggaaggaagggaga

SEQ ID NO: 79951 - DNA, 560 bp, Homo sapiens
tccagctaacattaagtcccggatcctgggcaagtgcacccataaagatatagcctgatcttaacaaacatttcgttctccttggacagacatccttagaattcccactcatagatgtgtcccagattcctccctatggaaattagcaagatgcttggttatctcttaaatcagaccttgtactgctatctaggggctatgctgagatctctgggcctggagggttcagagcagtgaagggggtggctgctgagaagaagctgcatacctgtgtgaggccattgctccaggttaagtcattgaaatgtttaatgcagagcagcttggttggggatttgagaggactgcctcttagaaaggtttaggaggatatgaggggttcagagttctcttttatatctgtccagatgtcctcattgtaccatgtctggagccaacttgactttataacctttaattaatttagataacacatttccgtactgtttaaggccttttgaggcaagatattgtatttgtactggtaaacctcagtgttgattaaatgagatatgggtctt

SEQ ID NO: 79952 - DNA, 398 bp, Homo sapiens
tagcttcatagttttgaggattttactgctgagtaacaagttttggaaagcagaaaaaataaatgaaaatataaataaataatatagagaaattaacttttagaaaacatagatcaattaatgtagatagtatagatcaattaacttttagaaaacatagcaagtaatacatgaaaagtatataaaacatacatggacagtttaatgaatgaataaaaagtgagcacccatgtagccaccatcaaaatattgttgttttttaatttttttgagacagggtctcactatgtcacccaggctacagtgcagtggcacagtcttggctcactgcaacctctgccccctgggttcaagtgattctcctgcctcagcctcctgcgtagctgggattacaggtg

SEQ ID NO: 79953 - DNA, 369 bp, Homo sapiens
  misc_feature (41)..(41): n is a, c, g, or t
attcgcggccgcgtcgacgtagtgatggggtcttgctatgnggcccaggctggtgttggactcctggccttaagcaatccccctaccctggcctgccaaagcactgggaatacacatatgagccacggtgcctggcctgaagtttttaatagaaatgtttaatgagttttcattcttgagtttgttgggaagcagcttttttggaagcctcccgaggaccacggccgagccctcaaggtatggacgcgtgagtgtgatggctatgttaggacaactccccttatttgcaaacttcctcactttctgttgcccgtcagcagccgggggagggggtgggggagcaagaactagagaggaaagagaccccct

SEQ ID NO: 79954 - DNA, 533 bp, Homo sapiens
ctgattctgcaaggatgaacactgcagcccaaggtcaatatctaatcaaggagatggcttagaggagcctgactaaagtttggtcgaggagaaatcttgtcagactctgtcattctcatatgtaagggatgagctgctcttcatctgagcaaaggaaaagaataaattctgggtgacaaaacaattagactgtctaggttttctgtttgccttccatcatattcattctcctcacttccctgccctgttctataccccaaagctgacctctttggacggcaccacctgggctctcctcagctggtttccatttgagtttggacagcgggaggcattcagggagatgggaggcaggaggaaaaagacatcagggtatattttctctgttctttctctgtttggggctgagtatctggtggtggttgtgtttctccacaattgcagctcttggcaagcagtcccttctccatggctccagctccatgggctctggaaacacttttctcctttgctatgtagcctagagagagcgc

SEQ ID NO: 79955 - DNA, 444 bp, Homo sapiens
ttttttctaattctgcaaagaaagttaatggtaacttgacgggaatagcattgaatctataaattactttggacagtatggccattttcatgatactgattcttcctatccatgagcatgaatttttttttcaatttgtttgtgtcctctcttatttccttgctttagcatcctagagaggaagtctcttctaattattttttattcagaactttctgacttatcctgggcaataaagaccattctcattaaatgtgcatttttataagcagttttgcacagatttaatggaagctaaacagaacatggtctccttcttcagtgataaccaaggacctgatacaatctcaaacaggaatcttgggcatccacacctttccatgttcaacagccacaaaaggaacatttgtaatgctgcaggttataaattcatggtgacaattt

SEQ ID NO: 79956 - DNA, 370 bp, Homo sapiens
gacaaaattttccgtagtcattatttatcaaggatgtggagagcaataaattaatgctttaaacctcaagtactatgtttgaagtgtatacttctctgttgaggtgtctcagaggcgttagggtcataagtgttcctctggataatgacaggaatagaacaaggtgaagaaggtatgccaaaaccacaactaagtgctatgagcatttcaccttgattctgagtaaaggagtctcgcttaacagctattaactgttaacaagccacctaaagtttagactttgtacaccaatgtctttctctgtaaaatatatctttgggctgggcacggtggctatgcctgtaatcccagcactttgggaggctaaggc

SEQ ID NO: 79957 - DNA, 275 bp, Homo sapiens
ggggacgaggggacgaggggcccatgcccagtcagggaagccgaaggcctggaggggcttccgggagcaggggctggagttcctctgccaggcaggaggctggcaccagacacccggcagagggaggcggcgagggcccagcaaggattctccccagcccctgtgcctgcgtctcctgcggcttctgtgcgcggaccgtgtcctgtgctgtgtagggaacgctgcctctcctccccatcccctggctgccttaaccctacttttctgattgtcat

SEQ ID NO: 79958 - DNA, 573 bp, Homo sapiens
ggggacgaggggacgaggggcccatgcccagtcagggaagccgaaggcctggaggggcttccgggagcaggggctggagttcctctgccaggcaggaggctggcaccagacacccggcagagggaggcggcgagggcccagcaaggattctccccagcccctgtgcctgcgtctcctgcggcttctgtgcgcggaccgtgtcctgtgctgtgtagggaacgctgcctctctgctcgggacgtggattcctttcccctcctcctcgcccggctacttctgacgcaggtcgtcaggactccgcttgggtgtcacccgtgcaggaagcctcccttagtcaagggccctcggcacccgccccatatgtgactagcagccctcctgtgtatttcatcgcgcccccgttgtttatatcagccattccactcaccacccttctgggcaaccctttatctcccgctctgaaatcccatcgctgagggctgggacccctcctcagtgcttatccctgtttccccgcgcgagtctggcgcctggcgtgtggaaggcgctcagtaaacgtttgtggagcgaaga

SEQ ID NO: 79959 - DNA, 449 bp, Homo sapiens
tgtctataatcccagcactttgccaggccgaggcgcatggaaagcttgagttcagttcaagaccagcctgggcaacacggtgagaccgtttctaaaaagaaagaaaaaaaaaatcagcccggtgtggtggcacacgcctgtggtcttagctacccaggagctgaggtgggagggtcacttgaagccaggaagtggaggctgcaatgagtggtgatcacgccactgccctccagcctggtgacacagagtaaagctctgtctcaaaacaaaacaaaacagaacaaaacatcgataaaacaacaaaaccaacaatcaatcaattaaaaaaccaccaactgaccgggcgtggtggtttgcgcctgtaatcccagcactttcggaggccgaggcaggcagatcacgaagtcaggagttcgagaccagcctgaacaacatggtgaaaccccacc

SEQ ID NO: 79960 - DNA, 716 bp, Homo sapiens
ttcaggtgacttagaatgcctgaccatgtgggaatgcagcccagtaggactcagtctcattttacccagcccctgttcaagatggagtcgctctggttcacacgcctcagacacagctactcaggaggctgagatgggaggatcacctgagcctgggaggttgaggctgcagtcagccgtggtggtgtcattgcactccagcctgggcaacacagtgagaccctatctgagaaaaaaagaagaagaagaagaagaagaaatacaacgtgatggcttcatctgagttgagggctctgtgcagctcctttgtggtggaatcctctgctctgctggcagggacgtttcatcataagtgtgtgttctgtatatccaggtgcaagtgatattttaaaatataaaactattgtttaaatttcatgtaagtagcatgatttttccttttgcaactctttcacccccaccccaatgtggttgctgtgtccgggacttcgccattggtggctcacagccgcaggtcagctgtaatcgtgcagaacccatctatgaatacacgacggtgtacctgtccattctcctcttggtgaatgtgtggaggttttctgattctttgcagtgaccaacagcaatctgtgcccagcaatgcaaatgccggactgagggatgcaccctgcacgctggccaagatgtcactgggcgccattggtgtgttttttttt

SEQ ID NO: 79961 - DNA, 219 bp, Homo sapiens
aaaaaatattggccatcccagtgcttgctaggacgtggagcaacctatacactcacccattgcctgtgggaatgcaaaatggtgcagtcaatttggcaagttcagcagcttctgaaaagcttaacctacacttaccatatgacccagcaatctcattcctaagtatttatggaagacaaacgaaaatttatggtcaacacaaaaacctgtatttgcatg

SEQ ID NO: 79962 - DNA, 386 bp, Homo sapiens
ctcaagctcccgacctcaggagatccacccgcctcggtctcccaaagtgctggaattacaggcatgagccacggtgcctggctgcctccagggttttaaaacaaattaatgctattagatggcttcacatattgcaggttttatgctacaggctctaaacttcctttgtgtaataagatatgtcagccttccctgatgttgatgatggcatgctccttttcctgtctccctcatttcactgtcctgttagaaatagcttagactggctggccacagtggctaacacctctaatgccagcactttgggaggccaaggtgggtagatcacttgaggtccagagtttgagaccagtcaggtaatctcagcactttgggaggctgagact

SEQ ID NO: 79963 - DNA, 643 bp, Homo sapiens
ggaaaatccagattcccctgccctttttctgcctgtccttagccctgtttcccagagtgaatcagggacaggtcagtacctctaaagaataagctcatgttgctccttgtctgttgacttagacttctggaccctcagcaatgtcccgggactcacactgggggaggcagggagaccagcatgccccctcttgccacttgtacttcccattttccccctggcaaggtgtggaacatttatactcccacgcccacacttaagactcctgtgctttatctgcaaggttaattccaacaattgataaatggatgaacagtgtttacattaagaggcttgtcaatggccttcactgcccgtcgaagcagtcggctttgatcacatgtcctttgtgttcagctctctctttgccctcagcctcctgagtagctgggacttgcaggcaagtgctaccgctcctagctaatttgttttattcttagtacagatggggtcttgctatgtggtccctgctggagtgctggttgctctctaactggctgcgagccccggggtaggcacactggtactggggctatagcaaaatccgtgctcggtaaagcacccttgctccttcaatgatgatttaccgagcacgtttgctcat

SEQ ID NO: 79964 - DNA, 85 bp, Homo sapiens
  misc_feature (51)..(51): n is a, c, g, or t
gtcaggatggccgagtggtctaaggcgccagactcaagttctggtctccgnatggagcgtgggttcgaatcccacttctgacaca

SEQ ID NO: 79965 - DNA, 443 bp, Homo sapiens
cccagcctagttacaggattttctatttaaatatcttttatctatgaaataggcttgtcaaataccagttacaggtttccatctcccactctctaagagctaatgcttctaggtatgaattttcacttatgtgaagtgtgtactgcacagttcaatctaagtgtaactatctgccaaagagtctgacttacctgtcttgaattccagctctgccctttactacctgtgtagtttaagacaagttccttgagctccctgagattcagtttcctcatcttataaagtggtaattatacctcacaaagttgttttgggacttaaaaagatgataaaagtaaagcactcagcaaaacgtaagtattcaataaacagaaatactgtggaacatcagatcatgctcatagatagtccctaaaccccatttaggttaaaataaatcatct

SEQ ID NO: 79966 - DNA, 287 bp, Homo sapiens
ggaaaatgtaatccaggctggacataatcacagcactttgggaggctgagatgggaggatcatttgaggccaggagttcgagaccagcctgggcatcatagcaacactaccccaacccgacattacacattttttttttttagattagctgggagtggtgggggtgcacacctgtagtcctagctactctggtggttgaggtgggaggatcacctgaatctaggagcttgaggctgcagtgagctatgattataccactcaatttcagcctgggtgacagagtgaga

SEQ ID NO: 79967 - DNA, 298 bp, Homo sapiens
acaaaatgacctatatattcaaatatttttgatctgcaatttgctggaaagcttatttaatttgaagtgccaaagttgtatacaattgaaatcaggttagttttaggaactttgctttaattcagttctactgaaaatttttatgggctgtatggtgcatggatcatctctaaatgtgggtccatggctcctgctttacagaccaccataaagaaagcgtcattttggggaaaataatacttatatttttaccgatttttctcaataatatttgttccctaaaagatgttcctaattc

SEQ ID NO: 79968 - DNA, 360 bp, Homo sapiens
cttacatgattaagtagcatcttcaaattttgaattcatagagttaatttagtgtaagtagtatccattgagggttttttactgtgttctccattgtcctacacagtgacaggatcaataagataggatgaatatcctcaaagcaaggccattggataattcaagttgtacacatgaagagaaaaaaataacatctgtgcaaaggagtatgttattttaagtgctaaagtgagagccccagacaaggctaactgcaataggaaattaacaaatctccaagatcctctccttctgttctcagtgttgtcttcttctagaggacacacacacttacaccccacgcccccagcccccaaagca

SEQ ID NO: 79969 - DNA, 427 bp, Homo sapiens
tttggccttgtttcactggctaatacctccaatacagtgttgattagaaatggtgagaatgggcatgcctgtctggttcctggtgttaggggtgaagcattgagtcttgtatcattgccaggatgtgacctgtaagtttgctacacttgccttttatctggtgacgaaaattgtcttttcttttattccgaagattttaattatgaaagagtgttttaattttgtgaaacgctttattgcatctattgagatggttgaattgttttctcctttattctgttaatatgatgaattacattgatggatttttgtatgttaaaccaaatttgcattttggggacaaactcacttgatcacgaacaattatcctttttatatattgctatgtttgacttgctaacatttcattaaagattttacatctata

SEQ ID NO: 79970 - DNA, 296 bp, Homo sapiens
gtttcacagtaggtcaaaagtacagtcctagagttaagagcagcattcctctgtggtcacatgtttttaacacagatgttgaactgtcgttgcacacatgtgccctgtgtggcttccccttctgtcaggaatgtagtcagcattcatgctgctgcctgcctttcatgacacccacagtcaaattgcagcttttagcaccctgaaaaaaaatacagtgagccttacaggaaagacattcccccaaagggcatcttgaattcttaatggtgtgaccccccccaagcccagctctcagg

SEQ ID NO: 79971 - DNA, 515 bp, Homo sapiens
tttgagacggagtgtcactctgtcgcccaggctggagtgcagtggcgcaatctcagctcactgcaagctctgcctcctgggttcacgccattcttctgcctcagcctcccgagtagttgggactacaggcgcccaccaccacgcctggctaattttttatatttttagtagagatggggttttactatgttagccaggatggtctcgatctcctgaccttgtgatccacccgccttggcctcccaaagtgaaacttttctttaaaatagagatgggatcttgctgtattgcccagactggtctcagactccttgccttaagcagtcctcccacctcagcctcctaaagtgctgggattacaagcgtgaagcattacatccaagtgaaacttcttgagatagttacataatgtttaaatctgctggtgtacaagttaataaagtgtagaactgaataaatattaaatattagatcaagtttctcatgtttaccttaacgtataaagatttatctta

SEQ ID NO: 79972 - DNA, 409 bp, Homo sapiens
actatgtgttctaaatcaaacaaaaatacccgctctactacttcttcctagaatttacaactgcaatcaattaactaagcaattatgttagtgtctgcctttccttctttaatctaggcatgataaggataacatccagctatctagccccatgcctggcatagaataagttatgtgctcaataactactttcactgaatgaatgaaagtcataaaacattaaaaaaaaaactattgcaaataattatctcagcttagaaattaagctttcataagatgcaatttaaaagtcaactttatttactgtatacactataatttgttttgtaaaacttttgaaatcaaaaccatttcatctttaaatactcaatctttaatatccatgtattttgcctcttctaataattca

SEQ ID NO: 79973 - DNA, 433 bp, Homo sapiens
cccagcagcccccagactacttctatccctgaaaacacctggcctcaatgttggcttgttatgttacctgcccaccctcatccttacctcctcctactcaagctgcctggagaagacctgctctcagctgcccaccgttcctcagtgtgagcaagatttgggtctctccagacctctgggaggtagggagttccctggcactggcagcattcagtggggaccccccagtggcatgatgaatggagaggatggctggaccccttccactacttatgtttataattttttttttttttaatgaacttgagccgggtgcagtggctcacacctgtaagcccagctgtcagggggcagaagcgggaggatagcttgagcccaggagtgcaagacctgcctgggcaatatactgagaccccattctccacaaaaagga

SEQ ID NO: 79974 - DNA, 1303 bp, Homo sapiens
aatgcatgcttctgcctgaaaggaacatcagtcctacaagatagagcagaggaagaaaggcagagtcatcatgtttagctgaactaacaacattctcaaaaaggcctttaaaataaggaggtaaaataactgaagcccaggaaaatgcagtagaatctcaaagaggatcttgttgagctttctttttttaaatgaatagagtgaggcacaaagagaaaataacacctagaacattttttcttctcctttatctcgtagccccagagttccaaaagttggtttgcatggacagattcagagcagtcccacagagcccaggtcctgttaataagaagaggcatgttacatgatacgcacaaagaaagtaagtgagaagtagttagaactacatcagtggaatcttttgcctctttttcttagccatcacaccatggaataattgttgttcctgactccttcctttaggcaattgttgtcaagacattttgggccagggctgtaatctaggaccaggagccatcagagtttatttaagaagaagtagagacatgcggcaacctaatagttgacggcagcaaatgaaacgagaagcacgtagagcccttaggtacaactggccttacctgacctagggtaacccttcttcccactcaacttcactaatgaactttgcaggcagtgtgatggctacttattattagatgctatgtccatttattattataaatacaggcatatgatgctagaaatgatagaagttagctgtatcagggtccctttatctaatattttgccatctagccctctgagggagaaccatctggtctttgtttgctggccaacttcaacataaccatccacccagtctttgcattagagtttcactttaggaattcattttccatgtctgttcacacatatagcttgaacaccagcatctcttttaagatttcattacctcttggctgtttcttactgttgccctctggctcttaccttcttctagttaatagtcatagtacctaaattttgtattgggaaaagacattccctctacactgcctcattaattctcatccttactcaagtctcttcaaccttgctcaaggctcatcatctagggcttggacagccctagtctgacccaaacttgggcattagtatttgcattgcttaaaagtaacccaccccggccctccctagtacacagttcccagcataaggaatatggtggcattatatcagtatctgaatgccagcaatgttcatgagtaagacaggtagaaatacattcaaacttgag

SEQ ID NO: 79975 - DNA, 394 bp, Homo sapiens
gagtacaccgatatcagtgggcgagcacacgccatggcggtaaatcttacccaaaaaaaaactattaaaaaaatctagtggaggtaggggagtaaacagaggtaccactcaaacaagaaatggcaaagtattaattgttgacattaagtgatgggtacatgggagttcattatactattctgtttacttcatatatgtttgaaattttccataattaaaggtttttaataaataatttcccttaattccccctcagtggaggagaaaattaataatcactgtccttcatataagttaaaatcttcaaaggaagtctctaaactttgttttctacaccaaacaatccctgtcctctacactttcttcatattcatcatagttacagctcaccttg

SEQ ID NO: 79976 - DNA, 316 bp, Homo sapiens
tatgagataacacatacacacataaccactaaaatatacctgtatgtctagattttcaggagatgatttcattatcctcttgaatggaaattggaagccatttgtgtcttttctctgatttatcaattgaaaacaagagactgaatagaaccacattttatttttgaaaaaagagtaacatttcctttataatacagattttgtgttaaaatgtgtagctttctagaccttagacctgtgccgtccagcagagctctttgtgatggtggaaatttctgtatctatacagaagccgcatatgactgttgagcatata

SEQ ID NO: 79977 - DNA, 979 bp, Homo sapiens
ggcgcctgtgacacaaaatggagaaagaggaaccgggagtggaaaggaagaaggaaaaccgagtaaaggaggttattcataagaacaggaaaggggccgaggggtagagaacacccgaaggaaagcgcaggaggccctcgtgagagggcaagggggaaaagatcgacgaagtaagagcgaaaagaggaaaggaaagaaagactttctagatgcggagtctccattttcagcagcgccatattcgcttttcctctcgccgcttttggctgggttttgtgtgcggcggtggacaggcgccagcacatttctgcagcttcagcagctctgctcagacacctggggagggccgcagggcccgggcgggggacgcgcgctcttggcccaggcccgggcgaggccccctccccggcctggcggttcctgcgcagcgccagccccgcgctcctctaggctgcaaagggggcctccgactcgggcccggcccggaggggacacctcactcggggccccgcggcagcccccaggggacgcgggccctctagtttcgcccacggtgtggctgggcatgcgtgccaaggggatgcgtaaccgagaaccgaaaaagacgaattaaccttcggggaggaggagagggcgcacgctgcgggtaccggggcttgggggcgctcctggaggtgacggggtcacctccacctgcgcggggccactctctgggagccggcgatcgatgcccgccgcggcgcctggccaggccccaggctctcgcggtcgcggaaaacgtccgggtcggggctcggcgggagcccaagcgggtccctggctcgggacgccagtccggaggcggcgaactccggtttcgcggtctcagcgatttaaggcgcgcagtgtttgaagctctcggggtacctccttggggcactgggggcggtccacgactcaaagtcggggtttcgccggatcccacgtgctttggaatcca

SEQ ID NO: 79978 - DNA, 400 bp, Homo sapiens
acgccaccacgcctgcctaaatttttttgtatttttagtagagatggggtttctccatgttggtcaggctggtcttgaacttctgagctcaggtgatccgcctgcctcggcctcccaaatgcccttgtaagatttttatcattgcattccccatcccaaatatagtacctgccgcttagtaggtattccataaatgcttgttgagtaaatgaatgcacataaattggatttcaatggatcacatttgaggggaaaaaaagaaagcatgccagttaataatcagtgtagtttatttaaaatctcttgatgtttattttaacaaaagccttcttggaattctaacactgaaataggatgtcattgaggcctttgtggttttagtagctgtgacctttaccat

SEQ ID NO: 79979 - DNA, 323 bp, Homo sapiens
tctgtgatgctgggatgggggaggaggtggcaggaaacatctataaggagagggcacttaaccaaaatgatgaccatatcttaacatgatactgcatataaagcactgggtacctttgtttttccatgtatatatgtgtgtttgtgtacacagatacacgtctttatatgtatacatatattctccatttgtttaaaaacttgattcccataccctaagagtgatgaaaatcattacataaatgacttattgcaaatagtgaaaagatgacaaagtatttctgtagttttataaaacaccacttgctattattattttcaagt

SEQ ID NO: 79980 - DNA, 607 bp, Homo sapiens
tttgagacagagcaactctgtctcaaaaagaaaaaaaaatatgctattcgtatacttagaaaattatgacatacatgcttcaccctgagtacctcattattattcagatactcattttaatattttacaatttctaaatgtttattttcacagaaggtataaattaaaagattaagaaaaatcctgccaagatcacgtcttaggcacacacagagagcagttgagcgtctgccacacctgatggtcttgagccgtgatggccttaactcctgagccccagtgccctgctccgtaattgatgctgtccactaaggcttgttaggcctaaaggagggaagtgtaagctaagtgtggtatctggtaggaaacccactctgggttgggtgtggtggatcacttgaggtaaggagtttgagaccagcctggccaacatgacaaaactccgtctctactaaagatacaaaaatcagccctgcatggtggcgcacacttgtaatcccagctattcaggaggctgagacaggagaatcgcttgaacccgggaggaggaggctgcagtgagccaagatcaggccattgcactctggcttaggcaacagagtgagac

SEQ ID NO: 79981 - DNA, 838 bp, Homo sapiens
  misc_feature (733)..(733): n is a, c, g, or t
  misc_feature (738)..(738): n is a, c, g, or t
  misc_feature (740)..(740): n is a, c, g, or t
  misc_feature (749)..(749): n is a, c, g, or t
  misc_feature (751)..(751): n is a, c, g, or t
  misc_feature (756)..(756): n is a, c, g, or t
  misc_feature (769)..(769): n is a, c, g, or t
caaaaaagtttcaatccagagttgggttccagctttctgtagctgtaagcattggtggccacaccacctccttacaaagcaactagaacctgcggcatacgttggagagatttttttaattttctggacatgaagtaaatttagagtgctttctaatttcaggtagaagacatgtccaccttctgattatttttggagcatgagaacattttggatttttttcatctctctctccccacccctaagattgtgcaaaaaaagcgtaccttgcctaattgaaataatttcattggattttgatcagaactgattatttggttttctgtgtgaagttttgaggtttcaaactttccttctggagaatgccttttgaaacaattttctctagctgcctgatgtcaactgcttagtaatcagtggatattgaaatattcaaaatgtacagagagtgggtagtggtgaatgttttcatgatgttgtacgtccagctggtgcagggctccagtaatgaacatggaccagtgaagcgatcatctcagtccacattggaacgatctgaacagcagatcagggctgcttctagtttggaggaactacttcgaattactcactctgaggactggaagctgtggagatgcaggctgaggctcaaagttttaccagtatggactctcgctcagatcccatcggtccactaggtttgcggcaactttctatgacattgaaacactanaagtntncgatgaagnantgggnaagaactcagtgnagccctagagaaacgtgcgtggaggtgggcagtgagctggtgaagagtacaaaacattctcaaggccca

SEQ ID NO: 79982 - DNA, 308 bp, Homo sapiens
gttacccagagcctactttaagccctcattttgtgtgtgtgagaaactcaatcattgtccccaaatgaagggacagtaaatgttcaccatctaaccagcagaaaagcttttgtgtttcaatgcagattacttagaaatgagaaatagaaagcggtttcaaagccagctaggtgtgatcatgcctgcagtttgcaacttggttcctgttcacagattgcagacgctaaaaggcatggaattcagctgccctcaccttttggctctgcaggttggaattctttttcctttcttgatgaatgtggctgcat

SEQ ID NO: 79983 - DNA, 558 bp, Homo sapiens
aactttattttcataaaaagaaaaaacataattaagagaaaataagcattctctccttcaaaagtaagttcatcttaaccaataaactgatgcaacaggtcctggatggttgagaaaccacctcattatgattctgagtattaattattaccatatactagataaacacaggagtcagaaaggattcagtatgatgacatagctgggcatacaccttaagtctaccagttagatatgtggacatgagcatattaattagacacactaaccgttgttacccttccctttaaattgagaaaaaataatagctacccaaataagtttgttatctaaatttaagagagattgtatgtaaattccctgacacaatgctcttgtataggaggcattaaaatggatctctatacagtagacattaacaaaaataataaaaataaaaataaatgaaagcttaaaacataggatattgtgggagtacagattgggtgtgcattacagtggcaaatttccttcacagataatttcttcccaaattcctacaaccatacaacatgtgtt

SEQ ID NO: 79984 - DNA, 450 bp, Homo sapiens
aatgtaaatgacgagttaatgggtgcagcacaccaacatggcacatgtacgcatatgtaacaaacctgcatgttgtgcacatgtaccctagaacttaaagtataataaaaatatatatatatataaaaataaaaaaataccttctaaataactcttggaggaaaagagatacaaacaaattacaggatttttgaagaataattacagataacaaaaatactacatgttaaaaatccatggaataatgttaaaaacaagtgtttaacaaatgaaataatgaaatcaatacaaatgaaataatgaaaataaataaattcccaactcaaaaacctagaaaaaagagaaagtaaacaacaacaaaaaaacacaagaaactactaaagataaaagtggaaattaataaagtagagaacagaaaaatagtggatcaaattaatcaaaatcttggtt

SEQ ID NO: 79985 - DNA, 272 bp, Homo sapiens
aggtagttctagccccagaaaatgggtcataaactgactttctgtgataatttactttttagagaaattgcaagcactactcagggttagtgttttgaaagaaactcaagtacacagaatagttttacaatgatatatctatttgtatcatcagaaaattaagaaaggacaaacagacttccaggttcctgtttatagaggggttttcgagtttccaaatcagtttctttcacacacacacacacacacacacacacacacacacacacaca

SEQ ID NO: 79986 - DNA, 273 bp, Homo sapiens
ctaatctagccatctgagttttaaacgaagccacgaaaccgatgtggtggaaccgcattgccatgtagactgtgcacagcacagaccggaagaaattaaaatcacctagggaatccatcttcaacatccatatccagtgaggtgctcttttagttattgcacagaattagtaccaaaaaaccctcaatatattaattttccaacagctgaattgtaccaatgtcctaaaaacatatttttaagcctatattgccaaacaggaagaacttccta

SEQ ID NO: 79987 - DNA, 453 bp, Homo sapiens
atttgtaataatgttatgagggtgagtacagtaggattgattttcaaaatatactaccaaattcatctgttctgagacacttccattggtctctaatctaaataggcaattaatcttccttttgcttttttggtcttaaaatttgagggctccttaacccattaacatcttcaggagaccaacctaggcaacacaattagccaggcatagtgacatgtgtctatggtcccagctatttgggaggctgaggtgggaggatcacttgagcccagaaggtcaaggatgcagtcagctgttatcacgccattgcactccagcctgggtgacagagcaagaccatgaatgaatgaatgagtgaatgaatgaatgaatgaatgaatgaaaaataagtaaataaagataaataaatatatctatatctatattctgatgttttgggggaacatttagaaa

SEQ ID NO: 79988 - DNA, 1051 bp, Homo sapiens
taagggggtcatggtcagtctgaactcaacaatagggctgaatgaatttaccaaaggaagctgccttatattatatgccaggctgctggggaaagcctcaggtcctggccagcccctgttctcacaagaacatgcaggttaccacataaataatggcatatgccttccataggacgtcaacctgacttaaatctacctataccctactctctattctttggtttttggttctcatccctgtggaaggaaatgggcctcttctggcatctcatgctactctgtgcttttccttgggctccaaattctagctcataaagatgcaagttttgcaatttcctataaatggttaagaaaagagcaagctgtccagagagtgagaagtttgaaaagagaggtgcataagagagaaatgatgtccatttgagccccaccacggaggttatgtggtcccaaaaggaatgatggccaagcaattaatttttcctcctagttcttagcttgcttctgcattgattggctttacacaactggcatttagtctgcattacacaaatagacactaatttatttggaacaagcagcaaaatgagaactttatttggtgcagtcagggctccatttagttccctcactctgcttctaatcaccccttctcccagccctcttctatttgatagaggtctgtccctcagatcagcaatgtcttagcccctctcctctcttccattccttcctgttggtactcatttcttctaacttttaataaacatttaggtataatacattacagtaagtgctatttagatacaaacttaaaacatactatatattttaaggatctaagaatcctttagagaaggcacatgactgaagtacctcagctgcgcagcctgtagccagtttttttaatgtaaaagtaagaatgccagccttaacctagccctgcagataaaagctaacttttattaataccagccctgaataatggcactaatccacactcttccttagagtgatgctggaaaaataaaatcaggggcttcagattaaa

SEQ ID NO: 79989 - DNA, 821 bp, Homo sapiens
aaaaaaaaaaaaaaaaaaaaattagctgggccggtgatgtgcgcctgtggtcccagctacttgggtggctgaggtgtgagaattgcttgaggctttttgtttgtttgtttgtttgtttgtttaagacaaaaatcttcctctcttgctcaggctggagtgcagtggcatgatctgggctcactgcagcatctacccatcaggctcaagggattctcccagctcagccttcctagcagctgggaccgcaggtgcacagtggcacaatctcagctcactgcaacttctgcctccatagctcttccacctcagccccagagtatgcccagctaatttttgttttttgtttttgtttttgtatagacagggtttcaccacattgccaaggctgctctcaaactctaggctcaggcagtctgcctgccttggcctcccaaagtgttgggattacaggcgtgagccaccatgcctggccagcttgctatacttctttatgttttttctacacatatgcaacttggaattagatctctgtcctctcagagactttccttatgctgtctggctcccaggagcctcttttcctagtcctttcactagtggcaggggttattctttctcttagagtcttagtgtcaccctcccccactgttttgccccagagaaatacatagtgaagattcttcccatattcttcctactaccctggaccctttcccgtttctcaggacagaaggacaggtttctcttaggctttcagatgtgctgcctcagtagtgcagcttcataacagactggcttctgagcagagtcagcagagaaga

SEQ ID NO: 79990 - DNA, 517 bp, Homo sapiens
gaataggcaaatccatagagatggaaaataagataagcagtccttgggggcaggggaagggggcaatggggcatgattactaacagatacagggtttctttttgggatgatgaaattgtcctgaattaggtaatagtgatgattgcaagaaagacctcatgaatatgctaaaaaccactgacttgtacactttaaaagggtgagctttaatactgtaataatactgtaaaattctcaatttttaaaaaagagaagggttgggcacagtagctcacgcctgtaatcccagcactttgggaggccaaggcaggcagatcacctgaggtcagtagttcgagaccagcccggccaacatggggaaaccccgtctctactaaaaatacaaaaattagctgggcatggtggcaggtgccggtaatcccagctactccggaggctgaggctgaagaaccgcttgaacctgggaggcgaaagttgcagtgagctgagattgtgccattgggctccagcctgggtg

SEQ ID NO: 79991 - DNA, 380 bp, Homo sapiens
tgttgcccaggctggtgcagtagtacaatgacggctcactgtaatagccttcatctcacctcctgggctcaggtgatccttccacctcagtctcctgagtagctatgaccacaggcacgcaccaccacacccagctaatttttctattttcggtagagacagggcctcattatgctgcccaggctgatcttgaactcctagcctcaagtgatcctcccacctcagcctcctgagcagttgggacaaggggctcataccaccatgccgggctaatttttaaatttttcgtagagacaaggtcttgttatatggcccaggtgggtctcaaactccggggctcaaatgcttctctcacctcagactcccacgtggctgggatt

SEQ ID NO: 79992 - DNA, 473 bp, Homo sapiens
catgattatttgaatttgtacttccctaagttctagtgaagttggacatattttcgatacattattgtcctttctgctttcctctgctgtaaattaattgcatgttcgtatcctctgctgtaaattaattgcatgttcatatcctctgctgtaaattaattgcatgttcgtatcctctggtgtaaattaattgcatgttcatatcctctgctgtaaattaattgcatgtgcgtatcctctgctgtaaattaattgcatgtgcgtatcttctgctgtaaattaattgcatgttcgtatcctctgctgtaaattaattgcatgttcgtatcctctgctgtaaattaattgcatgtgcgtatcctctgctgtaaattaattgcatgtgcgtatcctctgctgtaaattaattgcatgttcatatcctttgtccagtctccttttgggtggattatctttttcttagtgatttgtag

SEQ ID NO: 79993 - DNA, 255 bp, Homo sapiens
ttagcagaaaccagatggatgtttctgctaaagctcctccatacctgagcatgatttatccttgcatgtaacattttaaaccaccaaaagactttgcaattacaaatcatttccattttccctctctgactttatccttataattttctagagcaagtatcattatttcaactctgaaaaataaaaactaagcctcaggaagattaaatgactatgccaaatatactcagatagtaaatgttcatggcttttgga

SEQ ID NO: 79994 - DNA, 265 bp, Homo sapiens
ttttgtcagttctagaagctgtctggaggagtctttagggttttctaggtaaacaggtcatcagcaaacagtgacagtgtaacttcctctttaccaatttggatgctctttgtatctttctcttttcttttttttttcttttttttattattatacttcaagttctagggtacacgtgcacaacgtgcaggtttgttacatatgtatacatgtgccatgttggtgtgctgcacccattaactcatcatttacattaggtatatct

SEQ ID NO: 79995 - DNA, 433 bp, Homo sapiens
tagtagagacaaggtttcaccatgttggccaggctggtctcaaacccctgacctcaggtgatccacccacctcagcctcccaaagtgctgggattaaaggcatgagccaccacacctggcctatatctcttcttttagaatgtttggatcacataaattaatttttgcatttagtaagttttattttaacaaataacctaaattgccattagctatcctgctgagaaagctcaactgttcttactgtaacctgactttacaagcccactgggaagtgtcttatcacatgctgtgtgcaaacccttaatgtgccttaaagtagaactgggcacttcaagcatttattgatcaagtgctagcaaacatcacttccatcaccacaactatcaaaggtgcctagggtttccttgacgactaacaatatttaagattg

SEQ ID NO: 79996 - DNA, 520 bp, Homo sapiens
gctcgaccttggaaccaacccaaatgtccaacaatgatagactggattaagaaaatgtggcacatatacaccatggaatactatgtagccataaaaaatgatgagttcatgtcctttgtagggacatggatgaaattggaaatcatcattctaatttttgtatttttagtagagatgaggttttgccatgttggccagggtggtctcaaactcccagccttaggtgatccacctgcctcagtttcccaaagtgctgagatttggtgtgagccaccatgcctggctgtttaattcatttttaaatgagtttctcccaccatttatttatttcacatgaacagttggctgggatggggtggaagaaaaaaatggctggagttaaggagccaaggaattgaaaaacaggtgtgttggctgtgtcatttatgtgattttaaactcactgggaatgataaggggggttgtgaagtggtggaccagcagccaggcaccgaagtcatcagtgaattatggagagggg

SEQ ID NO: 79997 - DNA, 532 bp, Homo sapiens
aaaagagttagaggcacaagtttcccctgactcccatctcctagagggaaaccaacattaagagactggtgtatatctttatacattttactgtcttatttgtagaaacaaatgtttctgtatgaaatcattttttatatccttttctaccatttcttttataactcagctctctctcttgttctctctctctgtatgtgtgtgtgtatatatgtgtatatatacatatatatatatacatatactttaaacatctttttatggtgatagaggtgcatcgtttttagcaatttcgtagttgtcccctgtatgaagcagggggaaaggaagggctagtttcatgactgaagcagagctgctgtttgggcaagaacatcatctttatttagctttcataaaccatcttggttgtgaaaagacagcacagccaggatgggctgaaagtgcttggggatgtctaatctgcttagcataagcaaccaacaagattctggagaaagtcaggactcaagagtatgcaaatcaggagcca

SEQ ID NO: 79998 - DNA, 1235 bp, Homo sapiens
aaaaagaggcaaggttgggctggtgctcacagctgtaatcccagcactttgaggttggctgggagttcaagaccagcctggccaacatgtcagaactactaaaaataaagaaatcagccatgcttggtgctgcacacttgtagttgcagctcctgggaggcagaggtgagggatcacttaacccaggaggcagaggctgcactgagccaggatcacgccactgcactctagcctgggcaacagtgagactgtctcaaaaaaaaaaaaagagacagggtcttcggcacccaggctggagtacagtgccacaatcatggctcactgcagtcttgaactcatggcctcaagcagtcctccctcagcctcccaagtagaggggtttataggcacgagaccctgcacccaacctagagttgccttttttaagcaaagcagtttctagttaatgtagcatcttggactttggggcgtcattcttaagcttgttgtgcccggtaaccatggtcctcttgctctgattaacccttccttcaatgggcttcttcacccagacaccaaggtatgagatggccctgccaagtgtcggcctctcctgttaaacaaaaacattctaaagccattgttcttgcttcatggacaagaggcagccagagagagtgccagggtgccctggtctgagctggcatccccatgtcttctgtgtccgagggcagcatggtttctcgtgcagtgctcagacacagcctgccctagtcctaccagctcacagcagcacctgctctccttggcagctatggccatgacaaccccagagaagcagcttcagggaccgagtcagattctgttttgtctacatgcctctgccgggtgccggtattgaggcacccagggagctgttactggcgtggaaataggtgatgctgctacctctgctgctgcactcacagccacacttgatacacgatgacaccttgcttgtttggaaacatctaaacatctagtagatgacttgcaggctgttggctaccagtttcctgtctgaggtgtatatgttaacttcgtgatcagtttgtatgtttgggactcttgtcctatgtaaagttaaggtgggccgggtgcagtggctcacgcctgtaatcctaacactgggaggccgaggcgggtggatcacctgatggtgaaacctcatctctactgaaaatacaaaaattagctgagtggtgacacacgcctgt

SEQ ID NO: 79999 - DNA, 1281 bp, Homo sapiens
aaaaagaggcaaggttgggctggtgctcacagctgtaatcccagcactttgaggttggctgggagttcaagaccagcctggccaacatgtcagaactactaaaaataaagaaatcagccatgcttggtgctgcacacttgtagttgcagctcctgggaggcagaggtgagggatcacttaacccaggaggcagaggctgcactgagccaggatcacgccactgcactctagcctgggcaacagtgagactgtctcaaaaaaaaaaaaagagacagggtcttcggcacccaggctggagtacagtgccacaatcatggctcactgcagtcttgaactcatggcctcaagcagtcctccctcagcctcccaagtagaggggtttataggcacgagaccctgcacccaacctagagttgccttttttaagcaaagcagtttctagttaatgtagcatcttggactttggggcgtcattcttaagcttgttgtgcccggtaaccatggtcctcttgctctgattaacccttccttcaatgggcttcttcacccagacaccaaggtatgagatggccctgccaagtgtcggcctctcctgttaaacaaaaacattctaaagccattgttcttgcttcatggacaagaggcagccagagagagtgccagggtgccctggtctgagctggcatccccatgtcttctgtgtccgagggcagcatggtttctcgtgcagtgctcagacacagcctgccctagtcctaccagctcacagcagcacctgctctccttggcagctatggccatgacaaccccagagaagcagcttcagggaccgagtcagattctgttttgtctacatgcctctgccgggtgccggtattgaggcacccagggagctgttactggcgtggaaataggtgatgctgctacctctgctgctgcactcacagccacacttgatacacgatgacaccttgcttgtttggaaacatctaaacatctagtagatgacttgcaggctgttggctaccagtttcctgtctgaggtgtatatgttaacttcgtgatcagtttgtatgtttgggactcttgtcctatgtaaagttaaggtgggccgggtgcagtggctcacgcctgtaatcccaaaggtgttctttttatattctggatattaaccctttatcagatgcgttatttggaaatattttgtctcattctgtaagttaacttttctctctgttgattgtgtctttggatgccaaaaattcttaagttgatatagtc

SEQ ID NO: 80000 - DNA, 383 bp, Homo sapiens
atgcacccaggtggtctcagttcagagcttatgtgtgcatcctaacgctaacacatggaaaccaagatgtttcatggtatcttcccctgtcaaccaacttaggcacagtaggacctaagactcagatatttgtgatctggaaggaatccaagagatctcacctgattctgttatggtagaaggaataaaagattttgaggctgaaggctgggtctttctctctcttactgggtgacatataatgttaaactttctgaatgtcagtatcctcacctgaacaatggagaaaatcactcctgctttacagggttgtgaagattgaaatgtatgcatgtccaagggctttgaaaagtgcttgcagttcctctttcatttcctaccac

SEQ ID NO: 80001 - DNA, 338 bp, Homo sapiens
gtatttttagtagaggcggggttccaccatgttggccaggctggtctcgtactcctgacctcaggtgatcacctgcctcctcggcctcccaaaatgctgggattacaagcgtgagccaccgcgcctggcaccatcagtttttgatcctgatacttgtctgtcctcttggttctcctcatccctaatttaaccttgaacacaaaattcaacaggttttggcatatagaataaagattatcaggcaaaggcgcactcttgacctaatgatatatctacatttcatttcctgatctatcagcaatattaattgtctagaatgatgagaagtttagagaagt

SEQ ID NO: 80002 - DNA, 364 bp, Homo sapiens
gagacagggttttaccatgttggccaggctagtcttaaactcctgacctcgtgatccacccgcctcagcctccgaaagtgctgggattacaggcgtgagccgctgcacccgacccaacttgtcattttcaaagaaatatttcctccaaagccttgctgtccaatttgagagccactagtcacctcgtctaaatgtaagaaattaagtgaaagttgcagtagtgagtatcttagataacatgcagtctgaatgcaagataactaattagccagcccagaatctcaagattctttaaaccaactgtgcctaatttacagagtttataactcacatgttaaaccctgaaatacttatggtgatggct

SEQ ID NO: 80003 - DNA, 367 bp, Homo sapiens
agattctataaagaagagaatgatgtaagtgacccgggggcaatggggggagcttaaatttgaaactagaaaaaattttgaacaaaataatcataattgttagctgatgaaaaactagaaaatattttctgagtaaattcttgatttcagaaattaactataatttatattgctcttaatatcttacccttgaatataaatgattaatgccctttaaaatgtccttttttctagctaacctgatgtacatatgacattaatccaatagacttaggaataagatacagggggttttcctgaatgattcgagtatatccccattcatattaagaaaacaaagtattggccaagcgtggtggctcacgcc

SEQ ID NO: 80004 - DNA, 464 bp, Homo sapiens
gtgagccactgcgcctggccctttgcccatttctgaattgggttgttttgttgtttagttggagaagttctttatatatcctagatattaaacctttatcagatatatgatttacacatattttcttccattctgtgtgttgtcttttcttttttttcttttttcttctttgaaacggagtcttgctcgtcaccgaggctggagtgcagttggtgcgatctcagctcactgcagccttcacctcctgggttcaggtgattctcctgcctccgccacctgagtagctgggattataggtgtccgccaccacacctggctgatttttgtatttttagtggagacagggtttcaccatgttggtcttgaactactgacctcaggtgatgcacctgcctcggcctcccaaaatgctgagattgcaagcgtgagccactgcacccagccatttctgtgggttgtctttg

SEQ ID NO: 80005 - DNA, 363 bp, Homo sapiens
ggttcatttattcagccagtcactcaacccctctcctgtgccaggcctgactggaacactgagggtacagaggtgaaggtcccacagcctggtgtgcagatggtgacaattcatgtgagtggtttcattaaaaagcaagacagatcccacctctcccttgcctagaacactccattggctctcactccaccttcctcagatctgatcttcccaggctgctttctcagcatttaggtcttaatttagaagcagtcctctctaacctgaatgttaatgtagcctccctttgccccattgctggatctcttcccaccgactttaattttattcagcgtgcttatcatgggaagctactcctgtttg

SEQ ID NO: 80006 - DNA, 422 bp, Homo sapiens
acctgagttctaaatttatttctcaaagaagccaagctcctgagagagaaatgatactgtaagagtatctgcctggaaaccctgttgcctggagaccactcttgaagaacatccactgctgtggcctcttaaagatttaagacatctaatgaacagctgacagaaatcatcaatttgctcctcatttcagtgtcaaatcatgatgcaacagcagagtgaactcagtgtttttggtatgaagatctccatgtgtttccatcatcagcatctcctgtgctcttaatcttaccctggacacctgacccaggtgcccattctgtgaattctttcattgtaggaaagagaaacagatgttgacaccatgctcttggacttcccagcttccagaatcatgagccaaataaacctcttttctttataaa

SEQ ID NO: 80007 - DNA, 211 bp, Homo sapiens
gccagtgataaacagtcgaaaggattgtccctgccctcatggagactccagtctagcagaacagacagacgggtgttcatcatgtcatcacaacttctgtgtgacaagtgccatgaaggaaacgtacacatggagatgagagcacatcaccaagccctcctttcctcacagcatcactatcattcctggccaatcaatcccaccttgaaat

SEQ ID NO: 80008 - DNA, 317 bp, Homo sapiens
ccagatggtgaaggaagaggcttgtgtttgcctgagacccctctccaacagtggtgccagtgtttccagtggcgacagtagtggtagtggtgcgttgggagtagagaatgggaaggacttcaggggtgtcctgtgaccgataaaggacagcctgtcaaagccttgccccactgagtaataggcctacctctttttgatcacggtcaacaattagttggcagtgagtcttggagttcacatactcttcactcatttttctatatctgcttgaaacagtctttaccatgaaccaaatcagcattatcaatcatctgagg

SEQ ID NO: 80009 - DNA, 652 bp, Homo sapiens
ggccacaaatatcaggggaacggaaaagcttgctggacagacgaaaacaacaggtaccacacacctctaaaactacctctcaaaattgtgaaaagactagtgaaagtatacataactgtttgggaagcccaggcgggcggatcacctgaggtcaggagttcaagaccagcctgggcaacgtggtgaaacctggtctctacaaaaatacaaaaattagccgggcatgatggcgggtacctgtaatcccagctactcgggaggctgaggcgggagaatcgcttaaacccgggaagcagaggttgcagtaagcctagattgcgccactgcactctagcctgggcaacagagcaagactctgtctcaattaaaaaaaaaaaaaaaagtatacataactgcctaacagaggacgtaataggacacacccaataaatggtcattgttgtttcctccagcagcaccgtaagaaggaatacaaacaatctttcttctgcagtcttggagcaaacaggtgctgataaaatcaacattagttcaagcctcacccccaaagttgaactgagcctgaacctttctgaagaatgaagaatgtttagcaaacattcccctccagtgtgcctaaacttcatgtatctttgtacttcctcggccagat

SEQ ID NO: 80010 - DNA, 416 bp, Homo sapiens
gaagtaaaatactataaaaagcacccatgaaactaccacccaacccaagaagcacatcacatcaatgctttgagtctattcggtcctctctcttggcccagtctcatcttcctgcccatccctgaggtcgtcacagtctgagcttggtaattatcagcaccttgctttgtcttctctcagggattttgagtgtgtgtattcccaaacaatacgttgtttagtttggtttatttttctttacaaatatggtatcatgtatcatgccatatgtagtcttttaaaaaatgctaacattgatttaatatggatttaacataagatagcatcatagcatagtacttaaagcagtctattcatgaatccatgtaattctgcagatggcctaacttttattttgaaatgatttcaaacttcca

SEQ ID NO: 80011 - DNA, 536 bp, Homo sapiens
agttctgtaggatgctaatagaagtgtgatatttagatgctattaggacattgtatacatttctttaatgtggttattttaagtttaggactgtaaatgttccctactggaatagaaatatgtctctctccaactttccaccaaataaaatggttagagtgaatgcccagtttcacatctgccttttggagtttggaaagcttaaacaagtcagttaagagaatgagaagaatctcactgtgggtgataaggagtgtgtagtttgctgtaagggccactgatatgacaagaatgattatcccacagtaagaatgggtaaaacttaataaagttttctaactttattaaactcacattatttaatgaaaaaataactgcaaaggaccaatgagatcatgcatgctgctgtattcttgtgatggaatctaccaggattaagttgtatttaaatgaaaaaacaggtacacatttagagatcattgaccaagaaatgtaaatatatttgattaataaaacgtttttatgatgactcgaaa

SEQ ID NO: 80012 - DNA, 610 bp, Homo sapiens
ttttttttatattttctaaaatttttatttcttgttcattttgtttctaagatattcactcacatattaaaaataacaacgtctcaaaacatttgaagcaactctcttcatcccttttaaaaataccttgctgtttcgggggttaaaaaaagccacaagggagattaaaacaatacaaatatttattttcccaactcccctgccatgggttctgggacgtcaccgcctctttctggggcccgtttcatccttttcttttaatccaagaagcgatggtgttgtgcgcctgtagtcccagctacctgggaggcaggctgaggtgggaggatcttttgggtccaggattttgaggctgcagtaagccgtgttctcaccactgcactcgagactgggcggaagagcgagacactgtatcaaaaacaaaacaaaacaaaacgagaaggcatcgcggctctgtaacactccgtccagctctcgcactctcagatgcaaacttccacacaaactcctcggctcgccttgtcccgcgggactagcatatcaagccttccgggacacaccgtgcgatgatatatacgtatatacccctcttgcccttgaaggccggaag

SEQ ID NO: 80013 - DNA, 641 bp, Homo sapiens
gcttgctgatgggtccgggtggggcgcgcgtggactatgggcccgggaggtcccttactgtccccgagccgcgggttcctcttgtgcaaaacggggtggcactccaatcgcctgcttggtgattgtggcccccacacacctgtttctacagcgcttagcttcatcgcagtaggaatggcagccccatctatgaaggaaagacaggtctgctggggggcccgggatgagtactggaagtgtttagatgagaacttagaggatgcttctcaatgcaagaagttaagaagctctttcgaatcaagttgtccccaacagtggataaaatattttgataaaagaagagactacttaaaattcaaagaaaaatttgaagcaggacaatttgagccttcagaaacaactgcaaaatcctaggctgttcataaagattgaaagtattctttctggacattgaaaaagctccactgactatggaacagtaatagtttgaatcatagtgaacatcaatacttgttccctatatacgacacttgataattaagatgatcaagaaccagaagatctgtgaagaaatgaaataaaatggtatttagtaagaaatctctattttaagaaaaaaagtaaaacctgttataaacaca

SEQ ID NO: 80014 - DNA, 573 bp, Homo sapiens
aaagcggcctcccaaaaggggattttggcccctgaagcccaaaaattggggcacgaggggccccccacacacctgttttctacagggtttcttcatcgcagtaggaatggcagccccatctatgaaggaaagacaggtctgctggggggcccgggatgagtactggaagtgtttagatgagaacttagaggatgcttctcaatgcaagaagttaagaagctctttcgaatcaagttgtccccaacagtggataaaatattttgataaaagaagagactacttaaaattcaaagaaaaatttgaagcaggacaatttgagccttcagaaacaactgcaaaatcctaggctgttcataaagattgaaagtattctttctggacattgaaaaagctccactgactatggaacagtaatagtttgaatcatagtgaacatcaatacttgttccctatatacgacacttgataattaagatgatcaagaaccagaagatctgtgaagaaatgaaataaaatggtatttagtaagaaatctctattttaagaaaaaaagtaaaacctgttataaacaca

SEQ ID NO: 80015 - DNA, 507 bp, Homo sapiens
ttttttttggaaccatgtgcgcctttattagctgagccactacttgagagggatgaagcagaaggagtgggtggcgccgatgccggaccggcattgctttacgggcttgtaggtgatggagaactcgcccaggtagtggccaatcatctcgggcttgacctccacctggttgaaggtcttgccgttgtggacgcccaccatgctgcccaccacctcgggcaggatgatcacgtccctcaggtgcgtcttcaccacttccggcttctccatgggcggcgcctccttcttggccttgcgcaggcgcttcagcaggtagtgccgcttccgccgcaggccccggttcagccgccgccgctggcgcgcactgtacagctgcatcagctgttcgtaggacatgtccagcagctggtccaggtccacgccgcggtaggtgaacttgcggaaggtccgcttcttcttctgctctacttctgccatcttgccggatcctcagaaagagctatttgc

SEQ ID NO: 80016 - DNA, 1052 bp, Homo sapiens
ttttttttatattttctaaaatttttatttcttgttcattttgtttctaagatattcactcacatattaaaaataacaacgtctcaaaacatttgaagcaactctcttcatcccttttaaaaataccttgctgtttcgggggttaaaaaaagccacaagggagattaaaacaatacaaatatttattttcccaactcccctgccatgggttctgggacgtcaccgcctctttctggggcccgtttcatccttttcttttaatccaagaagcgatggtgttgtgcgcctgtagtcccagctacctgggaggcaggctgaggtgggaggatcttttgggtccaggattttgaggctgcagtaagccgtgttctcaccactgcactcgagactgggcggaagagcgagacatttttgcggctggggaggtctacgcttctagagcttgagccagcggggcgaccctgcagtggcaggactcggcaccgcgccctccaccgccggttggtggcctgcgtgacagtttcctcccgtcgacatcgaaaggaagccggacgtgggcgggcagagagcttcatcgcagtaggaatggcagccccatctatgaaggaaagacaggtctgctggggggcccgggatgagtactggaagtgtttagatgagaacttagaggatgcttctcaatgcaagaagttaagaagctctttcgaatcaagttgtccccaacagtggataaaatattttgataaaagaagagactacttaaaattcaaagaaaaatttgaagcaggacaatttgagccttcagaaacaactgcaaaatcctaggctgttcataaagattgaaagtattctttctggacattgaaaaagctccactgactatggaacagtaatagtttgaatcatagtgaacatcaatacttgttccctatatacgacacttgataattaagatgatcaagaaccagaagatctgtgaagaaatgaaataaaatggtatttagtaagaaatctctattttaagaaaaaaagtaaaacctgttataaacaca

SEQ ID NO: 80017 - DNA, 1026 bp, Homo sapiens
gcttgctgatgggtccgggtggggcgcgcgtggactatgggcccgggaggtcccttactgtccccgagccgcgggttcctcttgtgcaaaacggggtggcactccaatcgcctgcttggtgattgtggcccccacacacctgtttctacagcgcttaggttcgaacagtaaccctgtaaactaggcactgctgtccccgctttactggtgggaaacgggctcggagagaataaatgagctgccctaagcgactgggacagaaccacagttctcagccgggctttctgagcccacgctgccgccccagcagggatcaaatcacacagtgtgagataagcctcaagagcgggtggccttatgctgccactgagaactgattgggttcagttgcctcatcaaaatccctaagcatggttttgttttgtttttgttttttttttttttagttttaaaggaagaggagattgacggttttcctctttccttatcttctcttcagattacaaagttcattggtaatctcaaatattattttgggcaagacttcatcgcagtaggaatggcagccccatctatgaaggaaagacaggtctgctggggggcccgggatgagtactggaagtgtttagatgagaacttagaggatgcttctcaatgcaagaagttaagaagctctttcgaatcaagttgtccccaacagtggataaaatattttgataaaagaagagactacttaaaattcaaagaaaaatttgaagcaggacaatttgagccttcagaaacaactgcaaaatcctaggctgttcataaagattgaaagtattctttctggacattgaaaaagctccactgactatggaacagtaatagtttgaatcatagtgaacatcaatacttgttccctatatacgacacttgataattaagatgatcaagaaccagaagatctgtgaagaaatgaaataaaatggtatttagtaagaaatctctattttaagaaaaaaagtaaaacctgttataaacaca

SEQ ID NO: 80018 - DNA, 909 bp, Homo sapiens
ttttttttggaaccatgtgcgcctttattagctgagccactacttgagagggatgaagcagaaggagtgggtggcgccgatgccggaccggcattgctttacgggcttgtaggtgatggagaactcgcccaggtagtggccaatcatctcgggcttgacctccacctggttgaaggtcttgccgttgtggacgcccaccatgctgcccaccacctcgggcaggatgatcacgtccctcaggtgcgtcttcaccacttccggcttctccatgggcggcgcctccttcttggccttgcgcaggcgcttcagcaggtagtgccgcttccgccgcaggccccggttcagccgccgccgctggcgcgcactgtacagctgcatcagctgttcgtaggacatgtccagcagctggtccaggtccacgccgcgcttcatcgcagtaggaatggcagccccatctatgaaggaaagacaggtctgctggggggcccgggatgagtactggaagtgtttagatgagaacttagaggatgcttctcaatgcaagaagttaagaagctctttcgaatcaagttgtccccaacagtggataaaatattttgataaaagaagagactacttaaaattcaaagaaaaatttgaagcaggacaatttgagccttcagaaacaactgcaaaatcctaggctgttcataaagattgaaagtattctttctggacattgaaaaagctccactgactatggaacagtaatagtttgaatcatagtgaacatcaatacttgttccctatatacgacacttgataattaagatgatcaagaaccagaagatctgtgaagaaatgaaataaaatggtatttagtaagaaatctctattttaagaaaaaaagtaaaacctgttataaacaca

SEQ ID NO: 80019 - DNA, 2125 bp, Homo sapiens
ttttttttatattttctaaaatttttatttcttgttcattttgtttctaagatattcactcacatattaaaaataacaacgtctcaaaacatttgaagcaactctcttcatcccttttaaaaataccttgctgtttcgggggttaaaaaaagccacaagggagattaaaacaatacaaatatttattttcccaactcccctgccatgggttctgggacgtcaccgcctctttctggggcccgtttcatccttttcttttaatccaagaagcgatggtgttgtgcgcctgtagtcccagctacctgggaggcaggctgaggtgggaggatcttttgggtccaggattttgaggctgcagtaagccgtgttctcaccactgcactcgagactgggcggaagagcgagacaagataaaagcgaaacaggaagtcccgcccctctatggaaagtaaatggtagctcggaagggtcaaaagagtccgcggtttcgccgcgtgacttgctttttgcggctggggaggtctacgcttctagagcttgagccagcggggcgaccctgcagtggcaggactcggcaccgcgccctccaccgccggttggtggcctgcgtgacagtttcctcccgtcgacatcgaaaggaagccggacgtgggcgggcagagagcttcatcgcagtaggaatggcagccccatctatgaaggaaagacaggtctgctggggggcccgggatgagtactggaagtgtttagatgagaacttagaggatgcttctcaatgcaagaagttaagaagctctttcgaatcaagttgtccccaacagtggataaaatattttgataaaagaagagactacttaaaattcaaagaaaaatttgaagcaggacaatttgagccttcagaaacaactgcaaaatcctaggctgttcataaagattgaaagtattctttctggacattgaaaaagctccactgactatggaacagtaatagtttgaatcatagtgaacatcaatacttgttccctatatacgacacttgataattaagatgatcaagaaccagaagatctgtgaagaaatgaaataaaatggtatttagtaagaaatctctattttaagaaaaaaagtaaaacctgttataaacacatgcacttttgttttgtttttgttttgtttttaattagaggatgggtagtaggcagatgataaaatttataatatacatagaagtgaaataaatgggagttagcattttaatacaggcaagagctattacaacaacccaagtgagaaatgatgagggtttgtggaaggtttataaggaagaagggtgaacttaaaatatacaagtaaaataataaaagccatctataaaaaagcccatagctaatatcaacacttaatgttgggacaggaactggatgtctagctagtccagtgagacaaaaaagaaaaagcatacacactgggaaggaagaaagaaaactagctctactcacatataataaatactatcttatagaatgtaccaatggatgcacaaaaagagctcctagaactataagtcaatcatagaaaggttgcaggaaacaaggtcaatatacacaaggaaaattatattcctatatatcagcaataaacaactggaatttaaaacttaaaaataccatttgtgaatagcaccaaaaaaaattaaaggaatacttaggtataaatctaatatatggaggcctctatgctgagaactagaaaacacttggaagcagactacatcagattaaatggagaggtatacagttggccctctgtgggttctgcatccatggattcaaccccgaagagaaaatttttgggaaaaggaaaaacgagtaaaaataataaaaatttaaaaatccagtataacacctatttacattgtattaggtattgtaagtcattgagatgatttaaagtataggcatacctcaaagatactgcaggtttggttacagaccactgcattaaagtgaatatcacaatagagtgggttacacaaatgttttggttttccagtacacatagaagttatgtttatactgttgtctagtaagtgtgcaatagcattatgtctgctcagtatatatgc

SEQ ID NO: 80020 - DNA, 1275 bp, Homo sapiens
ttttttttatattttctaaaatttttatttcttgttcattttgtttctaagatattcactcacatattaaaaataacaacgtctcaaaacatttgaagcaactctcttcatcccttttaaaaataccttgctgtttcgggggttaaaaaaagccacaagggagattaaaacaatacaaatatttattttcccaactcccctgccatgggttctgggacgtcaccgcctctttctggggcccgtttcatccttttcttttaatccaagaagcgatggtgttgtgcgcctgtagtcccagctacctgggaggcaggctgaggtgggaggatcttttgggtccaggattttgaggctgcagtaagccgtgttctcaccactgcactcgagactgggcggaagagcgagacaagataaaagcgaaacaggaagtcccgcccctctatggaaagtaaatggtagctcggaagggtcaaaagagtccgcggtttcgccgcgtgacttgctttttgcggctggggaggtctacgcttctagagcttgagccagcggggcgaccctgcagtggcaggactcggcaccgcgccctccaccgccggttggtggcctgcgtgacagtttcctcccgtcgacatcgaaaggaagccggacgtgggcgggcagagagcttcatcgcagtaggaatggcagccccatctatgaaggaaagacaggtctgctggggggcccgggatgagtactggaagtgtttagatgagaacttagaggatgcttctcaatgcaagaagttaagaagctctttcgaatcaagttgtccccaacagtggacagtctcactctgttgcccaggctggagtgcagtggtgtgatctttgccatgttgcccaggctggtcttgaactcctggactcaagcgatctgcccatctcagcctcccaaagagctgggattatagataaaatattttgataaaagaagagactacttaaaattcaaagaaaaatttgaagcaggacaatttgagccttcagaaacaactgcaaaatcctaggctgttcataaagattgaaagtattctttctggacattgaaaaagctccactgactatggaacagtaatagtttgaatcatagtgaacatcaatacttgttccctatatacgacacttgataattaagatgatcaagaaccagaagatctgtgaagaaatgaaataaaatggtatttagtaagaaatctctattttaagaaaaaaagtaaaacctgttataaacaca

SEQ ID NO: 80021 - DNA, 1015 bp, Homo sapiens
  misc_feature (651)..(651): n is a, c, g, or t
gcttgctgatgggtccgggtggggcgcgcgtggactatgggcccgggaggtcccttactgtccccgagccgcgggttcctcttgtgcaaaacggggtggcactccaatcgcctgcttggtgattgtggcccccacacacctgtttctacagcgcttagcttcatcgcagtaggaatggcagccccatctatgaaggaaagacaggtctgctggggggcccgggatgagtactggaagtgtttagatgagaacttagaggatgcttctcaatgcaagaagttaagaagctctttcgaatcaagttgtccccaacagtggataaaatattttgataaaagaagagactacttaaaattcaaagaaaaatttgaagcaggacaatttgagccttcagaaacaactgcaaaatcctaggctgttcataaagattgaaagtattctttctggacattgaaaaagctccactgactatggaacagtaatagtttgaatcatagtgaacatcaatacttgttccctatatacgacacttgataattaagatgatcaagaaccagaagatctgtgaagaaatgaaataaaatggtatttagtaagaaatctctattttaagaaaaaaagtaaaacctgttataaacacaaaaaaaaaanaaaaaaaacaaaaaaaaaaaaaaaaaacaaaaagaacggaacaaagacacaaaaaaaaacacaacagaagaaagaggaagggggggggggcgggggggccccgggggggccggggaccccccagccccacccggggcgcccgcattagagaggtccatcacatcatccatcgctaagaaccaccagcaacacatgaacaacatggattaaatacacatcacaccatgttatgtgctctctaagaacaaccaaacgtatccgtagctaacagttagcaaactacgacatctatatgttcaatattgattaatatttgtttaaagtcagttgacaatctctgtgatatcttgtacaattttaacaa

SEQ ID NO: 80022 - DNA, 1147 bp, Homo sapiens
ttttttttatattttctaaaatttttatttcttgttcattttgtttctaagatattcactcacatattaaaaataacaacgtctcaaaacatttgaagcaactctcttcatcccttttaaaaataccttgctgtttcgggggttaaaaaaagccacaagggagattaaaacaatacaaatatttattttcccaactcccctgccatgggttctgggacgtcaccgcctctttctggggcccgtttcatccttttcttttaatccaagaagcgatggtgttgtgcgcctgtagtcccagctacctgggaggcaggctgaggtgggaggatcttttgggtccaggattttgaggctgcagtaagccgtgttctcaccactgcactcgagactgggcggaagagcgagacaagataaaagcgaaacaggaagtcccgcccctctatggaaagtaaatggtagctcggaagggtcaaaagagtccgcggtttcgccgcgtgacttgctttttgcggctggggaggtctacgcttctagagcttgagccagcggggcgaccctgcagtggcaggactcggcaccgcgccctccaccgccggttggtggcctgcgtgacagtttcctcccgtcgacatcgaaaggaagccggacgtgggcgggcagagagcttcatcgcagtaggaatggcagccccatctatgaaggaaagacaggtctgctggggggcccgggatgagtactggaagtgtttagatgagaacttagaggatgcttctcaatgcaagaagttaagaagctctttcgaatcaagttgtccccaacagtggataaaatattttgataaaagaagagactacttaaaattcaaagaaaaatttgaagcaggacaatttgagccttcagaaacaactgcaaaatcctaggctgttcataaagattgaaagtattctttctggacattgaaaaagctccactgactatggaacagtaatagtttgaatcatagtgaacatcaatacttgttccctatatacgacacttgataattaagatgatcaagaaccagaagatctgtgaagaaatgaaataaaatggtatttagtaagaaatctctattttaagaaaaaaagtaaaacctgttataaacaca

SEQ ID NO: 80023 - DNA, 1521 bp, Homo sapiens
  misc_feature (1157)..(1157): n is a, c, g, or t
ttttttttatattttctaaaatttttatttcttgttcattttgtttctaagatattcactcacatattaaaaataacaacgtctcaaaacatttgaagcaactctcttcatcccttttaaaaataccttgctgtttcgggggttaaaaaaagccacaagggagattaaaacaatacaaatatttattttcccaactcccctgccatgggttctgggacgtcaccgcctctttctggggcccgtttcatccttttcttttaatccaagaagcgatggtgttgtgcgcctgtagtcccagctacctgggaggcaggctgaggtgggaggatcttttgggtccaggattttgaggctgcagtaagccgtgttctcaccactgcactcgagactgggcggaagagcgagacaagataaaagcgaaacaggaagtcccgcccctctatggaaagtaaatggtagctcggaagggtcaaaagagtccgcggtttcgccgcgtgacttgctttttgcggctggggaggtctacgcttctagagcttgagccagcggggcgaccctgcagtggcaggactcggcaccgcgccctccaccgccggttggtggcctgcgtgacagtttcctcccgtcgacatcgaaaggaagccggacgtgggcgggcagagagcttcatcgcagtaggaatggcagccccatctatgaaggaaagacaggtctgctggggggcccgggatgagtactggaagtgtttagatgagaacttagaggatgcttctcaatgcaagaagttaagaagctctttcgaatcaagttgtccccaacagtggataaaatattttgataaaagaagagactacttaaaattcaaagaaaaatttgaagcaggacaatttgagccttcagaaacaactgcaaaatcctaggctgttcataaagattgaaagtattctttctggacattgaaaaagctccactgactatggaacagtaatagtttgaatcatagtgaacatcaatacttgttccctatatacgacacttgataattaagatgatcaagaaccagaagatctgtgaagaaatgaaataaaatggtatttagtaagaaatctctattttaagaaaaaaagtaaaacctgttataaacacaaaaaaaaaanaaaaaaaacaaaaaaaaaaaaaaaaaacaaaaagaacggaacaaagacacaaaaaaaaacacaacagaagaaagaggaagggggggggggcgggggggccccgggggggccggggaccccccagccccacccggggcgcccgcattagagaggtccatcacatcatccatcgctaagaaccaccagcaacacatgaacaacatggattaaatacacatcacaccatgttatgtgctctctaagaacaaccaaacgtatccgtagctaacagttagcaaactacgacatctatatgttcaatattgattaatatttgtttaaagtcagttgacaatctctgtgatatcttgtacaattttaacaa

SEQ ID NO: 80024 - DNA, 615 bp, Homo sapiens
cttaaataacgtgtgtagaagacttagtgcattgtctggcatatagagagctttcaataatcaacagctattattatggtgaggcaagagcacaagctcttgagtcatacctctaacattcacttggctttactactttaatttgtgtggcaccgaccaaagcacttaatttccccgtgcctcagtttcttcacctttgaaataaggataataatagtgaagaagttaatatatgtaaggaatttaaaatagcatttgacacataagtgccatgcaagtgttagttgttaatgactgttgctgtcgactctggttagactgtaaattccttaagttatcatctttttttattgattttcccttcccccacctacaaaacctatcttagtggtgaaacataagcctgaccaaatgttttattttggggcatacttaactaataagtctgaagtgacaaggatttactgtgttgtgctgtactcagccataaggaacattctaaagcagaagttggcagactttttgtgaagagccagatagcaaatactttagacttcacagaccatgtggtctctggcacaatttctcagctctgcagttctagtggaaaagcag

SEQ ID NO: 80025 - DNA, 501 bp, Homo sapiens
cttaaataacgtgtgtagaagacttagtgcattgtctggcatatagagagctttcaataatcaacagctattattatggtgaggcaagagcacaagctcttgagtcatacctctaacattcacttggctttactactttaatttgtgtggcaccgaccaaagcacttaatttccccgtgcctcagtttcttcacctttgaaataaggataataatagtgaagaagttaatatatgtaaggaatttaaaatagcatttgacacataagtgccatgcaagtgttagttgttaatgactgttgctgtcgactctggttagactgtaaattccttaagttatcatctttttttattgattttcccttcccccacctacaaaacctacggccatgtacaacaacggccttaaccctgccacaaccacgccttcggcgcccaccttgccttttacacccaccacaccttcggctggtcgcccctaccattcaaacacccccggttgc

SEQ ID NO: 80026 - DNA, 2668 bp, Homo sapiens
cgggaaagctgcagacgaggcagggagaggcgggacttcgcgggcgagacgtcatcggggcgccggaggcccggggcgcctgggagtttgaagcaaacaggcagcgcgcgacaatggcggtcgctcgtgcagctttggggccattggtgacgggtctgtacgacgtgcaggctttcaagtttggggacttcgtgctgaagagcgggctttcctcccccatctacatcgatctgcggggcatcgtgtctcgaccgcgtcttctgagtcaggttgcagatattttattccaaactgcccaaaatgcaggcatcagttttgacaccgtgtgtggagtgccttatacagctttgccattggctacagttatctgttcaaccaatcaaattccaatgcttattagaaggaaagaaacaaaggattatggaactaagcgtcttgtagaaggaactattaatccaggagaaacctgtttaatcattgaagatgttgtcaccagtggatctagtgttttggaaactgttgaggttcttcagaaggagggcttgaaggtcactgatgccatagtgctgttggacagagagcagggaggcaaggacaagttgcaggcgcacgggatccgcctccactcagtgtgtacattgtccaaaatgctggagattctcgagcagcagaaaaaagttgatgctgagacagttgggagagtgaagaggtttattcaggagaatgtctttgtggcagcgaatcataatggttctcccctttctataaaggaagcacccaaagaactcagcttcggtgcacgtgcagagctgcccaggatccacccagttgcatcgaagcttctcaggcttatgcaaaagaaggagaccaatctgtgtctatctgctgatgtttcactggccagagagctgttgcagctagcagatgctttaggacctagtatctgcatgctgaagactcatgtagatattttgaatgattttactctggatgtgatgaaggagttgataactctggcaaaatgccatgagttcttgatatttgaagaccggaagtttgcagatataggaaacacagtgaaaaagcagtatgaaggaggtatctttaaaatagcttcctgggcagatctagtaaatgctcacgtggtgccaggctcaggagttgtgaaaggcctgcaagaagtgggcctgcctttgcatcgggggtgcctccttattgcggaaatgagctccaccggctccctggccactggggactacactagagcagcggttagaatggctgaggagcactctgaatttgttgttggttttatttctggctcccgagtaagcatgaaaccagaatttcttcacttgactccaggagttcagttggaagcaggaggagataatcttggccaacagtacaatagcccacaagaagttattggcaaacgaggttccgatatcatcattgtaggtcgtggcataatctcagcagctgatcgtctggaagcagcagagatgtacagaaaagctgcttgggaagcgtatttgagtagacttggtgtttgagtgcttcagatacatttttcagatacaatgtgaagacattgaagatatgtggtcctcctgaaagtcactggctggaaataatccaattattcctgcttggattcttccacagggcctgtgtaagaatgggttctggagttctcatggtctttaggaaatattgagtaatttgtaatcaccgcattgatactataataagttcattcttaagcttgctttttttgagactggtgtttgttagacagccacagtcctgtctgggttagggtcttccacatttgaggatccttcctatctctccatgggactagactgctttgttattctatttattttttaatttttttcgagacaggatctcactctgttgcccaggatggagtgcagtggtgagatcacggctcattgcagcctcgacctcccaggtgatcctcccacctcagcttccagattagctggtgctataggcatgcaccaccacgtccatctaaatttctttattatttgtagagatgaggtcttgccatgttacccaggctggtctcaactcctgggctcaagcgatcctcctgcctcagtctctcaaagtgctgggattacaggtgtgagccactgtgcccagcctaattgcagtaagacaaaaattctagggcaccaagaggctaaagtcagcacagcttttcttgtgtcctgtattctctgtctaatgtgttgcccaaataatacctaattgttagccattcccctccatctctggcctaaaagtgatagtccaggtatccacatgggctggttcccagaactgccattgctcactctccaaagaggggaaggtggggaaggggaaggtgactatagctcagctcctgagctagtatctggctgttatttcaacaaccggagttggggtttgggctcattttttcccctagccagcaattatggaccagtagtaacacaagtgacagcttcctgtgactgacttcacaattaggaggtctaagattccatttgggtatttgcttaaggatcccacataattgtcccaacggtcattagtagaggggaggtaagccttcattaataataaagagaaagcccacattcaaggt

SEQ ID NO: 80027 - DNA, 753 bp, Homo sapiens
aaataaaaaatataaaataaaataaaatagttacaataaaacattgtttatgtgttcattttcttacaggttgcagatattttattccaaactgcccaaaatgcaggcatcagttttgacaccgtgtgtggagtgccttatacagctttgccattggctacagttatctgttcaaccaatcaaattccaatgcttattagaaggaaagaaacaaaggattatggtaaaataaaagtaacataaagcatgaagttaattaatctgtaacatcatactcttagaatttttccgcttctgtgcactaatgttttaccagtcatcttgagttctttaagttgttactgcttgtagaatttataattgttactataagtcaccttcctttttttagacttggggtgaaatgctttgtattgattaggaaatgaaaagtgctttttttggtactgtatctatgaaactccaacattttttttttttaccagcccttccctcatcagcaaaatgttgtaacagcacatactttcccagtatgtttgtatttaaacttcatgaaaagtaatccatggataaaattactctcataaagcagtgtaaacacctcagagagatatttttgtgggttcatggcaatagattatcaggtgacttgctttaaaacccgaaaatttgtccaggcaccatggctcacgcctgtaatcccagcacttttggaggccgaggtaggcggatcacttgaggtcaggagttcaa

SEQ ID NO: 80028 - DNA, 1790 bp, Homo sapiens
cgggaaagctgcagacgaggcagggagaggcgggacttcgcgggcgagacgtcatcggggcgccggaggcccggggcgcctgggagtttgaagcaaacaggcagcgcgcgacaatggcggtcgctcgtgcagctttggggccattggtgacgggtctgtacgacgtgcaggctttcaagtttggggacttcgtgctgaagagcgggctttcctcccccatctacatcgatctgcggggcatcgtgtctcgaccgcgtcttctgagtcaggttgcagatattttattccaaactgcccaaaatgcaggcatcagttttgacaccgtgtgtggagtgccttatacagctttgccattggctacagttatctgttcaaccaatcaaattccaatgcttattagaaggaaagaaacaaaggattatggaactaagcgtcttgtagaaggaactattaatccaggagaaacctgtttaatcattgaagatgttgtcaccagtggatctagtgttttggaaactgttgaggttcttcagaaggagggcttgaaggtcactgatgccatagtgctgttggacagagagcagggaggcaaggacaagttgcaggcgcacgggatccgcctccactcagtgtgtacattgtccaaaatgctggagattctcgagcagcagaaaaaagttgatgctgagacagttgggagagtgaagaggtttattcaggagaatgtctttgtggcagcgaatcataatggttctcccctttctataaaggaagcacccaaagaactcagcttcggtgcacgtgcagagctgcccaggatccacccagttgcatcgaagcttctcaggcttatgcaaaagaaggagaccaatctgtgtctatctgctgatgtttcactggccagagagctgttgcagctagcagatgctttaggacctagtatctgcatgctgaagactcatgtagatattttgaatgattttactctggatgtgatgaaggagttgataactctggcaaaatgccatgagttcttgatatttgaagaccggaagtttgcagatataggaaacacagtgaaaaagcagtatgaaggaggtatctttaaaatagcttcctgggcagatctagtaaatgctcacgtggtgccaggctcaggagttgtgaaaggcctgcaagaagtgggcctgcctttgcatcgggggtgcctccttattgcggaaatgagctccaccggctccctggccactggggactacactagagcagcggttagaatggctgaggagcactctgaatttgttgttggttttatttctggctcccgagtaagcatgaaaccagaatttcttcacttgactccaggagttcagttggaagcaggaggagataatcttggccaacagtacaatagcccacaagaagttattggcaaacgaggttccgatatcatcattgtaggtcgtggcataatctcagcagctgatcgtctggaagcagcagagatgtacagaaaagctgcttgggaagcgtatttgagtagacttggtgtttgagtgcttcagatacatttttcagatacaatgtgaagacattgaagatatgtggtcctcctgaaagtcactggctggaaataatccaattattcctgcttggattcttccacagggcctgtgtaagaatgggttctggagttctcatggtctttaggaaatattgagtaatttgtaatcaccgcattgatactataataagttcattcttaagctaaaaaaaaaaagaaaaacaac

SEQ ID NO: 80029 - DNA, 2607 bp, Homo sapiens
  misc_feature (2)..(2): n is a, c, g, or t
  misc_feature (12)..(12): n is a, c, g, or t
  misc_feature (15)..(15): n is a, c, g, or t
gnaacctttganaanccgacagatgggggaagcaaacaggcagcgcgcgacaatggcggtcgctcgtgcagctttggggccattggtgacgggtctgtacgacgtgcaggctttcaagtttggggacttcgtgctgaagagcgggctttcctcccccatctacatcgatctgcggggcatcgtgtctcgaccgcgtcttctgagtcaggttgcagatattttattccaaactgcccaaaatgcaggcatcagttttgacaccgtgtgtggagtgccttatacagctttgccattggctacagttatctgttcaaccaatcaaattccaatgcttattagaaggaaagaaacaaaggattatggaactaagcgtcttgtagaaggaactattaatccaggagaaacctgtttaatcattgaagatgttgtcaccagtggatctagtgttttggaaactgttgaggttcttcagaaggagggcttgaaggtcactgatgccatagtgctgttggacagagagcagggaggcaaggacaagttgcaggcgcacgggatccgcctccactcagtgtgtacattgtccaaaatgctggagattctcgagcagcagaaaaaagttgatgctgagacagttgggagagtgaagaggtttattcaggagaatgtctttgtggcagcgaatcataatggttctcccctttctataaaggaagcacccaaagaactcagcttcggtgcacgtgcagagctgcccaggatccacccagttgcatcgaagcttctcaggcttatgcaaaagaaggagaccaatctgtgtctatctgctgatgtttcactggccagagagctgttgcagctagcagatgctttaggacctagtatctgcatgctgaagactcatgtagatattttgaatgattttactctggatgtgatgaaggagttgataactctggcaaaatgccatgagttcttgatatttgaagaccggaagtttgcagatataggaaacacagtgaaaaagcagtatgaaggaggtatctttaaaatagcttcctgggcagatctagtaaatgctcacgtggtgccaggctcaggagttgtgaaaggcctgcaagaagtgggcctgcctttgcatcgggggtgcctccttattgcggaaatgagctccaccggctccctggccactggggactacactagagcagcggttagaatggctgaggagcactctgaatttgttgttggttttatttctggctcccgagtaagcatgaaaccagaatttcttcacttgactccaggagttcagttggaagcaggaggagataatcttggccaacagtacaatagcccacaagaagttattggcaaacgaggttccgatatcatcattgtaggtcgtggcataatctcagcagctgatcgtctggaagcagcagagatgtacagaaaagctgcttgggaagcgtatttgagtagacttggtgtttgagtgcttcagatacatttttcagatacaatgtgaagacattgaagatatgtggtcctcctgaaagtcactggctggaaataatccaattattcctgcttggattcttccacagggcctgtgtaagaatgggttctggagttctcatggtctttaggaaatattgagtaatttgtaatcaccgcattgatactataataagttcattcttaagcttgctttttttgagactggtgtttgttagacagccacagtcctgtctgggttagggtcttccacatttgaggatccttcctatctctccatgggactagactgctttgttattctatttattttttaatttttttcgagacaggatctcactctgttgcccaggatggagtgcagtggtgagatcacggctcattgcagcctcgacctcccaggtgatcctcccacctcagcttccagattagctggtgctataggcatgcaccaccacgtccatctaaatttctttattatttgtagagatgaggtcttgccatgttacccaggctggtctcaactcctgggctcaagcgatcctcctgcctcagtctctcaaagtgctgggattacaggtgtgagccactgtgcccagcctaattgcagtaagacaaaaattctagggcaccaagaggctaaagtcagcacagcttttcttgtgtcctgtattctctgtctaatgtgttgcccaaataatacctaattgttagccattcccctccatctctggcctaaaagtgatagtccaggtatccacatgggctggttcccagaactgccattgctcactctccaaagaggggaaggtggggaaggggaaggtgactatagctcagctcctgagctagtatctggctgttatttcaacaaccggagttggggtttgggctcattttttcccctagccagcaattatggaccagtagtaacacaagtgacagcttcctgtgactgacttcacaattaggaggtctaagattccatttgggtatttgcttaaggatcccacataattgtcccaacggtcattagtagaggggaggtaagccttcattaataataaagagaaagcccacattcaaggt

SEQ ID NO: 80030 - DNA, 2602 bp, Homo sapiens
cgggaaagctgcagacgaggcagggagaggcgggacttcgcgggcgagacgtcatcggggcgccggaggcccggggcgcctgggagtttgaagcaaacaggcagcgcgcgacaatggcggtcgctcgtgcagctttggggccattggtgacgggtctgtacgacgtgcaggctttcaagtttggggacttcgtgctgaagagcgggctttcctcccccatctacatcgatctgcggggcatcgtgtctcgaccgcgtcttctgagtcaggttgcagatattttattccaaactgcccaaaatgcaggcatcagttttgacaccgtgtgtggagtgccttatacagctttgccattggctacagttatctgttcaaccaatcaaattccaatgcttattagaaggaaagaaacaaaggattatggaactaagcgtcttgtagaaggaactattaatccaggagaaacctgtttaatcattgaagatgttgtcaccagtggatctagtgttttggaaactgttgaggttcttcagaaggagggcttgaaggtcactgatgccatagtgctgttggacagagagcagggaggcaaggacaagttgcaggcgcacgggatccgcctccactcagtgtgtacattgtccaaaatgctggagattctcgagcagcagaaaaaagttgatgctgagacagttgggagagtgaagaggtttattcaggagaatgtctttgtggcagcgaatcataatggttctcccctttctataaaggaagcacccaaagaactcagcttcggtgcacgtgcagagctgcccaggatccacccagttgcatcgaagcttctcaggcttatgcaaaagaaggagaccaatctgtgtctatctgctgatgtttcactggccagagagctgttgcagctagcagatgctttaggacctagtatctgcatgctgaagactcatgtagatattttgaatgattttactctggatgtgatgaaggagttgataactctggcaaaatgccatgagttcttgatatttgaagaccggaagtttgcagatataggaaacacagtgaaaaagcagtatgaagttgtgaaaggcctgcaagaagtgggcctgcctttgcatcgggggtgcctccttattgcggaaatgagctccaccggctccctggccactggggactacactagagcagcggttagaatggctgaggagcactctgaatttgttgttggttttatttctggctcccgagtaagcatgaaaccagaatttcttcacttgactccaggagttcagttggaagcaggaggagataatcttggccaacagtacaatagcccacaagaagttattggcaaacgaggttccgatatcatcattgtaggtcgtggcataatctcagcagctgatcgtctggaagcagcagagatgtacagaaaagctgcttgggaagcgtatttgagtagacttggtgtttgagtgcttcagatacatttttcagatacaatgtgaagacattgaagatatgtggtcctcctgaaagtcactggctggaaataatccaattattcctgcttggattcttccacagggcctgtgtaagaatgggttctggagttctcatggtctttaggaaatattgagtaatttgtaatcaccgcattgatactataataagttcattcttaagcttgctttttttgagactggtgtttgttagacagccacagtcctgtctgggttagggtcttccacatttgaggatccttcctatctctccatgggactagactgctttgttattctatttattttttaatttttttcgagacaggatctcactctgttgcccaggatggagtgcagtggtgagatcacggctcattgcagcctcgacctcccaggtgatcctcccacctcagcttccagattagctggtgctataggcatgcaccaccacgtccatctaaatttctttattatttgtagagatgaggtcttgccatgttacccaggctggtctcaactcctgggctcaagcgatcctcctgcctcagtctctcaaagtgctgggattacaggtgtgagccactgtgcccagcctaattgcagtaagacaaaaattctagggcaccaagaggctaaagtcagcacagcttttcttgtgtcctgtattctctgtctaatgtgttgcccaaataatacctaattgttagccattcccctccatctctggcctaaaagtgatagtccaggtatccacatgggctggttcccagaactgccattgctcactctccaaagaggggaaggtggggaaggggaaggtgactatagctcagctcctgagctagtatctggctgttatttcaacaaccggagttggggtttgggctcattttttcccctagccagcaattatggaccagtagtaacacaagtgacagcttcctgtgactgacttcacaattaggaggtctaagattccatttgggtatttgcttaaggatcccacataattgtcccaacggtcattagtagaggggaggtaagccttcattaataataaagagaaagcccacattcaaggt

SEQ ID NO: 80031 - DNA, 1934 bp, Homo sapiens
cgggaaagctgcagacgaggcagggagaggcgggacttcgcgggcgagacgtcatcggggcgccggaggcccggggcgcctgggagtttgaagcaaacaggcagcgcgcgacaatggcggtcgctcgtgcagctttggggccattggtgacgggtctgtacgacgtgcaggctttcaagtttggggacttcgtgctgaagagcgggctttcctcccccatctacatcgatctgcggggcatcgtgtctcgaccgcgtcttctgagtcaggttgcagatattttattccaaactgcccaaaatgcaggcatcagttttgacaccgtgtgtggagtgccttatacagctttgccattggctacagttatctgttcaaccaatcaaattccaatgcttattagaaggaaagaaacaaaggattatggaactaagcgtcttgtagaaggaactattaatccaggagaaacctgtttaatcattgaagatgttgtcaccagtggatctagtgttttggaaactgttgaggttcttcagaaggagggcttgaaggtcactgatgccatagtgctgttggacagagagcagggaggcaaggacaagttgcaggcgcacgggatccgcctccactcagtgtgtacattgtccaaaatgctggagattctcgagcagcagaaaaaagttgatgctgagacagttgggagagtgaagaggtttattcaggagaatgtctttgtggcagcgaatcataatggttctcccctttctataaaggaagcacccaaagaactcagcttcggtgcacgtgcagagctgcccaggatccacccagttgcatcgaagcttctcaggcttatgcaaaagaaggagaccaatctgtgtctatctgctgatgtttcactggccagagagctgttgcagctagcagatgctttaggacctagtatctgcatgctgaagactcatgtagatattttgaatgattttactctggatgtgatgaaggagttgataactctggcaaaatgccatgagttcttgatatttgaagaccggaagtttgcagatataggaaacacagtgaaaaagcagtatgaaggaggtatctttaaaatagcttcctgggcagatctagtaaatgctcacgtggtgccaggctcaggagttgtgaaaggcctgcaagaagtgggcctgcctttgcatcgggggtgcctccttattgcggaaatgagctccaccggctccctggccactggggactacactagagcagcggttagaatggctgaggagcactctgaatttgttgttggttttatttctggctcccgagtaagcatgaaaccagaatttcttcacttgactccaggagttcagttggaagcaggaggtaaatctggtcactggtcgtggctcttccaaaaatgcttctttacccatggcaggcaaaataaaactttgcatattattatacacttgcttaagaaaagccttcttagtctagaacaataatgaatgagccctttggtaactatgtatctttggacaagtcagtttacttcttttagtctaattgtctgtaaaatggggatgataacagtattgacctcataaggtaatcaagatgctttaatgagataacatgtagaatatttaacacaatgtcttggcacagagtaaacactctgtacttataagcccttattcgtaagccctaataattgtttgactagatattatagttagggtctaggttagaatactaagttctggttgggaattagcccttaagagggctgggaaggaattataagcaaataggccggttggagtggggccccggggcgtttagggggcgaagtcccggggggataagggcaccggggcatgtggtgccttaaaggggtctgcgggccgtttgttcgcacgcacgttgat

SEQ ID NO: 80032 - DNA, 1868 bp, Homo sapiens
cgggaaagctgcagacgaggcagggagaggcgggacttcgcgggcgagacgtcatcggggcgccggaggcccggggcgcctgggagtttgaagcaaacaggcagcgcgcgacaatggcggtcgctcgtgcagctttggggccattggtgacgggtctgtacgacgtgcaggctttcaagtttggggacttcgtgctgaagagcgggctttcctcccccatctacatcgatctgcggggcatcgtgtctcgaccgcgtcttctgagtcaggttgcagatattttattccaaactgcccaaaatgcaggcatcagttttgacaccgtgtgtggagtgccttatacagctttgccattggctacagttatctgttcaaccaatcaaattccaatgcttattagaaggaaagaaacaaaggattatggaactaagcgtcttgtagaaggaactattaatccaggagaaacctgtttaatcattgaagatgttgtcaccagtggatctagtgttttggaaactgttgaggttcttcagaaggagggcttgaaggtcactgatgccatagtgctgttggacagagagcagggaggcaaggacaagttgcaggcgcacgggatccgcctccactcagtgtgtacattgtccaaaatgctggagattctcgagcagcagaaaaaagttgatgctgagacagttgggagagtgaagaggtttattcaggagaatgtctttgtggcagcgaatcataatggttctcccctttctataaaggaagcacccaaagaactcagcttcggtgcacgtgcagagctgcccaggatccacccagttgcatcgaagcttctcaggcttatgcaaaagaaggagaccaatctgtgtctatctgctgatgtttcactggccagagagctgttgcagctagcagatgctttaggacctagtatctgcatgctgaagactcatgtagatattttgaatgattttactctggatgtgatgaaggagttgataactctggcaaaatgccatgagttcttgatatttgaagaccggaagtttgcagatataggaaacacagtgaaaaagcagtatgaagttgtgaaaggcctgcaagaagtgggcctgcctttgcatcgggggtgcctccttattgcggaaatgagctccaccggctccctggccactggggactacactagagcagcggttagaatggctgaggagcactctgaatttgttgttggttttatttctggctcccgagtaagcatgaaaccagaatttcttcacttgactccaggagttcagttggaagcaggaggtaaatctggtcactggtcgtggctcttccaaaaatgcttctttacccatggcaggcaaaataaaactttgcatattattatacacttgcttaagaaaagccttcttagtctagaacaataatgaatgagccctttggtaactatgtatctttggacaagtcagtttacttcttttagtctaattgtctgtaaaatggggatgataacagtattgacctcataaggtaatcaagatgctttaatgagataacatgtagaatatttaacacaatgtcttggcacagagtaaacactctgtacttataagcccttattcgtaagccctaataattgtttgactagatattatagttagggtctaggttagaatactaagttctggttgggaattagcccttaagagggctgggaaggaattataagcaaataggccggttggagtggggccccggggcgtttagggggcgaagtcccggggggataagggcaccggggcatgtggtgccttaaaggggtctgcgggccgtttgttcgcacgcacgttgat

SEQ ID NO: 80033 - DNA, 2453 bp, Homo sapiens
  misc_feature (2)..(2): n is a, c, g, or t
  misc_feature (12)..(12): n is a, c, g, or t
  misc_feature (15)..(15): n is a, c, g, or t
gnaacctttganaanccgacagatgggggaagcaaacaggcagcgcgcgacaatggcggtcgctcgtgcagctttggggccattggtgacgggtctgtacgacgtgcaggctttcaagtttggggacttcgtgctgaagagcgggctttcctcccccatctacatcgatctgcggggcatcgtgtctcgaccgcgtcttctgagtcaggaactaagcgtcttgtagaaggaactattaatccaggagaaacctgtttaatcattgaagatgttgtcaccagtggatctagtgttttggaaactgttgaggttcttcagaaggagggcttgaaggtcactgatgccatagtgctgttggacagagagcagggaggcaaggacaagttgcaggcgcacgggatccgcctccactcagtgtgtacattgtccaaaatgctggagattctcgagcagcagaaaaaagttgatgctgagacagttgggagagtgaagaggtttattcaggagaatgtctttgtggcagcgaatcataatggttctcccctttctataaaggaagcacccaaagaactcagcttcggtgcacgtgcagagctgcccaggatccacccagttgcatcgaagcttctcaggcttatgcaaaagaaggagaccaatctgtgtctatctgctgatgtttcactggccagagagctgttgcagctagcagatgctttaggacctagtatctgcatgctgaagactcatgtagatattttgaatgattttactctggatgtgatgaaggagttgataactctggcaaaatgccatgagttcttgatatttgaagaccggaagtttgcagatataggaaacacagtgaaaaagcagtatgaaggaggtatctttaaaatagcttcctgggcagatctagtaaatgctcacgtggtgccaggctcaggagttgtgaaaggcctgcaagaagtgggcctgcctttgcatcgggggtgcctccttattgcggaaatgagctccaccggctccctggccactggggactacactagagcagcggttagaatggctgaggagcactctgaatttgttgttggttttatttctggctcccgagtaagcatgaaaccagaatttcttcacttgactccaggagttcagttggaagcaggaggagataatcttggccaacagtacaatagcccacaagaagttattggcaaacgaggttccgatatcatcattgtaggtcgtggcataatctcagcagctgatcgtctggaagcagcagagatgtacagaaaagctgcttgggaagcgtatttgagtagacttggtgtttgagtgcttcagatacatttttcagatacaatgtgaagacattgaagatatgtggtcctcctgaaagtcactggctggaaataatccaattattcctgcttggattcttccacagggcctgtgtaagaatgggttctggagttctcatggtctttaggaaatattgagtaatttgtaatcaccgcattgatactataataagttcattcttaagcttgctttttttgagactggtgtttgttagacagccacagtcctgtctgggttagggtcttccacatttgaggatccttcctatctctccatgggactagactgctttgttattctatttattttttaatttttttcgagacaggatctcactctgttgcccaggatggagtgcagtggtgagatcacggctcattgcagcctcgacctcccaggtgatcctcccacctcagcttccagattagctggtgctataggcatgcaccaccacgtccatctaaatttctttattatttgtagagatgaggtcttgccatgttacccaggctggtctcaactcctgggctcaagcgatcctcctgcctcagtctctcaaagtgctgggattacaggtgtgagccactgtgcccagcctaattgcagtaagacaaaaattctagggcaccaagaggctaaagtcagcacagcttttcttgtgtcctgtattctctgtctaatgtgttgcccaaataatacctaattgttagccattcccctccatctctggcctaaaagtgatagtccaggtatccacatgggctggttcccagaactgccattgctcactctccaaagaggggaaggtggggaaggggaaggtgactatagctcagctcctgagctagtatctggctgttatttcaacaaccggagttggggtttgggctcattttttcccctagccagcaattatggaccagtagtaacacaagtgacagcttcctgtgactgacttcacaattaggaggtctaagattccatttgggtatttgcttaaggatcccacataattgtcccaacggtcattagtagaggggaggtaagccttcattaataataaagagaaagcccacattcaaggt

SEQ ID NO: 80034 - DNA, 2273 bp, Homo sapiens
ggagttcaagaccagcctagacaacatagaactaagcgtcttgtagaaggaactattaatccaggagaaacctgtttaatcattgaagatgttgtcaccagtggatctagtgttttggaaactgttgaggttcttcagaaggagggcttgaaggtcactgatgccatagtgctgttggacagagagcagggaggcaaggacaagttgcaggcgcacgggatccgcctccactcagtgtgtacattgtccaaaatgctggagattctcgagcagcagaaaaaagttgatgctgagacagttgggagagtgaagaggtttattcaggagaatgtctttgtggcagcgaatcataatggttctcccctttctataaaggaagcacccaaagaactcagcttcggtgcacgtgcagagctgcccaggatccacccagttgcatcgaagcttctcaggcttatgcaaaagaaggagaccaatctgtgtctatctgctgatgtttcactggccagagagctgttgcagctagcagatgctttaggacctagtatctgcatgctgaagactcatgtagatattttgaatgattttactctggatgtgatgaaggagttgataactctggcaaaatgccatgagttcttgatatttgaagaccggaagtttgcagatataggaaacacagtgaaaaagcagtatgaaggaggtatctttaaaatagcttcctgggcagatctagtaaatgctcacgtggtgccaggctcaggagttgtgaaaggcctgcaagaagtgggcctgcctttgcatcgggggtgcctccttattgcggaaatgagctccaccggctccctggccactggggactacactagagcagcggttagaatggctgaggagcactctgaatttgttgttggttttatttctggctcccgagtaagcatgaaaccagaatttcttcacttgactccaggagttcagttggaagcaggaggagataatcttggccaacagtacaatagcccacaagaagttattggcaaacgaggttccgatatcatcattgtaggtcgtggcataatctcagcagctgatcgtctggaagcagcagagatgtacagaaaagctgcttgggaagcgtatttgagtagacttggtgtttgagtgcttcagatacatttttcagatacaatgtgaagacattgaagatatgtggtcctcctgaaagtcactggctggaaataatccaattattcctgcttggattcttccacagggcctgtgtaagaatgggttctggagttctcatggtctttaggaaatattgagtaatttgtaatcaccgcattgatactataataagttcattcttaagcttgctttttttgagactggtgtttgttagacagccacagtcctgtctgggttagggtcttccacatttgaggatccttcctatctctccatgggactagactgctttgttattctatttattttttaatttttttcgagacaggatctcactctgttgcccaggatggagtgcagtggtgagatcacggctcattgcagcctcgacctcccaggtgatcctcccacctcagcttccagattagctggtgctataggcatgcaccaccacgtccatctaaatttctttattatttgtagagatgaggtcttgccatgttacccaggctggtctcaactcctgggctcaagcgatcctcctgcctcagtctctcaaagtgctgggattacaggtgtgagccactgtgcccagcctaattgcagtaagacaaaaattctagggcaccaagaggctaaagtcagcacagcttttcttgtgtcctgtattctctgtctaatgtgttgcccaaataatacctaattgttagccattcccctccatctctggcctaaaagtgatagtccaggtatccacatgggctggttcccagaactgccattgctcactctccaaagaggggaaggtggggaaggggaaggtgactatagctcagctcctgagctagtatctggctgttatttcaacaaccggagttggggtttgggctcattttttcccctagccagcaattatggaccagtagtaacacaagtgacagcttcctgtgactgacttcacaattaggaggtctaagattccatttgggtatttgcttaaggatcccacataattgtcccaacggtcattagtagaggggaggtaagccttcattaataataaagagaaagcccacattcaaggt

SEQ ID NO: 80035 - DNA, 1684 bp, Homo sapiens
gaagaagggtatgtgcctgggcaagcaaatttgacagatgtccttggcagaatatgatgttttgaatgaaaattccacataaaggaaacaatgaaaaagaaatataaaatggaggtatctttaaaatagcttcctgggcagatctagtaaatgctcacgtggtgccaggctcaggagttgtgaaaggcctgcaagaagtgggcctgcctttgcatcgggggtgcctccttattgcggaaatgagctccaccggctccctggccactggggactacactagagcagcggttagaatggctgaggagcactctgaatttgttgttggttttatttctggctcccgagtaagcatgaaaccagaatttcttcacttgactccaggagttcagttggaagcaggaggagataatcttggccaacagtacaatagcccacaagaagttattggcaaacgaggttccgatatcatcattgtaggtcgtggcataatctcagcagctgatcgtctggaagcagcagagatgtacagaaaagctgcttgggaagcgtatttgagtagacttggtgtttgagtgcttcagatacatttttcagatacaatgtgaagacattgaagatatgtggtcctcctgaaagtcactggctggaaataatccaattattcctgcttggattcttccacagggcctgtgtaagaatgggttctggagttctcatggtctttaggaaatattgagtaatttgtaatcaccgcattgatactataataagttcattcttaagcttgctttttttgagactggtgtttgttagacagccacagtcctgtctgggttagggtcttccacatttgaggatccttcctatctctccatgggactagactgctttgttattctatttattttttaatttttttcgagacaggatctcactctgttgcccaggatggagtgcagtggtgagatcacggctcattgcagcctcgacctcccaggtgatcctcccacctcagcttccagattagctggtgctataggcatgcaccaccacgtccatctaaatttctttattatttgtagagatgaggtcttgccatgttacccaggctggtctcaactcctgggctcaagcgatcctcctgcctcagtctctcaaagtgctgggattacaggtgtgagccactgtgcccagcctaattgcagtaagacaaaaattctagggcaccaagaggctaaagtcagcacagcttttcttgtgtcctgtattctctgtctaatgtgttgcccaaataatacctaattgttagccattcccctccatctctggcctaaaagtgatagtccaggtatccacatgggctggttcccagaactgccattgctcactctccaaagaggggaaggtggggaaggggaaggtgactatagctcagctcctgagctagtatctggctgttatttcaacaaccggagttggggtttgggctcattttttcccctagccagcaattatggaccagtagtaacacaagtgacagcttcctgtgactgacttcacaattaggaggtctaagattccatttgggtatttgcttaaggatcccacataattgtcccaacggtcattagtagaggggaggtaagccttcattaataataaagagaaagcccacattcaaggt

SEQ ID NO: 80036 - DNA, 611 bp, Homo sapiens
cgggaaagctgcagacgaggcagggagaggcgggacttcgcgggcgagacgtcatcggggcgccggaggcccggggcgcctgggagtttgaagcaaacaggcagcgcgcgacaatggcggtcgctcgtgcagctttggggccattggtgacgggtctgtacgacgtgcaggctttcaagtttggggacttcgtgctgaagagcgggctttcctcccccatctacatcgatctgcggggcatcgtgtctcgaccgcgtcttctgagtcaggttgcagatattttattccaaactgcccaaaatgcaggcatcagttttgacaccgtgtgtggagtgccttatacagctttgccattggctacagttatctgttcaactcgacttagcagattcaagaaagaagatcaggaaggggcatgacccctgagtgtccaagtgagggaggctcaggtgctgaggatggactagtgctgtgtggtgaggagagcagtctccggaagctcatctgtcccttctccccttcataactcaggggtcatgccccttcctgatcttctttcttgaatctgctctgtgcagcctcacatggccactcaataccggggatcctct

SEQ ID NO: 80037 - DNA, 428 bp, Homo sapiens
tgatttttgtattatgtgaaacaacaatttttgtgtttcttgcaggagataatcttggccaacagtacaatagcccacaagaagttattggcaaacgaggttccgatatcatcattgtaggtcgtggcataatctcagcagctgatcgtctggaagcagcagagatgtacagaaaagctgcttgggaagcgtatttgagtagacttggtgtttgagtgcttcagatacatttttcagatacaatgtgaagacattgaagatatgtggtcctcctgaaagtcactggctggaaataatccaattattcctgcttggattcttccacagggcctgtgtaagaatgggttctggagttctcatggtctttaggaaatattgagtaatttgtaatcaccgcattgatactataataagttcattcttaagct

SEQ ID NO: 80038 - DNA, 1454 bp, Homo sapiens
  misc_feature (1437)..(1437): n is a, c, g, or t
  misc_feature (1449)..(1449): n is a, c, g, or t
cgggaaagctgcagacgaggcagggagaggcgggacttcgcgggcgagacgtcatcggggcgccggaggcccggggcgcctgggagtttgaagcaaacaggcagcgcgcgacaatggcggtcgctcgtgcagctttggggccattggtgacgggtctgtacgacgtgcaggctttcaagtttggggacttcgtgctgaagagcgggctttcctcccccatctacatcgatctgcggggcatcgtgtctcgaccgcgtcttctgagtcaggttgcagatattttattccaaactgcccaaaatgcaggcatcagttttgacaccgtgtgtggagtgccttatacagctttgccattggctacagttatctgttcaaccaatcaaattccaatgcttattagaaggaaagaaacaaaggattatggaactaagcgtcttgtagaaggaactattaatccaggagaaacctgtttaatcattgaagatgttgtcaccagtggatctagtgttttggaaactgttgaggttcttcagaaggagggcttgaaggtcactgatgccatagtgctgttggacagagagcagggaggcaaggacaagttgcaggcgcacgggatccgcctccactcagtgtgtacattgtccaaaatgctggagattctcgagcagcagaaaaaagttgatgctgagacagttgggagagtgaagaggtttattcaggagaatgtctttgtggcagcgaatcataatggttctcccctttctataaaggaagcacccaaagaactcagcttcggtgcacgtgcagagctgcccaggatccacccagttgcatcgaagcttctcaggcttatgcaaaagaaggagaccaatctgtgtctatctgctgatgtttcactggccagagagctgttgcagctagcagatgctttaggacctagtatctgcatgctgaagactcatgtagatattttgaatgattttactctggatgtgatgaaggagttgataactctggcaaaatgccatgagttcttgatatttgaagaccggaagtttgcagatataggaaacacagtgaaaaagcagtatgaaggaggtatctttaaaatagcttcctgggcagatctagtaaatgctcacgtggtgccaggctcaggagttgtgaaaggcctgcaagaagtgggcctgcctttgcatcgggggtgcctccttattgcggaaatgagctccaccggctccctggccactggggactacactagagcagcggttagaatggctgaggagcactctgaatttgttgttggttttatttctggctcccgagtaagcatgaaaccagaatttcttcacttgactccaggagttcagttggaagcaggaggagataatctggcccataccatagcccacaggagttattggcgaggtcgangtcacatgtagncgtgc

SEQ ID NO: 80039 - DNA, 2706 bp, Homo sapiens
  misc_feature (2)..(2): n is a, c, g, or t
  misc_feature (12)..(12): n is a, c, g, or t
  misc_feature (15)..(15): n is a, c, g, or t
gnaacctttganaanccgacagatgggggaagcaaacaggcagcgcgcgacaatggcggtcgctcgtgcagctttggggccattggtgacgggtctgtacgacgtgcaggctttcaagtttggggacttcgtgctgaagagcgggctttcctcccccatctacatcgatctgcggggcatcgtgtctcgaccgcgtcttctgagtcagatgggatctctcttacgtcacccaggctggagtgcagctctgtgatcatagctcactgcagcctggaactcctgggcttaagagatcttcttgcctcgggttgcagatattttattccaaactgcccaaaatgcaggcatcagttttgacaccgtgtgtggagtgccttatacagctttgccattggctacagttatctgttcaaccaatcaaattccaatgcttattagaaggaaagaaacaaaggattatggaactaagcgtcttgtagaaggaactattaatccaggagaaacctgtttaatcattgaagatgttgtcaccagtggatctagtgttttggaaactgttgaggttcttcagaaggagggcttgaaggtcactgatgccatagtgctgttggacagagagcagggaggcaaggacaagttgcaggcgcacgggatccgcctccactcagtgtgtacattgtccaaaatgctggagattctcgagcagcagaaaaaagttgatgctgagacagttgggagagtgaagaggtttattcaggagaatgtctttgtggcagcgaatcataatggttctcccctttctataaaggaagcacccaaagaactcagcttcggtgcacgtgcagagctgcccaggatccacccagttgcatcgaagcttctcaggcttatgcaaaagaaggagaccaatctgtgtctatctgctgatgtttcactggccagagagctgttgcagctagcagatgctttaggacctagtatctgcatgctgaagactcatgtagatattttgaatgattttactctggatgtgatgaaggagttgataactctggcaaaatgccatgagttcttgatatttgaagaccggaagtttgcagatataggaaacacagtgaaaaagcagtatgaaggaggtatctttaaaatagcttcctgggcagatctagtaaatgctcacgtggtgccaggctcaggagttgtgaaaggcctgcaagaagtgggcctgcctttgcatcgggggtgcctccttattgcggaaatgagctccaccggctccctggccactggggactacactagagcagcggttagaatggctgaggagcactctgaatttgttgttggttttatttctggctcccgagtaagcatgaaaccagaatttcttcacttgactccaggagttcagttggaagcaggaggagataatcttggccaacagtacaatagcccacaagaagttattggcaaacgaggttccgatatcatcattgtaggtcgtggcataatctcagcagctgatcgtctggaagcagcagagatgtacagaaaagctgcttgggaagcgtatttgagtagacttggtgtttgagtgcttcagatacatttttcagatacaatgtgaagacattgaagatatgtggtcctcctgaaagtcactggctggaaataatccaattattcctgcttggattcttccacagggcctgtgtaagaatgggttctggagttctcatggtctttaggaaatattgagtaatttgtaatcaccgcattgatactataataagttcattcttaagcttgctttttttgagactggtgtttgttagacagccacagtcctgtctgggttagggtcttccacatttgaggatccttcctatctctccatgggactagactgctttgttattctatttattttttaatttttttcgagacaggatctcactctgttgcccaggatggagtgcagtggtgagatcacggctcattgcagcctcgacctcccaggtgatcctcccacctcagcttccagattagctggtgctataggcatgcaccaccacgtccatctaaatttctttattatttgtagagatgaggtcttgccatgttacccaggctggtctcaactcctgggctcaagcgatcctcctgcctcagtctctcaaagtgctgggattacaggtgtgagccactgtgcccagcctaattgcagtaagacaaaaattctagggcaccaagaggctaaagtcagcacagcttttcttgtgtcctgtattctctgtctaatgtgttgcccaaataatacctaattgttagccattcccctccatctctggcctaaaagtgatagtccaggtatccacatgggctggttcccagaactgccattgctcactctccaaagaggggaaggtggggaaggggaaggtgactatagctcagctcctgagctagtatctggctgttatttcaacaaccggagttggggtttgggctcattttttcccctagccagcaattatggaccagtagtaacacaagtgacagcttcctgtgactgacttcacaattaggaggtctaagattccatttgggtatttgcttaaggatcccacataattgtcccaacggtcattagtagaggggaggtaagccttcattaataataaagagaaagcccacattcaaggt

SEQ ID NO: 80040 - DNA, 2267 bp, Homo sapiens
cggacgcgtgggtcgacccacggaactaagcgtcttgtagaaggaactattaatccaggagaaacctgtttaatcattgaagatgttgtcaccagtggatctagtgttttggaaactgttgaggttcttcagaaggagggcttgaaggtcactgatgccatagtgctgttggacagagagcagggaggcaaggacaagttgcaggcgcacgggatccgcctccactcagtgtgtacattgtccaaaatgctggagattctcgagcagcagaaaaaagttgatgctgagacagttgggagagtgaagaggtttattcaggagaatgtctttgtggcagcgaatcataatggttctcccctttctataaaggaagcacccaaagaactcagcttcggtgcacgtgcagagctgcccaggatccacccagttgcatcgaagcttctcaggcttatgcaaaagaaggagaccaatctgtgtctatctgctgatgtttcactggccagagagctgttgcagctagcagatgctttaggacctagtatctgcatgctgaagactcatgtagatattttgaatgattttactctggatgtgatgaaggagttgataactctggcaaaatgccatgagttcttgatatttgaagaccggaagtttgcagatataggaaacacagtgaaaaagcagtatgaaggaggtatctttaaaatagcttcctgggcagatctagtaaatgctcacgtggtgccaggctcaggagttgtgaaaggcctgcaagaagtgggcctgcctttgcatcgggggtgcctccttattgcggaaatgagctccaccggctccctggccactggggactacactagagcagcggttagaatggctgaggagcactctgaatttgttgttggttttatttctggctcccgagtaagcatgaaaccagaatttcttcacttgactccaggagttcagttggaagcaggaggagataatcttggccaacagtacaatagcccacaagaagttattggcaaacgaggttccgatatcatcattgtaggtcgtggcataatctcagcagctgatcgtctggaagcagcagagatgtacagaaaagctgcttgggaagcgtatttgagtagacttggtgtttgagtgcttcagatacatttttcagatacaatgtgaagacattgaagatatgtggtcctcctgaaagtcactggctggaaataatccaattattcctgcttggattcttccacagggcctgtgtaagaatgggttctggagttctcatggtctttaggaaatattgagtaatttgtaatcaccgcattgatactataataagttcattcttaagcttgctttttttgagactggtgtttgttagacagccacagtcctgtctgggttagggtcttccacatttgaggatccttcctatctctccatgggactagactgctttgttattctatttattttttaatttttttcgagacaggatctcactctgttgcccaggatggagtgcagtggtgagatcacggctcattgcagcctcgacctcccaggtgatcctcccacctcagcttccagattagctggtgctataggcatgcaccaccacgtccatctaaatttctttattatttgtagagatgaggtcttgccatgttacccaggctggtctcaactcctgggctcaagcgatcctcctgcctcagtctctcaaagtgctgggattacaggtgtgagccactgtgcccagcctaattgcagtaagacaaaaattctagggcaccaagaggctaaagtcagcacagcttttcttgtgtcctgtattctctgtctaatgtgttgcccaaataatacctaattgttagccattcccctccatctctggcctaaaagtgatagtccaggtatccacatgggctggttcccagaactgccattgctcactctccaaagaggggaaggtggggaaggggaaggtgactatagctcagctcctgagctagtatctggctgttatttcaacaaccggagttggggtttgggctcattttttcccctagccagcaattatggaccagtagtaacacaagtgacagcttcctgtgactgacttcacaattaggaggtctaagattccatttgggtatttgcttaaggatcccacataattgtcccaacggtcattagtagaggggaggtaagccttcattaataataaagagaaagcccacattcaaggt

SEQ ID NO: 80041 - DNA, 953 bp, Homo sapiens
cgggaaagctgcagacgaggcagggagaggcgggacttcgcgggcgagacgtcatcggggcgccggaggcccggggcgcctgggagtttgaagcaaacaggcagcgcgcgacaatggcggtcgctcgtgcagctttggggccattggtgacgggtctgtacgacgtgcaggctttcaagtttggggacttcgtgctgaagagcgggctttcctcccccatctacatcgatctgcggggcatcgtgtctcgaccgcgtcttctgagtcaggttgcagatattttattccaaactgcccaaaatgcaggcatcagttttgacaccgtgtgtggagtgccttatacagctttgccattggctacagttatctgttcaaccaatcaaattccaatgcttattagaaggaaagaaacaaaggattatggtaaaataaaagtaacataaagcatgaagttaattaatctgtaacatcatactcttagaatttttccgcttctgtgcactaatgttttaccagtcatcttgagttctttaagttgttactgcttgtagaatttataattgttactataagtcaccttcctttttttagacttggggtgaaatgctttgtattgattaggaaatgaaaagtgctttttttggtactgtatctatgaaactccaacattttttttttttaccagcccttccctcatcagcaaaatgttgtaacagcacatactttcccagtatgtttgtatttaaacttcatgaaaagtaatccatggataaaattactctcataaagcagtgtaaacacctcagagagatatttttgtgggttcatggcaatagattatcaggtgacttgctttaaaacccgaaaatttgtccaggcaccatggctcacgcctgtaatcccagcacttttggaggccgaggtaggcggatcacttgaggtcaggagttcaa

SEQ ID NO: 80042 - DNA, 775 bp, Homo sapiens
aaggcactctggctttttaagttctcagggttcttgcactgattctttctcatcgttttgggcttatcttccttcaattttttaggttgctggtgtttggatttttttttctcttatcctatttgataaccttgagtgtttgattctggtataaggtggattcagctgactggcttcatttctagaagattttagggagccaacactcagctcctaactcctggactgtgtgctttaaatatgggagacttgtactgggctgcaactttgttctctgtctcctggaggtcaggaatctactgcactggggatgctgaggttctcacagactgcttctcatcacactcccataggtggtgtcagccaaaaggttctgtgatgtgtgaaaacaacttgggagtagtaatgaagatgaccagaggccagcgagctgaaagtgtttccagcaaagcagccctctgatccatatactttagctacaacttacatcaccaaggtccatattatatactgtgatattccagctgcacagcgaagaatccgtcacctgctgacaaaaacaaatgatgctgagaggtttgggcacaataaagtggataattatacacaggcactttttcccatgcagcattctttaaggatgtgccagaggatcttgaaagatctttgaagagctatgaactgatagaaatacaatcttggatttattttttaatcatttgctagttaataaaattactgctttcaatgtagaattacagcttttaactgatcc

SEQ ID NO: 80043 - DNA, 363 bp, Homo sapiens
tgcttcatgagacctctggtatgatgagttggctcattacatttgctttttttaaaaggaaccctataagacattatcaagagacttttcaatccaatctatttgtgattgcatctttgttttcaaagaaactatttttggaattgttggtttagagttccatctcttagtgtggtcaaaattaactacttagagatactaggcaggatgtaactgagtcagctaatggaactcatgtgttgaagaaaaatttcttgacaaagaaaaaaaaaatggaaggttggggctagaggaagcacccatgggaataataatgtgatttagaatatgccttactacactggcatctgaaaagattttata

SEQ ID NO: 80044 - DNA, 1511 bp, Homo sapiens
tggtacatatacaccatggaatactacgcagccataaaaaaacaagatcatgtcctttacagggacataaatggagctggaagccattatccttagcaaactaatgcaggaatagaaaaccaaacattacatgttctcacttataagtgggagctgaacaatgagaacacagggaggggaacaacacttaccggggcctgtcaggggaggatggtgggggaagagcactagggaaaagagctaatgcatgcggggcttaaacctaggtgatgggttgataggtgcagcaaaccaccatagcacacgtttacctatataataaacctgtacgtcctgcacatgtacccaggaacttaaaaaaaaagtcaagtggttgaggattttataattgattttttagtcttaaaaaaaggaaaaaacaagaaataaataaataccatttaaaaaataaaaaatgcaagtgatagcttgccatatacacagttctatcccttgtgtttttcatgtacatatcttggatgtgatcttactgaatgctctctcattctttgttatagctgcatagtgtttagcagtgtttctgatttctctcttgtctccaacatctactcaattgccaagttatattaatgatgtattatttttcctatggcatctctattcccagtgctgattagtttagactttcacgcctggattgccacaatagcctcctgtttgtcctctccttagcctttcctttatttcatgctattccgttagattcatcttaagtaccgctctgattatgttatttcccagcttagcaattttctccttgcctgcagaatctgatgctacgttctctccatttttcttactgccccctcctccttcatgctctgaactcttaagtcacaccgaagagcctgatgatcctagaacagaccttgtgaattttcacgggagcgttttccatattgttactttaccttgaggtagatgacattgccaccaagtccaaaaccaccccatccttcagttcagctcagacactaactttcctctgaaggcctactgatccccacaattagtccagcaagctaaaagtgagtctggcaaggtgcctaagatacatttaaggggttgctcattctcagggtcatgcaagtgccaacgctgcattcacacaccctgagagtgggtggcttcttaaattttgcctcctcagtgacttgcttacctcttcctagtcccagcctttccttagcagtcctaggcctcctctaaactcccaaagagcttgatttgcacatctctaagggtgttctcttcctagcctgcactgtagttattgaagtacagacttcattttctccccactaagttccttgagggcggcaccacgcctgacccacactggatccctggtgcctctccccgaatctcacacacagcccacgtgtatttgttacagctctttaggttaggactgtctgctcacctgaaaccatgctcaaaggactttcgta

SEQ ID NO: 80045 - DNA, 632 bp, Homo sapiens
  misc_feature (5)..(5): n is a, c, g, or t
  misc_feature (7)..(7): n is a, c, g, or t
  misc_feature (10)..(10): n is a, c, g, or t
  misc_feature (14)..(14): n is a, c, g, or t
  misc_feature (16)..(16): n is a, c, g, or t
  misc_feature (19)..(19): n is a, c, g, or t
  misc_feature (22)..(22): n is a, c, g, or t
  misc_feature (631)..(632): n is a, c, g, or t
aagantnatncttntngcnaanccaaacatccataggactacatactcacagaggtagcaacttcttctgaaggacacctattagcagcctaaactttcctctaagaaacccagcctactcttgtgtcagactgctgaaggcagctacttatatagcctgaatgtttattttcccccaaactctgtatgttgaaacctgatcatgaatgtgatgatgttggagtttgggcctttgggaggtgattgaatcatgagggtgctgaatggggttagtgcttcctataaatgaggccccaaagtcacctggcctcttccatcttctgatgacacagtcagttggtgccgtctatgaatcaggaggcaggccctcaccagacacctgctagtgccttgcttttggattccccagcctccacaactgtgagaaataaaatttctgttatttataagctacccattctattgtattttgctatagcagcctgatatcgtttggctgtatccccacccaaatctcatcttgaattgtagctcccataatccccatgtgtcttgggagggatccggtgggaggtaattgaatcatgggggtgggtttttcccatgctgttcttgtgatagtgaaagtctnn

SEQ ID NO: 80046 - DNA, 321 bp, Homo sapiens
  misc_feature (8)..(8): n is a, c, g, or t
  misc_feature (303)..(303): n is a, c, g, or t
ggaggaanagtgaataaaaaatagaaaataaaaacaatatggaagtattaggcaaaatatacagttacggcaataaattaaaatgtgttgtcccggcacagtggctcatgcctgtaatcctaccactttgggagggaagggttgggcggacacgaggtcaggagttccagaccagcttggccaacatggcaaaacctgtctctactaaaaatacaaaaatcggccgggcgtggtggcgggcacctgtaatcccagctacttgggaggctggggcaggagaataacttgaacttgggagggggngtttgcagtgagccgaga

SEQ ID NO: 80047 - DNA, 524 bp, Homo sapiens
cttaaaatatttcagttaaattttttaatacattatatagcaaacttactgtgccttatatagcagtgtttaaggatcattattttaatttgaatatgccagtgagttcttcatattaagctttttacaatatataatccatgctaaatacatattttggttgtgcttttaacataaatcttaggatgggaaatcatagaaagctggttgcaaatatcagtgggtatttttttaaatttttgagggaatcatttgtgcattataacatgtcttcaatgtgttgtttaattccttttcattgtgccaagatatgtcccattttcttacttagaacacttatatatggaaataaagacattaattcatacattaaagtgatttcaaataaattatatgcactagaacttaacacttaaatatgcatttagcttcttaaaaatacttttattttctgttattgtaagatacaagagtggaggtaggtgcaaggtattgccaacttggtccagtgctcctgcagtctg

SEQ ID NO: 80048 - DNA, 404 bp, Homo sapiens
tgcctgtatttgctaatttttccagaatgggaatttttatttttaaaaaaaggccctcagaggaaacaaaagaaaatgtcagtaggtgaaaaaaggactcaaacgtgacatttttcagaaagtattttttaattaaaaaaaaaatcaccaccgacaccacagactattccctttgcaggtccctgtgcaggttccaaccctagggctcatgaaatcaaattactaggtcaggatcagcatttaagaaaagaatagaatagaaatagcaagcggaaaatcctcaaaattttgaaaagtatgaaaagaaaaaaggctcaaaaacacataaagcaaaatgactacaacctgagaaccagagagtaaggacactggccaaattattattttatttatttatttatttt

SEQ ID NO: 80049 - DNA, 709 bp, Homo sapiens
cactagggggctgcttgtagggggatggaaaaaacggaggcttaaaaaaatcatgctgctgaaatttcagcaagaggggaaaagagagagcgcgtgagagagagagagagagagagagagagagagagagagagacagcaaagcagtcccaggcttcctcctctctttcacgtcagaggcaggaaccgactgtgctaaggctgttggctcaacacccagaggagacgggcagacccagggagagtgagagaagggggtcctctctgacccaaggaattaccactagtggagtgaagccacctgactttttgatcttattttggttgcctcctcattctccttccacccgtagccctgacagcttgggtttcatttctttcgtggagccttgtctcttcctcccagaataggaggaagggaagagaagggaaagaggagggctctctaggtgagcgcatcagctggctccagcctgagcaagcaagaattttcttcccaggaagctcctctcgctccccggccgcccacccccagcctgggtggctgtatcgttttaactgcatagagggcaggtctcttttggaattaggattaaagaaagtgcagtaaagagaaagcatcgaagacaccatcacaaaagattcccacaactccatgctgtgtgctgcaggctggtcctgaacccagatctctggctgagaggatgggg

SEQ ID NO: 80050 - DNA, 1062 bp, Homo sapiens
cactagggggctgcttgtagggggatggaaaaaacggaggcttaaaaaaatcatgctgctgaaatttcagcaagaggggaaaagagagagcgcgtgagagagagagagagagagagagagagagagagagagagacagcaaagcagtcccaggcttcctcctctctttcacgtcagaggcaggaaccgactgtgctaaggctgttggctcaacacccagaggagacgggcagacccagggagagtgagagaagggggtcctctctgacccaaggaattaccactagtggagtgaagccacctgactttttgatcttattttggttgcctcctcattctccttccacccgtagccctgacagcttgggtttcatttctttcgtggagccttgtctcttcctcccagaataggaggaagggaagagaagggaaagaggagggctctctaggtgagcgcatcagctggctccagcctgagcaagcaagaattttcttcccaggaagctcctctcgctccccggccgcccacccccagcctgggtggctgtatcgttttaactgcatagagggcaggtctcttttggaattaggattaaagaaagtgcagtaaagagaaagcatcgaagacaccatcacaaaaggtatttcctgtgaacatttgatcattcatcattcccatggccagtctgtggctttcatatgtaactgcatattcccagggatctgagaccttttgttactggaacaacaccctgggggctagtctccttgaaatgaggtggtcaacagcattagctcctctgggcttcatgcagtctctgaaaaagctggagaaaccgggtaccaaggctttggcttctcataaaatatttctgaatgcatttcatgatgcggttggtaatgaaagtgtgttactgtgctcagtccctccaagaagctagacttgactcccagcctgcctgtgcctgcactgggcccgcatgaatcagtgataaattattcaccagtctcgctctaaaatttctggagttccaaaacccctaataaagtattatgaaaaaat

SEQ ID NO: 80051 - DNA, 482 bp, Homo sapiens
ccagccaaactttttcctagtaagtgaagaaggctctcagcagaaagtacctgtaggccccctcctcccctgggcaccagagaacccagcagcccctcctctaggctggcagtccctggccggagaggctcccatagggcacttgggattcacggagcagggcccagccgccctgctccaggcaaggtgctgggtgtgtttctgacgccaccaagggtgcccatctgccagcactgcaagtgacactatggcgttgtctccctggtggggtgacctggtgctgttttaggctgctgaagtgggtgtgattggcaggctgaacggggtgggctcgcctggcttcgtcatcccccacttttccctgaaataaatcagttcttcatagacatgcaagttcttcacaagccctaaccctgccagctgtcttacaaaaaccccacttaaaatcactagagagttgaacttgtcttggaggcgtcaaa

SEQ ID NO: 80052 - DNA, 488 bp, Homo sapiens
gtatttggagacgacccaagcttgtttaatttctaacctttgtggggaaggggagaggggaaatgaagcatagctttgatccttaggtaatttttgtgttacagttaacattttagacataatttgaaggagttaaggagctataaagaaatttagcagaatggtgggatttggatttgaatcaaaatgatttccctgtgttaaatgagaaactcagcttatttatatctaaagatgtgctttttttcctttctgaaaggaatttcttagaaaaaaattaagaatctttaaaaagaaaaatatagtgacactagtcccaaaatacctcattatcttggaggtttaattatgctcaaatgccttatgtcaacttttttcttttcttttttactaagtaaacaatacatgtggtttaaaatgagatgagctaaataaatgactaatcctataaatttcaaacatttgggggaaaagctctagaaatttta

SEQ ID NO: 80053 - DNA, 457 bp, Homo sapiens
aatgactaaatatcagaatggtgagtgtggagggtcaggatgtctgccaaattggagatgactcttcacttctcaatcttggtgtctcatctggggaagctggagggagacatgcacagcttctcatgaacagtcctggaagcccttaccccaaggcctcatggggctctctccagggcttgctctttgtcactcctttaaaagcctgtcattcattgccagagaacagaagactccatcctaaggccaagttgaaaacggcaggcttgggagctgtctagactctgggtcctggcttttgtcttggctggtgtcaaaatggactctttaaaaactgtcctcaggaagattccccatccaactctgaacagcctggactgatctttttctgatttttaggggtcttgtgaacaagagtcaggtgggcgggcagctcttgtaaagctgaacataacca

SEQ ID NO: 80054 - DNA, 770 bp, Homo sapiens
cttaggtaagaaaattctgaaatgaaggaatattttaaaatacagaaaaagattaagaagtcaccagaaagctagtagttaatcattgaataaaggaacactctacagagaccaaaaactgatgaaacaggctccatcttgctgaatggcgcaagaatgggaaacacaatggaaatgaatcacagatagttgtgaggaggattctttgaaagaaggaaaactctgtttctctatctgtaggatgtcaaatcatgggacataacctgaaaaggaagttaaattttgaacttcaatattattatttccatggtcaaccaaaatttgtactgtttaagagaaagatacaaaagtactgcagcatttgtttaaaatttcatttgcacaagcctgactcttatctctcaagactcggacatgcttcaggcagttaatgactcacaatccactactctagagggtgctgaatctccttaatgaaagaatgtgctttaagattcaatggttaggaagagagaaataaacgagagtaaaacacgaagcacagcagtttttcaaagctagtaagacttctgcgtccaccaaccaactttagctcttacatttttagaaagaaagcactaacacagaaccatgaaattatttttaaaggttctttctaacagggtttcagaggatggtttccaaaaaactcactcagaagtgaaataccacacgttgattttcacgttgcagggagcgcattcctatgcagttcagggattataaatgac

SEQ ID NO: 80055 - DNA, 289 bp, Homo sapiens
agggacataaaggcttacaaaggaaagtgtaccttctgcacacaatacgaaaaaatacataattgtaaattattatgtcaaagtggaaaactgaaatggttattttatcagtgcagttaaaattttaaaaaccctggactgaacgaagaaacacttgaaccccttcagtaggtattgaacacttttctaggcactgtgtaagcacagtggaaataaaataatactttgctcctgctctgacaggtatggtctttgtgggaaggatggtcaggcaagtacatttcccagg

SEQ ID NO: 80056 - DNA, 658 bp, Homo sapiens
  misc_feature (619)..(620): n is a, c, g, or t
ggtttggtccattcagtggtatagacagactaagtgtggccaggcgtggtggctcacgcctgtaatcccagcactttgggaggccgaggcaggcagatcacccgaggccaggagttccagaccagcccggtcaacacgatgaaaccctttctccatgttggtcaggctggtgacccggaacttcttgaagagaacaagggcacacagaggccagggcagaatgctgatgtctgggtagggtgtaataaatactcactgaatgaactcaagttttacttgctggccagggaggaagtagaccgagaaatccctcctacaggctgaacaggggacaggacttcatacgctggctcctgactcagggcatttggatgtcgaggaaggagaagggaaaggtttctgcctcgggggtctgggtcagcctctgtcaacaaggtttacgcagagccaggagaacagagctattgaacaactcacagcggcaggtctgaaggagggagagccttgccaaagctgaagcttccttgttctgagagggccatgtccccaaagctgatgcaaaatcctgaatggagccaagggtacgagtcgaatcgtattgctttttttcacaaaaaannaagtaacaaaaaaaaccatagacaaaaacaaaaaaaaa

SEQ ID NO: 80057 - DNA, 420 bp, Homo sapiens
atccacctgccttggcctcccgaagtgctgggattacaagcctgagccaccgcgcccggcacattattgttttcttagatgtgattttaattttgtttgctaggcaataaactgctgaaataattaaccagcaataattgctcttcagttaggctctaatatgaccactgagcagagcatctaagagacttaaaattgagttactttaggtgtataccattcttacccatttaaattgtagttttaaaggtgggttatgagttggcttgccagtcaaagccttgcttggggtcgtatttctctgtactttcatctttaatcatcagctagattagtcttctggttgagtatagaagccagagagacctaggtttatacaaggagtgctattaactgtgtgtgaccttggaccaaagatta

SEQ ID NO: 80058 - DNA, 325 bp, Homo sapiens
tcaacgaccaaccataagacatagcttcaatttttatacattctacttctgtaaaaactataacccatgctttcagctcctaaactgcctttcatttgccaagttcgaatttagttaactttaatacactccaagaaataatgtagtttttttccttctctgtacatcgtttggcacttacttgaaaattttgagttttgtccttatcttactaaggtgagtggaagatatttttaatatataaaggtactaataactagtgataagaaatataggtttcaaatataaaatgattgggctgaagatagaaatcactaagcatgct

SEQ ID NO: 80059 - DNA, 495 bp, Homo sapiens
ttagttttaagcacaagcagaggaagatgggagcatagagaaggggaaatttctcctgcgcagttagttcaagaattcttcctggagaaagtgacctctgaactaaatgtttagggattctgtaatttactaagcaatacttacaaaaatctgttatgccagatgcagttctaggggctgggattctatagaaaagatctcaactttcataaagataccttctggggaggaaagtgagacactaacacaagcaaacaaataattaaaatcttcagtagtgatgagagtgatgagagctacttaaaatatatcaaggttgtatgattcagcctccattttgctattgtaacatttaagctgatacgtggaagacaacaaagaaataatgagtaggtgaaaggaaatgcatttccaagcttcggaaacagcaacagtaaaagcaaaccaacagtcgcagctagagcagcattaaaagattttatttatttaaaattt

SEQ ID NO: 80060 - DNA, 790 bp, Homo sapiens
cgcggccccaagcggttcccgagcccaggcccgcgccgagcccaggtcctagagcagctccagcaggatggcggctccagcgtctctaaggcctgcagggggtccagccccatggggggcgccctaggcctccgacagctccccatctgtgctcctgcctgccggccatcctcaggccactcgccatgggcggctgcttctccaaacccaaaccagtggagctcaagatcgaggtggtgctgcctgagaaggagcgaggcaaggaggagctgtcggccagtgggaagggcagcccccgggcctaccagggcaatggcacggcccgccacttccacacggaggagcgcctgtccacccctcacccctaccccagccctcaggattgcgtggaggctgctgtctgccacgtcaaggacctcgagaatggccagcgttctgtcccgtggtcgggtgcgctgcccctggcacggcgcctgcttcaacatcagcactggggacctggaggacttccctggcctggacagtctacacaagttccaggtggggatggcagtgaccctccaccctcctggcacccacaggccctacagctgcagcgaagggaccaaggtgatggccaagtgtatctctccaagtgctgggtacagcagtagcaccaatgtgctcattgtgggtgcaggtgcagctggtctggtgtgtgcagagacactgcggcaggagggcttctccgaccggatcgtcctgtgcacgctagaccggcaccttccctacgaccgtcccaagctcagca

SEQ ID NO: 80061 - DNA, 909 bp, Homo sapiens
cgcggccccaagcggttcccgagcccaggcccgcgccgagcccaggtcctagagcagctccagcaggatggcggctccagcgtctctaaggcctgcagggggtccagccccatggggggcgccctaggcctccgacagctccccatctgtgctcctgcctgccggccatcctcaggccactcgccatgggcggctgcttctccaaacccaaaccagtggagctcaagatcgaggtggtgctgcctgagaaggagcgaggcaaggaggagctgtcggccagtgggaagggcagcccccgggcctaccagggcaatggcacggcccgccacttccacacggaggagcgcctgtccacccctcacccctaccccagccctcaggattgcgtggaggctgctgtctgccacgtcaaggacctcgagaatggccagatgcgggaagtggagctgggctgggggaaggtgttgctggtgaaggacaatggggagttccacgccctgggccataagtgtccgcactacggcgcacccctggtgaaaggcgttctgtcccgtggtcgggtgcgctgcccctggcacggcgcctgcttcaacatcagcactggggacctggaggacttccctggcctggacagtctacacaagttccaggtggggtgaagattgagaaggagaaggtgtacgtccgggccagcaagcaggccctacagctgcagcgaagggaccaaggtgatggccaagtgtatctctccaagtgctgggtacagcagtagcaccaatgtgctcattgtgggtgcaggtgcagctggtctggtgtgtgcagagacactgcggcaggagggcttctccgaccggatcgtcctgtgcacgctagaccggcaccttccctacgaccgtcccaagctcagca

SEQ ID NO: 80062 - DNA, 1292 bp, Homo sapiens
ggggctgaaagccggaattctttaatcacgtggttagttcctgggcaaggagcccctatcttgaagctatccaggagcttctggcatgcagaaacccacttatcactgtcatttcattagcatacaaaaaaccatttatcactttggagattcccagggttttaggagctgtgtgccagaatactgggactaagactatctatacatactgcatatcttattatacatcacagtgtcataccatctttccaaacctaaaataagaacacagataaacctaaagaattgtcatccaaccaggagtttgagaccagcctgggcaacatagtgagaccccatctctacaaaaactaaaaaattagctgggcatggtggcacatacctgtagtcccagctacttgggaggctgaggcaggaggatcacttgagacctggaggctgaagctatagtgaatccagatggcaccacctcagcccatccttggcaacagagtcagaccatgttcctttaaagaagaagaatatgtcatccaaaagaccaccaggatggctaaatagtagaaggagagctatattggtgatttcagtttgcacagcgggaagagacagtctccagcttatgccaaaagtgctctcttcccagagggaaaagggcagattggtttttatgcctcacagggcctgtatcacacaatagagtaaaacatattcagcagttttgggagaaaagttatacatatctatgagggaagttgaacacacgtgcaatggataaacatatgtaacacaaatcccacgttcactttggggtaaggttttaacattaaaataaggtggaacttggcccttcatgtcaaaaggtgaactattggacacaaagtttgcatgcagtctctataaactggctgacactggctcgaggtcttcggttgcttatcaggaaagaatttttgtaaggctggtcctttgtccaatcagagctatagtggtttggattgtaaatcaggtttggtaaggttctgacaattttcccaatagctcctatttttagcaaatttagcaagattgtgttttttcttgtagccttaggaatttgcgaagttcccatgccaaccaagccctgaaccctccacccataggtaactttcgttttcttaactttagggttcttcttagttgataaaggagcatccattttggtcttccagataacagaacacaatctgacagggcaattatgtgactaaaataatgaaatattaaaaactgaattttccacagaaaaaaaaata

SEQ ID NO: 80063 - DNA, 584 bp, Homo sapiens
aaacccacttatcactgtcatttcattagcatacaaaaaaccatttatcactttggagattcccagggttttaggagctgtgtgccagaatactgggactaagactatctatacatactgcatatcttattatacatcacagtgtcataccatctttccaaacctaaaataagaacacagataaacctaaagaattgtcatccaaccaggtgcaatggctcatgcctgtaatcccagcattttggaaggctgaggtgggaggattgcttgagcccaggagtttgagaccagcctgggcaacatagtgagaccccatctctacaaaaactaaaaaattagctgggcatggtggcacatacctgtagtcccagctacttgggaggctgaggcaggaggatcacttgagacctggaggctgaagctatagtgaatccagatggcaccacctcagcccatccttggcaacagagtcagaccatgttcctttaaagaagaagaatatgtcatccaaaagaccaccaggatggctaaatagtagaaggagagctatattggtgatttcagtttgcacagcgggaagagac

SEQ ID NO: 80064 - DNA, 343 bp, Homo sapiens
aggcaagaggcaagataatgaagtgatgaactgtgggctctaggctaaatggagaattaaatgaagccaagaggtggcaggtgctggacacaactgtgggcagacagcctggggcaatcattctcagcctaggctgcacatccatgtcacctatggagttttgaaaatactgatgcctgaaccaatttaaccatgtctgtaggggtgagacccaggcagcagttgtttcttttttttaagcccttgatgtgactccatagtgcagtcaaacttgacaaccacaggtctagaaagactgggtgactgaagaatggaaaggcctataatcccagcacctgtggag

SEQ ID NO: 80065 - DNA, 409 bp, Homo sapiens
aagcatcttagctaatgacctaaagataagttattctgcttgttatatattcatttatgttgtttgttgaatattgacccatactaatggtgacaatggaataaatggaatgtgggaacttgttcatattgcaaaagtactcattttcagtgagcaactttggccaccttttactgaggaatgagggacctcagagtagacacttgacttacctactgatttacactaggcccttgtcttattgcattttacttttctttttcatccccacccctgctctcatcaccctccttctctcctatagacacccactctaatgaatttgatacttcttaaatatgcatcagtgtaaaaatagttttgtaagtacatgtgtgttcaatttgaataaaggttcttatgccttgtt

SEQ ID NO: 80066 - DNA, 411 bp, Homo sapiens
atgtatggtcttgttttttgaggtcgtctgatgaaatcagaatgatttcacttaaggcaaggcatattaaaatacaaattcgtaaagataataccttgatgtttatgtctatgccaaacttgctctgctgagttcctggtggaatgaaaagactgtctttttttaattgtgatttgtttatgactaacagcatggatttgagacagttatgaaaatgccatggtatcattctgtaaataactttgtctatgtaattgtagtgtatacttattattgacaacttgaagaaagtacataaagtacaaaataaaagttacccatattcttatcagccagatctaactaattttaccattttcatatctctgtgcatactcttaataaaaaatggtataatacatttaagcagat

SEQ ID NO: 80067 - DNA, 409 bp, Homo sapiens
aggaaagatgatagatagatagatagatagatagatagccatagaaaggtagagaaaatgctatattatgaataagtggtaggaaggtggaagattatatagtaaatagcattgaaaatcgcaatataggccagatgcggtggctcgcacctgtaatcccagcacattgggaggatgagatggatggatcacatgaggtcaggagttcaaggccagcctggccaacatggtgaaacctcatctctaataaaatacaaaaattagccaggcagggtggtaagtgcctgcaatcccagctactcgagagtctgaggcaggagaattgcttgaacccagaaggcagaggttgcagtgagcagagattgcgacactacattccagcctgggcgacagagcaaaactccgtctc

SEQ ID NO: 80068 - DNA, 950 bp, Homo sapiens
ggcaggagaatggcgtgaacccaggaggcggagcttgcagtgagccgagatggtgccactacactccagcctgggtgacagagcaagactctgtctaaaaaaaaataaataaattaaataaaaataaataaataaataaataattataccattttttcaaggtccaaactgaatccagagatttagcatttcagcagccctgcatgcaaggaacaaggcaatttcaaatgattgtcttccattcattcaagccaggacatgggatacaggattgtatttcaggtctgcactggaaagtaacggaacatcatttcctttttaaaaaacgggcatctatgccaaaacaacagcttcagctgatgtctccatgaatctaaattcacgtgatccactggttgacctgggtccccgccttccaccacctggctttggttcattgtctcctttcatttctgggctctgtgattggaaacatctgagcaggcggcccacactctggtcctcatcagaaccagtcaatatcctgtgtgtgtgatctggcaagggaagggctggcccggcaccagttgtgttttcacctttcatggctccaactgagttcagcccaagcctacgacccagtcactgggaaaacgtgagcaatgggatctacacaacaatattccacagtcagcagctcctgaacgtgccgcagccacagggcttacagcctcacaataaagcccaggggtagtaaaaagtgagctcgctgttacagaacagtgagtgccacctagcttcactgtcatgggacacacgctgcaggcaaatgcactacttggtaggagattcagcagttctgaggaagggcctccagctctccaggtactgcagcttccagtggttcaagtgtccagtgcaggggcctgcaaagcaaacacgggcaggagaggggctgccagtgtggccca

SEQ ID NO: 80069 - DNA, 1071 bp, Homo sapiens
ttaggtagtccgaagccgactatagagcaataatgcgcactgcatgcgaagctgccgccgcctctagagttactgagaatcaggtatcccctcgccctacccaccccataggcccctagatcagggacgctgcgcggggccggccgcgcagactttctccccacccctccccgacccccacggcagagcccggcggctgtaatggttccatgggcgggggtggggtggttgcccccaagacccctccttcaggcattaatcattcactgaccgttcattgagcacctactatgtgccaggccaattgctgagtccgccaggagcgcagccacctgctgggaggtgtgtttgcaggacaggggtccaaccggcttgggtgggccagggaagaacggcagatgcagagagaccaggtccctaggttcacatgccccctacactcctccccacctcaaccagtccctgctgggcacaactgggctctacctttgagttaggccttttgactccagctgagggggacagatccagggctcctgggcccccacacaggtggccacttctctgatcctctggccaacacacatctgccatgtccagccaggggcagagccatggctggagaagaaggtgccagctgtagcctatggtgtggccagcctcacccccagcagcaagcgtggctgcccccacaaggatgacccaccgctctgcacagcagtgcccacatccaaacaccctacacaaccaggtgtggtgcctgcacagctcccaagctggggcctgcccacctgtgccgcatgcacacgcacacacaggcgcccccacctcaccccaccccatactcctgtctacctacctaaggagaaagctggagggctgtgggcccgtcagggtctcctgcttccccctacaccccgccgccgtggaaagccatgggccccctcccgcccccataactaagcagcacaataaccgacttagcgaattcaggtagaaggaacgtttaggtagcacctattttgtactgattctacaagtagggcccgaggtgcgggggccctcgggtgg

SEQ ID NO: 80070 - DNA, 268 bp, Homo sapiens
taaatcctctgctagtctaactctcctcaccccaccccatactcctgtctacctacctaaggagaaagctggagggctgtgggcccgtcagggtctcctgcttccccctacaccccgccgccgtggaaagccatgggccccctcccgcccccataactaagcagcacaataaccgacttagcgaattcaggtagaaggaacgtttaggtagcacctattttgtactgattctacaagtagggcccgaggtgcgggggccctcgggtgg

SEQ ID NO: 80071 - DNA, 657 bp, Homo sapiens
gtgggagccaaactatgagttttattgaggtgaagctatactggaaaagctttgccctgtagctccaagtggactgtcccatcctctttctagaccttgaggcttacctcaggaggatgatgtttaaatcaacagctgaaagacttgtgagtggtttctacaccatgttaaagagaaggttctaagacagcatgataggcctctaggcctggcctggactctggctcagtgttgcttaccatatgtagaggatgaacagaggttaagcccatcaaggtctgaagtagagcccaggaggaactgaactgtatctggctttcaggatccttttcccagtgtcatcaatcagagaagtcaaacctctgtgagaatgcttgtgcagaggtataacagtctcatgtattggttggcttttgctgcacctttctcattctgttggagggacattggttagtcaggactctgaaggccagctttttcacactgaccaaagcaagtgaaggtcaagcctaactttaatgggaccaggaagtatactcctcccatggaggtggtgggaatggcaccgagaagtttgatgacagttatctaatggactagaggttggcaaactttctgtaaatggccaggttagtaaaatagttctgcttttgaagg

SEQ ID NO: 80072 - DNA, 849 bp, Homo sapiens
gtgtgttccaataagaaaaaaacatggctgtttgcttcggccccagggttgtagcttaccagtcctgtaacagatcacagtttgctcttttggtcacaaatacttgaacccctccctagttcagagcatttgataccgtaatatttaaagctcacttgtaaaacatcgtttgttgcctccatccatagtatctcaaacagaatgtctctcccaaatatacctaaattccatattctctgaagcacaaccagctattttcttgacatacttcctaacacaccccacagttcacaatttgatctgaaaacttgttaagggaggttctttggcatgtgatgccataaaaagagaggtatgggctctcctttaaaaaagagaccctttttatgagactcacaataggataaagagcccatgcctatttttaatcattttttcactatatagacatgcatgctgaaaaatgtttttattagtataatgctaattatactgacttcctatatattttagcatatagattcaaagattattagcacaataaggtagataacttcatagaccatttcttcatcttgttttcatttagtatgtaaaatttatctaaaatttacatgaaagatcagaatagctatgtaatgctactttgtaactcttatattttccaccagatgtcactaatgctgtaatattcaaattaagatgactttcttttggttctaaaggctgtaagcttattggaaaagcaaggttactcagcattggaattcctggcaacaaatatataaatacattaggggaataaacacttagcatttattatttactagtcacttcacatgaattttt

SEQ ID NO: 80073 - DNA, 432 bp, Homo sapiens
atggagagcgggtaagataaagggctattgaaaacccctgaagcatctgactaatgcttattcaagttaggtattggactaaaagatttcagcatccgaaatgaagtataaaattttcctaatgtataaattaatggaacattctcaaatttacaaagtagtacttatgttttaaaagtatagagacttacaatgacttaagtatgaaaaaaattgtctttaaaaaaaaatgttagttttaccctatttggtaattgatgctaaggattttaagagaccaaatttcatcagcctaaaccttccaggttgtatttaaaccatctagctagaagtttattttccataattaaacttctagatttctcttgccacctgagatatacaacttgtatttgggcattttaagaatgcatttttgttttttctctattc

SEQ ID NO: 80074 - DNA, 381 bp, Homo sapiens
ttgagcatatgagcctgttttacagccccctgccccatagcttgtttttttgtagaaaaaaaaacaagtagaaccccatgtagaatgtggtcacctggttggctggaaccagtttatgacagacctcagcaacttatagatggactggtgaactctaatttttaccgtgctaaagtttccaccctaggccaggagcggtggctcacacctgaaatcccagcgctttgggaggcagaggagggaggatcacctgaggtcaggagctcaagaccaacatggccaatatggggaaaccccatctgtactaaagatacaaaaattagccgggtgtggtgacacatgtctataattccagctactcgggaggctgaggcaggagaa

SEQ ID NO: 80075 - DNA, 297 bp, Homo sapiens
attatttttctgtagccctttaaataactttgttatgaaaaatttcaaacatatacaaatctagagaaaatagaataatgatggataccatggatgactagagggagaaaggaaggaggggaacagggtggaaaaactattgggaactatgcaaactctctggctgatgggatcatttgtaccccaaacctcagcatcacacagtattcccttgtaacaaacccacacatgtaccctcttaatctaaaatatgaattgaggctcatgcctgtaatcccagcactttcgaaggctgag

SEQ ID NO: 80076 - DNA, 458 bp, Homo sapiens
gtatccagattgttttattttgcttagacaatcaggtactgggatgaaggatttcctgaagtctttttacctctttatcttatctctttctctgcgtgtgtgtgtgtgtgtgtgtgtgtgtgtgtgtgtgtgtatttagaattatgtctgacacaccgttaagaaccataaagtattagttatcattgttatctcctttaacaaaatcctttcagaaaaatggtccccatgtgctagcatgtgaacccccagggaggccatgcatggtctgtctggttgtctgttcttacgaacctttccaattcagagttgcatgccatgcagggcctcggctgacttgcttattgaagtatgttttattgtatagtgagtgttcattaggccccttggtgccttgtgaaaggagagtggtgggtgcagcctggacaggttctctcacaggagtagcatctctcctc

SEQ ID NO: 80077 - DNA, 292 bp, Homo sapiens
agaaaaaaatgaccttcttgagcaattgaagtaattggtacagtttgaaaaaaataaaaataacaaaacaaaacaaaacaaaaaaacacaaaaagccagtctcaggtgaggcaggtggtgaagggctacgaaacgcatgggtttcaataatgcagtctcctgtcctgtgcctccaaggaggactgtttttggggaggatgtaggaacaattacctggaagtagaagtgtagaagtgaagcttagggagagagcctatccccaatccaagatcaagatcagtggtgtgcaggt

SEQ ID NO: 80078 - DNA, 239 bp, Homo sapiens
ctggaacggagctgctgattctcagtcctgggagttattacgccactctgctttcttaccgagtgaacaatgtcatcagaactatggatgtctcaaagaagtaagaaataagtgtatgaagtagattagttgatttaattactattcatctccctttctcctctcaaggaaatgagttaaggggttgaattaagacaattgtgaggtgtgggaggagcagttttatcttcctgatggtg

SEQ ID NO: 80079 - DNA, 451 bp, Homo sapiens
atgtaactaattattaaagattctcatgaatttttttttttttttgagacagagtcttgctctgtcgcccaggctagagtgcgtgtagtggtgcgatctcggctcactgcagcctgtgcctcccgggttcaagcaattctcctgcctcagcctcccaagtagctgggattataggcacgtgccaccatgcctggctaatttttgtatttttagtagagatggggttttaccatcttggccaggctggtctcgaactcctgacctcgtgatccacccaccttggcttcccaaagtgctgggattacagcgtgagccaccacgcctggccgattgtcatgaatttttatcctcaattaattgtgtaaatgtgagtgcatagtaactcatatgctagagactaggaaaataagttagaaaagattatctaaatatattctgtgttgcaaaaaaa

SEQ ID NO: 80080 - DNA, 804 bp, Homo sapiens
cccttggagaggatatctggggaaggcctctttgaggaggtgagttgtgaagggacaagaaagagacagccatatggacactggagttaagactatcagtcacagtagcgactctggttttctcaagttcatattgttgtactgtaagagcagaggcattctaactttccagcagcttccaagtggaagagtttttattgccttggtggctttccttaacaattgaacagaaccacaagggagaaagacctttttttcagggaagctggggtaggtagagttggcctctgacctaagattttgtccagtgacttttctgttggaacggaatgtctaagaaaacccaaggaagaagtgaagtctctaagaaatgtcaggcagaaatcacccgggggcaaaatccacctgaaaatgttgattagcctctccctttccctctttcatccacatccttatctctatatactcacatggtagaaggtcagattgttttccttaagaagaattttctcatgtaaaatattaatgcaatctgaattgcataattttaccatattctattatctgaaattagttataataattcaatgctttcaccccataccacataaatacaaagcattttttcttagtgggtggaatggtgaaccccaaaatgatatgttcatgtcctcacccacaaaaactgtaaatgtgatgttatttggaaagggagtctttgcagatgttactaagttaaggatcacaagagcatactgatttagggtgggccctaaatccaatgacaagtccttctaagagaag

SEQ ID NO: 80081 - DNA, 475 bp, Homo sapiens
gctgagatatatgggaatcttaccctagttttgccattttctcctaacatcagtctacttcttttaatattcattgcttctccccatttctgtagttcagtgcatgttcctttcctctgcaggaactacttctctttcctcacccaactcataaatctctgcctcccaccctaagggtaggcacatgacccaacctgggagatcagaatgccacacccccaatacaggattggtttgtgagtaggcagatgattctgtccatgcacagaactaagtagaagagagtttttacacctcagcttagcttgatgctagcagagagctactggagttctatttcctcctctagggaagaaaaggattttggtttggagataaagccaagataccaagaaagtgggaatgaaagacttagagacagggagtcctggccccttttcagatgctcagatgctggcactagcttgaggcccag

SEQ ID NO: 80082 - DNA, 1465 bp, Homo sapiens
  misc_feature (3)..(3): n is a, c, g, or t
ggngaggggtagagtgagaagcaccagcaggcagtaacagccaacccttagccattgctaagggcagagaactggtggagcctttctcttactcccaggacttcagcacctaagacagctccaaaacaaaccagaacagtcagctccgggggagcacgactgggcgagaggcacagaaatggacaccagaaataaggcccagctccttgtgctcctgactcttctcagtgtgctcttctcacagacttcggcatggcctctttacagggcaccttctgctctcaggttgggtgacagaataccctttgagggagcaaatgaacctgatcaagtttcattaaaagaagacattgacatgttgcaaaatgcattagctgaaaatgacacaccctattatgatgtatccagaaatgccaggcatgctgatggagttttcaccagtgacttcagtaaactcttgggtcaactttctgccaaaaagtaccttgagtctcttatgggaaaacgtgttagcagtaacatctcagaagaccctgtaccagtcaaacgtcactcagatgcagtcttcactgacaactatacccgccttagaaaacaaatggctgtaaagaaatatttgaactcaattctgaatggaaagaggagcagtgagggagaatctcccgactttccagaagagttagaaaaatgatgaaaaagacctttggagcaaagctgatgacaacttcccagtgaattcttgaaggaaaatgatacgcaacataattaaattttgagttctacataagtaattcaagaaaacaacttcaatatccaaaccaaataaaaatattgtgttgtgaatgttgtgatgtattctagctaatgtaataactgtgaagtttacattgtaaatagtatttgagagttctaaattttgtctttaactcataaaaagcctgcaatttcatatgctgtatatcctttctaacaaaaaaatatatttaatgataagtaaatgctaggttaattccaattatatgagacgtttttggaagagtagtaatagagcaaaattgatgtgtttatttatagagtgtacttaactattcaggagagtagaacagataatcagtgtgtctaaatttgaatgttaagcagatggaatgctgtgttaaataaacctcaaaatgtctaagatagtaacaatgaagataaaaagacattcttccaaaaagattttcagaaaatattatgtgtttccatattttataggcaacctttatttttaatggtgttttaaaaaatctcaaatttggattgctaatcaccaaaggctctctcctgatagtctttcagttaaggagaacgacccctgcttctgacactgaaacttccctttctgcttgtgttaagtatgtgtaaaatgtgaagtgaatgaaacactcagttgttcaataataaatatttttgccataatgactca

SEQ ID NO: 80083 - DNA, 1588 bp, Homo sapiens
  misc_feature (3)..(3): n is a, c, g, or t
ggngaggggtagagtgagaagcaccagcaggcagtaacagccaacccttagccattgctaagggcagagaactggtggagcctttctcttactcccaggacttcagcacctaagacagctccaaaacaaaccagaacagtcagctccgggggagcacgactgggcgagaggcacagaaatggacaccagaaataaggcccagctccttgtgctcctgactcttctcagtgtgctcttctcacagacttcggcatggcctctttacagggcaccttctgctctcaggttgggtgacagaataccctttgagggagcaaatgaacctgatcaagtttcattaaaagaagacattgacatgttgcaaaatgcattagctgaaaatgacacaccctattatgatgtatccagaaatgccaggcatgctgatggagttttcaccagtgacttcagtaaactcttgggtcaactttctgccaaaaagtaccttgagtctcttatgggaaaacgtgttagcagtaacatctcagaagaccctgtaccagtcaaacgtcactcagatgcagtcttcactgacaactatacccgccttagaaaacaaatggctgtaaagaaatatttgaactcaattctgaatggaaagaggagcagtgagggagaatctcccgactttccagaagagttagaaaaatgatgaaaaagacctttggagcaaagctgatgacaacttcccagtgaattcttgaaggaaaatgatacgcaacataattaaattttgagttctacataagtaattcaagaaaacaacttcaatatccaaaccaaataaaaatattgtgttgtgaatgttgtgatgtattctagctaatgtaataactgtgaagtttacattgtaaatagtatttgagagttctaaattttgtctttaactcataaaaagcctgcaatttcatatgctgtatatcctttctaacaaaaaaatatatttaatgataagtaaatgctaggttaattccaattatatgagacgtttttggaagagtagtaatagagcaaaattgatgtgtttatttatagagtgtacttaactattcaggagagtagaacagataatcagtgtgtctaaatttgaatgttaagcagatggaatgctgtgttaaataaacctcaaaatgtctaagatagtaacaatgaagataaaaagacattcttccaaaaagattttcagaaaatattatgtgtttccatattttataggcaacctttatttttaatggtgttttaaaaaatctcaaatttggattgctaatcaccaaaggctctctcctgatagtctttcagttaaggagaacgacccctgcttctgacactgaaacttccctttctgcttgtgttaagtatgtgtaaaatgtgaagtgaatgaaacactcagttgttcaataataaatatttttgccataatgactcagaatattgctttggtcatatgagcttccttctgtgaaatacattttggagacacaactatttttccaaaataattttaagaaatcaaagagagaaaataaagaccttgcttatgattgcagat

SEQ ID NO: 80084 - DNA, 202 bp, Homo sapiens
tggctattaaatagctacaatatgagttaacatcccttatgtagaagtataaaccattgctaattagagtaacactgaaaatacaagtttacatttaaccaaaaaaaggaacaccatgactgatcccatgttttcactgtttcagaatgtggaatctttaagcaactacaggcttacatttttctcttaaaaaaaaaaaaag

SEQ ID NO: 80085 - DNA, 541 bp, Homo sapiens
ctgaagctatccaataccctggttgtcagtgactgacaagcagccacatctgtgctactgctgtgccagtcatccaaggcacagatgccacctcttccacgtcacatccttccatctctccagatacttccatcaccctcaggttctttgtctagttcccaatttggctctgtgactacccagccacctgcctttatttgacatagagatgaccgtggctctcactgcagttctcactgctcattctataatgttcatcattcctttggatttctgtccaactgctcattctctagcccctaaacaattccaatcttctctccaggccaccaccaactccaccagacacctaaactagctgaaataccatcaaaaggaaaaaaactgtcacttgttcacatgacagggataacatggggaaaaacagcatgagagttttaaaaaggtgggaaaatggaaagactcaaatggcattttcttacctagcatttgcaagtggattcaattaggagaaaaagcctatgagggtcattaacaattt

SEQ ID NO: 80086 - DNA, 203 bp, Homo sapiens
ttttttttttgtagagacaaggtcttgctatgcccaggttggtctcaaactccaggcctcaattgatcttactgccttggcctcctaaagcactaggattacaggtgtttaattgtgatgttctatgccaccatcaaactgaaggcacacccatccacttccactattatgactttctatccaatgtccaatcaccttccttc

SEQ ID NO: 80087 - DNA, 453 bp, Homo sapiens
ataaataaaattgcggccgcgtggaccttgaaaagacaggggtctcaccgtgttgcccaggctagtctcaagctgtcctcccgccccagctccccaaagtgacggtattacaggcataagtcaccactcctgccccagagctgggttttgaaggatgaagagtgatatgccagacaagggagagaaagggaatttcttgctgaaagttaacacaaaccttatgcaaaggcataaaacaacttcctatgtaaatttttactttttaaagatgaggtctcgcctgtcacctaggctggagtgcagtggcgtgattgtagctcactgcagctttgaactcccggcctcatcctctcgagtaactgggactaaaggcacacaccaccttgcctggctagaaacagattttcatctgtagaagacaggaagccaataaagagttttaagcactggtga

SEQ ID NO: 80088 - DNA, 854 bp, Homo sapiens
agtgcactgaacaccagctgctctcttcctctctggctcccatggcagccatggtctgttgcagagagaagaggattgcctgttccctctttaagggaacctccgttttgctttctggaaccactctcttaatgccgcctgtcaaaaccagctaggactccctggggtccaatccctctgtgtttaatcttctgtcatctctgtcccacctggctcatcagggaggtgcagaaggctgaagagagcaaagtccctgaggactcactggaggaatgtgccatcacttgttcaaatagccacggcccttgtgactccaaccagcctcacaagaacatcaaaatcacatttgaggaagacgaagtcaactcaactctggttgtagacagagaatcctctcatgatgaatgtcaggatgctctaaacattctcccaggtagcctctattttccttgtgtctcatacctctgtctaggctatggaagatcaattctgaggacaggctgtatatacacatattgttattgttttagtcagaaactaggatggagctaggtgctgtgactcacacatataatcacagcactttggaaggcccaagtgggacgatgacttgagttcaggagttgaagaccagcctacacaatatggtgaaacccatctttacaaagaatacaaaaaattaggcaggcatggtgctgcacgcctatagtcccaactgctcaggagacttaggtgggaggatgggctgagatgatcctcccactctcattcacttctgtcaggctagactctctctccttttcattggcttgtcttagctattaataagtctcggctgggcgcagtgggtcaca

SEQ ID NO: 80089 - DNA, 396 bp, Homo sapiens
cgagtacctcagttttcaattcaattgggaacagcagtggttccctaatttgattccataggcttcttcagaatcctctggagtaattacagatactcacatagattggcaagtgccatctctagaggcagaagctgggaccacaggtgcctgccaccatacctggctcatttttttatttttagtagagatgaagtcttgctgtgttgcccacactggtctcaaattcgagctcaagccaccctcctcgcttggcttcccaaagtgttgggattacaggcgtgggccaccgcacctggctagctcagctttttacagtaacaaaataaattggaaataatctaagtgtctgacagtaaccacgtacttaaaccagttatgctttagccacatggt

SEQ ID NO: 80090 - DNA, 482 bp, Homo sapiens
ggctgaggtcctcttccacactgtggaagctttgttcttttgctcttcacaataaatcttgctgctgctcacgctttgggtctgcactacctttatgagctgtaacactcattgcaaaggtctgcggcttcactcctgaagtcagcaagaccacgaacccaccagaagtaagaaactctggacacatctgaacatctgaaggaacaaactccagacataccatctttaagaattgtaacactcaccacgagggtctgcggcttcattcttgaagtcagtgagaccaagaacccataggcaggaaccaattctggacacagttagacataggaagagtgtttcctgggtcgtaagtgaaaattttttatttcatagaacaatttaaagccaaaagcacagaatattatgttggaaggaaacatttcctttagacctttaagagaaaacatttttagcatcagaccacaacagaacccgaaaaa

SEQ ID NO: 80091 - DNA, 394 bp, Homo sapiens
tgctgctgtgaatatgactgcacagatagctgtttgcatccctgctttcaattcttttgggtgtgtgcgcacaagaggaattgctggatcatatggtaattctatgtttaattttttttcacagcatctggaccattttacattccccctccactagatatgttattatatacaaaggtggacggctatacaaggacattccctacagcattgactataacagtgaaatatgagaagccacttaaattcaatagaataatgaaatagaatcatatagatctatgtacacagataagggaccatctatagtacattctgttaagtaaagcaagcaaagtgagctgggcacagtggctcatgcctgtaattctagcactttgggaggctgaggtgg

SEQ ID NO: 80092 - DNA, 341 bp, Homo sapiens
gtttggaaatggttctccaaccaggctacaaatcaggatcaagtgggaagcttcaaacaaacagaggccaaagccttatgcttagaactcttttattcagttggtctgatgtgtagccaaggcaccagtgttttttttaatgctttccaggtgatttgattgtaaggtgcagcagggctgagaaccactatttagggaagcaacagaagtaatgtattctaggccaggtgtggtggctcacacctgtaatcccagcactttgggaggccgatgcaggcagatcacctgagattgggggttcaagactagcctggccaacatggcaaaatgctgtatctact

SEQ ID NO: 80093 - DNA, 346 bp, Homo sapiens
caacacattcaaagccaaaggacttagagtgaaatcttaaggtgtttgctaccataattctaatttggtattcataaaaaattatgtaatatttcaagacttaacgtgctctgtttgaatacacacatcaaaactctgtggttgctttcttttttccacttgagaaactaaattaatttaaagctagtttgtggaatataattgaacactagttattttaatttccttgctacttgatcaagatcttgctcttttaagcatcatgtgaaaccgttagtacccactttcacctggcaaaataaggcattttacatgatcagggcaaatatttttctgactctgatga

SEQ ID NO: 80094 - DNA, 839 bp, Homo sapiens
tttttatattgttagtagagatgcggtttgactatgttggccaggctggtctcaaactcctgaccctgtgatcctgccaccttggcctcccaaagttctggaattacaggcgtgagccactgcgcccagcctctatggttattatattacaaaaacagcacaaaaactatatattttttataatactcaagttgtttgacaaagatactcatcatttgcaacattattctgtaatttttaaaatatatttgttaattgacagataaaatatcctgtagaatatggtgttttgtagtatatatacattgtcaaaagcttaattctagctgcttaacaaatacttcaccacacataattacttttgggataagagctcataacattgactgtgttagcattttccaaaaatacattattgttaactgtagtcaccatgctgtacaatagatttcttgaatttattcctcctaggcaactatgtgttgttttacagacatgtctccagatgcccctttcttgtaaatacccaagcatctggtaaccagcattctactctctggcttatttcacttagcatagtgtcttccacatttatccacattgtttcaaatgaaaagatttcctcccttttaacgttgaattgtatttccttgtgtataccacgtttttggaaaaatacattcatttcttggttgaaaaactcacgtgatgagaagatatttctgtattaaagcatgtattggaattccgtatatacatgttttagtaatagttgatttctaccaaatgctaaccataatactgtatatgtgttaataaattttattttcggccaggcg

SEQ ID NO: 80095 - DNA, 652 bp, Homo sapiens
tgcatcccccggtctgtaagaattccgcatttcacacgtgtgctccctgccctgctcctggccccttggccggccgggctgtttctggccatgggtcgctcccgccggacaggcgcgcaccgagcgcactctctagcccggcagatgaaggcgaagcggcggcggccggacttggatgagattcaccgcgagctgcggcctcagggatccgcacgaccccagcccgacccaaacgccgagttcgaccccgacctgccagggggcggcctgcaccgctgtctggcctgcgcgaggtacttcatcgattccaccaacctgaagacccacttccgatccaaagaccacaagaaaaggctgaagcagctgagcgtcgagccctacagtcaggaagaggcggagagggcagcgggtatgggatcctatgtgccccccaggcggctggcagtgcccacggaagtgtccactgaggtccctgagatggatacctctacctgacatggcctgaagatgcagggcagaggaattgcccatggacagtgacgcaaggactaggctgggagggagcgtgccaaccccttttgcctctgggtttggggagcggagggcctcttcttggtgccctgcccccaataaaggaactggacaaagagaa

SEQ ID NO: 80096 - DNA, 662 bp, Homo sapiens
gcgtggcctgacgtagctgatcggcccggaagtgctcacacgtgtgctccctgccctgctcctggccccttggccggccgggctgtttctggccatgggtcgctcccgccggacaggcgcgcaccgagcgcactctctagcccggcagatgaaggcgaagcggcggcggccggacttggatgagattcaccgcgagctgcggcctcagggatccgcacgaccccagcccgacccaaacgccgagttcgaccccgacctgccagggggcggcctgcaccgctgtctggcctgcgcgaggtacttcatcgattccaccaacctgaagacccacttccgatccaaagaccacaagaaaaggctgaagcagctgagcgtcgagccctacagtcaggaagaggcggagagggcagcgggtatgggatcctatgtgccccccaggcggctggcagtgcccacggaagtgtccactgaggtccctgagatggatacctctacctgacatggcctgaagatgcagggcagaggaattgcccatggacagtgacgcaaggactaggctgggagggagcgtgccaaccccttttgcctctgggtttgatgtgacagggaagtgtacagactaccctgcccccagagagtggaggcggcaaaagcggggcaga

SEQ ID NO: 80097 - DNA, 173 bp, Homo sapiens
gctgggagggagcgtgccaaccccttttgcctctgggtttggggagcggagggcctcttcttggtgccctgcccccaataaaggaactggacaaagagaacttgcctccaactctaacttccaggccgctgtctcaaactcctgccctggaagggcttctctactactttctg

SEQ ID NO: 80098 - DNA, 656 bp, Homo sapiens
gcgtggcctgacgtagctgatcggcccggaagtgctcacacgtgtgctccctgccctgctcctggccccttggccggccgggctgtttctggccatgggtcgctcccgccggacaggcgcgcaccgagcgcactctctagcccggcagatgaaggcgaagcggcggcggccggacttggatgagattcaccgcgagctgcggcctcagggatccgcacgaccccagcccgacccaaacgccgagttcgaccccgacctgccagggggcggcctgcaccgctgtctggcctgcgcgaggtacttcatcgattccaccaacctgaagacccacttccgatccaaagaccacaagaaaaggctgaagcagctgagcgtcgagccctacagtcaggaagaggcggagagggcagcgggtatgggatcctatgtgccccccaggcggctggcagtgcccacggaagtgtccactgaggtccctgagatggatacctctacctgacatggcctgaagatgcagggcagaggaattgcccatggacagtgacgcaaggactaggctgggagggagcgtgccaaccccttttgcctctgggtttggggagcggagggcctcttcttggtgccctgcccccaataaaggaactggacaaagagaa

SEQ ID NO: 80099 - DNA, 798 bp, Homo sapiens
gcgtggcctgacgtagctgatcggcccggaagtgctcacacgtgtgctccctgccctgctcctggccccttggccggccgggctgtttctggccatgggtcgctcccgccggacaggcgcgcaccgagcgcactctctagcccggcagatgaaggcgaagcggcggcggccggacttggatgagattcaccgcgagctgcggcctcagggatccgcacgaccccagcccgacccaaacgccgagttcgaccccgacctgccagggggcggcctgcaccgctgtctggcctgcgcgaggtacttcatcgattccaccaacctgaagacccacttccgatccaaagaccacaagaaaaggctgaagcagctgagcgtcgagccctacagtcaggaagaggcggagagggcagcgggtatgggatcctatgtgccccccaggcggctggcagtgcccacggaagtgtccactgaggtccctgagatggatacctctacctgacatggcctgaagatgcagggcagaggaattgcccatggacagtgacgcaaggactaggctgggagggagcgtgccaaccccttttgcctctgggtttggggagcggagggcctcttcttggtgccctgcccccaataaaggaactggacaaagagaaaaaagcacaaacaaaaaaaaaaacaggctccagagaacgagaggtgcgccacagggtctcgtcccgccgcgggacgcgcgcccgggaagaccagggacgcctgggcctgtgccgaaacaccggccgccgccgtccacaaccc

SEQ ID NO: 80100 - DNA, 402 bp, Homo sapiens
aagaattgcctgaacccaggaggcagaagtggcagtgagctgacatcatgccactgcactccagcctgggcaacggagcaacactctgttgcaaaaaaataaataaaataaaatttaaaatgtaaagtttattgtgataaatgcctaaggaatatatcttaaataaaaaaactcattttatacatcaaggagctagaaaaagaataataaactaagtccaaggttagcagaaggaagtaaataataaatattggagcagaaataaatgacattaagatagtaaaacaactgaaaagatcaatgaaactaaaagtttctttgaaaggctaaacaaaatagataaaccaagagctgttttttttttgaaaggataaaataaacctttagctagattaaccaaag

SEQ ID NO: 80101 - DNA, 624 bp, Homo sapiens
agatgtcggagtcatcagaactgatacttgacagtgagagaaggaatcgattttcccagagttcaaagtagaatgtgacttttaagaggtttcatggtttttgtgaattccatgaagttactaagtaaaagctgcaaattcatcataatttttctcaacattcaacactcctacttgttaatccaacaaatggtagataaaagtctgtattctaccatgcctttcaaaagtttttattatctgaaagcatatgaagatgatatttatgtatatttaatatgtaggggtattattacatattatcagtgaaatacgagtataaaaattagggtcaaccagaaatctgcaattgactgtcaaaactgagctcagttaaagtaagattcaattctaacatggatgtgcacgttcctaaatatcttatgattgaatatttacatgaaggcattcatttttatctgcccctttatcagacctatttgcatctcctcaaatgaattagatgtggcctatgctttgcagaggatggacctcacctactccgcacaccgtgaaaaaactggaaatgggcattgtagtctttaattaataaaaacaccaaaaatgtgtattgcctttcttaac

SEQ ID NO: 80102 - DNA, 444 bp, Homo sapiens
tttggctattgtggttcttacgagtttaaggaaggcattattggttggggggcggcgggtgggaatgtattatggtagcttgttttagatgctcttacacttcatatatacaagaaactaatgagattggttctctgtgaaggatcggggacaaggaggtgggaggatggggagggagtgtgcctttggcatggtttcacttttgtatggttttgagtcatgttaatgttttacatattcaacaagcaaaccaaaaggacagggacaaatgtaaaactgaaaagaaacaaacaaatgctctaactgcatttcaaatgaataacataatcacattgaaggagggaaaatggatttcagtaacgtttgtaccggatataccctcagtctaatgaagaaacaaaaagaactgcaaacaaatcttaaacatttcttcaaggtttagtt

SEQ ID NO: 80103 - DNA, 621 bp, Homo sapiens
cgtctcaaggtatgtttcatgtatcttctcttttttcattgataaaggcccaaacttcccagagagaaaaacatacagccttaaggaatttggctagaagtctattcagggcatatgatacgatagaacagggattctgtagaacctggaagaaagtagtcactctaggagtaggttagcttgagagaagtagcaagaatgtacttaaagcagcagataatgagatagaattggggtaaattgcggtaggaatatgttagaagcaagggtggaactgtcgtcactgttacctcgatggcgaagccagaatgtgaggctcttgctcttagaactcacgtgagtaccatagcctcgcgttgtcttgcaggacacagattatccttatttgggtaccaccatggacacctataaggaactgattgagaggattcctgagttgaacaaagtggcacgagcagctgcagaggtcgctggtcagttcgtgattaaactaacccatgatgttgaattgaacctggactatgagaggtacaacagccaactgctttcatttgtgagggatctgaaccaatacagagcagacataaaggtgagcactgattccaattacgtttttatttt

SEQ ID NO: 80104 - DNA, 301 bp, Homo sapiens
cttactcagtttggataaacccctctttcttcttcagtcacaccctagctatactgcctacctagcacctttggatttgcatcttattctctgcctgttatgctctttgagccctctatgactccctttctcacctcatatctgttcaaatgttaaattctcattgaggggttccctaattacctataagatattttttcaactcccctactccttctctctgattttctccctgatttcttctaccatgatatataaattggttatttattctattgcaagataaactttatgaagacaa

SEQ ID NO: 80105 - DNA, 449 bp, Homo sapiens
ttgagacagagtttcactcttgttgcccaggttggagtggctcctgagtagctaggattacaggtgtcctctaccacgcctggctaattttttgtatttttggtagagatggggtttcaccatgttgaccaggctggtctcaaactccagacctcaggtgatccacctgccttggcctccaaaagtgttagattacaggcgtgagccaccgcacccaacccaacatcctatattttatgtaaatattatactatggaccgacttgtgtctcttcaaaatttatatgttgaagtccttaccccctgtacctcagaatgtgactgtatttggaggtggggattttaaagaggtggttatggtaaaatgaggtcatatgagcgggtgcttatcaaatatgatataagccggggaaatctggacacagacatgcacagagggaaagcatgtgg

SEQ ID NO: 80106 - DNA, 156 bp, Homo sapiens
gccgtgggaaggagaggagaggaggatccttgtaacttgctggtggcccaggtgtccctgctatccgtggacgaaatgtaccagaaccttccccccgctgagaaggaccagtactgggatgaggaccagccgcagccaccctacactgtggccacg

SEQ ID NO: 80107 - DNA, 295 bp, Homo sapiens
gataaaatgcaaacacaagcctgtggtacacattctgtatggttatttaagtagtttaggggtattttcaagtcaagaacagactacttatgtataagtaagcacagtctatattgtgccaaactattttttaaaatacttaaatttaaattacttttcaaaggatccaaatcataggtattaatattgacattgtcttgcatagattaaaacgtatcatgttgttaaataattatacatatctaagatatttttatttttttttgagacggagtcacgtgtctaagatatttta

SEQ ID NO: 80108 - DNA, 203 bp, Homo sapiens
cttctcagtagttcagccaatgcgatgaaatgtgaagaagccttccccagcttccttgcattctctccatcatctgtgcagtggagagtagttcccactgctgtggaaacattttccctttgctcttttctctcagggcaggctttcctgagtgcctgctctgtgtgagtcatcgtgggaggatgcggtggagaaggacaggg

SEQ ID NO: 80109 - DNA, 738 bp, Homo sapiens
  misc_feature (419)..(419): n is a, c, g, or t
gcctgtaggtttacttgctacattatcttgatagtgccaatgagatctgtgccactaaaattaaaattgggccaatagcatataattaaacacattttgttgtaaaaacatgatttagataagtgctataggctatttttttcttttctttgagatggagtctcgttctgtcacccaggctggagtgtagtggcacaatctcggctcactgcaatatctgcctcccatgtcaagcaattctcctgcctcagcctcccaagtagctgggattacaggcacatgccaccatggccagctaatttttgtatttttagtagagacggggtttccccatgttggtcttgaattcctgggcctcaagtgatgcgcccacctcagcttcccaaaatactgggataacagtcatgaggccaccatgncccggccactataggctatttttaaaaaaattttttgtggaggcaaggtcttgctatgtggcctaggctgatctcaaactcctggcctcaagcagtcttccttcctcagcctcccaaagtgttgggattacaggtattagccaccatgcctggcctgctctaggctcttaaaatgtactttcacataaaaggaaaaaataacacttcttgttgccattgttatatgtgtgttttacatattgtcaaggtcttaagtgatgaacatgaatttgtaaattgaacttttgaaataataaatttcagttaatgaaatatatat

SEQ ID NO: 80110 - DNA, 355 bp, Homo sapiens
tccattcttcaggtcagagcattgggccactggagtagtctgggaggggcctttgacttctctgcccctaaaagtgagttctcataaaatatggtgcgcccaggctaacgctggtacttattatggcaaatcctttagcttcaggtccctgctctttttgtcctccacttctgatatgacaaatgcccaacagtggaggcaggaagacagcccaccttctgtcagagcctactccccagctcatgtttctctgtccctccgttgtatagcaaactcttgccaagccttttggaatgactttttaacaagaaaagccccatactttaatgggccaattcaaacaactgacatctgt

SEQ ID NO: 80111 - DNA, 404 bp, Homo sapiens
ttaagattacacaggcatgcacattttcactgacaattgaaatttatttgctttacatgacactaagttgttctattaataactaagataccaaatataatttagaaatacaaaaaaagaggatgggtgcggtggctgacgcctgtaatcccagcactttgggaggcagaagtgggcggatcacctgaggttgggagttcgagaccagcctgaccaacatagagaatccccgtctccactaaaaatacaaaattagccatacatggtgatgcatgcctgtaatcccagctactctgtaggctgaggcaggagaatcacttgaacccgggaggcacaggttacagtgagccgagatcgcacccttgtactccagcctgggcaacaaagagtgaaacttcatctca

SEQ ID NO: 80112 - DNA, 752 bp, Homo sapiens
agcggatagctctggctaggacctccagtactatgttgaaaaggagtggtgagagtaggctcttcgtcttgttccagttctcaaagggaatgctttcaccttttccccattcagtattatgttggctgtgggtctgtcatagatggcttttattacattaagactcagcttcgcactccagggctgcgtaccaccagccactgtcatgttaaccccttcccaggccaatgtgtccttggtctggagcccaatctgctggacagcctgggaccgtccattttcggggtggtgggcaacctggtggccatcgtggtgctgtgcaagtcgcgcaaggagcagaaggagaccaccttctacacagttatgcggctggttgccaccgacctgttgttcactttgctggtgagccaggtgaccatcgccatgtacatgaagggcgggtaacctgggggccagctgctgtgtgagtacagcatcttcagcttgttcttcttcagtcagtccggcctcagcatcgtctgtgccatgatatctatacaggatgtctcaactcaaatgtgaaattttcatggagaatatttgaactgtatttagattaatacaaattgcagttaaaaagtttaatatagatttaccagggggcgtgcagcccgcttgccaatcagatcgctgctgagcggtcccacagccaacccccgaagagcagcctgctggcttccccagtgcccaggagttggggatgtcctacaaac

SEQ ID NO: 80113 - DNA, 863 bp, Homo sapiens
cctgggtgagcgccagacgcctggggtccgtttgccgcctgctgagactagacaaggaccccgggagggcgacgttgggggagagggctacggatggaggtcccgccgcgcttgggccgggtccggagccaccaggacgcacagcgggtttccctcattctcagtcaggtggttgagttatccaagccttcataaccagagggtctgagcacttgttggactgtgcttactgcagcttctcatttacaattaccactgcacctgagagtaccaagagattcctgagccagagattacgatttccaacttccagctcctcaagatggagaaacagagggaagaagagacttggaatcactctgtcctggctgtgggtctatgaaaaagaatgtggcctactgctaaatacattgattttgaagctagatagctctggttttggggagcaagtgatttgatctctcagagactcagctacttcatcagtaaacagagattaccatatccaccagtaatggctataggagcagtaatagggatgatataggtgaaagcactgatcactgaatgattccaaagacaggtgcagagaggttcaggcatcagacaggctacctggatccaaatcccagctccatcatttactactttcatggcctttacaaaccactaaacttctctctgagcttcaattttcccatctgtaacatgggaactaataaaatgaaaccttcctaataaagttgccaggaagattcattgagacattgaatgtaaagtatttaactcaatatagagcacaggggagcaccaaataaaattcaggtgttacatttttaagcacgtgttcaccaaggctccca

SEQ ID NO: 80114 - DNA, 764 bp, Homo sapiens
gtaaaataaatatataacacagaaatacatgagaaaaaaaaactaaaacagtccaaaatatctgcagtcacgaaattcacagttaacgtttcatcttccacctcccacatcctccgcccctgccacctgcctccgactgtcattgggattacaaaacccaactggagccctaacagtgcgctcttctctgaagtacttgaaagacgtttatctccagtacaatataaataatacaaatagttgtacttcaataatcactcaagaccacctcctgagaccttgtctgagaaacagagaaaaaaagaacaaaagtctactaccaaggagctcctttattctactggcaattccacatgacctcttgtcacttaacaattgtaacagagagactgtgacatacatgcaggcctgacattattaaccatcattcagagcacaccagacaccacagaaataaatgctcttctgttgtagttgcaggtatgaagaacagctggaaggaaatttggtataatgaaaagaatactaatcccacgaatctggaagactgactgccagtcctttttctgatgtcaaaattactgtcttaaagacaatccactcatttttatagtacctgtagaaccctgtgttcaaagacatgctgtaaaagatgtaaaattagtaatcaagggcctgctcctacttggtgaatggggaaggcggactgaacctcgattatttctaataacacaactggttccctgtacatagtgaagtccaaa

SEQ ID NO: 80115 - DNA, 423 bp, Homo sapiens
gcacaagcatatgcatatgctaaatatcaatgtccagagttttaacattttgacattttttatttaaacttgtttttaccttatttagattatatggtagagataattttatgccctcctttcttaacattatcataagcatttttcttaattgtttagttatgcattgtgtttattacaaaaccagcatggaatgctgatgtgaacagtagaataaaatcagactgtgtaccacacctgactccgccattaagtatttgtcttttttttttttttttttgagatggagtctcactctgtcgcccaggctggagtgcagtggcgcgatctcggctcactgcaacctctgcctcctgggttcaagcggttctcctgcctcagcctttcaagtagctgggactatagtcgtccgccactatgccc

SEQ ID NO: 80116 - DNA, 550 bp, Homo sapiens
ccagcatgggaaaattctggcaaacaatcttacaagcagagtaagtacaagactttgaagcagcaaagatcttacacaatccatcgtggttggagcagtaagagttaagaatacatagatgagagaagagaagagaagaaaggcagatattgcaaggtctggaaggccaagataaggaaatgaatttcacctcattttaaatgtagtaggaagccaataagccaacaagaaattttaagcagagaagtgagatgttctcatttatgtttccaacagttcactctgctgtgtacagcgtggactgggggggaagagttaaagcaggaaaatcttcaactagggtggccccaatggattacagaaacttcaatgacctaagaatagtttggtagaagcaatggactttgccgataaaatgaatgttgtggtgtgtgagggcaataagttaagaataactcacaggtttctagcttggtcactgggcccaaggtattgtcaatttctaacttggaaggagactttgaagaaaaaatgtttacaggatacaaat

SEQ ID NO: 80117 - DNA, 947 bp, Homo sapiens
taatgtttgactctaagagcttaaatacttggcaaggttttcctaggagaatttgtggagaaaatctgtgaatagatgagccaatttttaaataatataaaatggggatacatgatgcaaattaattcttgccttttagtcccacatcccttcttccattacttacaggttattgttaccattaagaacacttctttttcttaaatgagcaggtttatgtcgattattcagagttgttacacaggacatagattggttttatcatgtctatcttaaagtttttctttttcttactcttaccagtcaacctaaaattcttttttccctctgatatctaattgcaggttaagcaacctgaaattcttgcaaaagggcacctttaatttgaattgtaattggaatcctatgctagtgacagtgtatggcttttctgtattgttttctaataattatttgaatatgaaacattccacagtaaatcccagacaagagctattgtttttcattttataggtgagagattaagtaacttatataagattatacaactggtaaggttggagctagtattcaaattctgataaatctggtacaaaagtacacattcttctgtaatatttaaatgtgaattctttttgcagtttttgagtcagagtcttgccctctcccccaggcatgagtgcagtggtgcgatcatggctcattgcagccccagcctcctaggctcaagcgatcttcctgcctcatttttaaatttttcatggagatgatgtctcattatgttgcccagcctggtcttgaactcctgggctcaagtgatccatcccaccttggcctccgaaagtgctggaattacaggtttgagccaccatgcctggcctaaatatgaattattattattttaaatggagcctgggcaacaagagcgaaactctgtctcccattta

SEQ ID NO: 80118 - DNA, 597 bp, Homo sapiens
ctgttgcaaacaggctggtttgtaaaagatgtatgttttggtgtttgaaatgtttataaaattgtatataaatggtttcaattttccaggcttttgtagatactatatttgatgcctatcaggatgctttaatttggggggtcgaatataattgtaagtcatccacgctgttggtctgcaaacttttgaggtaactacacacacacacacacacacacaaggattttagatttgaaaatgatgttttttactcatttcaaaatgtactgtaacctttctttggttcttactgttttcatttaactttctctgttttcaagaaaaattgtctttattgacatttgtaaaaaagaatgtgttttgcccagttattaagtattttatttttatgcaatttcagaatcacaatgaggtatgccatttcttcatatacatgcacattcacctcaacttgcacacacatcacacaccaaaccttatgcaaaggggaaagctaacacttagagtggattttgtcccttaaggaaatggattgttcctgcatatattgctggtggcagtattcagtcttgtgttctttttctaaaaaaaaagaaa

SEQ ID NO: 80119 - DNA, 167 bp, Homo sapiens
ctacaaacagaaactgtataaccattaagcagtaactcttcatgcttcccacctccagcctctagtaacctttaatctcctttctatctctttgaattagtctattctagacattgcatacaactgtacggaattcttttgctttttacggggggggagatgcttat

SEQ ID NO: 80120 - DNA, 336 bp, Homo sapiens
aaagatgggaaaggatcaaaagaatatgtcaaataaagatgtgcaatcgcatcattaacatgaactaccccctaaggcatgctgtcctcagagactgtaactactaacagatagcatggaagcaactccactattagacgtcattttttctagctagaacgtattattttcacaagtcaccttgaggaacaaactgcattttaaaaacctttctacttcatagaaaacaatttcacgtttttcaaaggacattcatattccacacctcactttatcttccaaatgaaaccaaaaaaataacttcagagatattatcactaaaattaaacaaatagg

SEQ ID NO: 80121 - DNA, 727 bp, Homo sapiens
aagccccccacaccggctgtgcacttctcagtgaggactgaagtcacacttggggactccaaatttgattttctgccaaccctggctgctaatggcagcagcagatcatcctctggtaccaagacttggcagcaccaaaatgcccagtctcatgtgagactgttagaatggactccaaagcccccaggaacccagagagcttcctgcctccccgctcctgccactcctgctcctgcaaagggaaaccctgcccctggctatggctgtcttcacaaacacactcgctgcctctactggcatcttgctccactgtgaggaaatgtgtttccatggtgatgccggctctgtgtgctggtttcggggatagtgggctggttttgaatcaggattgtaaacttgccttgtacttccctcccttgcctgcctaccagccaaggacgtcagagttgactgcaaaggcacacttagttaattgggaggcagaggaaggaccacggatggattaaactgcctgcttcctctgttcactgttcactagggctgaagccaagctagcattgtctcctttggacataaaggccagtccattgtcgtggtttaaagaaggccactccacagggtctgaaggacatttactaacactggggggagcatgatttttcaacaggaaaatgggtctattgcagtggctcgagtctggctgcatactggagtcacctgggaacgt

SEQ ID NO: 80122 - DNA, 232 bp, Homo sapiens
gaagcccgatttgaaacatttggcaatttctgtgttggaaatacactcaccacagttgatttaaagctgtcaatgtaaagtcactgaagaaggagacaagatgtgcacaactagttcctatgtgtgagtatgagttggctccagcatactatcgaaaccccacgtgttcttggtagcctttcattcaacagtatttcaagaataacttttcctgtcaacaaatgttcctttg

SEQ ID NO: 80123 - DNA, 239 bp, Homo sapiens
aggcacctgccactgcgcccggctaattttttgtatttttagtagagacgaggtttcaccgtgtcagccaggatggtcttgatctcctgacctcgtgatccaccagcctcggcctcccaaagtgctgggattacaggcatgagccaccagcgcccggccagttacatctttttaaaacattttagccaggtgcagtggcttacagctataatctcaacattttgggagacacaaggcag

SEQ ID NO: 80124 - DNA, 304 bp, Homo sapiens
gctgcagcttctggcatttggttgtcctgataaaaaggaggcagcaaaaactagaagccttgcactgaggtttagatttataccacattttaatctaattaatgtggttccttttttaaagacagatctcagtctgtcacccaggctagatctagtgcagtggcgagatcttggcttactgtagccttgacctcccgggctcaagcagtcctcccacctcagcctcccaggtagctgtgaccataggcatgtgccaccatacccagctcattgttctgtgtttttggtaaagacagggtttcac

SEQ ID NO: 80125 - DNA, 355 bp, Homo sapiens
tgagtagcaagtgattctagtttgtcatacaaagaagtgatatcatatttgtgtgaaataagtgcaaattaaaagtggtttgatttaaataaaaatattaagccagtgtacaggtgctgtatagatatggcaataatagtgaaagaaaaccttgaatgactgaagtttgagtcatgctgctctcatgtctataacatgattctctatgttctctatgaaaattcagttcacacgcaatttttaggaaatacttctggcaaactccgtatggttgccttctgtcacctgggtctgctactgtacattcacactaatataatgcgttgatggattaaattaaagttctgggcctgga

SEQ ID NO: 80126 - DNA, 438 bp, Homo sapiens
gtcatctctacttgccatcttgagcattcaccctaacgtcttcaagtttctattgcctcatctgaaaattgaggcctaacaatgtgtgtcttatacagctctggcaagagttaaattaggtgatacttgcaaaacatccagttcagttcctggtgcctaataggtttttaaaagtgatcactttaattgccagcaagtcttgttattttgagtcaaaatcaacctccttgtaacttccacttcagtagagttgccctcaaattacttgatttcctcttccacatgagaatatttctgccatttgaaaatagctctcataccctttctttgggatgattttatgctcttgttggtgcccggatcaattcttaagctgtcctccccatcctgcccaccaaagctcaagcctcaacttttctcctagccaggtcctctttt

SEQ ID NO: 80127 - DNA, 512 bp, Homo sapiens
acctaacagagcactgggcaacctaacagagcactcactgggcactgtagaaggcactcaataatcatttgttgaatgaaaggctaattttaccactttgggactttgagtttattatcctgctatagataaggatccctagggtgatcatgtaacttactgtccaaatgagatccttttgaaagtgaaagggaacactcaaataattttactgggacaacagttgtaacccagagctgttttggcaaactggggtatatgatcaccctaagaatagctctaatcaatgaagcttccatggctgaatagcccggctaccaggtaaataacaatggggaagtgtagcgcatagtgtgctttgcggagtaggcactcaacaattattggtggaacatgaatctaactgtatcatattctctttgaagcccatgggctctacattgtgaccctggggcataggcattccttgggatgactctgtccacagcagtcctgacgtgtgtgcttttgct

SEQ ID NO: 80128 - DNA, 215 bp, Homo sapiens
  misc_feature (164)..(164): n is a, c, g, or t
  misc_feature (169)..(169): n is a, c, g, or t
  misc_feature (189)..(189): n is a, c, g, or t
atgttacttttattgtaagaaaaccttcccttctccccttcttttttcctctccactaagagtctcctcttcttttcttctcttctgttgcctaggttggagtgctgtggtgtgatcacagctcactgcagcctcgacctctctggctcaggagaattgcttgnacccnggaggcggaggttgcagtgnaccaagattgcgccattgcaccccag

SEQ ID NO: 80129 - DNA, 719 bp, Homo sapiens
atcacctgctgtttcttgggacctgaccatgtacatactaatatgaagcactagggacttggtaggaaaaaagttcaggcattaacagcttgcttgtttcagccctcagcaaatatctagaaaaaagaaacagccttatcctgaaactggtcagtctgtaaacaaagaagggagaaatatggctttgctaagagaccccctttctaaacttaaggaatttcttcacatttaatttccatttaaatttcttcaggtaaaatttaaattaatgattttattaagaattatggccaggaggccgggctggtctcgagctcctgacctcgtgatctgcccaccttggcctcccaagcccatccatctttatcctgtcctctcaattcttggaagtacaatgcatagaacttttattctcagccatttgagagtaaattgcctgaggctccattaccctccaaacaaggacattctcctacataaccacaatggcaccatcaaaatcaggaaactggagtgataccatcaaaatgataccataaccatgaaaaccaggaactggaatgaaactgccaatccttagggccccttcacgttttgacaatcgttctaataatgtccttttcgcaaaaggagccagtttagagtcgcctgctgtattcagctgtcctgtctctctagtctctttcagtctagaacagtctcagtctgtccttgacttc

SEQ ID NO: 80130 - DNA, 443 bp, Homo sapiens
ggaatttccacagacaggaatttccacagagctagaactgttctctttatgggttcttgtctgcctcagatggcatccattacagtggggaatgtgttcatagttaaaaagttttgctatctccatgctcctagttcctataaaatcacttgcctcattgtgaatgttcctcatctccaccccaccttctccatccctaccccacagtctctgccctaccatcatctggctgactcctgtacattccattcttgccagctttgtaacctgccctttcctgttcagggcactttcctgatcatggcacactgcctacgctctgtccctcttctcaggctttcccactgaatgtgagttgcttgaccattttgattttgactattttattcaccactccatcccaagaacctaagcgcataataggtgaccaacaaatatttgct

SEQ ID NO: 80131 - DNA, 884 bp, Homo sapiens
gagacaaaggaaggcctcactaagaagtggaaaattaaggaagtcaggaatacaccaaacattcatatggaagaaagaaaggagttctaggaagatggagagaagcccagaagacagaggcaggttggtatgtcaaagaaacaacaattagacaagtgtagcaaaaggagagtagcttggggcagataatgggagataagtcagagtggtactagaacaaagggtttgctttaccctgagtttgatggaaagccatcatgcagtttgagcagagatgacatgatctaccttgtctttcaacaggaccaccctggctgcgatgtggtaactaaagacagcaaatactgaagcaggaaagagaaggtccttctaacaggagagacataatggctgactggaccgggggagggatagtaagagtgacagtaacaagccgttaagagtctggatatagtttgaagaaagagcccacaggatctgtgctaacagaaatgaaggacaatgacaagatttttgtctaagcaactgaaaaatggaggtactggtttgctaacatgagtaaaaacaacgtatgaggaagaaatatcaggggcccagttctgggtaggttaactttgttattagacatctgagtggagatattgagttaaggaacctggaattcagacgagaggtcagggctgaagatataaattcaggagtcatcataaattcaggagtcatcatcagatatagataattcttaaaggaatgaaaaagaatgagactacccagggactaagtgaagctagagaagcagggagcccaaggactgaatctgggatacttccaacacgaggagaaagagaactggcaagggtgactggaaagaggccagggaagaa

SEQ ID NO: 80132 - DNA, 637 bp, Homo sapiens
gtggcccctgaactccccctcgggctccctctgctcgccggacctctctgggatgtgaccaccctggctgcgatgtggtaactaaagacagcaaatactgaagcaggaaagagaaggtccttctaacaggagagacataatggctgactggaccgggggagggatagtaagagtgacagtaacaagccgttaagagtctggatatagtttgaagaaagagcccacaggatctgtgctaacagaaatgaaggacaatgacaagatttttgtctaagcaactgaaaaatggaggtactggtttgctaacatgagtaaaaacaacgtatgaggaagaaatatcaggggcccagttctgggtaggttaactttgttattagacatctgagtggagatattgagttaaggaacctggaattcagacgagaggtcagggctgaagatataaattcaggagtcatcataaattcaggagtcatcatcagatatagataattcttaaaggaatgaaaaagaatgagactacccagggactaagtgaagctagagaagcagggagcccaaggactgaatctgggatacttccaacacgaggagaaagagaactggcaagggtgactggaaagaggccagggaagaa

SEQ ID NO: 80133 - DNA, 2560 bp, Homo sapiens
ccagacaaacaaaagctgagggatttcatcaacactagactggtcccataagaaacgcttaagggagtactttggtcagaaagaaacagacattaatgagcaacaaagaatcatctaaaggtaaaaaactcactgttaagagtaagtacacagaaaaacccaaagtgtgataacattgtaactgtggtgtgtaagtagaaagaataaatgataaaccaatcaaaaatagtaactacaacttttcaagaccagtcagaaaaataagataaaattagaaacaacaaaaagttaaaaagtggggggatgaagttaagatgtagagtttttattagttttttgtttgttaatgcaaacagtgttaccaggttaaaataatgggttacaaaatagtatttgtaatccttatggtaacctcaaaccctaaaaacatacactggatacataaaaaataaaaagcaaaaacctaaactcatatcaccagagcaaactaccttccctaaaggaagacaggaagaaaagaaagaagaagaccacaaaacaaccagaaaacaaataaataacaaggcaggagtaagtctttacttatcgataatacattgaatggaaatatggactaaactctccaatcaaaagacatagactggctgaatgaatggagaaaacaagacccattgatctgttgcctacaagaaacacacttaaactataaagacacacataggctgaaagtaaagagttggaaagagttattccatgccaatggaaaccaggaaaaagagaaggagtattgattttgatacaaaaactatgagacaaataaagtcactatacaatgataaaggggttaatatggtttccatttgtgccccacccaaatttcgtgttctattgtaatcctcaatgttggaggtggggcctggtgggacgtgattagatcatgggggtggatctttcatgactaattcagcaccatcttcttagtgctgttctcatgatagtgagttcttctgaaatctggttgcttaaaagtgtgtagcacctctccacaccacccgcttgccttggtctactcctgctatgtagatgcttgctcccactttgcattattccatgagtaaaagctccctcaggccttcccagaatcagatgccgctatgcttcctgaacagcctgtggaactatgagccaattcaacctcttttcttcataaattaacaagtcttgggtatttctttatagcagtgtgagaacagaataatacagaaaattggtaaagaggagtgaggcattgctagaaagatacctgaaaatgtggaaacagcagtggaactgggaaatagacagaggttggaagagtgtggagggctccgaagataggaagatgaggggaagtttggaatttcttagagatttgttaaattgttttgaccaaaatactgatagtgatatggacaatgaagtccaggctgaggaggtctcagatggagatgagggacttattgggacctggagtgaaggtcacttttgttaggacattgtggttggagacattgtgcccctgccctaggaatctgtggaactttgaacttgagagcgaagatttagggtatctggcagaagaaatttctaagcagcaaagcgttcaagacgtggcctggctgcttctggtagtctgtgctcatatttgtgagcaaagacatgacaagaaactggaacttatatttaaaaaggaagcagagtgtaaaagtttggagaatttgcagcctggccatgttgtagaaaagaaaaaaaccattttctggagaggaattcaagctagctgcagaaaattgcaagtaacaaggagcaaaatgttgatagccaagatagtgggaaaaacaccttgaaggcatttcagataccttgggggcagcctctcccatcacaggcccaaaggcctaggagggaaggatggtttcctgggccaggctcagggtcctgctgccctgcacaacctcaggaaactgctctccaaatcccagctgctccagctccagcttcagctcaaagggccccaggtatagctcaggctgctgctccataggatgcaagttataagccttagtggctcccgtgtggtgttaaattaagcctgtaggtgcacagagtgcaagaattgaggcttgggagcctccaactagatttcagagtatgtgtgggaaagcctggatgtccaggcagaagccagctgcagggacagagccctcatggagaacctctactagggtagtgtggaggggaaatttggggttggagttcccacacagcttcccctctggtgtactgcctagtggagctgtgagaagacagccactgtcctccagattccaggatgatagatctgccaatgacagcttgcactgtacaactggaaaagccacaggcagtcaatgccagcccgtgaaagcagtgacagtggcttaccctgcaaagtcccaggggctgagctgcccaaggccttgggagcccaccccttgcaccagtgtgccctggatgtgagatatggagtcaaaggagagta

SEQ ID NO: 80134 - DNA, 1362 bp, Homo sapiens
ccagacaaacaaaagctgagggatttcatcaacactagactggtcccataagaaacgcttaagggagtactttggtcagaaagaaacagacattaatgagcaacaaagaatcatctaaaggtaaaaaactcactgttaagagtaagtacacagaaaaacccaaagtgtgataacattgtaactgtggtgtgtaagtagaaagaataaatgataaaccaatcaaaaatagtaactacaacttttcaagaccagtcagaaaaataagataaaattagaaacaacaaaaagttaaaaagtggggggatgaagttaagatgtagagtttttattagttttttgtttgttaatgcaaacagtgttaccaggttaaaataatgggttacaaaatagtatttgtaatccttatggtaacctcaaaccctaaaaacatacactggatacataaaaaataaaaagcaaaaacctaaactcatatcaccagagcaaactaccttccctaaaggaagacaggaagaaaagaaagaagaagaccacaaaacaaccagaaaacaaataaataacaaggcaggagtaagtctttacttatcgataatacattgaatggaaatatggactaaactctccaatcaaaagacatagactggctgaatgaatggagaaaacaagacccattgatctgttgcctacaagaaacacacttaaactataaagacacacataggctgaaagtaaagagttggaaagagttattccatgccaatggaaaccaggaaaaagagaaggagtattgattttgatacaaaaactatgagacaaataaagtcactatacaatgataaaggggttaatatggtttccatttgtgccccacccaaatttcgtgttctattgtaatcctcaatgttggaggtggggcctggtgggacgtgattagatcatgggggtggatctttcatgactaattcagcaccatcttcttagtgctgttctcatgatagtgagttcttctgaaatctggttgcttaaaagtgtgtagcacctctccacaccacccgcttgccttggtctactcctgctatgtagatgcttgctcccactttgcattattccatgagtaaaagctccctcaggccttcccagaatcagatgccgctatgctctaacgacaaaggggagctccttactagttcaaacacgggtacagacaacagcggtctgtcacagacccaacatggcgcatggaccacaaaggccaccaacgcgattccatcgcaaccggaagccccaagaggggagggcagaagagaccctgtgaagggaacacagataaccggtaagaagctatatcacctccccgggccg

SEQ ID NO: 80135 - DNA, 255 bp, Homo sapiens
accactccaaatactaaaaataaaataaaataaagtatggggttcctagggaactgactttgccaggacatacttttcgttggggcggaatgcaccgaaaatcattggtaggaaaaataattttttttttgaggaaaaatttggaaacctttttcccaaagggcccgcaagatcctaaaaaaagcaagagaccgcgcagaaaccgaggatccccctcacaggcgacacccagcgcgacctccgctagggtcctga

SEQ ID NO: 80136 - DNA, 449 bp, Homo sapiens
cctgacccacttctatgaatctagaattacctaaaatgtgattagacaagctacatgctgcaaaactgcttttggaatttgttaacatgccgtaataagatgttaggttggtgcaataggaattgcagtttttgccattaaaagtaatgaacaattcctttagcactaacaataatttagcacctaaaagtcaagcatttagaagtctgaaattctgaggcagcagaaaataacagttactttccaggtaatgtgaaacacacacatatgcaagtatgttcacaggccatacatgcaaattttaatgctattacataaacacataggtaggcatatatttcatatgctacaacatttatatacatatataaaaacttaagacacaggcatgcacatttagttaacaagccaatacgatatttgagtgtttctgggtaatatatcagtgt

SEQ ID NO: 80137 - DNA, 849 bp, Homo sapiens
gtttttactacttacatcataactcctcttatggaccatcatcaatacctaatctggaaaatttcccctgctccttgtcatatattcaaaattaatagatattttttctcttaacactaataagtttttaattacttcctatcttatctgttatcacaatgaatcaaattagttaggtatgcttatgtatctggtttttcaacacctatttaagggaagaaacaataggccattcatctttatatttctgggaccagagacatagcacttttgtgtcctcaatatccccaaatatgactatcacagggaaggtgcccacaaaatgtttgctgaatgaatctagttaagtcctcaataaataccagctgagtgaatgaatggaacttcatagaactataatcatattgatgatctgcattacatttcaaattgtttaatacaatttaacattcatgatatgcactttttcaggtaaaatgtaacaccttgactattgtacattaggatgttcttgaaatgtgaaatctaaataaatatgtatacaaatttggtatctcttttcgtggcagctctccttggctgagatttctggatcccctgtgggatctactgaactcagtatcacacgtaacttagctttgtttgattcaacctgccacacagttcaccagcctggatcttgttgatgtagctcattatccataaatcactacctgcattgtctaatttaagatccagggtaactgcatacttgtgttttgttgttgtttctttttttggggggagaggaatttacatgaaagcagaacagagagtaccatgattatacactaaatagaataagagaac

SEQ ID NO: 80138 - DNA, 1021 bp, Homo sapiens
cccccaccccttcttttacctaggcaagagattaggggagtcttttttgattaaagagagtaggtccaaaataaagaccctgaaacactaaaatctggggatccccaacaaaagaactggctcagtacctagtgatccgacggagacacctctgttagacagctcctgcccacacacacagcttccagtcttgctcttctatatgaacaggcagttaacgatgatcataaggaccaacctgagcagcagaaccaaagggactgaggaaacagacagtgctggtacaagtatgcaagttttctgtaaacagattactttcaaacagttgggagccccagggagataatagaaggtatcctactcaacagcagtatatagaatgctgtagaagaggaatattgtaagaacaagaactatctcttgaaaactaaaaatatgataactgaaatataaatttaaataggattggaagctaaagctaggaaattaccctagaatgttttttgagaaatggaaaatacgaagaccaaaaaaataaaataaaactatgctgtgaaagagaaagattagcatttgagaaggcggaagttggtcctgctcagatgcggttttcagatgccttattctaaaaatagtgatagaaaacaaatttctacaaagcaaaattacaataaatttattaaactcttgcaacaaagctgttttcttatgtcttcctatgttttcctgctgtcattcaatgtgatgctgaagttcttcctccttaaaaatgtaatatttttccctttgcacaggtaatttagagttttaatttatttggtcatcatgatagctattcctgatagctgtcctgttacttagacataaaaatagtgagtaagcccaattacatatttgtagggttgttgaactcttaaaaagaaatcacttctttaatttttctactttttaaaatgggaacgcagaataataatgaaatttgttctaaaccaaaaacctacctggtttaccagttattgca

SEQ ID NO: 80139 - DNA, 456 bp, Homo sapiens
ttaggaaaatgcaaatgaaatcctcaatgagataccacgtatccactaagatggctgtaataaaaaaagatggacaataacaagtgttggttaggatatgtggaaagtagaactttctggcattgctggtgagagagaatttaatgatgcagcagctttgtcatttcttcaaaatgtttaatgttccaaaaaatgttaaaagtggaattaccatataacccagcaattccactggtaggtataaacccaagataagtgaaaacacattcacataaaaattttatgaatgttcatggcagcattattcataatagccaaaaagcagaacaaccaaaatgtccatcaactaaagaatggataattaaaattaatatatccatacaatggaatattatttggcaataaaaagtaatgaagtactgatacatgctgcaaggtgaatgccccttgaaaaca

SEQ ID NO: 80140 - DNA, 994 bp, Homo sapiens
ctggagcaggtccctggcctctcctgggagcgagtttgagtgcagtctcccgtcagacctcctgcaatggaatctgcatttctgtaagcttgctcagcaagattgagagcagggtttggcatttctagcgagagtcccaaaaggaaagagggactgtacctgaagataaaaataacaaagaaattcctgcacctaaatctatgcagtgaaactaaatcagagagaaactattaagcagccagattttaaaaagacatcactttccgaggagctgtccccttatcaacagaaatgggagcttgaagacagtcaaatgatatcttccgtgagttgaaagatgcactgccagcctagaattatacacccagggagaccatctttaaagaatgaaggtgaaatcaaggcattttcaggcaaacaaaaagcttactttggcaccagcagacctgcacaaaaggatatacctcaggcaggaggaaactgaccccagagggaagatctgagaataacggatactgtgcacctaaattaaagctgaataaacaagaataacgtggggtacaacattttagaatgtggctgcacagtacgaagaggaatgaagggagggaaactgctcaaaggcccccccgccatgctgccctggaagaggatcaagatgcacattcgcttctgagtgtatgaagtatgtttattgcgattcctagggtaaccgctaaaataacccatttagctggaatcccagaaggaaagaagaagaagaagaaaaaaaacaaagagggagataaaatgaagataaatttcccaaagtaaaagcaaagagatgaaagaccctgtactgaaagggcctatagcgtgctgaagacaagaaataaagaaaaatgtcatctagatcatgctatagtcaaaatgaagaccgaagaaaaaattctaatagcttccagggaggagcaaaagattttagtcaaggataaagaattagacatcagatttt

SEQ ID NO: 80141 - DNA, 415 bp, Homo sapiens
ctactaaaaatgaggaaagtaattattcatttataactggtagacacagtcttttaaaacggtgattttgagcctttttggtgttaaggtttttaaaacgtgattgcatagcggctaccaacatcataagttggttgtttttcatttcaatgcccttttgaaatctttaactatattgtgatgctcagaaataatatgcagaattttttatttgtgtcccaaaatggtatgtgagtggttatacactttacatacctttctgccactttctttggtgtattttgtattatgttttccagatgtatccacattgatatgattatctctggtttaattcattttatacttttcattgtattcccttataccactttaccacatttagttagactctcctgttgctgataaatgaaga

SEQ ID NO: 80142 - DNA, 2250 bp, Homo sapiens
ccctttaagacagaaagtccgttggaaccgtcggctgctctctggtctctggagatgaggcgggaggacttggggacagctgtggggacacggcccagatgctctggtcccagcagaagtgactggcggggaccaggatgctggagggtcagctcgaggccggggagcccaaggagggcacccacccagaagacccgtgcccgggagctggggctgccatggagaagacacctgcagcagccgaggtccccagggaggacagcaatgccggggagatgccgtcattacagcagcagatcaccagcctccaccaagagctcgggagacagcagtcgctgtgggctgatattcacagaaaactccagagtcatatggatgccttgaggaagcagaaccgggagctccgagaagagctgagaggcctgcagcggcagcagtgggaagccgggaagaaacccgcagcgtccccacacgcggggcgagaatcacacactctggcattggaacctgcttttggaaaaatttcacctctgtcagctgatgaagagacaacacccaaatacgctggccgcaagagtcagagtgccactctcctgggacaaagatggtcatctaaccacttagctcctccaaagccaatgagtttaaagacagaaagaattaactcggggaaaacaccaccacaggaagatagagagaaaagtcctcccgggagacgtcaagacagaagtccagcacccactggaaggccgactcccggtgcagaaagacgggaggtgtctgaagacggaaagattatgcatccatcttcccgaagtccgcaaaactccggtggcagaaaatcaccagtgcaggcttcccaggccaccacgctgcaggagcagacggcagcagccagaggagctgacagaagctcatcagtcttagggagttctgaaggcggatttctcagccgcgttcaagctgacgagttcgccagttcttccccagacagtgcagagcggcaggaaaaattctaccccaatggctccaaagaaatcgtgtttcccgacgggacggtggaacatctcaaggatggacaggaagagaccttatttcctgatgggacaatcgtaagggtggaaaggaacggcgacaaaaccattgtgctcagcaacgggcagaaagaaatccacacagcccggttcaagaggagggagtacccggatggcaccgtcaagactgtgtattgcagcggctgtcaggaaaccaagtatgcctccgggagggttaagatcaaagatgaagctggaaatgtcgtcctggacgagaagcagatgagccctcaacacgcagcatcacatgggaaatgccaattgcagatttttgctaaaacagacaaaaactaataacatattagctgccctaaatgatcttggagagccaccaaaactttaggactacccaagtcatctagaaattgcaaaggaaaagacattctctcccctatttaggaaacttggttagagcagcacacgtcggagaacaggaggctcacaaaagaacgattttcagtgcccccagcaaggctgcaccctccttgatcatcacaggggccatttctgccttgtgatggacccaggaggtctctgcagagcaagtgccgttggaccagctgattcacaaagtgctgagcccctcttccccgtgtggcccaccccaggcacggctcattcctccagaattatagaagctcagcctggcctgctcccctctggtcaccgacacccctgtcctcgctgggacaagagggagacaattctagtcactacaaggacacccaaggggtctgagtcagggctccaatagtgcagttatcgtggcctctcgcagcccggggagcacgtcgcctcttgaaactcgagatttcttaaatccaatataaaatgataaccagttacttacttctttgttgtttgcaggccacctagaaatacaaatgccaattcacctaatttttatactgaaatgtagatgcccccaacatgattttggaaagatataatttcttgaaaatcttatcagaagatgcatagttaatttttttccattatgtactcatgtttttatgaaatacaataccatattttagggccagggattattttaaccttaaaattttgcatgcgtcattgtagccctcaatatttggtaatgctatttaaagtgactcaagaagcatgtgctatctggctttgaaggaaaaaaaaa

SEQ ID NO: 80143 - DNA, 1051 bp, Homo sapiens
ccctttaagacagaaagtccgttggaaccgtcggctgctctctggtctctggagatgaggcgggaggacttggggacagctgtggggacacggcccagatgctctggtcccagcagaagtgactggcggggaccaggtgaggtgatgaggtctgttagtggggctgagggaaggggtcttccccagactgagggggtcacaagtttggggccgaggacactggggtatcccctcggaggagcgggaaagaagaagctttctcagggctgtgaggaccgcggacccttgcccacttccacagaaactgtcccaatccccgcggggaaggaacagccagggatccggttactggcattggaacctgcttttggaaaaatttcacctctgtcagctgatgaagagacaacacccaaatacgctggccgcaagagtcagagtgccactctcctgggacaaagatggtcatctaaccacttagctcctccaaagccaatgagtttaaagacagaaagaattaactcggggaaaacaccaccacaggaagatagagagaaaagtcctcccgggagacgtcaagacagaagtccagcacccactggaaggccgactcccggtgcagaaagacgggaggtgtctgaagacggaaaggtgacctcggaaacctgggtcactctacactggcagcatggaaaattcagattcagatgaagttccacttaggtctcataagagtactcaatttgttattcgaaatagacctagtaatttattaacctaattatgtttctatagataaaactttgaatttctgcagacatgtctttaatgctataaaagcaaataaattgaattgggttttaaaaagcaaacaacttgaattgggttttaaaaatcaattactttcccgagctccgtaattggtatatttctgcagagtctttaaaagaattgatctaccttgtagtgctgagctcagggctgttgggtgagccctggggtcttgctggaaattgtggatggctgaagatggcttcgtgctcccagcctttgg

SEQ ID NO: 80144 - DNA, 740 bp, Homo sapiens
  misc_feature (153)..(153): n is a, c, g, or t
tcgtattgcaacaacgttgctcctgcctgggtcttcagctccacaaaaatcaatctagaacaagacctctcctccctaagtctccagcttccggatcctcgaattgcaacaaccttgctcctgcctgggtcttcagctccacaaaaatcaatntagaacaagacctctcctccctgggtcgccagcttcctgaccctcgaactacaacaaaattgctcctccctgggtcggcagctccacgaccctcagaccacaacaagacctctcctgcatcgccagctttctgaccctcgaactacagcaacgttcctcctgcctgggtctgcagcctccaccaagagctcgggagacagcagtcgctgtgggctgatattcacagaaaactccagagtcatatggatgccttgaggaagcagaaccgggagctccgagaagagctgagaggcctgcagcggcagcagtgggaagccgggaagaaacccgcagcgtccccacacgcggggcgagaatcacacactctggtaccaaaggcgcatttgtgtttttgtatcatttgcgtcgtgtaaatatagcgtccccgtaaagatgtgggctttgttgctgggtgacgtggtatctctcacgttccaggtggtgggagggcttgctatctttccatcagctccatttcccacaagtaaagattaaagaactggatacatcaggcatctcacctgacactccagcagacagaagcacag

SEQ ID NO: 80145 - DNA, 1412 bp, Homo sapiens
ccctttaagacagaaagtccgttggaaccgtcggctgctctctggtctctggagatgaggcgggaggacttggggacagctgtggggacacggcccagatgctctggtcccagcagaagtgactggcggggaccaggtgaggtgatgaggtctgttagtggggctgagggaaggggtcttccccagactgagggggtcacaagtttggggccgaggacactggggtatcccctcggaggagcgggaaagaagaagctttctcagggctgtgaggaccgcggacccttgcccacttccacagaaactgtcccaatccccgcggggaaggaacagccagggatccggttactggatgctggagggtcagctcgaggccggggagcccaaggagggcacccacccagaagacccgtgcccgggagctggggctgccatggagaagacacctgcagcagccgaggtccccagggaggacagcaatgccggggagatgccgtcattacagcagcagatcaccagcctccaccaagagctcgggagacagcagtcgctgtgggctgatattcacagaaaactccagagtcatatggatgccttgaggaagcagaaccgggagctccgagaagagctgagaggcctgcagcggcagcagtgggaagccgggaagaaacccgcagcgtccccacacgcggggcgagaatcacacactctggcattggaacctgcttttggaaaaatttcacctctgtcagctgatgaagagacaacacccaaatacgctggccgcaagagtcagagtgccactctcctgggacaaagatggtcatctaaccacttagctcctccaaagccaatgagtttaaagacagaaagaattaactcggggaaaacaccaccacaggaagatagagagaaaagtcctcccgggagacgtcaagacagaagtccagcacccactggaaggccgactcccggtgcagaaagacgggaggtgtctgaagacggaaaggtgacctcggaaacctgggtcactctacactggcagcatggaaaattcagattcagatgaagttccacttaggtctcataagagtactcaatttgttattcgaaatagacctagtaatttattaacctaattatgtttctatagataaaactttgaatttctgcagacatgtctttaatgctataaaagcaaataaattgaattgggttttaaaaagcaaacaacttgaattgggttttaaaaatcaattactttcccgagctccgtaattggtatatttctgcagagtctttaaaagaattgatctaccttgtagtgctgagctcagggctgttgggtgagccctggggtcttgctggaaattgtggatggctgaagatggcttcgtgctcccagcctttgg

SEQ ID NO: 80146 - DNA, 413 bp, Homo sapiens
gtaggtggctgagtggcttctgtgagggcggcccacccggttcccctcagggagacctgagaaggtgaccttttcgtcctggggaagtgagattcggagccggtgtcatgagatggttgcatcttcccatcttctcaacaagaacagaaaattaagatgattccaaatgtctctttatttcctgaagttcagcctttcaaacagagacttttttttatagatttaagttggttgcatttagcacaaacaagattaatgttttttatgacttaagagttcccctagtcagagtttcattttttatcattttgatttacagttctcagttgacattaatagactcgaaggcaagaatagcaaacatacttctaagccctagctaggggccgacttgtaacatgctatattttaca

SEQ ID NO: 80147 - DNA, 252 bp, Homo sapiens
atgaaagaattaatgttcttacaggatcacttgttgttgaactgacctgacatgtgtatagtgatctcatgaacaagagggaagctgtgcatccattcacttcaattggatttagcaatcgcagtaggataatgatatttccacaatgtatatgctctgtccctttaaatttaactttttgctttttagacagaagctcatcagtcttagggagttctgaaggcggatttctcagccgcgttcaagctgacg

SEQ ID NO: 80148 - DNA, 731 bp, Homo sapiens
ccctttaagacagaaagtccgttggaaccgtcggctgctctctggtctctggagatgaggcgggaggacttggggacagctgtggggacacggcccagatgctctggtcccagcagaagtgactggcggggaccaggatgctggagggtcagctcgaggccggggagcccaaggagggcacccacccagaagacccgtgcccgggagctggggctgccatggagaagacacctgcagcagccgaggtccccagggaggacagcaatgccggggagatgccgtcattacagcagcagatcaccagcctccaccaagagctcgggagacagcagtcgctgtgggctgatattcacagaaaactccagagtcatatggatgccttgaggaagcagaaccgggagctccgagaagagctgagaggcctgcagcggcagcagtgggaagccgggaagaaacccgcagcgtccccacacgcggggcgagaatcacacactctggcattggaacctgcttttggaaaaatttcacctctgtcagctgatgaagagacaacacccaaatacgctggccgcaagagtcagagtgccactctcctgggacaaagatggtcatctaaccacttagctcctccaaaggtgacccttcgtgcttatcgtctgtaaagagcagcagagcttctgtacccaaacacacacatcccatcagctcctcaccacacagtttcacctccc

SEQ ID NO: 80149 - DNA, 931 bp, Homo sapiens
ccctttaagacagaaagtccgttggaaccgtcggctgctctctggtctctggagatgaggcgggaggacttggggacagctgtggggacacggcccagatgctctggtcccagcagaagtgactggcggggaccaggtgaggtgatgaggtctgttagtggggctgagggaaggggtcttccccagactgagggggtcacaagtttggggccgaggacactggggtatcccctcggaggagcgggaaagaagaagctttctcagggctgtgaggaccgcggacccttgcccacttccacagaaactgtcccaatccccgcggggaaggaacagccagggatccggttactggatgctggagggtcagctcgaggccggggagcccaaggagggcacccacccagaagacccgtgcccgggagctggggctgccatggagaagacacctgcagcagccgaggtccccagggaggacagcaatgccggggagatgccgtcattacagcagcagatcaccagcctccaccaagagctcgggagacagcagtcgctgtgggctgatattcacagaaaactccagagtcatatggatgccttgaggaagcagaaccgggagctccgagaagagctgagaggcctgcagcggcagcagtgggaagccgggaagaaacccgcagcgtccccacacgcggggcgagaatcacacactctggtaccaaaggcgcatttgtgtttttgtatcatttgcgtcgtgtaaatatagcgtccccgtaaagatgtgggctttgttgctgggtgacgtggtatctctcacgttccaggtggtgggagggcttgctatctttccatcagctccatttcccacaagtaaagattaaagaactggatacatcaggcatctcacctgacactccagcagacagaagcacag

SEQ ID NO: 80150 - DNA, 430 bp, Homo sapiens
tactttttgctatttgctaattgtgttcctctccattcataataataacaacaaaataaaatgataatgataatagctagtttttatatgttgggcattgttctaaacactttacatatgttagctcttatttaatcctcataaaaaccctgttagatagtactattattatggtcattttacaggtgagaaactgagttatagagaagtttagtgattttcaaagaacacaagaaggttagcagtggagccagaatctgaacctgagctctctgtctccaaagtccttgctcttttttttttttttcctttttgcaaaactccatgacttttaattttcacttttgaactaatcagaatgttattggcaaaatggccatattatgtgtatgcataatatttctttttaaaagatttcttctaaaaaaaa

SEQ ID NO: 80151 - DNA, 326 bp, Homo sapiens
ccaccttcagctctggttggacagaagccaccccgtccaggctcccaccttgtaggagagccgaggggtctggtagggagcggaggccgaggtctcggccaccgggagaatgacgagcccactggagaaggaccctgagcccaatggggcactgagccctgggcctggggataccaatagctggggctttgggagggatccagcccccagtcctcgagactcactggccccggaagacttagagatgtttgtgctggactttgaggatggtgacctgtgggagtccatcaggggccagctgggccccatggcagggccaccaactt

SEQ ID NO: 80152 - DNA, 555 bp, Homo sapiens
gaacccactagcagaatcagaggaatggccatctttgaaaatcacagtagaaaataagagcaaacaaaactaagtctgcagagcaaatgacaaaactgaaaagaaacagcatgcacacatgaaaagaaaggcataaaaacatggcagcagtgagactaaccatgataagtttagttattaaatgtagattccctattaatagaaaaagcctcccagattgtgttaaaaattaaaatccaatactttactgcttataaaaaaatacttctaaataaaataagacaaaaagactacaaagaaaaggataggtaaatatgtagtaagcaagcttgtaataaattaggaaaaagcattattacattaaaatagaattcaaagcttaaaggttattttgatttaatataaacatgagatacacaaaaagataaatgtcaatagatacaacaattcacaaaattgaaaataaattagctaactatgggagtgttgcagaaccactacctcactgtatcagttttcctcttcttcctgggcacatgggtaaagtataccttc

SEQ ID NO: 80153 - DNA, 950 bp, Homo sapiens
tcctaattgtacttaagtaaggaaatagctcatttatgaatctaagaagattaaagaatatggctttagtgtgtttgtttagaatctatgccaaaatttttttccgaagcataaatctggttttttttcttttccttaaaaaaaactttaataaagccaaagaaagaaagaaaggaaagaaagaaagaaagagggctccacatgcagtttcagcactaagggatcctgacaagtaattcacctctgctttgaatgtgggatttttgcactctatgatatatacctttggagtggttttgttttctttgtggttttttttttgtttgttttttgttttttgttttttttgtgtgagacagtggatttttttatccatcattgcattattggagttttatgtgatttaatgtataaaaagtgaggctattctccaactagttgtttgggtttctgtaaagttcaatttccacagtttacctcaagaggtcttttaaaaatgaaatttcaagcatgttgcttgatattctttaacatgttctcaattaatttgcaataaagtccagcccccttcctattgcacactattgtacccttcctgcctttttcatgcactgctctccacccaccctggcttcccggctttgcctccaacgtcagagtgatttctgggcttgcttttttttttttttttttgcctggaaacttcttctctgaagaactttcaaatggctgccttcttcatgtatctcctctcggagcatcattccctgaccttcctttctagggctctgaatccaccccattgctgtctatccagtcagtctctcttttctagctggcatccatcacaagcaatctgcttatcttgtttttggtgagtttatatctgtttctaccactggattataaatacttccaggatagagatctagtttatatcactcaccatt

SEQ ID NO: 80154 - DNA, 365 bp, Homo sapiens
aaacagtgtattgtttagttctcccaacatctagcactatgcctggcaaataatgaggatttcacatacacatttttaacagctctgtatagatatagttgacagataataagctgcacaatttgatttgttttcaatgtatgtataaacccatgaatccatcacataatcaagatgttgatcctggctaacacggtgaaaccccgtctctactaaaaatacaaaaaattagccgggcctacgtagtggcgggcgcctgtagtcccagctactcgggaggctgaggcaggagaacggcgtgaacccaggaggcggagcttgcagtgagctgagatggcgccactgcactccagcctgggcgacaa

SEQ ID NO: 80155 - DNA, 265 bp, Homo sapiens
gctcgacgtgagataaacattggatgggaccatcaggaaactagacatcacagaagaagatattaataaagctatagttctatcactatagctttattaatatcttcttctgtgatgtctagtttcctgatggtcccatccaatgtttatctcacacattatagttttcatccttataagttagatttctgccttttttgtgtttttcgtgtctctactttgatcatatgcaatacagttataactgtttcattatctttctctg

SEQ ID NO: 80156 - DNA, 170 bp, Homo sapiens
aaaaaaagaaaaaaaagaaaaagaaaagatgcatccttcctatgacaaattgtgcaagaaggtaacaagcactgttcaaactgctcttcattaacgtttcatgaagaaaacactttaattttttggattacagtgtactaaaatattttactgttcttttcgttttccta

SEQ ID NO: 80157 - DNA, 437 bp, Homo sapiens
atgggaaacctggtatctcttaaaagttggtccttattctgtagttacttttaaaaagtatattaagaatattcaataaaaatgtgttatgctgaaacaaaaagacacatgaaactgcttgaaaacttcattgatatggttaggctttatgtctccacccacatctcatcttgaattataattcgcaggtgttgagggaaagacctggtgggaggtgattggatcatgggggcagtttcccccatgctgttctcatgatagtgagttctcacgagatctgatggttttataagcatctggtatttcccttgcttgcacttctctctcttgctgccatgtaaagaaggtccttgcttcccctttgccttccatcatgactaagtttcctgaggcctccccagccatgcagaactgtgagtgaattaaacctcttttct

SEQ ID NO: 80158 - DNA, 429 bp, Homo sapiens
ctctaagtcattttgacctgagccattttactccagcaagaggtataattaaacaggattcagtggacatggaatcaatgtctctgcatgctttccagaggacagcacacttaaaataggctcttagaaattgtctgcctctttaaaggatatgaggcccctagaaattgtctgcctctttaaaggacagggtaggagttgtttccctcaccttacatttgtggattaaaatgttttaaataaaagaatgaaattgactaatgaaatgaaatgtctaaagactattatgtgccttagaggttggtaccatgtaaaaatataaaaagaatgttcttttgagtaataattattatgtggacatagtaacattgggaagcaaggttaataactgaccggttgaagagtttgtgtcaatctgatttagactgc

SEQ ID NO: 80159 - DNA, 404 bp, Homo sapiens
gtgacaaatgttaagaaattgtgtgtcaagcaaaatactttagaggccaatgggccacatgtttttgatatcaagagattacacacaaaatttgttttctagcttcttttgaaaaatcagaattgggaagatgtattcatgagtgactgctgccccctttggttgggactcgttccttcaggttcattacatggtcatcaataaccatttccttggtccctgcttttgtcttgtctggactctaagcatttgaatttttagtattataagaaaacttaatactttactatcagtcaccacatacatgtgtttctatctgtactacgacttattaaaagccttttatcaatagcctccattttggagggggggatttcaactggtgcctagactagcaaggattt

SEQ ID NO: 80160 - DNA, 511 bp, Homo sapiens
acagaaagcacttaactggtttcccatatatgggtgggctgagaggagcgtgaaagagggattacaaagaggtatgaggaaactctggggataatggatatgttcttgactgtggtggtggtttcatgggtatatacatgtcaaagtttatcatgttatacactttaaatatacgcagtttactgtatttcaattatacctacaaaatatcttttaaaaagacaacaaagtaatattaccttttcctttcaggtctaaaacaaacactatattccctttccttttttttttttttttttaaattggcaagcaaaaaccgcatatatttatggtgtataacatgatgttttcatatatgtctgcagtgtagaatggcaaaatcaacctacttaatgtatgcattacctcacaatacttatcattttttgtaatgagactaattaaaatcttctcttggaaatgttcacgtataggctgggggcgatggctcatgcctgtaatcccagcactt

SEQ ID NO: 80161 - DNA, 372 bp, Homo sapiens
agcactgaagcataataaatatgattcaagaggtataaaataaacaacactattatatgtgtaactgtaggtatgatctgtcccgctcatttacaaagattccatactatgtcctagtgactcttatctaggtggaatgtcattatatttgatttctcctatgataagttcactttcagaaaaacatgtcttgagcaatcactttatagcataagctctttccctattgccgggaggtaatagtgagcatcactaagggtagttggatataatgggagtagtcaccgaagaactgcaaaggctgaaattagggaaaggaaatattaagactgtttattcccatggggaaaactctccaactctttgaaaaaa

SEQ ID NO: 80162 - DNA, 321 bp, Homo sapiens
atagaaagacctcaaaaacatttacaaggaaagtaaaacaattaagtaaattagggactttttctaaatattctcttctgagctaaagcatgactttaaaccattattaaccttatgtcatttttatacattagagctttcactcaaagcacatgccaagtatgtgtgctgacatgtattaattcaaattttaagtaagtttgcttacatttacacaggtgtctatttttggtcaaatgaaattcaaaattgaactagcaggttgcaaaatatatgtgtttagaggtgaggtcctatatgaagacaacggttgcttaaact

SEQ ID NO: 80163 - DNA, 252 bp, Homo sapiens
taatactaaagtcaggtcagaaaacaacaagaaaataaaatacaagccaatatccttgatgaacatagatgcaggaattctcaggaaaatactagcaaaccaaattcatcaggacattaaaaggctcattcaccatgattaagtggaatttgtccctagggtgcagacttttaaatataaataaattaataaatgtaatataccacattcacagaataaaggacaaaaaccatgtgatcatctcaatagatt

SEQ ID NO: 80164 - DNA, 275 bp, Homo sapiens
ccattctgcaaaacacatccagtaagcatctcactactgaagtatctgacaaactacctttatgggccgtctgcagcctagcacaagtggcaggctggcaatttttttttctccaaaataataacaaaaagcttctacctcttccattattgtaagctgactcacctcccaatggaacactatacagactcccctgtcctatattgtggaccaattcagtattagaaaaaaaccacttccaattttctttagagtgtttttaagaacttggtcac

SEQ ID NO: 80165 - DNA, 679 bp, Homo sapiens
ggcctgacgtagctgatcggcccggaagtgctcacacgtgtgctccctgccctgctcctggccccttggctggccgggctgtttctggccatgggtcgctcccgccggacaggcgcgcaccgagcgcactctctagcccggcagatgaaggcgaagcggcggcggccggacttggatgagattcaccgcgagctgcggcctcagggatccgcacgaccccagcccgacccaaacgccgagttcgaccccgacctgccagggggcggtctgcaccgctgtctggcctgcgcgaggtacttcatcgattccaccaacctgaagacccacttccgatccaaagaccacaagaaaaggctgaagcagctgagcgtcgagccctacagtcaggaagaggcggagagggcagcgggtatgggatcctatgtgccccccaggcggctggcagtgcccacggaagtgtccactgaggtccctgagatggatacctctacctgacatggcctgaagatgcagggcagaggaattgcccatggacagtgacgcaaggactaggctgggagggagcgtgccaaccccttttgcctctgggtttggggagcggagggcctcttcttggtgccctgccccaaataaaggaactggacaaagagaacaaaccaccaaaaactctccaagcgct

SEQ ID NO: 80166 - DNA, 631 bp, Homo sapiens
ggcctgacgtagctgatcggcccggaagtgctcacacgtgtgctccctgccctgctcctggccccttggctggccgggctgtttctggccatgggtcgctcccgccggacaggcgcgcaccgagcgcactctctagcccggcagatgaaggcgaagcggcggcggccggacttggatgagattcaccgcgagctgcggcctcagggatccgcacgaccccagcccgacccaaacgccgagttcgaccccgacctgccagggggcggtctgcaccgctgtctggcctgcgcgaggtacttcatcgattccaccaacctgaagacccacttccgatccaaagaccacaagaaaagggcagcgggtatgggatcctatgtgccccccaggcggctggcagtgcccacggaagtgtccactgaggtccctgagatggatacctctacctgacatggcctgaagatgcagggcagaggaattgcccatggacagtgacgcaaggactaggctgggagggagcgtgccaaccccttttgcctctgggtttggggagcggagggcctcttcttggtgccctgccccaaataaaggaactggacaaagagaacaaaccaccaaaaactctccaagcgct

SEQ ID NO: 80167 - DNA, 648 bp, Homo sapiens
ggcctgacgtagctgatcggcccggaagtgctcacacgtgtgctccctgccctgctcctggccccttggctggccgggctgtttctggccatgggtcgctcccgccggacaggcgcgcaccgagcgcactctctagcccggcagatgaaggcgaagcggcggcggccggacttggatgagattcaccgcgagctgcggcctcagggatccgcacgaccccagcccgacccaaacgccgagttcgaccccgacctgccagggggcggtctgcaccgctgtctggcctgcgcgaggtacttcatcgattccaccaacctgaagacccacttccgatccaaagaccacaagaaaaggctgaagcagctgagcgtcgagccctacagtcaggaagaggcggagagggcagcgggtatgggatcctatgtgccccccaggcggctggcagtgcccacggaagtgtccactgaggtccctgagatggatacctctacctgacatggcctgaagatgcagggcagaggaattgcccatggacagtgacgcaaggactaggctgggagggagcgtgccaaccccttttgcctctgggtttggggagcggagggcctcttcttggtgccctgccccaaataaaggaactggacaaag

SEQ ID NO: 80168 - DNA, 2028 bp, Homo sapiens
attaacctccagctttttaagcagtttatcgatggtcgactggcaaaactaaatgcaggaaggggtttctctgatgtatttgaagaagagatcacttcaggtggcttttgtggagggaacccgaggtcatatcaacaatgggtgcatacagtcaagaaaggaggtgcactgttcaacacagcaatgaccaaagcaacccctgctgtacggacagcatataaatttgcaaaaaatcatgcaaagctgggactaaaggaagtgaagagtaaactaaaacacaaggaaaatgaagaagattatgggacctgttctagttctgtacaatatacaccagtttacaaattacacaatgaaaagggaggaaactcagaaaagcgtaagcttgctcaggcacgcttaaaaaggcctcttaagagccttgatggtgctctatatgatgatgaagatgatgatgacattgaaagagcaagcaagttatcttctgaagatggtgaagaagcttctgcttatctctatgagagtgatgactctgttgaaacaagagtgaagactccttactcaggtgaaatggacttactaggagagattcttgatacattgagcacacacagctcagatcaggggaagctggcagctgcaaagagcttggatttctttagatcaatggatgacattgattacaaacctacgaataaatctaatgctcctagtgagaataacctggctttcctctgtggtggttctggtgaccaagcagagtggaatcttgggcaagacgatagtgccctccatggcaaacacctccctccatctcctaggaagcgggtttcctctagtggtttgacagattctctgtttatcctgaaagaggaaaacagtaacaagcacctcggtgctgacaatgtgagtgaccctacttcaggactggatttccaactcacttcccctgaagtttcccagactgataaaggaaaaacagaaaagagggaaacactaagccagatttcagatgatctgcttatacccggtcttgggcggcattcatcgacttttgttccttgggagaaagaagggaaagaagccaaagagacttcagaagatattggactgctccatgaagtagtgtcattatgtcatatgacatctgacttccaacaaagcttgaacatttcagacaaaaacacaaatggaaaccaaacttaaatcttgcatccaagcttctatggagacattttgagattcaatgcaatctgtataataaacagaattatttgtaggaatggcaactcatactatttaaatttttttttgcatttgcaacatttttctcacttgttcatttcgaggatatatgaaatgcattgatttttaaatataaagcgaattctactgtgcttttaaatcaggtactagtttgtatgtatgtttaaagtatgtattgaccatgagatttcccagtgtttggtgcttaatgccgtttattttatttaagctaagaatgcatatgtaacccatgcacataaccagtagctactatactaatctggttgagcatgaactgatcaagatatcaaaacttatcaaaactagcctgaagctgatgaaactgttaacccactaattgccttaatcttaaagctgttttttaagcatacttaaataatgtatgaaagtatgtataaagtttgaaggataagttattagtgttctgcagagcaataatgcctttttctattcatcaaatcaaggtcaaaattcatcttttcaagattaaaaagctctcttaatggaaatatttaatttgcttatataaagcactatagccatgttttccaaaaagtataaaaatatacacttacctttcattcagtgaaatataggaagtgctgaattacaatgtgaagttaatgacttctgtttacaaatgagacactctaacgagttttcagtctctctgtatgcctttgctatttaggggtccaccccaagaaagccaaatacaacataaaccgtcctgacaaaaaaaaa

SEQ ID NO: 80169 - DNA, 1877 bp, Homo sapiens
  misc_feature (1819)..(1819): n is a, c, g, or t
gcagtctacagctacgggtgatggagtagctagggcctttcttagagcacaggctgctttgtttggatcctacagagatgcactgagatacaaacctggtgagcccatcactttctgtgaggagagttttgtaaagcaccgctcaagcgtgatgaaacagttcctggaaactgccattaacctccagctttttaagcagtttatcgatggtcgactggcaaaactaaatgcaggaaggggtttctctgatgtatttgaagaagagatcacttcaggtggcttttgtggagggaacccgaggtcatatcaacaatgggtgcatacagtcaagaaaggaggtgcactgttcaacacagcaatgaccaaagcaacccctgctgtacggacagcatataaatttgcaaaaaatcatgcaaagctgggactaaaggaagtgaagagtaaactaaaacacaaggaaaatgaagaagattatgggacctgttctagttctgtacaatatacaccagtttacaaattacacaatgaaaagggaggaaactcagaaaagcgtaagcttgctcaggcacgcttaaaaaggcctcttaagagccttgatggtgctctatatgatgatgaagatgatgatgacattgaaagagcaagcaagttatcttctgaagatggtgaagaagcttctgcttatctctatgagagtgatgactctgttgaaacaagagtgaagactccttactcaggtgaaatggacttactaggagagattcttgatacattgagcacacacagctcagatcaggggaagctggcagctgcaaagagcttggatttctttagatcaatggatgacattgattacaaacctacgaataaatctaatgctcctagtgagaataacctggctttcctctgtggtggttctggtgaccaagcagagtggaatcttgggcaagacgatagtgccctccatggcaaacacctccctccatctcctaggaagcgggtttcctctagtggtttgacagattctctgtttatcctgaaagaggaaaacagtaacaagcacctcggtgctgacaatgtgagtgaccctacttcaggactggatttccaactcacttcccctgaagtttcccagactgataaaggaaaaacagaaaagagggaaacactaagccagatttcagatgatctgcttatacccggtcttgggcggcattcatcgacttttgttccttgggagaaagaagggaaagaagccaaagagacttcagaagatattggactgctccatgaagtagtgtcattatgtcatatgacatctgacttccaacaaagcttgaacatttcagacaaaaacacaaatggaaaccaaacttaaatcttgcatccaagcttctatggagacattttgagattcaatgcaatctgtataataaacagaattatttgtaggaatggcaactcatactatttaaatttttttttgcatttgcaacatttttctcacttgttcatttcgaggatatatgaaatgcattgatttttaaatataaagcgaattctactgtgcttttaaatcaggtactagtttgtatgtatgtttaaagtatgtattgaccatgagatttcccagtgtttggtgcttaatgccgtttattttatttaagctaagaatgcatatgtaacccatgcacataaccagtagctactatactaatctggttgagcatgaactgatcaagatatcaaaacttatcaaaactagcctgaagctgatgaaactgttaacccactaattgccttaatcttaagttagganttttaaaaaaggttaaaaagttgttaaaagtttaaagaataggttttatggtttttta

SEQ ID NO: 80170 - DNA, 469 bp, Homo sapiens
gcagtctacagctacgggtgatggagtagctagggcctttcttagagcacaggctgctttgtttggatcctacagagatgcactgagatacaaacctggtgagcccatcactttctgtgaggagagttttgtaaagcaccgctcaagcgtgatgaaacagttcctggaaactgccattaacctccagctttttaagcagtttatcgatggtcgactggcaaaactaaatgcaggaaggggtttctctgatgtatttgaagaagagatcacttcaggtggcttttgtggaggtaaagacaagttacaatatgattatccattttctcaataacaattttcttggtctttgcacttgtgtctgataaaacctatttcataaacaactaatgatttcctcctaaatatgtaatgtcttaaatacatttttcatcttataaaagctatggaattagcttattttgcctgatac

SEQ ID NO: 80171 - DNA, 755 bp, Homo sapiens
gcagtctacagctacgggtgatggagtagctagggcctttcttagagcacaggctgctttgtttggatcctacagagatgcactgagatacaaacctggtgagcccatcactttctgtgaggagagttttgtaaagcaccgctcaagcgtgatgaaacagttcctggaaactgccattaacctccagctttttaagcagtttatcgatggtcgactggcaaaactaaatgcaggaaggggtttctctgatgtatttgaagaagagatcacttcaggtggcttttgtggagggaacccgaggtcatatcaacaatgggtgcatacagtcaagaaaggaggtgcactgttcaacacagcaatgaccaaagcaacccctgctgtacggacagcatataaatttgtaagtttttttgatatttaacaatcctatttatgaaattataaaacattttcctaggtgatagacatataaattctgaatattttctatttttcttttaaataaacctaaaaaaaaattaggattaatattgaccaaagcaaattcaattgttaaaattataacattgcatgcagagggtagtttcttttatataatctaaaaatggttctcatttcattccaaagctatcggcaaagttgtgcagcaaattgaaacagttattgatggggtaccattttgtaaaatgtcattatttcatttaacaacattttacattcttgctgtgtacttgcggctcaagtagaaaaaaaaa

SEQ ID NO: 80172 - DNA, 295 bp, Homo sapiens
agaaacctgtgaatactgcaaactagcctctgacttcctcctactgagtctagttcatggtatccaggactctttatgctcataactctctctgattcccattgggtgatacctgacagccaaccagccgctctgccaccagaactcatttctccctgaaaaagaagaaaatcatatttggcagagcattctctggtctgccctgtaatgtgcttaaatgtcaggcaacatcctctttttttaaaaaaaaatggtatttttctttaaatttcaccctaataagaaagctattttc

SEQ ID NO: 80173 - DNA, 492 bp, Homo sapiens
  misc_feature (477)..(477): n is a, c, g, or t
ggaaacaactggaagaaatccaaaaagaaaatggccgatatattgaattactgaaagctaatgacatatgcttatatgatgacccgacaattcactggaaaggaaatcttaaaaactcaaaggtctctgttgttattcctagtgaccaggttcaaaaaaaattattgtttattccaacgggaatcagcctggtggaaacagccagggaacagctgttcaggggataacttttaatgttagtcataatttacaaaagcagaccgccaatgtggtgccagtacagaggacttgcaatcttgtgactcctgtatctatttctggagtttacccttctgaaaacaagccatggcatcagaccacagttcctgcattggctaccaaccaggctgttcctctttgtcttcctgctgccatttctgctcagagtattctcgagcttcccacctctgaaagcgaatcaaacaggaaataaatgtnaattgcccttgaaaa

SEQ ID NO: 80174 - DNA, 633 bp, Homo sapiens
ggaaacaactggaagaaatccaaaaagaaaatggccgatatattgaattactgaaagctaatgacatatgcttatatgatgacccgacaattcactggaaaggaaatcttaaaaactcaaaggtctctgttgttattcctagtgaccaggttcaaaaaaaattattgtttattccaacgggaatcagcctggtggaaacagccagggaacagctgttcaggggataacttttaatgttagtcataatttacaaaagcagaccgccaatgtggtgccagtacagaggacttgcaatcttgtgactcctgtatctatttctggagtttacccttctgaaaacaagccatggcatcagaccacagttcctgcattggctaccaaccaggctgttcctctttgtcttcctgctgccatttctgctcagagtattctcgagcttcccacctctgaaagcgaatcaaatgtgcttggtgccactagtggctcactgattgctgtttcaattgaatctgagcctcaccaacatcattctttgcacacatgcctaaatgatcaaaattcttctgaaaataagaatggacaagagaaccccaaagtattgaagaaaatgaccccttgtgttacaaacatccc

SEQ ID NO: 80175 - DNA, 362 bp, Homo sapiens
ctggtcagtcatagagaccactttgaagtgcctttattttgaacactaggaaagaactacaggagagccacagccctctgaagtagtaatttttgtaaatttgcgaataatgatgttacatcacgtcactgggacatcaaacctgtctaatgtgcactactactcccacactactactgctaaggcaacaaccatttactaggcttattggccgtgtgccaagtgctgtgtttatttcttattttcataggatatgttatttaattaacgggtagctaagagagagggttccagagacaaactgctaaggttcacattcttgcttccattatttgctagctgcatgaacttagccaaatttc

SEQ ID NO: 80176 - DNA, 331 bp, Homo sapiens
ttttagcagctaaagtaactgaggaacaaagatgtcaaaggtctactttatgttactacttcattagtgacagtcacaactagaactaaggactatgggttactaaattgtgtcttatatggatattttaatagaaaatttggatgttattactgatgctttatacatctatgcagatgttagatttttttgatgcaattacacttgacccttgaacaaaatgggggaagggacactgtcaccaccacagctgaaaatctatgtgtaacttttgacaactccaaaatttaactactaataacctactattcactggaagcctcaccaataa

SEQ ID NO: 80177 - DNA, 1318 bp, Homo sapiens
acttcctccggcctcccgctctcacttccttctcgagcccggagccgctgccgccgcccccagctcccccgcctcggggagggcaccaggtcactgcagccagaggggtccagaagagagaggaggcactgcctccactacagcaactgcacccacgatgcagagcatcaagtgcgtggtggtgggtgatggggctgtgggcaagacgtgcctgctcatctgctacacaactaacgctttccccaaagagtacatccccaccgtgttcgacaattacagcgcgcagagcgcagttgacgggcgcacagtgaacctgaacctgtgggacactgcgggccaggaggagtatgaccgcctccgtacactctcctaccctcagaccaacgttttcgtcatctgtttctccattgccagtccgccgtcctatgagaacgtgcggcacaagtggcatccagaggtgtgccaccactgccctgatgtgcccatcctgctggtgggcaccaagaaggacctgagagcccagcctgacaccctacggcgcctcaaggagcagggccaggcgcccatcacaccgcagcagggccaggcactggccaagcagatccacgctgtgcgctacctcgaatgctcagccctgcaacaggatggtgtcaaggaagtgttcgccgaggctgtccgggctgtgctcaaccccacgccgatcaagcgtgggcggtcctgcatcctcttgtgaccctggcacttggcttggaggctgcccctgccctccccccaccagttgtgccttggtgccttgtccgcctcagctgtgccttaaggactaattctggcacccctttccagggggttccctgaatgcctttttctctgagtgcctttttctccttaaggaggcctgcagagaaaggggctttgggctctgcccccctctgcttgggaacactgggtattctcatgagctcatccaagccaaggttggacccctccccaagaggccaacccagtgccccctcccattttccgctactgaccagttcatccagctttccacacagttgttgctgcctattgtggtgccgcctcaggttaggggctctcagccatctctaacctctgccctcgctgctcttggaattgcgcccccaagatgctctctcccttctccaatgagggagccacagaatcctgagaaggtgaatgtgccctaacctgctcctctgtgcctaggccttacgcatttgctgactgactcagcccccatgcttctggggacctttcctacccccatcagcatcaataaaacctcctgtctccagtg

SEQ ID NO: 80178 - DNA, 1659 bp, Homo sapiens
acttcctccggcctcccgctctcacttccttctcgagcccggagccgctgccgccgcccccagctcccccgcctcggggagggcaccaggtcactgcagccagaggggtccagaagagagaggaggcactgcctccactacagcaactgcacccacgatgcagagcatcaagtgcgtggtggtgggtgatggggctgtgggcaagacgtgcctgctcatctgctacacaactaacgctttccccaaagagtacatccccaccgtgttcgacaattacagcgcgcagagcgcagttgacgggcgcacagtgaacctgaacctgtgggacactgcgggccaggaggagtatgaccgcctccgtacactctcctaccctcagaccaacgttttcgtcatctgtttctccattgccagtccgccgtcctatgagaacgtgcggcacaagtggcatccagaggtgtgccaccactgccctgatgtgcccatcctgctggtgggcaccaagaaggacctgagagcccagcctgacaccctacggcgcctcaaggagcagggccaggcgcccatcacaccgcagcagggccaggcactggccaagcagatccacgctgtgcgctacctcgaatgctcagccctgcaacaggatggtgtcaaggaagtgttcgccgaggctgtccgggctgtgctcaaccccacgccgatcaagcgtgggcggtcctgcatcctcttgtgaccctggcacttggcttggaggctgcccctgccctccccccaccagttgtgccttggtgccttgtccgcctcagctgtgccttaaggactaattctggcacccctttccagggggttccctgaatgcctttttctctgagtgcctttttctccttaaggaggcctgcagagaaaggggctttgggctctgcccccctctgcttgggaacactgggtattctcatgagctcatccaagccaaggttggacccctccccaagaggccaacccagtgccccctcccattttccgctactgaccagttcatccagctttccacacagttgttgctgcctattgtggtgccgcctcaggttaggggctctcagccatctctaacctctgccctcgctgctcttggaattgcgcccccaagatgctctctcccttctccaatgagggagccacagaatcctgagaaggtgaatgtgccctaacctgctcctctgtgcctaggccttacgcatttgctgactgactcagcccccatgcttctggggacctttcctacccccatcagcatcaataaaacctcctgtctccagtgaaaaaaaaacaaaaaaaaagcaaaggaagaggaaaagagcgcgataagcacaagcgtgaggggacagaagacaaaacaaatagcaagacagaaaaacaaagggggcgcggcctaataaacactacccggcggcgggagcgcagataaaacagcagccacccggcggtggtatcaaaagacgcagccccaaagaggagcgataataaaaacaacagcaggggcgagcgaaaaacagagtggagagagaacaaccacctgagggcttgaggaaggaacccacactgtggggggaaaaacaagggaaacccacaaacaacgaccagcgagacaacaacgggatc

SEQ ID NO: 80179 - DNA, 1619 bp, Homo sapiens
acttcctccggcctcccgctctcacttccttctcgagcccggagccgctgccgccgcccccagctcccccgcctcggggagggcaccaggtcactgcagccagaggggtccagaagagagaggaggcactgcctccactacagcaactgcacccacgatgcagagcatcaagtgcgtggtggtgggtgatggggctgtgggcaagacgtgcctgctcatctgctacacaactaacgctttccccaaagagtacatccccaccgtgttcgacaattacagcgcgcagagcgcagttgacgggcgcacagtgaacctgaacctgtgggacactgcgggccaggaggagtatgaccgcctccgtacactctcctaccctcagaccaacgttttcgtcatctgtttctccattgccagtccgccgtcctatgagaacgtgcggcacaagtggcatccagaggtgtgccaccactgccctgatgtgcccatcctgctggtgggcaccaagaaggacctgagagcccagcctgacaccctacggcgcctcaaggagcagggccaggcgcccatcacaccgcagcagggccaggcactggccaagcagatccacgctgtgcgctacctcgaatgctcagccctgcaacaggatggtgtcaaggaagtgttcgccgaggctgtccgggctgtgctcaaccccacgccgatcaagcgtgggcggtcctgcatcctcttgtgaccctggcacttggcttggaggctgcccctgccctccccccaccagttgtgccttggtgccttgtccgcctcagctgtgccttaaggactaattctggcacccctttccagggggttccctgaatgcctttttctctgagtgcctttttctccttaaggaggcctgcagagaaaggggctttgggctctgcccccctctgcttgggaacactgggtattctcatgagctcatccaagccaaggttggacccctccccaagaggccaacccagtgccccctcccattttccgctactgaccagttcatccagctttccacacagttgttgctgcctattgtggtgccgcctcaggttaggggctctcagccatctctaacctctgccctcgctgctcttggaattgcgcccccaagatgctctctcccttctccaatgagggagccacagaatcctgagaaggtgaatgtgccctaacctgctcctctgtgcctaggccttacgcatttgctgactgactcagcccccatgcttctggggacctttcctacccccatcagcatcaataaaacctcctgtctccagtgaaaaaaaaaaaaaaaaaactccagggggggccccgtacccaattctccctatttgaggtctattttcgaccctaacttggccttcctttttacaacgttctgattggtttacaactaccccttccctattagtgtgttaataaaattcaccccgtgtcagaaacctttgtcaaaagacacaaaggctttaacaggaagtacctttgataccctatcttcataccctcccttagatacaattcacatttataatttcgaccttatgtcggtttccccggtaccaagatttcttaagggaggc

SEQ ID NO: 80180 - DNA, 1295 bp, Homo sapiens
ccatcttttcttcccaataggcagaggcctccctaaccaagaatgtcccctttcatctgtccacaggtcactgcagccagaggggtccagaagagagaggaggcactgcctccactacagcaactgcacccacgatgcagagcatcaagtgcgtggtggtgggtgatggggctgtgggcaagacgtgcctgctcatctgctacacaactaacgctttccccaaagagtacatccccaccgtgttcgacaattacagcgcgcagagcgcagttgacgggcgcacagtgaacctgaacctgtgggacactgcgggccaggaggagtatgaccgcctccgtacactctcctaccctcagaccaacgttttcgtcatctgtttctccattgccagtccgccgtcctatgagaacgtgcggcacaagtggcatccagaggtgtgccaccactgccctgatgtgcccatcctgctggtgggcaccaagaaggacctgagagcccagcctgacaccctacggcgcctcaaggagcagggccaggcgcccatcacaccgcagcagggccaggcactggccaagcagatccacgctgtgcgctacctcgaatgctcagccctgcaacaggatggtgtcaaggaagtgttcgccgaggctgtccgggctgtgctcaaccccacgccgatcaagcgtgggcggtcctgcatcctcttgtgaccctggcacttggcttggaggctgcccctgccctccccccaccagttgtgccttggtgccttgtccgcctcagctgtgccttaaggactaattctggcacccctttccagggggttccctgaatgcctttttctctgagtgcctttttctccttaaggaggcctgcagagaaaggggctttgggctctgcccccctctgcttgggaacactgggtattctcatgagctcatccaagccaaggttggacccctccccaagaggccaacccagtgccccctcccattttccgctactgaccagttcatccagctttccacacagttgttgctgcctattgtggtgccgcctcaggttaggggctctcagccatctctaacctctgccctcgctgctcttggaattgcgcccccaagatgctctctcccttctccaatgagggagccacagaatcctgagaaggtgaatgtgccctaacctgctcctctgtgcctaggccttacgcatttgctgactgactcagcccccatgcttctggggacctttcctacccccatcagcatcaataaaacctcctgtctccagtg

SEQ ID NO: 80181 - DNA, 914 bp, Homo sapiens
  misc_feature (91)..(91): n is a, c, g, or t
agagagagagagagagagagagagagagagagagagaggttcgccgaggctgttgcagggctgagcattcgaggtagcgcacacgtggatntgcttggccagtgcctggccctgcaacaggatggtgtcaaggaagtgttcgccgaggctgtccgggctgtgctcaaccccacgccgatcaagcgtgggcggtcctgcatcctcttgtgaccctggcacttggcttggaggctgcccctgccctccccccaccagttgtgccttggtgccttgtccgcctccccaagaggccaacccagtgccccctcccattttccgctactgaccagttcatccagctttccacacagttgttgctgcctattgtggtgccgcctcaggttaggggctctcagccatctctaacctctgccctcgctgctcttggaattgcgcccccaagatgctctctcccttctccaatgagggagccacagaatcctgagaaggtgaatgtgccctaacctgctcctctgtgcctaggccttacgcatttgctgactgactcagcccccatgcttctggggacctttcctacccccatcagcatcaataaaacctcctgtctccagtgaaaaaaaaaaaaaaaaaactccagggggggccccgtacccaattctccctatttgaggtctattttcgaccctaacttggccttcctttttacaacgttctgattggtttacaactaccccttccctattagtgtgttaataaaattcaccccgtgtcagaaacctttgtcaaaagacacaaaggctttaacaggaagtacctttgataccctatcttcataccctcccttagatacaattcacatttataatttcgaccttatgtcggtttccccggtaccaagatttcttaagggaggc

SEQ ID NO: 80182 - DNA, 395 bp, Homo sapiens
ccagccgtccagtttcgccgagatgaaacagaattctatttgggcaagagatgcgcttatgtatataagcaaagaacaacacagtcactcctggcggactgagagcccctaacctgaggcggcaccacacagttgttgctgcctattgtggtgccgcctcaggttaggggctctcagccatctctaacctctgccctcgctgctcttggaattgcgcccccaagatgctctctcccttctccaatgagggagccacagaatcctgagaaggtgaatgtgccctaacctgctcctctgtgcctaggccttacgcatttgctgactgactcagcccccatgcttctggggacctttcctacccccatcagcatcaataaaacctcctgtctccagtg

SEQ ID NO: 80183 - DNA, 1611 bp, Homo sapiens
acttcctccggcctcccgctctcacttccttctcgagcccggagccgctgccgccgcccccagctcccccgcctcggggagggcaccaggtcactgcagccagaggggtccagaagagagaggaggcactgcctccactacagcaactgcacccacgatgcagagcatcaagtgcgtggtggtgggtgatggggctgtgggcaagacgtgcctgctcatctgctacacaactaacgctttccccaaagagtacatccccaccgtgttcgacaattacagcgcgcagagcgcagttgacgggcgcacagtgaacctgaacctgtgggacactgcgggccaggaggagtatgaccgcctccgtacactctcctaccctcagaccaacgttttcgtcatctgtttctccattgccagtccgccgtcctatgagaacgtgcggcacaagtggcatccagaggtgtgccaccactgccctgatgtgcccatcctgctggtgggcaccaagaaggacctgagagcccagcctgacaccctacggcgcctcaaggagcagggccaggcgcccatcacaccgcagcagggccaggcactggccaagcagatccacgctgtgcgctacctcgaatgctcagccctgcaacaggatggtgtcaaggaagtgttcgccgaggctgtccgggctgtgctcaaccccacgccgatcaagcgtgggcggtcctgcatcctcttgtgaccctggcacttggcttggaggctgcccctgccctccccccaccagttgtgccttggtgccttgtccgcctcagctgtgccttaaggactaattctggcacccctttccagggggttccctgaatgcctttttctctgagtgcctttttctccttaaggaggcctgcagagaaaggggctttgggctctgcccccctctgcttgggaacactgggtattctcatgagctcatccaagccaaggttggacccctccccaagaggccaacccagtgccccctcccattttccgctactgaccagttcatccagctttccacacagttgttgctgcctattgtggtgccgcctcaggttaggggctctcagccatctctaacctctgccctcgctgctcttggaattgcgcccccaagatgctctctcccttctccaatgagggagccacagaatcctgagaaggtgaatgtgccctaacctgctcctctgtgcctaggccttacgcatttgctgactgactcagcccccatgcttctggggacctttcctacccccatcagcatcaataaaacctcctgtctccagtgaaaaaaaaaaaaaaaaaacaaacaacaaaaacacaaccaccaaaaaacaaaacaccaaaaacacccccccccccccacaccccaaaacaccccccaacccacacacaaaaaaaaaaccttcggggggggcccggaccccaattgccttaagggggcggcgttacccttcaggggccgcgttttaaaacgcgtgcttgggaaaaccctgtgggtcaccccattttatgcccttggagacaataccccttttcccgcgtgggaattcccagagggcccctacccgtcgccttttc

SEQ ID NO: 80184 - DNA, 613 bp, Homo sapiens
  misc_feature (91)..(91): n is a, c, g, or t
agagagagagagagagagagagagagagagagagagaggttcgccgaggctgttgcagggctgagcattcgaggtagcgcacacgtggatntgcttggccagtgcctggccctgcaacaggatggtgtcaaggaagtgttcgccgaggctgtccgggctgtgctcaaccccacgccgatcaagcgtgggcggtcctgcatcctcttgtgaccctggcacttggcttggaggctgcccctgccctccccccaccagttgtgccttggtgccttgtccgcctccccaagaggccaacccagtgccccctcccattttccgctactgaccagttcatccagctttccacacagttgttgctgcctattgtggtgccgcctcaggttaggggctctcagccatctctaacctctgccctcgctgctcttggaattgcgcccccaagatgctctctcccttctccaatgagggagccacagaatcctgagaaggtgaatgtgccctaacctgctcctctgtgcctaggccttacgcatttgctgactgactcagcccccatgcttctggggacctttcctacccccatcagcatcaataaaacctcctgtctccagtg

SEQ ID NO: 80185 - DNA, 863 bp, Homo sapiens
gcttcgcagcgtcggcgtctgtgcgtgggccaaacatcagggcctcgaccagggatacaagggcaaccgctaactagattcctgattcctgatggctggcggcggctgacaccaaaggtaaaaggccttttagggaaagaaaccatttgtgaaaagctcttgggctaaactcgctctgcaaactgggggcgcacgctcgtggccaaactctggcagtgggactatcccggagcacccgatccctggaatcatgttctggaaaccaccgcgacgtgcgcagttctcgggcgtggccctggtatcatcccactgaatcctaggaacgcggtgcggtaggtatcactgtccgcatttcacagaccgaagtccagaatggggaagcgacttgtcttaggcttcctggccacactggggaccgtggtcatggtagcgtccttggacacctgtctccaaggctctgcagaagggggaggtgccgggccctgacggctgatgtccaaggaccagccgggatggaccagccccaggaggccccagtggaggaaaacaggacgaggttttcagtaagatgatcttatactaattcaagggctataatttgttctccacatcgtgtgcctccaactttttcggggaaagggtgttaaaattccgttacagtgtttttacttgtcaaattagaagcagcaaccggctgggtgcagtgagtcaagcttggaatcccagcactttgggaggccaaggtgggcggattgcttgagctcaggagttggagatcgtggcatcgataacatggcagaacctcatctttgcaaaaaatacaaaaattagccaggcgtggtggcgcacgcctgtggtaccca

SEQ ID NO: 80186 - DNA, 1716 bp, Homo sapiens
gaacctttcttttccggattgggcatcccggcatctgcacgtggttatgctgccggagtttgggccgccactgtaggaaaagtaacttcagctgcagccccaaagcgagtgagccgagccggagccatggagggccagagcgtggaggagctgctcgcaaaggcagagcaggacgaggcagagaagttgcaacgcatcacggtgcacaaggagctggagctgcagtttgacctgggcaacctgctggcgtcggaccggaaccccccgaccgggctgcggtgcgccggacccacgccggaggccgagctacaggccctggcgcgggacaacacgcaactgctcatcaaccagctgtggcagctgcccacggagcgcgtggaagaggcgatagtggcgcggctgccggagcccaccacacgcctgccgcgagagaagcctctgccccgaccgcggccacttacacgctggcagcagttcgcgcgcctcaagggcatccgtcccaagaagaagaccaacctggtgtgggacgaggtgagtggccagtggcggcggcgctggggctaccagcgcgcccgggacgacaccaaagaatggctgattgaggtgcccggcaatgccgaccccttggaggaccagttcgccaagcggattcaggccaagaaggaaagggtggccaagaacgagctgaaccggctgcgtaacctggcccgcgcgcacaagatgcagctgcccagcgcggccggcttgcaccctaccggacaccagagtaaggaggagctgggccgcgccatgcaagtggccaaggtctccaccgcctctgtggggcgctttcaggagcgcctccccaaggagaaggtgccccggggctccggcaagaaaaggaagtttcaaccccttttcggggactttgcagccgagaaaaagaaccagttggagctgcttcgtgtcatgaacagcaagaagcctcagctggatgtgactagggccaccaataagcagatgagggaggaggaccaggaggaggccgccaagaggaggaaaatgagccagaagggcaagagaaagggaggccggcaggggcctgggggcaagaggaaagggggcccgcccagccagggagggaagaggaaagggggcttgggaggcaagatgaattctgggccgcctggcttgggtggcaagagaaaaggaggacagcgcccaggaggaaagaggaggaagtaatagtttctaactgtcggacccgtctgtaaaccaaggactatgaatactaaatgttaagttctaggcaattatacggggactcagaaggacctggccgctgccttcattgagtttaaagggacaggattgcccttccgtcaagaaagtatgtaagtgttggactgcacaaattaatgtttttcccacaaccgagactttggagattaagaacttatttgaggatttaagaattagggaaataatttggtggaaaccgggaatgagttctattcttaaacagcctttttttttctttttaatgttggatatacggcgaggtagagttggccatatttcagagacttagattgacgtatatgtttctgcattatttttacaacaagtttgtgtatcagagcgggagtgcgggggagggaaagaaaacaaacagtttcagaattgaataggcaagtgactgttttaaagattaagtaataaagatgtcttatctag

SEQ ID NO: 80187 - DNA, 1855 bp, Homo sapiens
gaacctttcttttccggattgggcatcccggcatctgcacgtggttatgctgccggagtttgggccgccactgtaggaaaagtaacttcagctgcagccccaaagcgagtgagccgagccggagccatggagggccagagcgtggaggagctgctcgcaaaggcagagcaggacgaggcagagaagttgcaacgcatcacggtgcacaaggagctggagctgcagtttgacctgggcaacctgctggcgtcggaccggaaccccccgaccgggctgcggtgcgccggacccacgccggaggccgagctacaggccctggcgcgggacaacacgcaactgctcatcaaccagctgtggcagctgcccacggagcgcgtggaagaggcgatagtggcgcggctgccggagcccaccacacgcctgccgcgagagaagcctctgccccgaccgcggccacttacacgctggcagcagttcgcgcgcctcaagggcatccgtcccaagaagaagaccaacctggtgtgggacgaggtgagtggccagtggcggcggcgctggggctaccagcgcgcccgggacgacaccaaagaatggctgattgaggtgcccggcaatgccgaccccttggaggaccagttcgccaagcggattcaggccaagaaggaaagggtggccaagaacgagctgaaccggctgcgtaacctggcccgcgcgcacaagatgcagctgcccagcgcggccggcttgcaccctaccggacaccagagtaaggaggagctgggccgcgccatgcaagtggccaaggtctccaccgcctctgtggggcgctttcaggagcgcctccccaaggagaaggtgccccggggctccggcaagaaaaggaagtttcaaccccttttcggggactttgcagccgagaaaaagaaccagttggagctgcttcgtgtcatgaacagcaagaagcctcagctggatgtgactagggccaccaataagcagatgagggaggaggaccaggaggaggccgccaagaggaggaaaatgagccagaagggcaagagaaagggaggccggcaggggcctgggggcaagaggaaagggggcccgcccagccagggagggaagaggaaagggggcttgggaggcaagatgaattctgggccgcctggcttgggtggcaagagaaaaggaggacagcgcccaggaggaaagaggaggaagtaatagtttctaactgtcggacccgtctgtaaaccaaggactatgaatactaaatgttaagttctaggcaattatacggggactcagaaggacctggccgctgccttcattgagtttaaagggacaggattgcccttccgtcaagaaagtatgtaagtgttggactgcacaaattaatgtttttcccacaaccgagactttggagattaagaacttatttgaggatttaagaattagggaaataatttggtggaaaccgggaatgagttctattcttaaacagcctttttttttctttttaatgttggatatacggcgaggtagagttggccatatttcagagacttagattgacgtatatgtttctgcattatttttacaacaagtttgtgtatcagagcgggagtgcgggggagggaaagaaaacaaacagtttcagaattgaataggcaagtgactgttttaaagattaagtaataaagatgtcttatctagaaaaaagaaaagaacgcaacataagaaaccaagaagaaagagagaagcgaaaagagggggaggcgcagacaggagaataaccgcggaagaggcaccacaaaagggaggacaagagaattgggtgaacgggggcgcccag

SEQ ID NO: 80188 - DNA, 546 bp, Homo sapiens
atctaacacaactctttacaaacaatgatgacaacttttttatattttaattgtgtctgcatctatcagagctctgaatccaacttaagtctccttttcttgactcattattacacaatttattgttttgttctaaagagttgcagataacactttgtttggaccataagatactaatatataaaaggaggaacatttatacatagctgttcaaattgcatgtctagatttgatatcctgagaaaaatgtacaactttaattaaaaatgtgtgaaatttcacattcaaagaaatcattaagagacgtgatagctaagtgcaatactccatcataggctggatactttcagagtgactaactgttatgttttatcttggactgataggtttccagggacacgggactttcagtgctaaaacatggacagtcaatcagactgctcatactggttctggaacacacacacacacacacgcacacacacacactcacaggagaaagaggaagggagagagaaaatgaataaattataaagcaaacagggc

SEQ ID NO: 80189 - DNA, 283 bp, Homo sapiens
cttgtttacaaaatacagcttgatttctctaatttttaccctttgattctagtccactcttggaatccaatcaaaataaaacaaatctaccttttgcataatagccctgcaaatatttgaagttagctcttgggttttccctaagtcttttgtaggctaaacattagttttggtaattaatataaaaaattagctttaatttcttctaggattaattaccttttttataagtattatactatttcgttaaatttttggatagtactttatcttacctaatcag

SEQ ID NO: 80190 - DNA, 588 bp, Homo sapiens
aaaataaaaagtcttaaaaataaatgttttctttgttttaaatctgggtcttcatgtatggagtatgcttataaagcaacaaattgggtaggacctgtacctttggaatcctgacatacatacatcacttaataaatcacactaccccagaaagaagcaggttattttggcctggctataattgaaaccaagatgaagagacttctgactttcagattaccccttagtttcccaatatacatttgactcagatgacctaaaaaataatcagttttcattgtctttagtagtgtgcaacaaaaaatgttattgctcgaaagaagtacgcacagtgcccaaatcatggttgacatagtaatttccttgaacatcctaaataagatctcatttgttaatgacttatcttttccaccctccttactttttatcttttctagcgacatattagtatatattctaaaaagcatttgtgtgtattgagaaaattcagttacaaaaaaaggtgactatttccgcttctgtatttgaaactgtggtggtgggctatggggaaagagagaataagaaggtggatttttatacatgttt

SEQ ID NO: 80191 - DNA, 148 bp, Homo sapiens
ggttggccagtcaggtcagaaccagggggattagggagactcaactatcgtccttcaccccagccaatacccatgagctcatccagtatttactcaccactcactatatccttgatctcacggggctgatgaagggagaggaagagtc

SEQ ID NO: 80192 - DNA, 571 bp, Homo sapiens
ggcttctgatgaaaagtctgttgccagacaaatcagagctcctttacatgttatcatgttattgtcttcttttctcttgttgcttttaggatcctttctttgttcttttttttttttttttttttttgagatggagtctcgatctcggctcactgcaacctccacctcctgggttgaagcagttcttctgcctcagcctcccgagtagctgagactacaggtatgtgccatcatgcccagctaactttttttttgtatttttagttaaagatggggtttcaccatgttggtcaggttggtcctgaactcctgacctcatgatccacccaccttggcctcccaaagtgctgggatcacaggtgtgagccaccgcgcctggccatttctttgttcttgacccttgagagtgcgattattatatgctttggggtggtcttatttggatctgaatctatttggtgatatttgaacttcctgtacctgtatatttatttctttctctaggtttagaaagttttctgctattatttcttggaataactttctacaccttgctatttctcaactccct

SEQ ID NO: 80193 - DNA, 721 bp, Homo sapiens
aggatgagactggctgagtcttctggtcttcatctttctcccatgctggatgcttcctgcccttgaacattggactgcaagttctttagcttttggacgtttggacttacaccagtggtttgccaggggctctcagaccttctgccacagactgaaggctgcactttcagcttccctacttttgaggttttggaactcggactggctttcttgctccgcagcttgcaggtggcctgttatgggactttaccttgtggatcataatcaagaaaaacttttttttaagctacttgtagcttttcacaattgagtaaggtatactcctgtaaacaaaatttggagcacattcgtctctctctacctgatttctccagaatttgaaaactagttgacaactttgtgccctgtcttccagtttaacatggagctttcagtctgtaatgcagaggatcctctagggtataactccacaaggcagaagacaagtttactgtggacaaaaaaatgggctagaatgtcttcagcttctcaggcccttaatagggctgatgatggatgactctactggagaaaaggaagacaaagaggtttcagatcatcaataaagcagctgactctcaagaaatggctggaaatcatatttaaagtcgatcttaaatgaatttgaaaaaaatgcacataaagatcgttacctgcctcgtttggacatatcagacctatg

SEQ ID NO: 80194 - DNA, 413 bp, Homo sapiens
agatgccaactggattatccaaaaatgggaaaaattacctcccagtgcctcctctgaagcatatttcacatatatttgggagtctctggtttcgtagatcttatgccttttctatttaatgaattaggtttgtcaaactgaattgcattccaaaaaagtcacttttttagaatactttaaaaagtgaaaatgaagattgaaaatgaatgaggataactatgttaaattgcttgcagcctatgttaaataggcttaattgaatgaatctcaggtcttttcttgccaggccagggacttcatggaaataagctcctagtacctagagactcacctaacaaatcatccagtccatgctctcccaggacagagtgactcccctgcccatttgcaccctgtccttgtacaggtttgct

SEQ ID NO: 80195 - DNA, 799 bp, Homo sapiens
accatcagtggggccctcaaccagttcccccaatcctgcagcaacatgccagccaagccagggcatctggggcaccctcagcagacagaagtggcacctgaccccaccacgatgggcaatcgccacagggaacttggggtccccgattcagccctggctggagtgccaccacctcacccagtccagagctacccacagcagagccatcacctggcagcctccatgagccaggagggctaccaccaggtccccagccttctgcctgcccgccagcctggcttcatggagccccaaacaggcccgatgggggtggctacagcagctttggcctagtgcagccccggcctcccctcgagcccagccccactggccgccaccgtggggtacgtgctgtgagcagagctggcctacgccggcacaggccatgccatggctgccatgccgtccagtcaggaaacagcagaggctgtgccaagggagcgatgggcaacatggggtcggtgcctccccagccgcctccgcaggacgcaggtggggccccggaccacagcatgctctactactacggccagatccacatgtacgaacaggatggaggcctggagaacctcgggagctgccaggtcatgcggtcccagccaccacagccacaggcctgtcaggacagcatccagccccagcccttgccctcaccaggggtcaaccaggtgtccagcactgtggactcccagctcctggaggccccccagattgacttcgatgccatcatggatgatggcgatcactcgagtttgttctc

SEQ ID NO: 80196 - DNA, 611 bp, Homo sapiens
ggagctgggtgatggatacctgagggtggagatggctctcctttaagagctcccttcttatataaattaaaaaaaaaaaaattaaacccactctcaggacgagagagccgaggacaagggggatccgtttggacgtgaccgtcatcgtccagctggtcacctttctcctctcatgtgcctttgttcttcgggtccaagctagagagagtgtagagaatgaccacctgggttctgataaactctatttagactttcctatccacacacacgtagaaaacttcagattggggcattacgtgggttgagccagaacccagatccaaaagcgctcacccgggactgggacgggtcctgactccatccttgctgctgctgccgctgctgctgcccctcctccctctcctccaccaccacctcctcctcctgctccacttccttttttttgttgttttgttttgcttttaatttgttgctgttgttgttttaaatgtaacatggacttccccgccccctcatttttcccccatccaaatggcatagctccttttaggaacactgctggggtcgattgcgtgtccaacttccaaaataaaagatttttctaaactctt

SEQ ID NO: 80197 - DNA, 268 bp, Homo sapiens
aataccttttcaaattgccagtcaagagtgaagtatgccaagaaaaaaggagaggctcctcaataaccctcaagacataatgtcattttctctcctgtggatgaagactctctatctgctgaatatttattagtctgctgggtcacctgctagaaaacagacaattctccagcaacttcaaacactcttcttcactgaactacagtttggtatgagacgtcaaaggataagaatgtgcatacctaaatggtcaaatgaagatgaatgt

SEQ ID NO: 80198 - DNA, 231 bp, Homo sapiens
taacaaggaggaagagttatttgttggctagagggagagacttataaaattgccccccagttcatgttaagagagcttagtctggagtcatataagcctttttgttaatctcagtttcatcattccctaatctactggccttgggttagcggccttggattatctgatctttttgtacctcagtttctttctccacaaaatgaggagagcagtcgaccttccctgtagaat

SEQ ID NO: 80199 - DNA, 436 bp, Homo sapiens
ccaagatgacaaagaaaagaaggaacaacggtcgtgccaaaaagggccgccaccacgcgcagcctattcgccgcactaactgtgcccgatgtgtgcccaagggcaaggccattaagaaattcgtcattcgaaacatagtggaggccgcagcagtcagggacatttctgaagctagcgtcttcgatgcctgtgtgcttcccaagctgtatgtgaagctacattactgcgtgagttgtgcagttcacagcaaaatagtcaggaatcgatctcgtgaagcccgcaaggaccgaacacccccaccccgatttagacctgcgggtgctgccccacgtcccccatcaaagcccatgtaaggagctgagttcttaaagactgaagacagactattctctggagaaaaataaaatggaaattgtacttaaaaaaaaaaaaaaga

SEQ ID NO: 80200 - DNA, 420 bp, Homo sapiens
taaataaaaaacatcattaatttttcaaaaaggaaataaatttctctttgaaaatttgtagtccacacaatggatgtcttcaacacatggtttctttccaattccaccacattcctcagatattccaggcttcctgccttccccaccagcagacagattaggtatgtcagaaaagaaacccgatcaagccaatttcttccagatgatgggccaggggcacaggcctagatgctcacaagtgagttgaaggaggattgggtgatatactgcaaaccctcagtgtacaattttgtagctaccaggtcattttcttactattaaatgcttcagagttcttacatgtgtaaaccaaaaataaaattctaaggccccccaactatctgaatagactttctcctcagccagaactcttttaaaatt

SEQ ID NO: 80201 - DNA, 241 bp, Homo sapiens
atgaaatgttattcagttattaaaaaaatgaagttctaatacatgctacaacgtggataaactttgaaacattatgttaaatgagataagccatacacaaaaggataaatattatgtaatttcacttatctgaataaaaaatgtatagagatggaaagtataacagagtttactaggggctgtgctggaaaggggagaatggaaagctattatttaatgggtatagagtctctgttgggga

SEQ ID NO: 80202 - DNA, 217 bp, Homo sapiens
tacaggccccacctgcccacttatttatgtaagacactcagaatggtaatgcatagcatacagcaggcactcaataagtgccagctattgttactgacactcagagctcactggctctctccagcatactgagtgtccccaccaccaactgaatcccaaggggagggctcacccccgctggctagtccctctatggtcctagggtgcccttctgggg

SEQ ID NO: 80203 - DNA, 398 bp, Homo sapiens
ctatgctatcctaaaatggtagccatctttttgtttatttttaattaaattccatccagataagggatcctcatcttctttcatatgggcttttcggactgccactgatccatgtaccagataaacaaaacaccttccaaattcaatccatttgggatagctactttcaaaagcagtgttttaagaatcagataactcctaatatcttttggtagggaaagggaaattcctatttattttagtggctggaattacctctgaggcctgagagaaaagttaccccccaaagaaggagaatgtaatctaattcttcctgagtgcttgcactagggaaagtaagcagctgtctgttgtcatttgaagggctctgtgacagctccctaccctttaaaataagc

SEQ ID NO: 80204 - DNA, 435 bp, Homo sapiens
ggtacagatttgggaaaggaaaccaggaattctgttttggatggaaatcagtaactcagtaagtttgaggtgtccacatgtggcgagctgcctcctggataccaagatatacagatctgggctttattctgcccaccaaatcctttactgaggtactctcttgccaaagcacacgtaggaacaagaaaagaggtaaaaaggaggaagattagagaccattctcgcccttaaggatgttgaaatctgagaagggaagaagggaggcttttcggcacctattgcagagcctgagctggaacagcaggtgctgccttgctcatctgacacttggaaaggtatcagcagcaaaacaagatggggacattcaaaaactggttcttagaaacaaaaacatactgccatgttgaccatctggttcctggctacagcagacaa

SEQ ID NO: 80205 - DNA, 958 bp, Homo sapiens
ggaactatggctgggcggggtggctcacacctgtaatctcagcactttgggaggccaaggtgggcggatcacctgaggtcaggagttcaagaccagcctggccaacacagtgaaaccctgcctctactaaaaatacaaaaattagccaggtgtggtggcacgctcctgtaatcccagctacttgggatgctgaagcaggagaatctcttgaacctgggaggcagaggttgcagggagttgagattgtcgagtatagtggattgagtgctgtggagccgagattgccaagtgcagtggatcgagtccactgcactccagtctgggcaatagagctaaactcagtctcaaaaaaaataataaaggaaaaagtaagtcagaggcgcaaaatcaatccttatttcctttaacctaggaataatagcatatttcactttcatagaaattgaactcttagagaaccagatccttctataccttttgttctgtaaactgctatttatttacttatttttgcctcacatattgtgcatatccttcttcattaacttaaaaagaactcctgagctcaggtgatacacacacctcagcaaatcttttaaattatacattctgtgatatttccttgactttcttatccagcactcgtattgattatttacatttggatcatgtagggtattaaacactcctttatgatggcaaatttccaaaaatacacaaaagtagagcacagaatggtatactaaacccactcagtctacacggattgggtcacctaagtaccagttaaattacgatgctttgactccacacaagtacccccaaccaagggcttcagaaatatttgaaaggcacattccagcacgtcgtattttactcataccatttccctaggttcgtaatcttgacgagactcgttcaacagactgtagctactatccagaatggacgaaaaatc

SEQ ID NO: 80206 - DNA, 223 bp, Homo sapiens
gcctaccctaagacgagacatctaatgacagatcttgggagaactgtgccatcagagcctgagagcacccatagacaccaccagatcagccaggcgcggtggctcacgcctgtaatcccagcactttgggaggccgaggcgggaggatcacctgcggttgggagttcgagaccagcctgacgaacatggagaaaccttgtctctactaaaaatacaaaaaatt

SEQ ID NO: 80207 - DNA, 590 bp, Homo sapiens
  misc_feature (447)..(447): n is a, c, g, or t
  misc_feature (493)..(493): n is a, c, g, or t
  misc_feature (500)..(500): n is a, c, g, or t
tggttcagaagcaaccaccaggcatctctgcacaaatttgccagctaagatcagtataggccctcctccaacttatctgcaatgcactgggagaatatatcttcatatctatttagaaacatgcatataagttattttaatactatttatacaattttagcattttcctagagtaggttttccactttcatcacccacagctacaaaattattcagttattttctacagttttacaaatataccatattacgggctgcttaatatcttccttgtttaagactttaacagtatcagccgggcgtggtggctcacgcttgtaatcccagctctttgggaggcgggcagatcatgagctcaggagttcgagaccagcctggccagtatggtgaaaccctgtctctactaaaaatgcagaaattagttgggcgtggtggtgcgcgcctgtngtcccagctactcgggagactgaggcagaggagtcgcttgaatccnggaggcngagcttgcagtgagccgagatcatgccactgcactccagcctgggcaacagagtgagactctgtctcaaaacaagcaaacaaaaaaaaaa

SEQ ID NO: 80208 - DNA, 1436 bp, Homo sapiens
aatatcttgtattattatacaatgcagtattcaaatttgtccttgtagtgcagagatgactgataatttctaaaagattcgatccttaaaacttgtttccaagcagacttataaggaagctgatttttgagtcagaggccttaaacgtgtcatatacaagtggcatcattttaagtccaaagtgaaacacttgatttgaataagctagtttataaactaaagctgttttcttatgttacagtatttcagcacatttcattccacataaaaagaatattaagtgtccctggttgtgggagagtgtttatttttctcaaaattatctagcattttgcttacagtgctttgaatgtttgacttaaaattattattgatgttgaattgtagggtgctgatttaggtcttgattcatacacatttaaaggaggttggtaaccccctcatggtagagtgaagggagaaaagggccaagaagacaaagtaccactgataaagaagagattgtcaaatagatgcattcctagtcatgaattacccttttccaaacatttttaaagcaatgccttgtgtcaactcaacccttcttccccatttcttgtcatagaatgtagcatggccataggtgaaaaagcttatcattaaagtatgaaaccatgaattataagcattttgccatgatgcccttttatacatatgtttttaaaagtactaaccaacatataggagtttaggaatggtgaagatataatttgattaagttgtaggtaaacagaaaggatcatcttaggctcagaatttctaatatgattacatgagtctactttataaactggtataggctatgtaattagcccgtaagttacttaaaggaccaggggacctaatttttgtcagttttccagtcacattggtgccattcaggactccagctgtttacaggaaatatgtacttagcagaatagtatttttccttgaaaaaaatttgaattcagcctaaatacagaatgaatatgaatagtttgtgaaaagggttagagaacaacaatattcctatagtttctgtattaatgcagtagagacagaggttcctaacgcaaaaagaaaaccacaagtaaagaccgtcaaattagagctttagaatatgacttgaaaaagtagggatgggcaaaacagcataagaaaatattttttcttaatgcagatggacagtgttttcttgttttaaaaatgttttgcctatttgccagcattttttgaagtaatacactgctgctacctggaagatgtctaacttcattttctacaactcttatgtgattttgccattgtcattaagatgcattgattttatttatgaggtgtatgactttaaatatctaaatgctgtattaagtgacttgtttcaaaggaataaatgaagtgaaaacgtaaaaaaa

SEQ ID NO: 80209 - DNA, 1452 bp, Homo sapiens
aatatcttgtattattatacaatgcagtattcaaatttgtccttgtagtgcagagatgactgataatttctaaaagattcgatccttaaaacttgtttccaagcagacttataaggaagctgatttttgagtcagaggccttaaacgtgtcatatacaagtggcatcattttaagtccaaagtgaaacacttgatttgaataagctagtttataaactaaagctgttttcttatgttacagtatttcagcacatttcattccacataaaaagaatattaagtgtccctggttgtgggagagtgtttatttttctcaaaattatctagcattttgcttacagtgctttgaatgtttgacttaaaattattattgatgttgaattgtagggtgctgatttaggtcttgattcatacacatttaaaggaggttggtaaccccctcatggtagagtgaagggagaaaagggccaagaagacaaagtaccactgataaagaagagattgtcaaatagatgcattcctagtcatgaattacccttttccaaacatttttaaagcaatgccttgtgtcaactcaacccttcttccccatttcttgtcatagaatgtagcatggccataggtgaaaaagcttatcattaaagtatgaaaccatgaattataagcattttgccatgatgcccttttatacatatgtttttaaaagtactaaccaacatataggagtttaggaatggtgaagatataatttgattaagttgtaggtaaacagaaaggatcatcttaggctcagaatttctaatatgattacatgagtctactttataaactggtataggctatgtaattagcccgtaagttacttaaaggaccaggggacctaatttttgtcagttttccagtcacattggtgccattcaggactccagctgtttacaggaaatatgtacttagcagaatagtatttttccttgaaaaaaatttgaattcagcctaaatacagaatgaatatgaatagtttgtgaaaagggttagagaacaacaatattcctatagtttctgtattaatgcagtagagacagaggttcctaacgcaaaaagaaaaccacaagtaaagaccgtcaaattagagctttagaatatgacttgaaaaagtagggatgggcaaaacagcataagaaaatattttttcttaatgcagatggacagtgttttcttgttttaaaaatgttttgcctatttgccagcattttttgaagtaatacactgctgctacctggaagatgtctaacttcattttctacaactcttatgtgattttgccattgtcattaagatgcattgattttatttatgaggtgtatgactttaaatatctaaatgctgtattaagtgacttgtttcacttcatttattcctttgaaactcgtgccgaattcggcacgagcggca

SEQ ID NO: 80210 - DNA, 440 bp, Homo sapiens
ttgaacttgatgaagagagcattgtactttctggcatcctatcaagaactgagagcactatgggagaacagacccagctcccctcacccaatccccagaaaagctgggagtgagaacagaggtgagtggatgggttctgtgagaggccttctggctggaacactgcttcagagcatgccagcaggaagtgagaagtgcccgggctcatctcgctggggcttgggacacagctctaccgactgtctcttggctgcgtccgcaaacataaacacgtgaagtgggagcaaatgtcatggtaaaggcagatcaagacaactccatctgttgacttattattagacaacaaatgtcatgggaagaaaatgtgccccaagtaatttagccccgttgaaactcaacaggcttccgctggttggaatgagaactcttcctacctctcc

SEQ ID NO: 80211 - DNA, 3015 bp, Homo sapiens
aggcgggcaccaggcgcgggtccctccgggcaggggaggtaggcctgggcctgacgccggccacgcagcggcgggagagtgagcactcgggcggcggcgtcctggagacccgcgagagatggaagcggcggcgacgccggcggctgccggggcggcgaggcgcgaggagctagatatggatgtaatgaggcccttgataaatgagcagaattttgatgggacatcagatgaagaacatgagcaagagcttctgcctgttcagaagcattaccaacttgatgatcaagagggcatttcatttgtacaaactcttatgcaccttcttaaaggaaatattggaactggccttttaggacttccattggcaataaaaaatgcaggcatagtgcttggaccaatcagccttgtgtttataggaattatttctgttcactgtatgcacatattggtacgttgcagtcactttctatgtctgaggtttaaaaagtcaacattaggttatagtgacactgtgagctttgctatggaagtgagtccttggagttgtcttcagaagcaagcagcatgggggcggagtgtggttgacttttttctggtgataacacagctgggattctgtagtgtttatattgtcttcttagctgaaaatgtgaaacaagttcatgaaggattcctggagagtaaagtgtttatttcaaatagtaccaattcatcaaacccttgtgagagaagaagtgttgacctaaggatatatatgctttgctttcttccatttataattcttttggtcttcattcgtgaactaaagaatctatttgtactttcattccttgccaacgtttccatggctgtcagtcttgtgataatttaccagtatgttgtcaggaacatgccagatccccacaaccttccaatagtggctggttggaagaaatacccactcttttttggtactgctgtatttgcttttgaaggcataggagtggtccttccactggaaaaccaaatgaaagaatcaaagcgtttccctcaagcgttgaatattggcatggggattgttacaactttgtatgtaacattagctactttaggatatatgtgtttccatgatgaaatcaaaggcagcataactttaaatcttccccaagatgtatggttatatcaatcagtgaaaattctatattcctttggcatttttgtgacatattcaattcagttctatgttccagcagagatcattatccctgggatcacatccaaatttcatactaaatggaagcaaatctgtgaatttgggataagatccttcttggttagtattacttgtgccggagcaattcttattcctcgtttagacattgtgatttccttcgttggagctgtgagcagcagcacattggccctaatcctgccacctttggttgaaattcttacattttcgaaggaacattataatatatggatggtcctgaaaaatatttctatagcattcactggagttgttggcttcttattaggtacatatataactgttgaagaaattatttatcctactcccaaagttgtagctggcactccacagagtccttttctaaatttgaattcaacatgcttaacatctggtttgaaatagtaaaagcagaatcatgagtcttctatttttgtcccatttctgaaaattatcaagataactagtaaaatacattgctatatacataaaaatggtaacaaactctgttttctttggcacgatattaatattttggaagtaatcataactctttaccagtagtggtaaacctatgaaaaatccttgcttttaagtgttagcaatagttcaaaaaattaagttctgaaaattgaaaaaattaaaatgtaaaaaaattaaagaataaaaatacttctattattcttttatctcagtaagaaataccttaaccaagatatctctcttttatgctactcttttgccactcacttgagaacagaataggatttcaacaataagagaataaaataagaacatgtataacaaaaagctctctccagatcatccctgtgaatgccaaagtaaactttatgtacagtgtaaaaaaaaaaaaatctcagttatgtttttattagccaaattctaatgattggctcctggaagtatagaaaactcccattaacataatataagcatcagaaaattgcaaacactagaattaattttacactctaatggtagttgatcttcatagtcaagaggcactgttcaagatcatgacttagtgtttcaatgaaatttgaaaagggactttaaaacttatccagtgcaactcccttgtttttcgtcagaggaaaaggaggcctagaaaggttaagtaacttggtcgagaccactcagccttgagatcaagaaaacctaatcttctgactcccaggccaggatgttttatttctcacatcatgtccaagaaaaagaataaattatgttcagcttaattttagtgttgaatctatttgattatattttaatactttgaaaatgaatgtgtgatttttaatagtatatgtgacctgagcagaaaatcagggaactccaagaagcctacactgtggccatataaacctcagcaagagaaagaagctatgttcttttaaaacagaatagagaccgcttgctggtgaaactcctggctagtaagatgtgtgtctagctatactatttgtggcttgagcttttttaattattaccttcctttcctgagttttgtaggcaccacattcctgaatggcagaaaatagacacctcagaaaacggaggatttgtggactctttccagccctgtggcttttcttatcacagccttttatttattatgagcagaataaaagaatcagctaggtgtggtggtctgtgcttataatcccagctactctggaggataagttgggaggatcacttgagaggccaggagcttgagaccagcctgggcagcatagtgagacctcgactctataaaacataaa

SEQ ID NO: 80212 - DNA, 2941 bp, Homo sapiens
aggcgggcaccaggcgcgggtccctccgggcaggggaggtaggcctgggcctgacgccggccacgcagcggcgggagagtgagcactcgggcggcggcgtcctggagacccgcgagagatggaagcggcggcgacgccggcggctgccggggcggcgaggcgcgaggagctagatatggatgtaatgaggcccttgataaatgagcagaattttgatgggacatcagatgaagaacatgagcaagagcttctgcctgttcagaagcattaccaacttgatgatcaagagggcatttcatttgtacaaactcttatgcaccttcttaaaggaaatattggaactggccttttaggacttccattggcaataaaaaatgcaggcatagtgcttggaccaatcagccttgtgtttataggaattatttctgttcactgtatgcacatattggtacgttgcagtcactttctatgtctgaggtttaaaaagtcaacattaggttatagtgacactgtgagctttgctatggaagtgagtccttggagttgtcttcagaagcaagcagcatgggggcggagtgtggttgacttttttctggtgataacacagctgggattctgtagtgtttatattgtcttcttagctgaaaatgtgaaacaagttcatgaaggattcctggagagtaaagtgtttatttcaaatagtaccaattcatcaaacccttgtgagagaagaagtgttgacctaaggatatatatgctttgctttcttccatttataattcttttggtcttcattcgtgaactaaagaatctatttgtactttcattccttgccaacgtttccatggctgtcagtcttgtgataatttaccagtatgttgtcaggaacatgccagatccccacaaccttccaatagtggctggttggaagaaatacccactcttttttggtactgctgtatttgcttttgaaggcataggagtggtccttccactggaaaaccaaatgaaagaatcaaagcgtttccctcaagcgttgaatattggcatggggattgttacaactttgtatgtaacattagctactttaggatatatgtgtttccatgatgaaatcaaaggcagcataactttaaatcttccccaagatgtatgcagagatcattatccctgggatcacatccaaatttcatactaaatggaagcaaatctgtgaatttgggataagatccttcttggttagtattacttgtgccggagcaattcttattcctcgtttagacattgtgatttccttcgttggagctgtgagcagcagcacattggccctaatcctgccacctttggttgaaattcttacattttcgaaggaacattataatatatggatggtcctgaaaaatatttctatagcattcactggagttgttggcttcttattaggtacatatataactgttgaagaaattatttatcctactcccaaagttgtagctggcactccacagagtccttttctaaatttgaattcaacatgcttaacatctggtttgaaatagtaaaagcagaatcatgagtcttctatttttgtcccatttctgaaaattatcaagataactagtaaaatacattgctatatacataaaaatggtaacaaactctgttttctttggcacgatattaatattttggaagtaatcataactctttaccagtagtggtaaacctatgaaaaatccttgcttttaagtgttagcaatagttcaaaaaattaagttctgaaaattgaaaaaattaaaatgtaaaaaaattaaagaataaaaatacttctattattcttttatctcagtaagaaataccttaaccaagatatctctcttttatgctactcttttgccactcacttgagaacagaataggatttcaacaataagagaataaaataagaacatgtataacaaaaagctctctccagatcatccctgtgaatgccaaagtaaactttatgtacagtgtaaaaaaaaaaaaatctcagttatgtttttattagccaaattctaatgattggctcctggaagtatagaaaactcccattaacataatataagcatcagaaaattgcaaacactagaattaattttacactctaatggtagttgatcttcatagtcaagaggcactgttcaagatcatgacttagtgtttcaatgaaatttgaaaagggactttaaaacttatccagtgcaactcccttgtttttcgtcagaggaaaaggaggcctagaaaggttaagtaacttggtcgagaccactcagccttgagatcaagaaaacctaatcttctgactcccaggccaggatgttttatttctcacatcatgtccaagaaaaagaataaattatgttcagcttaattttagtgttgaatctatttgattatattttaatactttgaaaatgaatgtgtgatttttaatagtatatgtgacctgagcagaaaatcagggaactccaagaagcctacactgtggccatataaacctcagcaagagaaagaagctatgttcttttaaaacagaatagagaccgcttgctggtgaaactcctggctagtaagatgtgtgtctagctatactatttgtggcttgagcttttttaattattaccttcctttcctgagttttgtaggcaccacattcctgaatggcagaaaatagacacctcagaaaacggaggatttgtggactctttccagccctgtggcttttcttatcacagccttttatttattatgagcagaataaaagaatcagctaggtgtggtggtctgtgcttataatcccagctactctggaggataagttgggaggatcacttgagaggccaggagcttgagaccagcctgggcagcatagtgagacctcgactctataaaacataaa

SEQ ID NO: 80213 - DNA, 361 bp, Homo sapiens
taagaaaaataaatgtattttcattttctaggtgccggagcaattcttattcctcgtttagacattgtgatttccttcgttggagctgtgagcagcagcacattggccctaatcctgccacctttggttgaaattcttacattttcgaaggaacattataatatatggatggtcctgaaaaatatttctatagcattcactggagttgttggcttcttattaggtacatatataactgttgaagaaattatttatcctactcccaaagttgtagctggcactccacagagtccttttctaaatttgaattcaacatgcttaacatctggtttgaaatagtaaaagcagaatcatgagtctt

SEQ ID NO: 80214 - DNA, 774 bp, Homo sapiens
aggcgggcaccaggcgcgggtccctccgggcaggggaggtaggcctgggcctgacgccggccacgcagcggcgggagagtgagcactcgggcggcggcgtcctggagacccgcgagagatggaagcggcggcgacgccggcggctgccggggcggcgaggcgcgaggagctagatatggatgtaatgaggcccttgataaatgagcagaattttgatgggacatcagatgaagaacatgagcaagagcttctgcctgttcagaagcattaccaacttgatgatcaagagggcatttcgtaagtgttatggtttataagtctccttttcttttaattcagtatgtattttgtaatcttcttctacaggcaagacattctattacattacaagacacaaatataagacatagtctccaccttcaatgagtttatagtctatttgggaaagaaatgcgtttaaatcacagagcagtgtataggaattactggagtgatgatgcgtaacaaatgctagggatcttgaaagaagggagatctgattaagtggaacaggaatgttaagagaagtgatgtctgaaatgatcaggaggtagtacatgcttctttatactgaaacaaagtcgtggaggtagaaatgcattgtaacttttgaaaaccttttttgacattttgtcatcgttaatagatttgagtaacttctcattctaataatagtttaatggttcagcaaagtaatatgcaattgatcagaaaagaagaatataaactgaaaaa

SEQ ID NO: 80215 - DNA, 2486 bp, Homo sapiens
aggcgggcaccaggcgcgggtccctccgggcaggggaggtaggcctgggcctgacgccggccacgcagcggcgggagagtgagcactcgggcggcggcgtcctggagacccgcgagagatggaagcggcggcgacgccggcggctgccggggcggcgaggcgcgaggagctagatatggatgtaatgaggcccttgataaatgagcagaattttgatgggacatcagatgaagaacatgagcaagagcttctgcctgttcagaagcattaccaacttgatgatcaagagggcatttcatttgtacaaactcttatgcaccttcttaaaggaaatattggaactggccttttaggacttccattggcaataaaaaatgcaggcatagtgcttggaccaatcagccttgtgtttataggaattatttctgttcactgtatgcacatattggtacgttgcagtcactttctatgtctgaggtttaaaaagtcaacattaggttatagtgacactgtgagctttgctatggaagtgagtccttggagttgtcttcagaagcaagcagcatgggggcggagtgtggttgacttttttctggtgataacacagctgggattctgtagtgtttatattgtcttcttagctgaaaatgtgaaacaagttcatgaaggattcctggagagtaaagtgtttatttcaaatagtaccaattcatcaaacccttgtgagagaagaagtgttgacctaaggatatatatgctttgctttcttccatttataattcttttggtcttcattcgtgaactaaagaatctatttgtactttcattccttgccaacgtttccatggctgtcagtcttgtgataatttaccagtatgttgtcaggaacatgccagatccccacaaccttccaatagtggctggttggaagaaatacccactcttttttggtactgctgtatttgcttttgaaggcataggagtggtccttccactggaaaaccaaatgaaagaatcaaagcgtttccctcaagcgttgaatattggcatggggattgttacaactttgtatgtaacattagctactttaggatatatgtgtttccatgatgaaatcaaaggcagcataactttaaatcttccccaagatgtatggttatatcaatcagtgaaaattctatattcctttggcatttttgtgacatattcaattcagttctatgttccagcagagatcattatccctgggatcacatccaaatttcatactaaatggaagcaaatctgtgaatttgggataagatccttcttggttagtattacttgtgccggagcaattcttattcctcgtttagacattgtgatttccttcgttggagctgtgagcagcagcacattggccctaatcctgccacctttggttgaaattcttacattttcgaaggaacattataatatatggatggtcctgaaaaatatttctatagcattcactggagttgttggcttcttattaggtacatatataactgttgaagaaattatttatcctactcccaaagttgtagctggcactccacagagtccttttctaaatttgaattcaacatgcttaacatctggtttgaaatagtaaaagcagaatcatgagtcttctatttttgtcccatttctgaaaattatcaagataactagtaaaatacattgctatatacataaaaatggtaacaaactctgttttctttggcacgatattaatattttggaagtaatcataactctttaccagtagtggtaaacctatgaaaaatccttgcttttaagtgttagcaatagttcaaaaaattaagttctgaaaattgaaaaaattaaaatgtaaaaaaattaaagaataaaaatacttctattattcttttatctcagtaagaaataccttaaccaagatatctctcttttatgctactcttttgccactcacttgagaacagaataggatttcaacaataagagaataaaataagaacatgtataacaaaaagctctctccagatcatccctgtgaatgccaaagtaaactttatgtacagtgtaaaaaaaaaaaaatctcagttatgtttttattagccaaattctaatgattggctcctggaagtatagaaaactcccattaacataatataagcatcagaaaattgcaaacactagaattaattttacactctaatggtagttgatcttcatagtcaagaggcactgttcaagatcatgacttagtgtttcaatgaaatttgaaaagggactttaaaacttatccagtgcaactcccttgtttttcgtcagaggaaaaggaggcctagaaaggttaagtaacttggtcgagaccactcagccttgagatcaagaaaacctaatcttctgactcccaggccaggatgttttatttctcacatcatgtccaagaaaaagaataaattatgttcagctta

SEQ ID NO: 80216 - DNA, 2058 bp, Homo sapiens
aggcgggcaccaggcgcgggtccctccgggcaggggaggtaggcctgggcctgacgccggccacgcagcggcgggagagtgagcactcgggcggcggcgtcctggagacccgcgagagatggaagcggcggcgacgccggcggctgccggggcggcgaggcgcgaggagctagatatggatgtaatgaggcccttgataaatgagcagaattttgatgggacatcagatgaagaacatgagcaagagcttctgcctgttcagaagcattaccaacttgatgatcaagagggcatttcatttgtacaaactcttatgcaccttcttaaaggaaatattggaactggccttttaggacttccattggcaataaaaaatgcaggcatagtgcttggaccaatcagccttgtgtttataggaattatttctgttcactgtatgcacatattggtacgttgcagtcactttctatgtctgaggtttaaaaagtcaacattaggttatagtgacactgtgagctttgctatggaagtgagtccttggagttgtcttcagaagcaagcagcatgggggcggagtgtggttgacttttttctggtgataacacagctgggattctgtagtgtttatattgtcttcttagctgaaaatgtgaaacaagttcatgaaggattcctggagagtaaagtgtttatttcaaatagtaccaattcatcaaacccttgtgagagaagaagtgttgacctaaggatatatatgctttgctttcttccatttataattcttttggtcttcattcgtgaactaaagaatctatttgtactttcattccttgccaacgtttccatggctgtcagtcttgtgataatttaccagtatgttgtcaggaacatgccagatccccacaaccttccaatagtggctggttggaagaaatacccactcttttttggtactgctgtatttgcttttgaaggcataggagtggtccttccactggaaaaccaaatgaaagaatcaaagcgtttccctcaagcgttgaatattggcatggggattgttacaactttgtatgtaacattagctactttaggatatatgtgtttccatgatgaaatcaaaggcagcataactttaaatcttccccaagatgtatggttatatcaatcagtgaaaattctatattcctttggcatttttgtgacatattcaattcagttctatgttccagcagagatcattatccctgggatcacatccaaatttcatactaaatggaagcaaatctgtgaatttgggataagatccttcttggttagtattacttgtgccggagcaattcttattcctcgtttagacattgtgatttccttcgttggagctgtgagcagcagcacattggccctaatcctgccacctttggttgaaattcttacattttcgaaggaacattataatatatggatggtcctgaaaaatatttctatagcattcactggagttgttggcttcttattaggtacatatataactgttgaagaaattatttatcctactcccaaagttgtagctggcactccacagagtccttttctaaatttgaattcaacatgcttaacatctggtttgaaatagtaaaagcagaatcatgagtcttctatttttgtcccatttctgaaaattatcaagataactagtaaaatacattgctatatacataaaaatggtaacaaactctgttttctttggcacgatattaatattttggaagtaatcataactctttaccagtagtggtaaacctatgaaaaatccttgcttttaagtgttagcaatagttcaaaaaattaagttctgaaaattgaaaaaattaaaatgtaaaaaaattaaagaataaaaatacttctatttcgaaaaaaaaaaaaaaaaaaattggggcggcgggccacaaaagttttaaacattggtgggggggccaaggaaggaatggcagggcggaaacgcgggagggggttcaacaaggcgggaggggtgaacaagggggggttggaaagaggggt

SEQ ID NO: 80217 - DNA, 2299 bp, Homo sapiens
ggataaaagcaagtttaaaacaaaaattaggaggttgtatgatatagctaatgttctgagtagcctggatcttatcaagaaagttcatgttacagaggaaagaggccgaaaaccagctttcaaatggaccggcccagaaatcagtccaaataccagtggctccagcccagtcattcattttactccctctgatttggaggtgagacggtcttcaaaagagaactgtgccaaaaacctcttttccacacgtgggaaaccaaactttactcgacacccatctcttatcaaattggtaaagagtatagaaagtgatcggagaaagataaattctgcgcccagtagccctatcaagaccaacaaagctgagagttctcagaattctgcacccttcccaagtaaaatggctcagctcgcagctatttgtaaaatgcagttagaagagcaatcaagtgaatccagacagaaagtgaaagtacagctggcaagatctggaccctgcaaaccagtagcccctctggaccccccagtgaatgctgagatggagctgacagcaccgtccctcatccagcccctgggaatggttcccctgatccccagccccttgtcatcagcagtgcccctgatcctacctcaggccccttcaggcccatcctatgccatctacctgcagcccactcaagcccaccaaagtgtgacgccaccccaaggcctgagcccaacggtgtgcaccacccactcttctaaagctactggctcaaaagactccacagatgccaccactgagaaggcagccaatgatacctcaaaggccagtgcctctaccaggcctggaagcttgctgccagcaccagagaggcaaggggcaaagagccgaaccagggagccagctggagaaagaggctcaaagagggcaagcatgctcgaggacagtggttccaaaaagaaatttaaagaggacctaaaaggacttgaaaatgtctccgcaaccttgttcccatcaggatacctaatccctctcacgcagtgctcatccctgggggcagagtccattttgtctggtaaagaaaactcaagtgctctttccccaaaccacaggatttacagctccccaattgcaggtgttattccagtgacatcatctgaactcactgctgttaattttccctcttttcatgtaacaccgttgaagctaatggtctcaccaacttccgtggcagccgtacctgtcgggaacagcccggctctcgcttcaagccaccctgttcccatccagaacccaagctcagccattgtaaacttcaccctgcagcacctgggactcatctcacccaatgtgcagttgtctgccagccctgggtctggaatcgttcctgtgtctccaagaatagagtctgttaatgtcgcaccagaaaatgcaggcactcagcaaggaagggccaccaactatgactcaccagtcccaggccagagccagccaaatggacaatcagttgctgtgacaggggcacaacagcctgttcctgtgacacccaaagggtcacaattagtggccgaaagtttcttccgtaccccaggtggacccaccaagccaaccagctcatcctgcatggattttgagggtgctaataaaacctccttaggaactctctttgtcccacagcgaaaactggaagtctcaacagaggatgtccattaatcaacagatgttggcttagtttaattttctaaagagttgtttaatagagaaaatgtacacagactgatttggagaacacattctctgaaaatactgtaaatacgttggggatttgttcaatgtgaaatcagatagttgttttcatacatatatatatatatacacacacacacacacacacacacacacatatatttgtataaagctaagtttagctttcaatcctacaaaataaaagtaaaatgttgaactctaagatatattaacttctagggggaaaaatccattattttagctatgcctatactattatgcaaagtaactgtattaaagtttacttccctctaagcaagtatgcttgacatgcctaacacagcattcccttaaacattttgcacaaagaaaatgctgtgtgatgtataatgttgtatttttaaataggggtatagctatattttttgtaatttctttaatctgttgttgcagtgtatctttttgtaaagtttgcaacaatcctcaatcaagtctatggaaaaattatttataaaatgtatttttaatcataagttgttcaaattaaaacttttctaaaatataaaagca

SEQ ID NO: 80218 - DNA, 1634 bp, Homo sapiens
agagttaagttatcagtttaagagtggtgtgctggatgaatccttacccctaagcagggtcagtgccatcatccaaaggtgtcctaagaccacaggtggcatttaagaaacatgttctgtattattcggggcaagcattggaaagggtgggagggtattctcctctaggagccaggtgaccagcctgcctgcagcccactccgctggaggctttggtccaatgaggcaaccaccaagggatattagtcctgaaagaggcacgtggccatttttcttcctgtatttgtgtgtaaaataaacccttcctccttgttttctagaccttgttcccatcaggatacctaatccctctcacgcagtgctcatccctgggggcagagtccattttgtctggtaaagaaaactcaagtgctctttccccaaaccacaggatttacagctccccaattgcaggtgttattccagtgacatcatctgaactcactgctgttaattttccctcttttcatgtaacaccgttgaagctaatggtctcaccaacttccgtggcagccgtacctgtcgggaacagcccggctctcgcttcaagccaccctgttcccatccagaacccaagctcagccattgtaaacttcaccctgcagcacctgggactcatctcacccaatgtgcagttgtctgccagccctgggtctggaatcgttcctgtgtctccaagaatagagtctgttaatgtcgcaccagaaaatgcaggcactcagcaaggaagggccaccaactatgactcaccagtcccaggccagagccagccaaatggacaatcagttgctgtgacaggggcacaacagcctgttcctgtgacacccaaagggtcacaattagtggccgaaagtttcttccgtaccccaggtggacccaccaagccaaccagctcatcctgcatggattttgagggtgctaataaaacctccttaggaactctctttgtcccacagcgaaaactggaagtctcaacagaggatgtccattaatcaacagatgttggcttagtttaattttctaaagagttgtttaatagagaaaatgtacacagactgatttggagaacacattctctgaaaatactgtaaatacgttggggatttgttcaatgtgaaatcagatagttgttttcatacatatatatatatatacacacacacacacacacacacacacacatatatttgtataaagctaagtttagctttcaatcctacaaaataaaagtaaaatgttgaactctaagatatattaacttctagggggaaaaatccattattttagctatgcctatactattatgcaaagtaactgtattaaagtttacttccctctaagcaagtatgcttgacatgcctaacacagcattcccttaaacattttgcacaaagaaaatgctgtgtgatgtataatgttgtatttttaaataggggtatagctatattttttgtaatttctttaatctgttgttgcagtgtatctttttgtaaagtttgcaacaatcctcaatcaagtctatggaaaaattatttataaaatgtatttttaatcataagttgttcaaattaaaacttttctaaaatataaaagca

SEQ ID NO: 80219 - DNA, 821 bp, Homo sapiens
tgccacgacattccccagggtgcaggtgcccggtggccgagggtcagtccagtggtagagccttgctctcctaggctcatcctgctggcggtcctcctgcttctgctgtgtggtgtcacagctggttgtgtccggttctgctgcctccggaagcaggcacaggcccagccacatctgccaccagcacggcagccctgcgacgtggcagtcatccctatggacagtgacagccctgtacacagcactgtgacctcctacagctccgtgcagtacccactgggcatgcggttgcccctgccctttggggagctggacctggactccatggctcctcctgcctacagcctgtacaccccggagcctccaccctcctacgatgaagctgtcaagatggccaagcccagagaggaaggaccagcactctcccagaaacccagccctctccttggggcctcgggcctagagaccactccagtgccccaggagtcgggccccaatactcaactaccaccttgtagccctggtgccccttgaaggaggtaggagaacggaccagagcttggagaactaatgcttggagccaagggccccagcccaccccaccgtcccacacattgctgtggccccaacctcggtgccatgttacaccggcccctggcgtcacccactaggcaggctgctgctttcagcctcagcccctggcccagccccagcaggccctcagcctggaagaggccccttgggcctaagcctcgggtgggagctcagggccacctgtgacgtctgcatcttcttggagagagaataaagtttgtatttaa

SEQ ID NO: 80220 - DNA, 914 bp, Homo sapiens
gcccgggggccgctggccgcccgcggactgcggctgctgctgccgctcctgccgctcctgccgctcctgccgctgccgcaggtggcgctgggcttcgcggacggcagctgcgacccctcggaccagtgcccgccccaggcccgctggagcagcctgtggcacgtggggctcatcctgctggcggtcctcctgcttctgctgtgtggtgtcacagctggttgtgtccggttctgctgcctccggaagcaggcacaggcccagccacatctgccaccagcacggcagccctgcgacgtggcagtcatccctatggacagtgacagccctgtacacagcactgtgacctcctacagctccgtgcagtacccactgggcatgcggttgcccctgccctttggggagctggacctggactccatggctcctcctgcctacagcctgtacaccccggagcctccaccctcctacgatgaagctgtcaagatggccaagcccagagaggaaggaccagcactctcccagaaacccagccctctccttggggcctcgggcctagagaccactccagtgccccaggagtcgggccccaatactcaactaccaccttgtagccctggtgccccttgaaggaggtaggagaacggaccagagcttggagaactaatgcttggagccaagggccccagcccaccccaccgtcccacacattgctgtggccccaacctcggtgccatgttacaccggcccctggcgtcacccactaggcaggctgctgctttcagcctcagcccctggcccagccccagcaggccctcagcctggaagaggccccttgggcctaagcctcgggtgggagctcagggccacctgtgacgtctgcatcttcttggagagagaataaagtttgtatttaa

SEQ ID NO: 80221 - DNA, 529 bp, Homo sapiens
  misc_feature (345)..(345): n is a, c, g, or t
  misc_feature (370)..(370): n is a, c, g, or t
aaaaattaacttccatgaatcctactgggaatttgtttcataacaaaaatttcacaacgcactgtgctgacttccttgtgaaacgggttgtttctgagtgtgcagggaagtggcgggaggcttgggggtttgtcctggcttctgtacccctcagcgcccaaggcagggaagtggcgggaggctcggggggttgtcctggcttctgtacccctcagcgcccaaggcaggtgttgcaggaagcccgttcatgaggtgggtgtgggtggtgccagccaggtctggggacaccagcgtcagctgccccaggcctctgtgcaacccccacagtcgcacccttttgcggtnacccacattactgggcactcggganggctgttttctttcccaggagccctaaggacagatgccgcagggcttggagttgtaccccgtagcctctcagaggtccagaaaggtccaggcctcttccaatttttttgaggttcttcttctcttaaaaaataaaatggggaaattccataccagggtt

SEQ ID NO: 80222 - DNA, 4094 bp, Homo sapiens
cagagtgatgaggtcaaggggagaagctcactattaaatgtctacatttcaggagatgaagacaaagaaaaatgggcagaggagtatacattttacccggatcagagatagagacaaggcaagaaggcgcgttattagcattttaaaatttgcctctttcatttcttccttaatgtaagctggttcttttcacgacgaaacactccccccgcgctacacctctttttgcgcgaatctttctccaggaccttaaaatggtttactgagcacttcccgcgagccaagtatttggggttccagatcctgggattttgtcctgacactgcctcctcgttttaacacccttgcctccttctgcagtgccagtttccagggagctgaagcacaggaaaggcctgttctcgccactggccctgcccccatttgccggcgcccttcctcttcgcttccccgtagctcccgctttcgcctcttcgtttatgactccgttgggctccggccctcctagagaggcctccatagcgcaggttcgtgggttctcgcggacctttttccgtgtagctttctgcttcttcccggcattcctgtttccgttttctcacagccctctggcttttccaccactgagacactttgcgctcaggacttcagtgacgtcatctttctgcggcgcgcggacacccgccggtggaagaagaaacagctccgccgtccttcgcttcttttgctgggctgctgctccttcggcatcatggcgccgtcgctgtggaaggggctggtgggcatcggtctctttgccctagcccacgccgccttttccgctgcgcagcatcgttcttatatgcgattaacagaaaaagaagatgaatcactgccaatagatatagttcttcagacacttctggcctttgcagttacctgttacggtatagttcatattgcaggagagtttaaagacatggatgccacttcagaactgaaaaataagacatttgatacgttaaggaatcacccatccttttatgtatttaatcatcgtggtcgagtacttttccggccttcggatacagcaaattcttcaaaccaagatgcattgtcctctaacacatcattgaagttacgaaaactcgaatcactgcgtcgttaagatttttacaaattataataataggacaggacacagagctggaatattggagtttggggtataaaacactcctccctgcccccattagtatttatattgatctttcagacctactttagtaaaaaaaaccatggcccttgtttatatactgttaatccaatcattaatgcagtgtaagttatatgtgaaatgagtctttggtatttcatataggaattattttttttttcatttaaaacaaatccacatcttttgtaaaagccactgttttgaacacatttccttgaaaaatgttggtggtttttgtgattatttatttttttagatttcttttcttttgcactacaatttttggaatccttttggaaatactgtgtgactgctgtgttttgcagcatgaattatagtaaaatggtcttcaattcttaacaaatggacttccctgatgagaccaaaatggtgatttaacagtttttcttgtgtcccctaaaaagtggctctgcttcagaagtacttgccagtttttaatttatttgtgacttttcaccctaccctgctcccatataccttctaccatcagctgtcttgtttcatcatttctctgagattctgtgtgcagtgagcaatttttgtgtcagaaattctttgtcagaacaaatatatgtaacaggctcaacttactgtaaagctacttgtgttctcttcatttgtctgtaaaaatttccctaattgattatatagtgtaagaatagttgaagactagttgaagaccttttgtgatttcattatcatgcctatgcagaagaaaaatcattgaggaaaattgtcattagccagtttaactgattcaaactctgtttatttcatactaaactagtgaataagtgaaataaaggaaactcgtcattaatctaaagacagagttcaaaggaattgggccaaatatattctcagtatttggaactaatgtttttaaggtttttaggaaaatcaggtcatttaagaaattgttttgtagtttctggtttatagcagtcttcaagttttccatcttcactgtatgttgctgaaagtgaggatgaggatacagagttgatatttttagaaacagtaattttacttttaaggaaattggctagctctttgagctagagagctgtaggaagctcaacatttctttgtagagaacgttgctttttttggattgtacaggtataaaaacattgcttttgttgaattgtataggtgtaaaaagggaataactgtatgcaggtttgaaaaggaaatgtgctttaggcatgagtcataagatgccattgtacttgtaggcattttattttcctttagaaatggacatcagctcttctcttctgactggtaacacatagccccaaagcatgagattatttttcattgggtttttattgttgtttagttttggtttgttacgccagcccagtctgtctgcggaacactgactctgctctctaatgagaacaaagttagaaatctgccgataacctaaaataatttagaaatgaattaaaaatgtgaaatcgggttaaagtgatgatgataaaatagcatgcaagaaacaagctccttccatcagacttggctactgttttcttctggtacgatttggtttggaagagcctcttgtttccttctctttggggtatgtcttcgtttcttaatatgtttgtaacattattgagatataattcacataccttacaattcacttattttaagggtacaatttagtggtttttagtgtattcacaaagttgtgtaaccgtgaccacagtcaattttagaacatttcgttaccccaaaaagaaaccctgtacccttgagcagtcacctctcattttctcccagtgcccaccccatccccgagcccctggcaaccactaatctatttctctctctgtagatttgcttattctggtcatttcatataaatgggaattctacaatattcggtcttttgggactggcttcccaaatatgattttctatatggagtgagaaaattcttctcatcttgagaactcttattgctgtgaaagggagtggttggtaaaatcaatagatttcaggcaagagggccagatacctaacaggtttttctccgtgaatcttatgctgagtagtttttcctcataaccaagcatttatgatatattactacttataatactgtggctagtctctagaatggatgttgaaatctttgcctcctcagtcgggaagagtcctgctaaaaatcaggctaaaaatcaggccaaaaatcaggccaaatgacttggcaaataattgacaaagtggttttcacgtgtgtctatctttgctagcagcttgtatacctcaggccaggtgagctccccaaatttcttttttcatttactccagtgagtttctgctgtctttttcaagtatgtaccataggacttaaaggtgatttggatgcgttgtaacactgctaaatatgctaagtacagaattttatctacagtactgtgagacagtcaattattgcctagggtagttcaaaaatatgatgtgagctagttaagcctttgcttgactgatttcagtgatattcagaagtgtgtaccaatcaaggctctttaaaatacggaacgactcacttaataaccagggaaccagccaaatactgtgcagccgcagaatatgcatatcaatgagttggaggtgattattctctgtaactccctaatgattgttttctaagcattgtggcttctcagtggcttgacagcatcttcctggttgtatgtggcctgtttacatgatgtattgaataatgttgtttgttgtgagcatcaatgcctgtaacaccaaactaaacacgtgtttttgggatatgtttccaatctttaaatgaccttgccctgtccaataaataaatgattgtctc

SEQ ID NO: 80223 - DNA, 1080 bp, Homo sapiens
cagagtgatgaggtcaaggggagaagctcactattaaatgtctacatttcaggagatgaagacaaagaaaaatgggcagaggagtatacattttacccggatcagagatagagacaaggcaagaaggcgcgttattagcattttaaaatttgcctctttcatttcttccttaatgtaagctggttcttttcacgacgaaacactccccccgcgctacacctctttttgcgcgaatctttctccaggaccttaaaatggtttactgagcacttcccgcgagccaagtatttggggttccagatcctgggattttgtcctgacactgcctcctcgttttaacacccttgcctccttctgcagtgccagtttccagggagctgaagcacaggaaaggcctgttctcgccactggccctgcccccatttgccggcgcccttcctcttcgcttccccgtagctcccgctttcgcctcttcgtttatgactccgttgggctccggccctcctagagaggcctccatagcgcaggttcgtgggttctcgcggacctttttccgtgtagctttctgcttcttcccggcattcctgtttccgttttctcacagccctctggcttttccaccactgagacactttgcgctcaggacttcagtgacgtcatctttctgcggcgcgcggacacccgccggtggaagaagaaacagctccgccgtccttcgcttcttttgctgggctgctgctccttcggcatcatggcgccgtcgctgtggaaggggctggtgggcatcggtctctttgccctagcccacgccgccttttccgctgcgcagcatcgttcttatatgcgattagcagaagaaaggcataatcgattggaagaacggaaaaggcagcgtaaagaagaacgcaggataacatactatagagaaaaagaagaggaggagcagagaagggcagaagaacaaatgctaaaagagcgggaagagagagagcgcgccgaacgagcaaaacgcgaggaagagctacgagagtatcaggagggggtgaagaaattagaagaagtgggaagggaaaaaacgcc

SEQ ID NO: 80224 - DNA, 949 bp, Homo sapiens
tccttgcagattaattcttcctctaccccaacccagccggaagtctggtaatttccttacactttctcctctctttcaagtcccacatcttaaaagtgagctagtactgccagcttcctgaacatccttcaaacctgggccagctccatctcttctgttaccacgctgttgatgtatggtcaattcccaacagtccagccctggcagcttgcaacccagtctccaaactgtaactctggtgatccttttagaacacaagtcttacggtgccagttccttgctgataacctttttctggctttctatggcctatgtgctgaacccctagcacaatttacacagctctctgtgatctgacctagcagtctcctgtgtgcaccctaaggtccaataatacggcactgcagcatgcgccatgcctacccttgctgttcgtatcttcatgactttgcacacaccagcccccgctgcttggaaacctcctccttctctggtctgctgggctaccttctacatgtttctcagcgcaggcagcgctgcctccgcctaacccccaaggttaattgcccttctgtgtcctgtagcaccctgtccataatagcatagtagctgagaatacagactcctggatcagactgcctgggttctgacctgtttggtaaccttgatgaagtcagtgcctcaatttcctcacttgtaaaatggaggtaggaatgtctctacttcatagagttgtgaggattgaatggaatattgtatgtttaggtcttaaaccagtgctaggcacaagaatgctcaataaattaaagtgagttgcctgggtgcagtggctcatgcattaatcctagtactttgggaggcaaggcaggatgatcgcttgaggccaggggtttgcaactagcttgggcaacatagtgagaccccatcgctacaaaaatttaaaaaacta

SEQ ID NO: 80225 - DNA, 127 bp, Homo sapiens
tgacccccatgagggaggcaaggaagagagattggagggaagcacctagacttctatacagtttaaggaagtgtcacaaaagctgtcaagaactcctcaaaccaaagccatcagaaaagtctcttgt

SEQ ID NO: 80226 - DNA, 550 bp, Homo sapiens
gattcctcatggtcccacacattaggcagtattacattcagtggaaaaccaaaggtcgtggagataatgccagcaagtcctaacctatgcaagatgccttttctagacttggctatggactgataaggtgatcaccaagggaggggtgacaccaggactccacacatacctcatggatgtctaaggaataatggtttgaccatctttgcagtgttctccacttgccataggggtatttggagactaatctgccaacagtgagggctctctgctttttctgttgatgcaggtcctctgtgacattgtcacagcaacttgaaaatgagggatacgggtatgaactaactagatcctggctggtacaggcttccttatcctctgacagaatagcagtgctcctttgtgtctccatactttcctaccatgaccacaacaatccaggattgccatagatttgtccttgacctgcattaagttgaagagttggaagatagatagcacagtgccagcagaagcactaaagaaagaactaggtggtaacacaggctgg

SEQ ID NO: 80227 - DNA, 439 bp, Homo sapiens
tctttcctcttactttccttccttccctcctttcatatgagagactctatatggaaaaggaagctgaagtggcctgcacacgatatagaaaagccatattactttcctaagactggtaatccggcaatacctaatgcagcacatggctagagactccacatttgcccaacttctctgctcatcatttgccactgttctgtaaatttcccagtcccctcacagaaagcacatggcaccatttaaaatggctgctcactctctaagggaggtctcacaggctggtagtgagccctgtcccaatagtgaagttctccacaaatggggagacttctcccaggaggaggggaggcctggagatgggcatgcagtgggcaatgtcagctgccctccaggttctgctgccttttccgccctggtcagtatacaagcttcggggaca

SEQ ID NO: 80228 - DNA, 302 bp, Homo sapiens
tgatttaagccaacttgagactggggaatgccatcttagagaggtacagcgtgcagggctgtaaggaacttttatgatgacactctcgatcataacatctctcgttctttcaagcctgtcggcagctgagtttgagaatccgcccgagttctccacaccttttgaaagattggcactcccagataagaacatggaaagagctgttgtgtggaaaaggaggcagaaatttcctctgtacagccctagaattcagaactaggaccagtgaggcaaagtccaaggacacttttgcttggtatagg

SEQ ID NO: 80229 - DNA, 340 bp, Homo sapiens
gacaagaataacattggtttacatttttgcgaatctctctaatgacctggcttaatagaaacagctggattcttacatctacttctgcattcattccattgtagtattttattttttatatttaagtatatgaggaagttctaatttcatgcaaataagtggttggaaagagaggaatattttggctttttttttgtgagacagtctcactctgtcacccaggctggagtgcagtggtgcgatctcggctcacggcaacctccgcctcccggattcaagcaattctcgtgcctcggcctcccaagtagctgggattacaggtgtgcgccaccatgcccag

SEQ ID NO: 80230 - DNA, 3255 bp, Homo sapiens
tcgaaacagctgccggctggtcccggccgaggccggcgcagggagggaggagccgcccgggctgtgggggcgccgcgagctgggccggcctcggtgtgcccgcgccgccagcccgctccagacgcgccacctgggcgctccaagaagaggccgaagtttgccgcggccgtgagttggagctcgcgccgggccgctgcgccgggagctccgggggcttccctcgcttcccggtattgtttgcaaactttgctgctctccgccgcggcccccaactcggcggacgccgggcgcggagagccgagccgggggcgctgtgcgcagcgctcgggccaggccgggcgggcatgggcgggggcccgagcaggggtggagagccggggccagcagcagcccgtgcccgggagcggcggcgctgaggggcgcggagctccccgcgaggacacgtccaacgccagcatgcagcgcccgggcccccgcctgtggctggtcctgcaggtgatgggctcgtgcgccgccatcagctccatggacatggagcgcccgggcgacggcaaatgccagcccatcgagatcccgatgtgcaaggacatcggctacaacatgactcgtatgcccaacctgatgggccacgagaaccagcgcgaggcagccatccagttgcacgagttcgcgccgctggtggagtacggctgccacggccacctccgcttcttcctgtgctcgctgtacgcgccgatgtgcaccgagcaggtctctacccccatccccgcctgccgggtcatgtgcgagcaggcccggctcaagtgctccccgattatggagcagttcaacttcaagtggcccgactccctggactgccggaaactccccaacaagaacgaccccaactacctgtgcatggaggcgcccaacaacggctcggacgagcccacccggggctcgggcctgttcccgccgctgttccggccgcagcggccccacagcgcgcaggagcacccgctgaaggacgggggccccgggcgcggcggctgcgacaacccgggcaagttccaccacgtggagaagagcgcgtcgtgcgcgccgctctgcacgcccggcgtggacgtgtactggagccgcgaggacaagcgcttcgcagtggtctggctggccatctgggcggtgctgtgcttcttctccagcgccttcaccgtgctcaccttcctcatcgacccggcccgcttccgctaccccgagcgccccatcatcttcctctccatgtgctactgcgtctactccgtgggctacctcatccgcctcttcgccggcgccgagagcatcgcctgcgaccgggacagcggccagctctatgtcatccaggagggactggagagcaccggctgcacgctggtcttcctggtcctctactacttcggcatggccagctcgctgtggtgggtggtcctcacgctcacctggttcctggccgccggcaagaagtggggccacgaggccatcgaagccaacagcagctacttccacctggcagcctgggccatcccggcggtgaagaccatcctgatcctggtcatgcgcagggtggcgggggacgagctcaccggggtctgctacgtgggcagcatggacgtcaacgcgctcaccggcttcgtgctcattcccctggcctgctacctggtcatcggcacgtccttcatcctctcgggcttcgtggccctgttccacatccggagggtgatgaagacgggcggcgagaacacggacaagctggagaagctcatggtgcgtatcgggctcttctctgtgctgtacaccgtgccggccacctgtgtgatcgcctgctacttttacgaacgcctcaacatggattactggaagatcctggcggcgcagcacaagtgcaaaatgaacaaccagactaaaacgctggactgcctgatggccgcctccatccccgccgtggagatcttcatggtgaagatctttatgctgctggtggtggggatcaccagcgggatgtggatttggacctccaagactctgcagtcctggcagcaggtgtgcagccgtaggttaaagaagaagagccggagaaaaccggccagcgtgatcaccagcggtgggatttacaaaaaagcccagcatccccagaaaactcaccacgggaaatatgagatccctgcccagtcgcccacctgcgtgtgaacagggctggagggaagggcacaggggcgcccggagctaagatgtggtgcttttcttggttgtgtttttctttcttcttcttcttttttttttttttataaaagcaaaagagaaatacataaaaaagtgtttaccctgaaattcaggatgctgtgatacactgaaaggaaaaatgtacttaaagggttttgttttgttttggttttccagcgaagggaagctcctccagtgaagtagcctcttgtgtaactaatttgtggtaaagtagttgattcagccctcagaagaaaacttttgtttagagccctccgtaaatatacatctgtgtatttgagttggctttgctacccatttacaaataagaggacagataactgctttgcaaattcaagagcctcccctgggttaacaaatgagccatccccagggcccacccccaggaaggccacagtgctgggcggcatccctgcagaggaaagacaggacccggggcccgcctcacaccccagtggatttggagttgcttaaaatagactccggccttcaccaatagtctctctgcaagacagaaacctccatcaaacctcacatttgtgaactcaaacgatgtgcaatacatttttttctctttccttgaaaataaaaagagaaacaagtattttgctatatataaagacaacaaaagaaatctcctaacaaaagaactaagaggcccagccctcagaaacccttcagtgctacattttgtggctttttaatggaaaccaagccaatgttatagacgtttggactgatttgtggaaaggaggggggaagagggagaaggatcattcaaaagttacccaaagggcttattgactctttctattgttaaacaaatgatttccacaaacagatcaggaagcactaggttggcagagacactttgtctagtgtattctcttcacagtgccaggaaagagtggtttctgcgtgtgtatatttgtaatatatgatatttttcatgctccactattttattaaaaataaaatatgttctttagtttgctgcta

SEQ ID NO: 80231 - DNA, 862 bp, Homo sapiens
ctagtggttctcctgcctggggtgcagccctgtgtctgtatccagcctgtccctgctacttataggatgggctgtgggcgagttcctgcccctctgggcccctctgcaaggtggagagttggcaagttggctctgaagagcatttttgtcttcaagggcctcgttctgctcctctgggcctcagtaacccctgggtgctcctaagctgtaaagaaaaacaaaaagtgttccttatatgtcccaagaaaagaaacagtttctagtccccgcctcaagaagaaataaactatgtctaacccaagcacctccctgatcaggggcaaagaagcaaacttttcaagaaagaaacacccacaaaaaaacccccaccgatctgccaacccctcacccctgcctgcacatgcacacacacacgacacacatgcacacacagacacacatacatagagacacatacatacaacacagaggtacacatgcacatccccacactcaccaaatgcatgttctttgttaaaaggaagtaagtcctggagcctatcatggaattaaaggcagggttttgcagcttccaaattctgtaacctcagttgggtcacttggcagctctgtgcctctgtttccctatctgacagcaggtagagtttgagtaaatcagaaactagagaatctggatccagcctacaaacgtgttttatttggctcactcaggcctttgagacagcttgttgtcatgtaaagataggaagattccaggtaaaaatctaagatgcagcatgtcctaaagatatggtgtctgccacagcaaaatcagcaggcaatgagaagcaaccttgactccattagagctgcactctccagt

SEQ ID NO: 80232 - DNA, 260 bp, Homo sapiens
ttgcctcagcctcccgagtagctgggattataggcgcctgctaccatgcctggctaatttttgtatttttagtagagatggggttttgtcatgttggccaggctggtgtcaaactcctgacctcaggtgatccacccgcctcagcctcccaaagtgctgggattataggcttgagccaccgcgcccggccttatctgttatttcttatgtcttctacaaattgcatgtcttgtacttccttgtactagcagagcatagaa

SEQ ID NO: 80233 - DNA, 412 bp, Homo sapiens
aggtgaggccatataagccaactagcatttgacaagtagagtgtggaaaaagcaaacgattgtttggagactaatgttagtgtatctaggagtactagaatggaattgggggaaaaaattaagtagaaaatataccagaggacctaatactaaatccttagaagttttgcagagcatagagactctaattgtatattaaaaagcatctgcttacaaaagttacaaatatagatagtagttatttccttgtttcttttttcttaaaattctttataagaaccagataacgcatgttattttagattgacaggagtcctcctcttttcaatatttataccgtgtacagatattggattatgacatttctaggattttttggaagttagaagataccctattttttaaaatacca

SEQ ID NO: 80234 - DNA, 322 bp, Homo sapiens
tttttttgagatagagtttcactcttgttgcccaggctggaatgcaacggcacaatcttggctcactgcaacctccacctcccgggttcaagcgattctcctgcctcagccaactacccaattatctatgaacttagccatagcaatccccctgtgagcaggcacagtgattacaggctttcgctttaaaaccaaaaactccttggcccatcttttaccacaaggcacctcccgagtagctggggttacaggcgtctgccaccacgcccagctaattttttgtatttttagtagagacaaggtttcaccagattggtcaggc

SEQ ID NO: 80235 - DNA, 622 bp, Homo sapiens
tggagaggcagtgaaaaagcattaccttgtaggtttccaggcagcctggacaataggggcacctaaacccacattgaaaagccttcacatcatcacagctgagtctcatagccttcaactttaccagttttggagaacagagataaatgcactggccagaaactagaagagcagctgctccaattggctgggaaatcatttaactggctcctcatcttggctcttaaatccccaaaattgttgactgaggtttcccgggctcctttctatgctccacctccttgtgaccttaaggattctctgccactgtcctaacccctttcccgccttgcaacaatgaccagtctgtccctagctgtttggaaaattcccactgagtctgtgagcctctgttctggtaacctcgaccaccctgtcaccagtatctctggtccaccagtgcggtgtaactcaagggagcagcatctctccagattgctgaagtgagggagggagattatgagggaactgccccaaggacacaaggattcattcttagagttcccacatcttgattaaaataaacagtacaggaaatagactgcaggcacatccaggtgattaaaaaatttaacaccaggca

SEQ ID NO: 80236 - DNA, 473 bp, Homo sapiens
  misc_feature (11)..(11): n is a, c, g, or t
cgccttgctgntgaatcctagcactttatgaggccgaggagggtggattagttgaggccaggagttcgagaccagcttgggaaacatggcgaaaccccatttctactaaaaattcaaaaatcagccaagcatggtgcgtgagccaccacttctggccacaaatttctttttgaaggcttattccagttttgtgaggctagcatgaggtgtatgcatttgccaggggcaaatttatactgctgaattaacccatgcaacaaatgctgcacatctgctcgcagtccatttagaggcatttgcggtagacaatggaggggccagactcatcatacatacctgatggctaacccacatgcttgcagtccatttagagggcatttgcagtggatgatggaggggccacatacctaattgctaatccacatctgctggaaggtggacagtgaggccaggatggaaccaccaatccacac

SEQ ID NO: 80237 - DNA, 3271 bp, Homo sapiens
  misc_feature (1517)..(1517): n is a, c, g, or t
ctaaattacccactacgttgcttgtatatttaaagttggagttcgttgctaaagatggcagacccagatgtcctcactgaagttccagcagcattgaagcggttagccaagtatgtgatccggggattttatggcattgagcatgccttggccttggacatcttgatcaggaactcctgtgtgaaagaggaggatatgctggagctgctcaagtttgatcggaagcaacttcgatcagttttgaataatttaaagggagacaagtttatcaaatgcagaatgagggtagagactgctgcagacgggaaaaccactcgccataactactacttcatcaattatcgtactcttgttaatgtggtaaaatataaactggaccacatgagaagaagaattgagaccgatgagagagattcgaccaaccgggcttccttcaaatgtcctgtctgtagtagtactttcacagacttagaagctaatcagctctttgatcctatgacaggaactttccgctgtactttttgccatacagaggtagaagaggatgaatcagcaatgcccaaaaaagatgcacgcacacttttggcaaggtttaatgaacaaattgagcccatttatgcattgcttcgggagacagaggatgtgaacttggcctatgaaatacttgagccagaacccacagaaatcccagccctgaaacagagcaaggaccatgcagcaactactgctggagctgctagcctagcaggtgggcaccaccgggaagcatgggccaccaaaggtccttcctatgaagacttatacactcagaatgttgtcattaacatggatgaccaagaagatcttcatcgagcctcactggaagggaaatctgccaaagagaggcctatttggttgagagaaagcactgtccaaggggcatatggttctgaagatatgaaagaagggggcatagatatggacgcatttcaggagcgtgaggaaggccatgctgggcctgatgacaacgaagaggtcatgcgagcactgctcattcacgagaaaaagacttcctctgccatggctggttcagtgggggcagctgctccagtgaccgctgccaatggcagtgactcagaaagcgagaccagtgagtcagatgatgattctccaccccgtccggcagctgtggctgtgcataaacgagaagaggatgaagaggaagatgacgagtttgaagaagtagcagatgaccccattgtcatggtggctggccgtccgttctcctacagtgaagtgagccaacggccagagctagtggcccagatgacaccagaagaaaaggaagcatatatagcaatgggacaacgcatgtttgaggacctctttgagtgagctttccctaattctttctcctttctctaatgctcagttcaaaaaggaatgtctcatctttgaagaaaagtatttaagtggctttctgcccctcttgatgtaagcaactgtccatccttgtgcaaagattgatggtagagagnttgacttttatgccagaaactttcccagcaaggtagggtgctgagaatcctacccttccttgctgtcactacagtattaatattttactgtattttcttttcttttttttttttttttggagatgaagtctcactcttgtaccccaggctggagtgcaatggcgtgatctcggctcactgcaacctctgcctcctgggttcaagcgattctcctgcctcagcctcccgagtagctgggattacaggtgcctgccaccatgcctggctaatttttgtatttttagtagaggcagggtttcaccatgttagccaggatgatctcgatctcctgacctcatgatccacccgcctcggcctcccaaagtgctgtattttcttatctgatttttttcttgccttattaagacataattttctcccttctgaaatgagtgagggaagttcataaggtaaatccttcccatccatctgtttactacaataggttacaataattcactgatcacatccattttatctgttctagccaggcattccaaacaatttcttatactgctgcccaccaaagcagcttgccaacagtcaaatcactgattgggggaaaaaatcctgaaattttgcttagaatttgagcatttcctcaaaattgagatggatcaatatgtaaggggaggtgggagcgtgtgtggaagggggagagatatacttgagtcttatgattaatgtctaaaccagaatttgtgtctttagaactgaccagactggtagattttattgtattgcttaatgtcttttggtttggatttaggatgatagaaaacagaagtataattggtaaacccttaggaagaaattagaaaaacatggacgtaagacaagaagtctctgtgaagggttgaagagtgacaagcattggtaacagtgccttagaactgtgtcagttagtctgatttggaaatcctttatgtaaagctgagactggtcctggttttgttccctttgggtacagacctcttgtcagtgctataaattgtttaatgaggccattccagcagaaatcaacagaataattgattactcttctctctctctgtcactctccctctttctaaacatcattgaaggctgtctctcttttaatttttgtcagacacagtattttagggtgcatccagtataccattgagcattgtaacctcaggaaacagtttattttgggttctgatatgtagcatggtattttccctaaggcagaactttaaaaataaagaactttcacacaagggtctgtaacaattgtatatcttacaatatttttccttgcattgtaatttttaagtatttatcattttatagtacacatgtaaagaatatatgagccttgtatggagtgatgtttcatttacctgggttgtgttaatgactgaatgttgacaataaatctgttttatactgactgaagtttgttcattttaagttctgtaacatcttggggcatattaaaatgaatattcttcccattaaaaaaatgttaaagacttttttattagtcatatttcaaatgatagatgcatatgggatctaaactttttgtgcaataagatgcctttgtaccttgtatacgtaaagtattcaacttttacacttgatcttagccaaaagaccaagaagcaatgctcttcagcttttaaacattgttttttaaacttttatagttctagaagttaatttaaataaaatggtaatcagatgtt

SEQ ID NO: 80238 - DNA, 589 bp, Homo sapiens
agttgaagcgctgggggcagctgtagtgggagtgttccaggattcgccttgtatatttaaagttggagttcgttgctaaagatggcagacccagatgtcctcactgaagttccagcagcattgaagcggttagccaagtatgtgatccggggattttatggcattgagcatgccttggccttggacatcttgatcaggaactcctgtgtgaaagaggaggatatgctggagctgctcaagtttgatcggaagcaacttcgatcagttttgaataatttaaagggagacaagtttatcaaatgcagaatgagggtagagactgctgcagacgggaaaaccactcgccataactactacttcatcaattatcgtactcttgttaatgtggtaaaatataaactggaccacatgagaagaagaattgagaccgatgagagagattcgaccaaccgggcttccttcaaatgtcctgtctgtagtagtactttcacagacttagaagctaatcagctctttgatcctatgacaggtgaggtttatccagtttgtgaatctttaaaataaagtgtgtattaccttttttcttaaa

SEQ ID NO: 80239 - DNA, 624 bp, Homo sapiens
atcatgaacactagtgtcatgtatacagaacactagtgcatccagtataccattgagcattgtaacctcaggaaacagtttattttgggttctgatatgtagcatggtattttccctaaggcagaactttaaaaataaagaactttcacacaagggtctgtaacaattgtatatcttacaatatttttccttgcattgtaatttttaagtatttatcattttatagtacacatgtaaagaatatatgagccttgtatggagtgatgtttcatttacctgggttgtgttaatgactgaatgttgacaataaatctgttttatactgactgaagtttgttcattttaagttctgtaacatcttggggcatattaaaatgaatattcttcccattaaaaaaatgttaaagacttttttattagtcatatttcaaatgatagatgcatatgggatctaaactttttgtgcaataagatgcctttgtaccttgtatacgtaaagtattcaacttttacacttgatcttagccaaaagaccaagaagcaatgctcttcagcttttaaacattgttttttaaacttttatagttctagaagttaatttaaataaaatggtaatcagatgtt

SEQ ID NO: 80240 - DNA, 591 bp, Homo sapiens
gagctgtagagccaagctgttcgaggatccgcctcgttatattaaaagtggtgttcgtaagctgtatcatgagagaaaccatgatgtcctcatagaggttgcatatcatcgatgcggttagccaggtgatgtgactccgggtattgaatggattctgaatgtgcttctgacgttgagacactgtttgtactcatcgaacttcctcctgtgtgaaagaggaggatatgctggagctgctcaagtttgatcggaagcaacttcgatcagttttgaataatttaaagggagacaagtttatcaaatgcagaatgagggtagagactgctgcagacgggaaaaccactcgccataactactacttcatcaattatcgtactcttgttaatgtggtaaaatataaactggaccacatgagaagaagaattgagaccgatgagagagattcgaccaaccgggcttccttcaaatgtcctgtctgtagtagtactttcacagacttagaagctaatcagctctttgatcctatgacaggtgaggtttatccagtttgtgaatctttaaaataaagtgtgtattaccttttttcttaaa

SEQ ID NO: 80241 - DNA, 3298 bp, Homo sapiens
  misc_feature (1544)..(1544): n is a, c, g, or t
agttgaagcgctgggggcagctgtagtgggagtgttccaggattcgccttgtatatttaaagttggagttcgttgctaaagatggcagacccagatgtcctcactgaagttccagcagcattgaagcggttagccaagtatgtgatccggggattttatggcattgagcatgccttggccttggacatcttgatcaggaactcctgtgtgaaagaggaggatatgctggagctgctcaagtttgatcggaagcaacttcgatcagttttgaataatttaaagggagacaagtttatcaaatgcagaatgagggtagagactgctgcagacgggaaaaccactcgccataactactacttcatcaattatcgtactcttgttaatgtggtaaaatataaactggaccacatgagaagaagaattgagaccgatgagagagattcgaccaaccgggcttccttcaaatgtcctgtctgtagtagtactttcacagacttagaagctaatcagctctttgatcctatgacaggaactttccgctgtactttttgccatacagaggtagaagaggatgaatcagcaatgcccaaaaaagatgcacgcacacttttggcaaggtttaatgaacaaattgagcccatttatgcattgcttcgggagacagaggatgtgaacttggcctatgaaatacttgagccagaacccacagaaatcccagccctgaaacagagcaaggaccatgcagcaactactgctggagctgctagcctagcaggtgggcaccaccgggaagcatgggccaccaaaggtccttcctatgaagacttatacactcagaatgttgtcattaacatggatgaccaagaagatcttcatcgagcctcactggaagggaaatctgccaaagagaggcctatttggttgagagaaagcactgtccaaggggcatatggttctgaagatatgaaagaagggggcatagatatggacgcatttcaggagcgtgaggaaggccatgctgggcctgatgacaacgaagaggtcatgcgagcactgctcattcacgagaaaaagacttcctctgccatggctggttcagtgggggcagctgctccagtgaccgctgccaatggcagtgactcagaaagcgagaccagtgagtcagatgatgattctccaccccgtccggcagctgtggctgtgcataaacgagaagaggatgaagaggaagatgacgagtttgaagaagtagcagatgaccccattgtcatggtggctggccgtccgttctcctacagtgaagtgagccaacggccagagctagtggcccagatgacaccagaagaaaaggaagcatatatagcaatgggacaacgcatgtttgaggacctctttgagtgagctttccctaattctttctcctttctctaatgctcagttcaaaaaggaatgtctcatctttgaagaaaagtatttaagtggctttctgcccctcttgatgtaagcaactgtccatccttgtgcaaagattgatggtagagagnttgacttttatgccagaaactttcccagcaaggtagggtgctgagaatcctacccttccttgctgtcactacagtattaatattttactgtattttcttttcttttttttttttttttggagatgaagtctcactcttgtaccccaggctggagtgcaatggcgtgatctcggctcactgcaacctctgcctcctgggttcaagcgattctcctgcctcagcctcccgagtagctgggattacaggtgcctgccaccatgcctggctaatttttgtatttttagtagaggcagggtttcaccatgttagccaggatgatctcgatctcctgacctcatgatccacccgcctcggcctcccaaagtgctgtattttcttatctgatttttttcttgccttattaagacataattttctcccttctgaaatgagtgagggaagttcataaggtaaatccttcccatccatctgtttactacaataggttacaataattcactgatcacatccattttatctgttctagccaggcattccaaacaatttcttatactgctgcccaccaaagcagcttgccaacagtcaaatcactgattgggggaaaaaatcctgaaattttgcttagaatttgagcatttcctcaaaattgagatggatcaatatgtaaggggaggtgggagcgtgtgtggaagggggagagatatacttgagtcttatgattaatgtctaaaccagaatttgtgtctttagaactgaccagactggtagattttattgtattgcttaatgtcttttggtttggatttaggatgatagaaaacagaagtataattggtaaacccttaggaagaaattagaaaaacatggacgtaagacaagaagtctctgtgaagggttgaagagtgacaagcattggtaacagtgccttagaactgtgtcagttagtctgatttggaaatcctttatgtaaagctgagactggtcctggttttgttccctttgggtacagacctcttgtcagtgctataaattgtttaatgaggccattccagcagaaatcaacagaataattgattactcttctctctctctgtcactctccctctttctaaacatcattgaaggctgtctctcttttaatttttgtcagacacagtattttagggtgcatccagtataccattgagcattgtaacctcaggaaacagtttattttgggttctgatatgtagcatggtattttccctaaggcagaactttaaaaataaagaactttcacacaagggtctgtaacaattgtatatcttacaatatttttccttgcattgtaatttttaagtatttatcattttatagtacacatgtaaagaatatatgagccttgtatggagtgatgtttcatttacctgggttgtgttaatgactgaatgttgacaataaatctgttttatactgactgaagtttgttcattttaagttctgtaacatcttggggcatattaaaatgaatattcttcccattaaaaaaatgttaaagacttttttattagtcatatttcaaatgatagatgcatatgggatctaaactttttgtgcaataagatgcctttgtaccttgtatacgtaaagtattcaacttttacacttgatcttagccaaaagaccaagaagcaatgctcttcagcttttaaacattgttttttaaacttttatagttctagaagttaatttaaataaaatggtaatcagatgtt

SEQ ID NO: 80242 - DNA, 1246 bp, Homo sapiens
agttgaagcgctgggggcagctgtagtgggagtgttccaggattcgccttgtatatttaaagttggagttcgttgctaaagatggcagacccagatgtcctcactgaagttccagcagcattgaagcggttagccaagtatgtgatccggggattttatggcattgagcatgccttggccttggacatcttgatcaggaactcctgtgtgaaagaggaggatatgctggagctgctcaagtttgatcggaagcaacttcgatcagttttgaataatttaaagggagacaagtttatcaaatgcagaatgagggtagagactgctgcagacgggaaaaccactcgccataactactacttcatcaattatcgtactcttgttaatgtggtaaaatataaactggaccacatgagaagaagaattgagaccgatgagagagattcgaccaaccgggcttccttcaaatgtcctgtctgtagtagtactttcacagacttagaagctaatcagctctttgatcctatgacaggaactttccgctgtactttttgccatacagaggtagaagaggatgaatcagcaatgcccaaaaaagatgcacgcacacttttggcaaggtttaatgaacaaattgagcccatttatgcattgcttcgggtgcatccagtataccattgagcattgtaacctcaggaaacagtttattttgggttctgatatgtagcatggtattttccctaaggcagaactttaaaaataaagaactttcacacaagggtctgtaacaattgtatatcttacaatatttttccttgcattgtaatttttaagtatttatcattttatagtacacatgtaaagaatatatgagccttgtatggagtgatgtttcatttacctgggttgtgttaatgactgaatgttgacaataaatctgttttatactgactgaagtttgttcattttaagttctgtaacatcttggggcatattaaaatgaatattcttcccattaaaaaaatgttaaagacttttttattagtcatatttcaaatgatagatgcatatgggatctaaactttttgtgcaataagatgcctttgtaccttgtatacgtaaagtattcaacttttacacttgatcttagccaaaagaccaagaagcaatgctcttcagcttttaaacattgttttttaaacttttatagttctagaagttaatttaaataaaatggtaatcagatgtt

SEQ ID NO: 80243 - DNA, 865 bp, Homo sapiens
agttgaagcgctgggggcagctgtagtgggagtgttccaggattcgccttgtatatttaaagttggagttcgttgctaaagatggcagacccagatgtcctcactgaagttccagcagcattgaagcggttagccaagtatgtgatccggggattttatggcattgagcatgccttggccttggacatcttgatcaggaactcctgtgtgaaagaggaggatatgctggagctgctcaagtttgatcggaagcaacttcgatcagttttgaataatttaaagggagacaagtttatcaaatgcagaatgagggtagagactgctgcagacgggaaaaccactcgccataactactacttcatcaattatcgtactcttgttaatgtggtaaaatataaactggaccacatgagaagaagaattgagaccgatgagagagattcgaccaaccgggcttccttcaaatgtcctgtctgtagtagtactttcacagacttagaagctaatcagctctttgatcctatgacaggaactttccgctgtactttttgccatacagaggtagaagaggatgaatcagcaatgcccaaaaaagatgcacgcacacttttggcaaggtttaatgaacaaattgagcccatttatgcattgcttcgggagacagaggatgtgaacttggcctatgaaatacttgagccagaacccacagaaatcccagccctgaaacagagcaaggacctttggtggcccatgcttcccggtggtgcccacctgctaggctagcagctccagcagtagttgctgcatggtccttgctctgtttcagggctgggatttctgtgggttctggctcaagtatttcata

SEQ ID NO: 80244 - DNA, 208 bp, Homo sapiens
  misc_feature (52)..(52): n is a, c, g, or t
  misc_feature (54)..(54): n is a, c, g, or t
cgtgtgcagcctatcaagctggccagggtcaccaaggtcctgggcaggacgntntctcagggacagtgcacgcaggtcgcgtggaattcatggacgacacgagccgatccatcatccgcaatgtaaaaggccccgtgcgcgagggcgacgtgctcacccttttggagtcagagcgagaagcccggaggttgcgctgagcttgcttgct

SEQ ID NO: 80245 - DNA, 232 bp, Homo sapiens
  misc_feature (33)..(33): n is a, c, g, or t
  misc_feature (66)..(67): n is a, c, g, or t
acaccagcgtgtcagctatagctggccaggggntcacccaaagggttccctgtggcagtgaccggnnttcttcagggaaccagtgtgcacgccaggggtgccgcgtggaattcatggacgacacgagccgatccatcatccgcaatgtaaaaggccccgtgcgcgagggcgacgtgctcacccttttggagtcagagcgagaagcccggaggttgcgctgagcttgcttgct

SEQ ID NO: 80246 - DNA, 741 bp, Homo sapiens
ctaatttacattttcatcaacagtgtacgagggttctccgttttctgcactcttgccagcatccgttttttcctgtcttttgataaaaaccactttaactgggggccttctgctgaagggccacagaggaacaccaggctgggatggattcagggcaagcaagtcactgtgctgggaagccctgtgcctgtgaacgtgttcctcggagtcccctttgctgctcccccgctgggatccctgcgatttacgaacccgcagcctgcatcgccctgggataacttgcgagaagccacctcctaccctaatttgtgcctccagaactcagagtggctgctcttagatcaacacatgctcaaggtgcattacccgaaattcggagtgtcagaagactgcctctacctgaacatctatgcgcctgcccacgccgatacaggctccaagctccccgtcttggtgtggttcccaggaggtgccttcaagactggctcagcctccatctttgatgggtccgccctggctgcctatgaggacgtgctggttgtggtcgtccagtaccggctaggaatatttggtttcttcacgtgagtctctccaaatgatggacatcccagatccccaaagggcagcagtgcagtagccatagacagtgcccagcaacctaagaaggagcgagccttccgggacaatgaacaaaactggccctaattacttaggtaatttttgcagctgtagcagataaat

SEQ ID NO: 80247 - DNA, 478 bp, Homo sapiens
gggccaaggctctgtcttctggcttgaaatctggggaatcatctccctatccctgcctttgggtctccataacaggaggcagcaattcctcctgccactggttaaatatttatttgaagattctatttcaggaaatgtggactgcaagatcaagagagagaggaaatactttatttcgagccactctccttgcagtctcagactgggttccaatcttgctgtgccaagaataaagtcaacttcatatttatatagttatattatccggagatctgagaaagaatggacgttacactgatcttctatgttcttttatttagtttctaacttcaatgttatttatatctaagtctgaatgctgtctatattgaaaatagttaatttattaaaacattttttcacgtaagtttatggtcacagtacctaatctttgctaaatgtttgatttatttctaaaaagtcttaaaatgatagttta

SEQ ID NO: 80248 - DNA, 596 bp, Homo sapiens
tcatggttcaaaatatcctcaatttcaaggactattgcagagtacactgaatttcatatgctgatgtatgtattgtgactactatacaaattctgttaaaagaaacaaatgattcaattttattaaattatacataacatagctattaggtgacagtattaagtttttctaagtttttattttttttttcattgaagagaataattgccattcccatttcccacctccaccaaccaaataatgtatcactggctcttcacaaagttatgacttgggaaaatgctgaaggaatggtaatataagataaagtgggctaggcatggtggctcacacctgtaatcccagaactttgagaagccaaggtgggtggatcacctgaggtcaggagctcaagaccagcctggacaacatgatgaaaccccatctctacaaaactacaaaaattagctaggcatgatggctggtacctgtaatcccagttgctcaggaggctgaggggggagaatcacttgaacctggaaggcggaggttgccttgagccaagattgcaccattgcactccagcctgggtgacagagcaagactccatatcaatt

SEQ ID NO: 80249 - DNA, 633 bp, Homo sapiens
gccagtaggaacgtttcttttcacctcgttgcattacccaccttcttcattttctcctttataaactgtcttccgcccaggggccgctgagccctctgttcctgttctgcgaaccgtcctttggaggaaaggaacaggctgctggggaggggaagactcagaatttctagttcccagcaaagcctccaggcaggcagtatcgatgcgctctctccgaaattgataaaatagcgagcaggcctcataccctcagctgggcacttatgaatatccccagcgtttcgagctgtcgagctctgcgtggaaagaattggtttctaagaatatagtcgaaaatttggggccgggcgcggtggctgacgcctgtaatcccagcactttgggaggctgatgtgggcggatcacctgaggtcagaagttcgagaccatcctggccaacatggcgaaaacccatctatactaaaaatacaaaaattagccggcgtggtggcgcgtgcctgtaatcccagctactcgggaggctgaggcaggagaatgacttgaactcgggaggcggaggttgcagtgagccgatatcgctccattgctctccagcctgggcgacagagtgagacttcgtctcagaaaaaaaaa

SEQ ID NO: 80250 - DNA, 258 bp, Homo sapiens
ggatttactccacagcagctccctgggtgcagagatcttggtgcagatcccatttcgctgacttgctttctctccttagacaaatgtgtgtggcggggctgagtacctgctcatgtccttttctggggacgccacacatggctggtttctggcccttggggacagtggctcaggtccagaggagaacccttactggctgtagtgtggtgggcacagcaggggtgggccggttcacctcctggctttgaagaaatgggt

SEQ ID NO: 80251 - DNA, 410 bp, Homo sapiens
atgagctcttatttcgtcaactcactgttctccaaatacaaaaccggggagtccctgcgccccaattattatgactgcggcttcgcccaggacctgggcggccgacccaccgtggtgtacggtcccagcagcggcggcagcttccagcacccgtcgcaaatccaggagttctaccacgggccgtcgtcgctgtccacggctccctaccagcagaacccgtgcgccgtggcgtgccacggggaccccggcaatttctacggctacgacccgctgcaacgccagagcctattcggtgcgcaggatccagacctggattcgcgaccgacctggattcgcgaccgacctggattcgcgaccgacctggattcgcgaccgacctggattcgcgaccgacctggattcgcgaccga

SEQ ID NO: 80252 - DNA, 1588 bp, Homo sapiens
atgagctcttatttcgtcaactcactgttctccaaatacaaaaccggggagtccctgcgccccaattattatgactgcggcttcgcccaggacctgggcggccgacccaccgtggtgtacggtcccagcagcggcggcagcttccagcacccgtcgcaaatccaggagttctaccacgggccgtcgtcgctgtccacggctccctaccagcagaacccgtgcgccgtggcgtgccacggggaccccggcaatttctacggctacgacccgctgcaacgccagagcctattcggtgcgcaggatccagacctggtgcagtacgcagactgcaagcttgccgccgccagcggcctgggcgaggaggccgagggctccgagcagagcccgtcgcccacacagctcttcccctggatgcgcccgcaagcagccgccggacgcaggcgaggccgacagacctacagccgctaccagaccctggagctggagaaggagttcctatttaatccctatctgactcgtaagcggcgaatcgaggtatcgcacgccctgggactgacagagagacaggtcaaaatctggttccagaaccggaggatgaagtggaaaaaagagaacaacaaagacaagttccccagcagcaaatgcgagcaggaggagctggagaaacagaagctggagcgggccccagaggcggcggacgagggcgacgcgcagaagggcgacaagaagtaggcttcagctgggactgccagggccgcggccgcccgcacgtccgcgggtcccggccgcgccgccgccgcgcgcccctgcccgagagagctctggccccgctagcggggccaggagccgggcctcccaccgcagcgtcccccgccgcgccagtccccgctagtggtagtatctcgtaatagcttctgtgtgtgagctaccgtggatctccttcccttctcttgggggccggggggaaagaaaaggatttaagcaaaggctccctcgccctgtgagggcgagcggcaaaggcccggctgagccccccatgcccctcccctccccgtgtaaaaagcctccttgtgcaattgtcttttttttcctttgaacgtgcttctttgtaatgaccaaggtaccgatttctgctaagttctcccaacaacatgaaactgcctattcacgccgtaattctttctgtctcccttctctctctctctctcgctcgctcgctctcgctctcgctctctctcgctgcgtcctcatttcccctcccaatcctctctcccctctgcaaccccccagctcgctggctttctctctggcttctctcttttcctcctccacccaccccctttggtttgacaattttgtcttaagtgtttctcaaaagaggttactttagttagcatgcgcgctgtgggcaattgttacaagtgttcttaggtttactgtgaagagaatgtattctgtatccgtgaattgctttatgggggggagggagggctaattatatattttgttgttcctctatactttgttctgttgtctgcgcctgaaaagggcggaagagttacaataaagtttacaagcgagaacccga

SEQ ID NO: 80253 - DNA, 1212 bp, Homo sapiens
taggatgcggggtctctaatggatgcaaatgatcatgaaaagacagtgcaaaatatgaaacaactcatttgcagggaagtaaatcaccgaaaactgtttatgaactggcatcccttttcctatttaatccctatctgactcgtaagcggcgaatcgaggtatcgcacgccctgggactgacagagagacaggtcaaaatctggttccagaaccggaggatgaagtggaaaaaagagaacaacaaagacaagttccccagcagcaaatgcgagcaggaggagctggagaaacagaagctggagcgggccccagaggcggcggacgagggcgacgcgcagaagggcgacaagaagtaggcttcagctgggactgccagggccgcggccgcccgcacgtccgcgggtcccggccgcgccgccgccgcgcgcccctgcccgagagagctctggccccgctagcggggccaggagccgggcctcccaccgcagcgtcccccgccgcgccagtccccgctagtggtagtatctcgtaatagcttctgtgtgtgagctaccgtggatctccttcccttctcttgggggccggggggaaagaaaaggatttaagcaaaggctccctcgccctgtgagggcgagcggcaaaggcccggctgagccccccatgcccctcccctccccgtgtaaaaagcctccttgtgcaattgtcttttttttcctttgaacgtgcttctttgtaatgaccaaggtaccgatttctgctaagttctcccaacaacatgaaactgcctattcacgccgtaattctttctgtctcccttctctctctctctctcgctcgctcgctctcgctctcgctctctctcgctgcgtcctcatttcccctcccaatcctctctcccctctgcaaccccccagctcgctggctttctctctggcttctctcttttcctcctccacccaccccctttggtttgacaattttgtcttaagtgtttctcaaaagaggttactttagttagcatgcgcgctgtgggcaattgttacaagtgttcttaggtttactgtgaagagaatgtattctgtatccgtgaattgctttatgggggggagggagggctaattatatattttgttgttcctctatactttgttctgttgtctgcgcctgaaaagggcggaagagttacaataaagtttacaagcgagaacccga

SEQ ID NO: 80254 - DNA, 1249 bp, Homo sapiens
atgagctcttatttcgtcaactcactgttctccaaatacaaaaccggggagtccctgcgccccaattattatgactgcggcttcgcccaggacctgggcggccgacccaccgtggtgtacggtcccagcagcggcggcagcttccagcacccgtcgcaaatccaggagttctaccacgggccgtcgtcgctgtccacggctccctaccagcagaacccgtgcgccgtggcgtgccacggggaccccggcaatttctacggctacgacccgctgcaacgccagagcctattcggtgcgcaggatccagacctggtgcagtacgcagactgcaagcttgccgccgccagcggcctgggcgaggaggccgagggctccgagcagagcccgtcgcccacacagctcttcccctggatgcgcccgcaagcagccgccggacgcaggcgaggccgacagacctacagccgctaccagaccctggagctggagaaggagttcctatttaatccctatctgactcgtaagcggcgaatcgaggtatcgcacgccctgggactgacagagagacaggtcaaaatctggttccagaaccggaggatgaagtggaaaaaagagaacaacaaagacaagttccccagcagcaaatgcgagcaggaggagctggagaaacagaagctggagcgggccccagaggcggcggacgagggcgacgcgcagaagggcgacaagaaaaacggcagcgtccaaggcccgtgggctggatcctgtgccctaggagcacctaggaagacttgctccatctccgcccgcatatctggggcaccaagagagacagagtcgtgagccaggctcgcctcattcctcgtcttgggagaaccggaccaacttccccaaaaggccttgccgtgcagaattggcctggtttaataaagaacagacctgccccaagcacccacccacccagttgcgtgcattcaatccctgcgtttgtctctcgctcggtaacgggctgaagaggatgggtggagggtgacacggatcgccccgaggttatttattttcccttccactcaatctcttcctccccaaatctcgcctgcaagcggcctccagcccgcgggagtcggcagcggcccttgagcccccagccccaatccacagggctcggctttcccattcattattgatcatattttataaatccaacgccacacaattttttccacattaccgggagccgtggggagacggc

SEQ ID NO: 80255 - DNA, 964 bp, Homo sapiens
atgagctcttatttcgtcaactcactgttctccaaatacaaaaccggggagtccctgcgccccaattattatgactgcggcttcgcccaggacctgggcggccgacccaccgtggtgtacggtcccagcagcggcggcagcttccagcacccgtcgcaaatccaggagttctaccacgggccgtcgtcgctgtccacggctccctaccagcagaacccgtgcgccgtggcgtgccacggggaccccggcaatttctacggctacgacccgctgcaacgccagagcctattcggtgcgcaggatccagacctggtgcagtacgcagactgcaagcttgccgccgccagcggcctgggcgaggaggccgagggctccgagcagagcccgtcgcccacacagctcttcccctggatgcgcccgcaagcagccgccggacgcaggcgaggccgacagacctacagccgctaccagaccctggagctggagaaggagttcctatttaatccctatctgactcgtaagcggcgaatcgaggtatcgcacgccctgggactgacagagagacaggtcaaaatctggttccagaaccggaggatgaagtggaaaaaagagaacaacaaagacaatttcccctcccaatcctctctcccctctgcaaccccccagctcgctggctttctctctggcttctctcttttcctcctccacccaccccctttggtttgacaattttgtcttaagtgtttctcaaaagaggttactttagttagcatgcgcgctgtgggcaattgttacaagtgttcttaggtttactgtgaagagaatgtattctgtatccgtgaattgctttatgggggggagggagggctaattatatattttgttgttcctctatactttgttctgttgtctgcgcctgaaaagggcggaagagttacaataaagtttacaagcgagaacccga

SEQ ID NO: 80256 - DNA, 405 bp, Homo sapiens
cttccaaacagatacagtcagtttatatacactaatagatacagtgctccccacctcaaaaaaaatagacgaagctattttgaagatgatcccctgaggagctggcatgacttagagcccatagttgccctgtgctacttccatgatgttaaatttcaaagcagagattacattttaattataatagcatgctttagagggattcacagcttaaaaaaacaactggaagcaaattgtacatgcaagtgattaaatgtcttatccatgtgatttccattctcaaagcttgatttataacacttggattcctaaaatctgttcttgcctttttctttccaccatattatgagttatctcagactgctcatgataaatgaggtgactaccactgatttttacaatgac

SEQ ID NO: 80257 - DNA, 331 bp, Homo sapiens
aattttaaaaattatctaggcgtgatggtgcctttggtcccagctccttgggaggccgacgggaaaagatcgattgagcctgggaggttaaggctgcagtgagctatggttgtgccactgttttccagcctgggtgatgaagcaagaccctgtctctcaaaaaaagcaaaaggtaaaactggatacccaccaaaattcccactaaaggggactgttttaaattaattatgtcaaggcgcctcacaagagaatatgctgcagccatgaaaactaaagacaagagtctctagttactcatatgttaagatgcctatggcatgctattggggga

SEQ ID NO: 80258 - DNA, 1157 bp, Homo sapiens
agttctgcaggttttacaggaagcatggtgctggcatctccttggtttctagggaagcctcaggaagcttacaatcatgacaaggcaaaggaggagcgatgttttcactccagaatgcaaattcaaggaatctgtgtttgaaaactactatgtgatctattcttccacactgtaccgccagcaagaatcaggccgagcttggtttctgggactcaataaagaaggtcaaattatgaaggggaacagagtgaagaaaaccaagccctcatcacattttgtaccgaaacctattgaagtgtgtatgtacagagaaccatcgctacatgaaattggagaaaaacaagggcgttcaaggaaaagttctggaacaccaaccatgaatggaggcaaagttgtgaatcaagattcaacatagctgagaactctccccttcttccctctctcatcccttccccttcccttccttcccatttacccatttccttccagtaaatccacccaaggagaggaaaataaaatgacaacgcaagacctagtggctaagattctgcactcaaaatcttcctttgtgtaggacaagaaaattgaaccaaagcttgcttgttgcaatgtggtagaaaattcacgtgcacaaagattagcacacttaaaagcaaaggaaaaaataaatcagaactccataaatattaaactaaactgtattgttattagtagaaggctaattgtaatgaagacattaataaagatgaaataaacttattactttaaaggaaaggatttggagaattgaactcacaaactgatgttatatactcaatagcttaaactcatgataatgctgcgatgtgtggttttgcttgattttgtattttatttgggcatctggaattgacacaccattacattctgtttgcaggattttttttgtaaccatgaaattgaacatttccaaattataaactatgttaatacctataaaatatatagccaggaaccatttatcatcaagaaaagtgtaagaaattatttttgagatgtaatttaagattgttttatgtaaaaggaaaatcttgtatggcatcgaatagccttaatgaatttaattctttcacaaaaatgatttcaaattatcctagagtataacatttttatcaaag

SEQ ID NO: 80259 - DNA, 765 bp, Homo sapiens
agttctgcaggttttacaggaagcatggtgctggcatctccttggtttctagggaagcctcaggaagcttacaatcatgacaaggcaaaggaggagcgatgttttcactccagaatgcaaattcaaggaatctgtgtttgaaaactactatgtgatctattcttccacactgtaccgccagcaagaatcaggccgagcttggtttctgggactcaataaagaaggtcaaattatgaaggggaacagagtgaagaaaaccaagccctcatcacattttgtaccgaaacctattgaagtgtgtatgtacagagaaccatcgctacatgaaattggagaaaaacaagggcgttcaaggaaaagttctggaacaccaaccatgaatggaggcaaagttgtgaatcaagattcaacatagctgagaactctccccttcttccctctctcatcccttccccttcccttccttcccatttacccatttccttccagtaaatccacccaaggagaggaaaataaaatgacaacgcaagacctagtggctaagattctgcactcaaaatcttcctttgtgtaggacaagaaaattgaaccaaagcttgcttgttgcaatgtggtagaaaattcacgtgcacaaagattagcacacttaaaagcaaaggaaaaaataaatcagaactccataaatattaaactaaactgtattgttattagtagaaggctaattgtaatgaagacattaataaagatgaaataaacttattactt

SEQ ID NO: 80260 - DNA, 847 bp, Homo sapiens
  misc_feature (779)..(779): n is a, c, g, or t
  misc_feature (785)..(785): n is a, c, g, or t
  misc_feature (824)..(824): n is a, c, g, or t
tgtctagatttttcttggcctttctgagtacgtattcctttcttctgagtgtggtgaggaccctctctggaaagggaatcttattacctacagttaaacaaggatgttttcactccagaatgcaaattcaaggaatctgtgtttgaaaactactatgtgatctattcttccacactgtaccgccagcaagaatcaggccgagcttggtttctgggactcaataaagaaggtcaaattatgaaggggaacagagtgaagaaaaccaagccctcatcacattttgtaccgaaacctattgaagtgtgtatgtacagagaaccatcgctacatgaaattggagaaaaacaagggcgttcaaggaaaagttctggaacaccaaccatgaatggaggcaaagttgtgaatcaagattcaacatagctgagaactctccccttcttccctctctcatcccttccccttcccttccttcccatttacccatttccttccagtaaatccacccaaggagaggaaaataaaatgacaacgcaagacctagtggctaagattctgcactcaaaatcttcctttgtgtaggacaagaaaattgaaccaaagcttgcttgttgcaatgtggtagaaaattcacgtgcacaaagattagcacacttaaaagcaaaggaaaaaataaatcagaactccataaatattaaactaaactgtattgttattagtagaaggctaattgtaatgaagacattaataaagatgaaataaacttattacttaaaaaaatncggctngttggcctcagcgggggactttgcggcccttcccttcantgaggctaataatcaccatggtc

SEQ ID NO: 80261 - DNA, 516 bp, Homo sapiens
caaacacacttgtctgccccccgcactcatggaatatgaattttctgtgtgtatgtacagagaaccatcgctacatgaaattggagaaaaacaagggcgttcaaggaaaagttctggaacaccaaccatgaatggaggcaaagttgtgaatcaagattcaacatagctgagaactctccccttcttccctctctcatcccttccccttcccttccttcccatttacccatttccttccagtaaatccacccaaggagaggaaaataaaatgacaacgcaagacctagtggctaagattctgcactcaaaatcttcctttgtgtaggacaagaaaattgaaccaaagcttgcttgttgcaatgtggtagaaaattcacgtgcacaaagattagcacacttaaaagcaaaggaaaaaataaatcagaactccataaatattaaactaaactgtattgttattagtagaaggctaattgtaatgaagacattaataaagatgaaataaacttattactt

SEQ ID NO: 80262 - DNA, 727 bp, Homo sapiens
  misc_feature (373)..(373): n is a, c, g, or t
  misc_feature (379)..(379): n is a, c, g, or t
cggcccaggacatccccaagtcgcccaatttcaacggctcacccgactcccaaccgttactcaccccagagaggcgttctgcatcctttcgcgtactacgccggccgagaggtagagtaatttaataggcgctcgcaggccatatcagctcgctgtaagaccgtgcgacgcatctctcccgctgaaaccaacaaggttaaagtgtccgcggaaccgaaccgcccctccccgagtcgaccctatatcctaaggtacgttgataggaccagagaaccgtcggcgagtggtactggcaagaagcaagttcatttgacactaaaattattcaacaccccccccagaaaaaagccaaccttaaaaccacaaataacanaaaaanaaaaactctccccttcttccctctctcatcccttccccttcccttccttcccatttacccatttccttccagtaaatccacccaaggagaggaaaataaaatgacaacgcaagacctagtggctaagattctgcactcaaaatcttcctttgtgtaggacaagaaaattgaaccaaagcttgcttgttgcaatgtggtagaaaattcacgtgcacaaagattagcacacttaaaagcaaaggaaaaaataaatcagaactccataaatattaaactaaactgtattgttattagtagaaggctaattgtaatgaagacattaataaagatgaaataaacttattactt

SEQ ID NO: 80263 - DNA, 1527 bp, Homo sapiens
agcggatggaaatctgctgtgcatccagagagcaaagtgggatgatctgtcactacacctgcagcaccacgctcggaggacagctcctgcctgcagcttccagacccaggaagcctgaggggaaggaaggaagtacgggcgaaatcatcagattggcttcccagatttgggaatctgaagcgggcccacatcttccggccaacttccattgaacttcccagcactcgaaagggaccgaaatggagagcaaagaaccccagctcaaagggattgtgacaaggttattcagccagcagggatacttcctgcagatgcacccagatggtaccattgatgggaccaaggacgaaaacagcgactacactctcttcaatctaattcccgtgggcctgcgtgtagtggccatccaaggagtgaaggctagcctctatgtggccatgaatggtgaaggctatctctacagttcagatgttttcactccagaatgcaaattcaaggaatctgtgtttgaaaactactatgtgatctattcttccacactgtaccgccagcaagaatcaggccgagcttggtttctgggactcaataaagaaggtcaaattatgaaggggaacagagtgaagaaaaccaagccctcatcacattttgtaccgaaacctattgaagtgtgtatgtacagagaaccatcgctacatgaaattggagaaaaacaagggcgttcaaggaaaagttctggaacaccaaccatgaatggaggcaaagttgtgaatcaagattcaacatagctgagaactctccccttcttccctctctcatcccttccccttcccttccttcccatttacccatttccttccagtaaatccacccaaggagaggaaaataaaatgacaacgcaagacctagtggctaagattctgcactcaaaatcttcctttgtgtaggacaagaaaattgaaccaaagcttgcttgttgcaatgtggtagaaaattcacgtgcacaaagattagcacacttaaaagcaaaggaaaaaataaatcagaactccataaatattaaactaaactgtattgttattagtagaaggctaattgtaatgaagacattaataaagatgaaataaacttattactttaaaggaaaggatttggagaattgaactcacaaactgatgttatatactcaatagcttaaactcatgataatgctgcgatgtgtggttttgcttgattttgtattttatttgggcatctggaattgacacaccattacattctgtttgcaggattttttttgtaaccatgaaattgaacatttccaaattataaactatgttaatacctataaaatatatagccaggaaccatttatcatcaagaaaagtgtaagaaattatttttgagatgtaatttaagattgttttatgtaaaaggaaaatcttgtatggcatcgaatagccttaatgaatttaattctttcacaaaaatgatttcaaattatcctagagtataacatttttatcaaag

SEQ ID NO: 80264 - DNA, 2110 bp, Homo sapiens
  misc_feature (293)..(293): n is a, c, g, or t
ctaatcttcagaaccgcgggccgcagggagttaaattgctgccttcctctccttctctcgtgcggttggtggcttgttttctaaaggaacgttttattcactttttagtattttctaccgggggcgcgctacccgcctgggtccagactctgctttgtaaacgggttttctatgtatgtatgtgtaggtatactttggacaccttacaacgcttgcgcctctccaacagaggcacgtcttgttattttgggcatcgttcttccccttccacttggtaccccgaacgcagtgtngactaaactccccactgccccttggacgccgatcgccttggggtgcaagtttggggtgcaaacgtctacttcgcaagagggcctgggaccgccccgccccgccccccggccgccagaggttggggaagtttacatctggattttcacacattttgtcgccactgcccagactttgactaaccttgtgagcgccgggttttcgatactgcagcctcctcaaattttagcactgcctccccgcgactgccctttccctggccgcccaggtcctgccctcgccccggcggagcgcaagccggagggcgcagtagaggctggggcctgaggccctcgctgagcagctatggctgcggcgatagccagctccttgatccggcagaagcggcaggcgagggagtccaacagcgaccgagtgtcggcctccaagcgccgctccagccccagcaaagacgggcgctccctgtgcgagaggcacgtcctcggggtgttcagcaaagtgcgcttctgcagcggccgcaagaggccggtgaggcggagaccagaaccccagctcaaagggattgtgacaaggttattcagccagcagggatacttcctgcagatgcacccagatggtaccattgatgggaccaaggacgaaaacagcgactacactctcttcaatctaattcccgtgggcctgcgtgtagtggccatccaaggagtgaaggctagcctctatgtggccatgaatggtgaaggctatctctacagttcagatgttttcactccagaatgcaaattcaaggaatctgtgtttgaaaactactatgtgatctattcttccacactgtaccgccagcaagaatcaggccgagcttggtttctgggactcaataaagaaggtcaaattatgaaggggaacagagtgaagaaaaccaagccctcatcacattttgtaccgaaacctattgaagtgtgtatgtacagagaaccatcgctacatgaaattggagaaaaacaagggcgttcaaggaaaagttctggaacaccaaccatgaatggaggcaaagttgtgaatcaagattcaacatagctgagaactctccccttcttccctctctcatcccttccccttcccttccttcccatttacccatttccttccagtaaatccacccaaggagaggaaaataaaatgacaacgcaagacctagtggctaagattctgcactcaaaatcttcctttgtgtaggacaagaaaattgaaccaaagcttgcttgttgcaatgtggtagaaaattcacgtgcacaaagattagcacacttaaaagcaaaggaaaaaataaatcagaactccataaatattaaactaaactgtattgttattagtagaaggctaattgtaatgaagacattaataaagatgaaataaacttattactttaaaggaaaggatttggagaattgaactcacaaactgatgttatatactcaatagcttaaactcatgataatgctgcgatgtgtggttttgcttgattttgtattttatttgggcatctggaattgacacaccattacattctgtttgcaggattttttttgtaaccatgaaattgaacatttccaaattataaactatgttaatacctataaaatatatagccaggaaccatttatcatcaagaaaagtgtaagaaattatttttgagatgtaatttaagattgttttatgtaaaaggaaaatcttgtatggcatcgaatagccttaatgaatttaattctttcacaaaaatgatttcaaattatcctagagtataacatttttatcaaag

SEQ ID NO: 80265 - DNA, 1687 bp, Homo sapiens
agcggatggaaatctgctgtgcatccagagagcaaagtgggatgatctgtcactacacctgcagcaccacgctcggaggacagctcctgcctgcagcttccagacccaggtaaaaaaaaaaaaaaaaaaaatctgagcgggcactgtgcatgcatttcagtatcagatgcgcgtcgaacgtatcccctgtagaggcaatctgctgctgctcctaagtgtcctttggtggctgattgcagcttcaaggtttaagaaatcccatctttcaggaagcctgaggggaaggaaggaagtacgggcgaaatcatcagattggcttcccagatttgggaatctgaagcgggcccacatcttccggccaacttccattgaacttcccagcactcgaaagggaccgaaatggagagcaaagaaccccagctcaaagggattgtgacaaggttattcagccagcagggatacttcctgcagatgcacccagatggtaccattgatgggaccaaggacgaaaacagcgactacactctcttcaatctaattcccgtgggcctgcgtgtagtggccatccaaggagtgaaggctagcctctatgtggccatgaatggtgaaggctatctctacagttcagatgttttcactccagaatgcaaattcaaggaatctgtgtttgaaaactactatgtgatctattcttccacactgtaccgccagcaagaatcaggccgagcttggtttctgggactcaataaagaaggtcaaattatgaaggggaacagagtgaagaaaaccaagccctcatcacattttgtaccgaaacctattgaagtgtgtatgtacagagaaccatcgctacatgaaattggagaaaaacaagggcgttcaaggaaaagttctggaacaccaaccatgaatggaggcaaagttgtgaatcaagattcaacatagctgagaactctccccttcttccctctctcatcccttccccttcccttccttcccatttacccatttccttccagtaaatccacccaaggagaggaaaataaaatgacaacgcaagacctagtggctaagattctgcactcaaaatcttcctttgtgtaggacaagaaaattgaaccaaagcttgcttgttgcaatgtggtagaaaattcacgtgcacaaagattagcacacttaaaagcaaaggaaaaaataaatcagaactccataaatattaaactaaactgtattgttattagtagaaggctaattgtaatgaagacattaataaagatgaaataaacttattactttaaaggaaaggatttggagaattgaactcacaaactgatgttatatactcaatagcttaaactcatgataatgctgcgatgtgtggttttgcttgattttgtattttatttgggcatctggaattgacacaccattacattctgtttgcaggattttttttgtaaccatgaaattgaacatttccaaattataaactatgttaatacctataaaatatatagccaggaaccatttatcatcaagaaaagtgtaagaaattatttttgagatgtaatttaagattgttttatgtaaaaggaaaatcttgtatggcatcgaatagccttaatgaatttaattctttcacaaaaatgatttcaaattatcctagagtataacatttttatcaaag

SEQ ID NO: 80266 - DNA, 1135 bp, Homo sapiens
agcggatggaaatctgctgtgcatccagagagcaaagtgggatgatctgtcactacacctgcagcaccacgctcggaggacagctcctgcctgcagcttccagacccaggaagcctgaggggaaggaaggaagtacgggcgaaatcatcagattggcttcccagatttgggaatctgaagcgggcccacatcttccggccaacttccattgaacttcccagcactcgaaagggaccgaaatggagagcaaagaaccccagctcaaagggattgtgacaaggttattcagccagcagggatacttcctgcagatgcacccagatggtaccattgatgggaccaaggacgaaaacagcgactacactctcttcaatctaattcccgtgggcctgcgtgtagtggccatccaaggagtgaaggctagcctctatgtggccatgaatggtgaaggctatctctacagttcagatgttttcactccagaatgcaaattcaaggaatctgtgtttgaaaactactatgtgatctattcttccacactgtaccgccagcaagaatcaggccgagcttggtttctgggactcaataaagaaggtcaaattatgaaggggaacagagtgaagaaaaccaagccctcatcacattttgtaccgaaacctattgaagtgtgtatgtacagagaaccatcgctacatgaaattggagaaaaacaagggcgttcaaggaaaagttctggaacaccaaccatgaatggaggcaaagttgtgaatcaagattcaacatagctgagaactctccccttcttccctctctcatcccttccccttcccttccttcccatttacccatttccttccagtaaatccacccaaggagaggaaaataaaatgacaacgcaagacctagtggctaagattctgcactcaaaatcttcctttgtgtaggacaagaaaattgaaccaaagcttgcttgttgcaatgtggtagaaaattcacgtgcacaaagattagcacacttaaaagcaaaggaaaaaataaatcagaactccataaatattaaactaaactgtattgttattagtagaaggctaattgtaatgaagacattaataaagatgaaataaacttattactt

SEQ ID NO: 80267 - DNA, 1212 bp, Homo sapiens
  misc_feature (1144)..(1144): n is a, c, g, or t
  misc_feature (1150)..(1150): n is a, c, g, or t
  misc_feature (1189)..(1189): n is a, c, g, or t
agcggatggaaatctgctgtgcatccagagagcaaagtgggatgatctgtcactacacctgcagcaccacgctcggaggacagctcctgcctgcagcttccagacccaggaagcctgaggggaaggaaggaagtacgggcgaaatcatcagattggcttcccagatttgggaatctgaagcgggcccacatcttccggccaacttccattgaacttcccagcactcgaaagggaccgaaatggagagcaaagaaccccagctcaaagggattgtgacaaggttattcagccagcagggatacttcctgcagatgcacccagatggtaccattgatgggaccaaggacgaaaacagcgactacactctcttcaatctaattcccgtgggcctgcgtgtagtggccatccaaggagtgaaggctagcctctatgtggccatgaatggtgaaggctatctctacagttcagatgttttcactccagaatgcaaattcaaggaatctgtgtttgaaaactactatgtgatctattcttccacactgtaccgccagcaagaatcaggccgagcttggtttctgggactcaataaagaaggtcaaattatgaaggggaacagagtgaagaaaaccaagccctcatcacattttgtaccgaaacctattgaagtgtgtatgtacagagaaccatcgctacatgaaattggagaaaaacaagggcgttcaaggaaaagttctggaacaccaaccatgaatggaggcaaagttgtgaatcaagattcaacatagctgagaactctccccttcttccctctctcatcccttccccttcccttccttcccatttacccatttccttccagtaaatccacccaaggagaggaaaataaaatgacaacgcaagacctagtggctaagattctgcactcaaaatcttcctttgtgtaggacaagaaaattgaaccaaagcttgcttgttgcaatgtggtagaaaattcacgtgcacaaagattagcacacttaaaagcaaaggaaaaaataaatcagaactccataaatattaaactaaactgtattgttattagtagaaggctaattgtaatgaagacattaataaagatgaaataaacttattacttaaaaaaatncggctngttggcctcagcgggggactttgcggcccttcccttcantgaggctaataatcaccatggtc

SEQ ID NO: 80268 - DNA, 1377 bp, Homo sapiens
cgcgcttctccatgaagattcttgagctttctctgaagaaaggagtgcatatgctgcagtgtctctgtggaaggagcctgaggtccagcgacacgccaagtgaaccccagctcaaagggattgtgacaaggttattcagccagcagggatacttcctgcagatgcacccagatggtaccattgatgggaccaaggacgaaaacagcgactacactctcttcaatctaattcccgtgggcctgcgtgtagtggccatccaaggagtgaaggctagcctctatgtggccatgaatggtgaaggctatctctacagttcagatgttttcactccagaatgcaaattcaaggaatctgtgtttgaaaactactatgtgatctattcttccacactgtaccgccagcaagaatcaggccgagcttggtttctgggactcaataaagaaggtcaaattatgaaggggaacagagtgaagaaaaccaagccctcatcacattttgtaccgaaacctattgaagtgtgtatgtacagagaaccatcgctacatgaaattggagaaaaacaagggcgttcaaggaaaagttctggaacaccaaccatgaatggaggcaaagttgtgaatcaagattcaacatagctgagaactctccccttcttccctctctcatcccttccccttcccttccttcccatttacccatttccttccagtaaatccacccaaggagaggaaaataaaatgacaacgcaagacctagtggctaagattctgcactcaaaatcttcctttgtgtaggacaagaaaattgaaccaaagcttgcttgttgcaatgtggtagaaaattcacgtgcacaaagattagcacacttaaaagcaaaggaaaaaataaatcagaactccataaatattaaactaaactgtattgttattagtagaaggctaattgtaatgaagacattaataaagatgaaataaacttattactttaaaggaaaggatttggagaattgaactcacaaactgatgttatatactcaatagcttaaactcatgataatgctgcgatgtgtggttttgcttgattttgtattttatttgggcatctggaattgacacaccattacattctgtttgcaggattttttttgtaaccatgaaattgaacatttccaaattataaactatgttaatacctataaaatatatagccaggaaccatttatcatcaagaaaagtgtaagaaattatttttgagatgtaatttaagattgttttatgtaaaaggaaaatcttgtatggcatcgaatagccttaatgaatttaattctttcacaaaaatgatttcaaattatcctagagtataacatttttatcaaag

SEQ ID NO: 80269 - DNA, 1162 bp, Homo sapiens
tgtctagatttttcttggcctttctgagtacgtattcctttcttctgagtgtggtgaggaccctctctggaaagggaatcttattacctacagttaaacaaggatgttttcactccagaatgcaaattcaaggaatctgtgtttgaaaactactatgtgatctattcttccacactgtaccgccagcaagaatcaggccgagcttggtttctgggactcaataaagaaggtcaaattatgaaggggaacagagtgaagaaaaccaagccctcatcacattttgtaccgaaacctattgaagtgtgtatgtacagagaaccatcgctacatgaaattggagaaaaacaagggcgttcaaggaaaagttctggaacaccaaccatgaatggaggcaaagttgtgaatcaagattcaacatagctgagaactctccccttcttccctctctcatcccttccccttcccttccttcccatttacccatttccttccagtaaatccacccaaggagaggaaaataaaatgacaacgcaagacctagtggctaagattctgcactcaaaatcttcctttgtgtaggacaagaaaattgaaccaaagcttgcttgttgcaatgtggtagaaaattcacgtgcacaaagattagcacacttaaaagcaaaggaaaaaataaatcagaactccataaatattaaactaaactgtattgttattagtagaaggctaattgtaatgaagacattaataaagatgaaataaacttattactttaaaggaaaggatttggagaattgaactcacaaactgatgttatatactcaatagcttaaactcatgataatgctgcgatgtgtggttttgcttgattttgtattttatttgggcatctggaattgacacaccattacattctgtttgcaggattttttttgtaaccatgaaattgaacatttccaaattataaactatgttaatacctataaaatatatagccaggaaccatttatcatcaagaaaagtgtaagaaattatttttgagatgtaatttaagattgttttatgtaaaaggaaaatcttgtatggcatcgaatagccttaatgaatttaattctttcacaaaaatgatttcaaattatcctagagtataacatttttatcaaag

SEQ ID NO: 80270 - DNA, 1114 bp, Homo sapiens
cgtacgcaatattcaattttaaattggtaatatatatcccaaaagtggaatctagatgttttcactccagaatgcaaattcaaggaatctgtgtttgaaaactactatgtgatctattcttccacactgtaccgccagcaagaatcaggccgagcttggtttctgggactcaataaagaaggtcaaattatgaaggggaacagagtgaagaaaaccaagccctcatcacattttgtaccgaaacctattgaagtgtgtatgtacagagaaccatcgctacatgaaattggagaaaaacaagggcgttcaaggaaaagttctggaacaccaaccatgaatggaggcaaagttgtgaatcaagattcaacatagctgagaactctccccttcttccctctctcatcccttccccttcccttccttcccatttacccatttccttccagtaaatccacccaaggagaggaaaataaaatgacaacgcaagacctagtggctaagattctgcactcaaaatcttcctttgtgtaggacaagaaaattgaaccaaagcttgcttgttgcaatgtggtagaaaattcacgtgcacaaagattagcacacttaaaagcaaaggaaaaaataaatcagaactccataaatattaaactaaactgtattgttattagtagaaggctaattgtaatgaagacattaataaagatgaaataaacttattactttaaaggaaaggatttggagaattgaactcacaaactgatgttatatactcaatagcttaaactcatgataatgctgcgatgtgtggttttgcttgattttgtattttatttgggcatctggaattgacacaccattacattctgtttgcaggattttttttgtaaccatgaaattgaacatttccaaattataaactatgttaatacctataaaatatatagccaggaaccatttatcatcaagaaaagtgtaagaaattatttttgagatgtaatttaagattgttttatgtaaaaggaaaatcttgtatggcatcgaatagccttaatgaatttaattctttcacaaaaatgatttcaaattatcctagagtataacatttttatcaaag

SEQ ID NO: 80271 - DNA, 1108 bp, Homo sapiens
  misc_feature (16)..(16): n is a, c, g, or t
  misc_feature (19)..(19): n is a, c, g, or t
gccccccccccccccnccncccccccggaagtcgagactagctctcacgatgttttcactccagaatgcaaattcaaggaatctgtgtttgaaaactactatgtgatctattcttccacactgtaccgccagcaagaatcaggccgagcttggtttctgggactcaataaagaaggtcaaattatgaaggggaacagagtgaagaaaaccaagccctcatcacattttgtaccgaaacctattgaagtgtgtatgtacagagaaccatcgctacatgaaattggagaaaaacaagggcgttcaaggaaaagttctggaacaccaaccatgaatggaggcaaagttgtgaatcaagattcaacatagctgagaactctccccttcttccctctctcatcccttccccttcccttccttcccatttacccatttccttccagtaaatccacccaaggagaggaaaataaaatgacaacgcaagacctagtggctaagattctgcactcaaaatcttcctttgtgtaggacaagaaaattgaaccaaagcttgcttgttgcaatgtggtagaaaattcacgtgcacaaagattagcacacttaaaagcaaaggaaaaaataaatcagaactccataaatattaaactaaactgtattgttattagtagaaggctaattgtaatgaagacattaataaagatgaaataaacttattactttaaaggaaaggatttggagaattgaactcacaaactgatgttatatactcaatagcttaaactcatgataatgctgcgatgtgtggttttgcttgattttgtattttatttgggcatctggaattgacacaccattacattctgtttgcaggattttttttgtaaccatgaaattgaacatttccaaattataaactatgttaatacctataaaatatatagccaggaaccatttatcatcaagaaaagtgtaagaaattatttttgagatgtaatttaagattgttttatgtaaaaggaaaatcttgtatggcatcgaatagccttaatgaatttaattctttcacaaaaatgatttcaaattatcctagagtataacatttttatcaaag

SEQ ID NO: 80272 - DNA, 376 bp, Homo sapiens
agctttgggtgggaggggctgagctttgcggggaccttagtttgacagggacagggatggacgaattacggtggcggagctgcgggaggcggtaccggctctgctcggggagccgctggcgggtcctgagctggacgagatgctccgagaagtggacctcaatggggatggcaccgtagactttgacggtgagtctccttcccggaaaaccctcccgtgcttccagggcctaggctgagcccagcacctcctgggatccctgacgtggactgacccaagccctgcccttctctcccgcagagtttgtgatgatgctctcccgccactgaggctccaggagggaatatctgttgcccctgcggccccagacaccagc

SEQ ID NO: 80273 - DNA, 309 bp, Homo sapiens
agctttgggtgggaggggctgagctttgcggggaccttagtttgacagggacagggatggacgaattacggtggcggagctgcgggaggcggtaccggctctgctcggggagccgctggcgggtcctgagctggacgagatgctccgagaagtggacctcaatggggatggcaccgtagactttgacggatgtttgtgatagatgctctccctgcccacttgaggctccatggagggggaatatcttgttgccccttgcgggcccccagaacaccatgccatgacccatggcttgcaggccttcccccc

SEQ ID NO: 80274 - DNA, 2293 bp, Homo sapiens
tttttttttattagcactatcctggtgtgaagtcatatctcatcatggagatttgcttttttaagttcaatattgtgtttctaagattcatttgtgttgtcacatgtaagctgttcattccttttcactgtgatataatactgtgttaaggtagcccataatttattcattattaatatttattcattgttactattttagttactattcatatattaatatatgtatatatatcaataatttattatatttataataatttatatattattcattgttctattgatggatgattcagtgttcaattttttgcttctatgaacagaatattcttgtacatgtttcctggcacacatgtgcaaaagtttatctagactgtgtataaatctcagagtggtattgctggtccatagggtatacaatactcaagtttacgagataatgccacccatgttttccaaatgtctctatcagtttgctttcccattagtgtataagacttttgtctctcaatgtcccacttggaactatcaggcccctttttgccaatttcatggatttctcaatttgcacttccctggaggctaaacatatcttcatatgtttattagtcctctgattgctcctttttaaaatgcttatcattgtgtcttttgcccattttttaaaatttgctcatttctcttattgatatgtgtagattattctacacattaatattttatcagttatatatgttacaggcatctagtttgtttttttcctttgtggtgttttttcgtaaacagaagttgttgattttaatgcagttcctcattaatgctataccttatatttactctgtcttaaagccacgtttagatggatagccatctcattcttgtagccaagcatgtttattgtaatttttcttccatctctgaaataatttgcttgtcagactctatagggattattcctctgtatgtggtactttaaaaaaaaaactttaaacatgtcaaataatggaaaagattggagaaaatatcataaggtgattcatacttaaggccatgccttatagatagaatacatacttaaatttgattggtgaaatattctgcagctcttctagatggcaggtgatagtaaatacacaaaaattgtggttctaccaatagcatattcattccttctataacaaagcttatattaatgagagaacagaagatgaaattaaaacagactttattatctcttaaaaagccatgagacttaacagaagttaaaagcgtgtttttttaattcaggaagaggatcacctagcccgggtagaagaggcaatcacccgtatgcttgtgtgtgccctgaaaactgcagagaatccacaaaataccagagcctggttaaaccccactgaggttgaggaaacgtcccatgcagtcaactgttgctacttaaatgcagctgtttctgcattttttgatcgctgcagaacatctgaggtagtagaaatccaagcactgagaacagatggagagcacatgaaaaaggaagaattaaatgtgtgcaaccacatggaggtgggccaaacaggtagccagaacttgaccacaggaacagacaaaccggaggcagcaagtccctttggccctgatctggtccctgtagcacagaggtccgaagaaccgccttcagaaagaggaggcatatttggaagtgatgggaaagactttgtggacaaggatggagaacactttggaaaattgcattgtgccaagagacaacaaataatgagcaacagtgaaaatgcaattgaggaacagattgcctcaaatactactacgactcctcaaacattcatttctacggatgacttgctggactgcttggtgaatccacaagtaaccaggatagtggcacaacttttgatacaaggaagaagtttatgattcaagtggaagatgacttttaaaataatattttttaaatatatatttttaagtagtatgactaaaataaagatgaaccagcaaaaggtcagtttgcacatttgtaaatgtatttatccttaccgaattacatgtcagtctgttgccaccttctttcatgcacattcctctttggccaaactggctgctctttgtttgtaagcttttgttcctctctcatcccatacttttagcctgtgtcaaatgtaagtcccaagtatttccagcaggaagtaatgtcttcctcagcctcaaccagggaccaaccggctgcttacttttgcaaataaaattttactagaacacggccatgccattcattt

SEQ ID NO: 80275 - DNA, 1968 bp, Homo sapiens
gtttcggtaggagccgggcgggagtcgccggggcttcttcctgtggtgcagcttcgggtctcggagtttggcccctactctgaccccaccccagctccgctccgccttgggttccggcagaacccgccttgcggtagccatggcagcaggctccgaggcgaccactcctgtgatcgttgcggctggggctggaggggaggaaggtgaacatgtcaaaccttttaagccagagaaagcaaaagaaattatcatgtctttacaacaacctgcaatcttctgtaacatggtgtttgattggccagcacgacactggaatgctaaatacctttcgcaggtccttcatggcaagcagatacgattcagaatggggatgaaaagcatgagcacagttcctcagtttgaaactacatgtaattacgtagaagctacactcgaagagtttctgacctggaactgtgaccagtctagtatttctggaccatttagagattatgaccattccaagttctgggcttatgctgactataaatattttgtcagtctatttgaagacaagacagatcttttccaggatgtgaaatggtctgacttcgggtttcctggaagaaatggacaggaaagtacattgtggattggctccttgggagcccacacaccctgtcatctggactcctatggttgtaacttggtattccaggtacaaggaaggaaacgatggcatctctttcctcctgaagatactcctttcctttatccaactagaatcccttatgaagaatctagtgtgttcagtaaaatcaatgttgtcaatcctgatttaaagcgttttcctcagttccggaaagctcaaagacatgcggttacactgagcccaggacaggttctctttgttcccagacactggtggcattacgtagaatccattgatcctgtcactgtcagtataaactcatggattgaactggaagaggatcacctagcccgggtagaagaggcaatcacccgtatgcttgtgtgtgccctgaaaactgcagagaatccacaaaataccagagcctggttaaaccccactgaggttgaggaaacgtcccatgcagtcaactgttgctacttaaatgcagctgtttctgcattttttgatcgctgcagaacatctgaggtagtagaaatccaagcactgagaacagatggagagcacatgaaaaaggaagaattaaatgtgtgcaaccacatggaggtgggccaaacaggtagccagaacttgaccacaggaacagacaaaccggaggcagcaagtccctttggccctgatctggtccctgtagcacagaggtccgaagaaccgccttcagaaagaggaggcatatttggaagtgatgggaaagactttgtggacaaggatggagaacactttggaaaattgcattgtgccaagagacaacaaataatgagcaacagtgaaaatgcaattgaggaacagattgcctcaaatactactacgactcctcaaacattcatttctacggatgacttgctggactgcttggtgaatccacaagtaaccaggatagtggcacaacttttgatacaaggaagaagtttatgattcaagtggaagatgacttttaaaataatattttttaaatatatatttttaagtagtatgactaaaataaagatgaaccagcaaaaggtcagtttgcacatttgtaaatgtatttatccttaccgaattacatgtcagtctgttgccaccttctttcatgcacattcctctttggccaaactggctgctctttgtttgtaagcttttgttcctctctcatcccatacttttagcctgtgtcaaatgtaagtcccaagtatttccagcaggaagtaatgtcttcctcagcctcaaccagggaccaaccggctgcttacttttgcaaataaaattttactagaacacggccatgccattcattt

SEQ ID NO: 80276 - DNA, 2050 bp, Homo sapiens
gtttcggtaggagccgggcgggagtcgccggggcttcttcctgtggtgcagcttcgggtctcggagtttggcccctactctgaccccaccccagctccgctccgccttgggttccggcagaacccgccttgcggtagccatggcagcaggctccgaggcgaccactcctgtgatcgttgcggctggggctggaggggaggaagaaggctacccagttatatctacccaagtatgaaccattttgggaataatcaaagccatgtgatctattggctctaatgtaaggtgaacatgtcaaaccttttaagccagagaaagcaaaagaaattatcatgtctttacaacaacctgcaatcttctgtaacatggtgtttgattggccagcacgacactggaatgctaaatacctttcgcaggtccttcatggcaagcagatacgattcagaatggggatgaaaagcatgagcacagttcctcagtttgaaactacatgtaattacgtagaagctacactcgaagagtttctgacctggaactgtgaccagtctagtatttctggaccatttagagattatgaccattccaagttctgggcttatgctgactataaatattttgtcagtctatttgaagacaagacagatcttttccaggatgtgaaatggtctgacttcgggtttcctggaagaaatggacaggaaagtacattgtggattggctccttgggagcccacacaccctgtcatctggactcctatggttgtaacttggtattccaggtacaaggaaggaaacgatggcatctctttcctcctgaagatactcctttcctttatccaactagaatcccttatgaagaatctagtgtgttcagtaaaatcaatgttgtcaatcctgatttaaagcgttttcctcagttccggaaagctcaaagacatgcggttacactgagcccaggacaggttctctttgttcccagacactggtggcattacgtagaatccattgatcctgtcactgtcagtataaactcatggattgaactggaagaggatcacctagcccgggtagaagaggcaatcacccgtatgcttgtgtgtgccctgaaaactgcagagaatccacaaaataccagagcctggttaaaccccactgaggttgaggaaacgtcccatgcagtcaactgttgctacttaaatgcagctgtttctgcattttttgatcgctgcagaacatctgaggtagtagaaatccaagcactgagaacagatggagagcacatgaaaaaggaagaattaaatgtgtgcaaccacatggaggtgggccaaacaggtagccagaacttgaccacaggaacagacaaaccggaggcagcaagtccctttggccctgatctggtccctgtagcacagaggtccgaagaaccgccttcagaaagaggaggcatatttggaagtgatgggaaagactttgtggacaaggatggagaacactttggaaaattgcattgtgccaagagacaacaaataatgagcaacagtgaaaatgcaattgaggaacagattgcctcaaatactactacgactcctcaaacattcatttctacggatgacttgctggactgcttggtgaatccacaagtaaccaggatagtggcacaacttttgatacaaggaagaagtttatgattcaagtggaagatgacttttaaaataatattttttaaatatatatttttaagtagtatgactaaaataaagatgaaccagcaaaaggtcagtttgcacatttgtaaatgtatttatccttaccgaattacatgtcagtctgttgccaccttctttcatgcacattcctctttggccaaactggctgctctttgtttgtaagcttttgttcctctctcatcccatacttttagcctgtgtcaaatgtaagtcccaagtatttccagcaggaagtaatgtcttcctcagcctcaaccagggaccaaccggctgcttacttttgcaaataaaattttactagaacacggccatgccattcattt

SEQ ID NO: 80277 - DNA, 2201 bp, Homo sapiens
  misc_feature (2200)..(2200): n is a, c, g, or t
gtttcggtaggagccgggcgggagtcgccggggcttcttcctgtggtgcagcttcgggtctcggagtttggcccctactctgaccccaccccagctccgctccgccttgggttccggcagaacccgccttgcggtagccatggcagcaggctccgaggcgaccactcctgtgatcgttgcggctggggctggaggggaggaaggtgaacatgtcaaaccttttaagccagagaaagcaaaagaaattatcatgtctttacaacaacctgcaatcttctgtaacatggtgtttgattggccagcacgacactggaatgctaaatacctttcgcaggtccttcatggcaagcagatacgattcagaatggggatgaaaagcatgagcacagttcctcagtttgaaactacatgtaattacgtagaagctacactcgaagagtttctgacctggaactgtgaccagtctagtatttctggaccatttagagattatgaccattccaagttctgggcttatgctgactataaatattttgtcagtctatttgaagacaagacagatcttttccaggatgtgaaatggtctgacttcgggtttcctggaagaaatggacaggaaagtacattgtggattggctccttgggagcccacacaccctgtcatctggactcctatggttgtaacttggtattccaggtacaaggaaggaaacgatggcatctctttcctcctgaagatactcctttcctttatccaactagaatcccttatgaagaatctagtgtgttcagtaaaatcaatgttgtcaatcctgatttaaagcgttttcctcagttccggaaagctcaaagacatgcggttacactgagcccaggacaggttctctttgttcccagacactggtggcattacgtagaatccattgatcctgtcactgtcagtataaactcatggattgaactggaagaggatcacctagcccgggtagaagaggcaatcacccgtatgcttgtgtgtgccctgaaaactgcagagaatccacaaaataccagagcctggttaaaccccactgaggttgaggaaacgtcccatgcagtcaactgttgctacttaaatgcagctgtttctgcattttttgatcgctgcagaacatctgaggtagtagaaatccaagcactgagaacagatggagagcacatgaaaaaggaagaattaaatgtgtgcaaccacatggaggtgggccaaacaggtagccagaacttgaccacaggaacagacaaaccggaggcagcaagtccctttggccctgatctggtccctgtagcacagaggtccgaagaaccgccttcagaaagaggaggcatatttggaagtgatgggaaagactttgtggacaaggatggagaacactttggaaaattgcattgtgccaagagacaacaaataatgagcaacagtgaaaatgcaattgaggaacagattgcctcaaatactactacgactcctcaaacattcatttctacggatgacttgctggactgcttggtgaatccacaagtaaccaggatagtggcacaacttttgatacaaggaagaagtttatgattcaagtggaagatgacttttaaaataatattttttaaatatatatttttaagtagtatgactaaaataaagatgaaccagcaaaaaaaaaaaaaaaaaaaaaaaaaaaacaaaaaaaaaaaaaacaaaaaaaaaaaaaaaaaaaaaaaaagagaggggggggcgcgccaaaaagtaccccccgggggggccccagatattacccacaccccgtatttgttagtcacacaaggaggcccaagagagggggggttataaaaaacagcaggagagacgaaggcgacggcgcgagacaacaagaagggggagcagagggagaaaaacgcgagcacgcggggaacctcggagaggagaaccccacacgccggggggggaggcacaaatggtgcgcagcaaacctccccaacaagggagaatataaaaccgccccacagaggaggacaatcaacatcaccccacacacagagggagacaaaaggggggaaacacacacgagccgcaaaaacgacgcggcgcagcaaaaaaagcatggccgccaagaggattcataccaccacaccaattattacacgggagggcgcacaacacggtggna

SEQ ID NO: 80278 - DNA, 1964 bp, Homo sapiens
agcggggtggatatgtggtactcgcgtaatatgtggcgtgaaactgaactcagcccaattctgatccggcttgtggttcctggcttaactactcacattgtggccagtacagtgtgacaagacataggcgtccgagggtagactcacatctctgcagatcgtggcggctggaggcatggagggcgaggaacggtggccaatgtacataccgtgaatctcgatgagatgcgctagatgaggatatcatgttgtgaacaacaacctgcaatcttctgtaacatggtgtttgattggccagcacgacactggaatgctaaatacctttcgcaggtccttcatggcaagcagatacgattcagaatggggatgaaaagcatgagcacagttcctcagtttgaaactacatgtaattacgtagaagctacactcgaagagtttctgacctggaactgtgaccagtctagtatttctggaccatttagagattatgaccattccaagttctgggcttatgctgactataaatattttgtcagtctatttgaagacaagacagatcttttccaggatgtgaaatggtctgacttcgggtttcctggaagaaatggacaggaaagtacattgtggattggctccttgggagcccacacaccctgtcatctggactcctatggttgtaacttggtattccaggtacaaggaaggaaacgatggcatctctttcctcctgaagatactcctttcctttatccaactagaatcccttatgaagaatctagtgtgttcagtaaaatcaatgttgtcaatcctgatttaaagcgttttcctcagttccggaaagctcaaagacatgcggttacactgagcccaggacaggttctctttgttcccagacactggtggcattacgtagaatccattgatcctgtcactgtcagtataaactcatggattgaactggaagaggatcacctagcccgggtagaagaggcaatcacccgtatgcttgtgtgtgccctgaaaactgcagagaatccacaaaataccagagcctggttaaaccccactgaggttgaggaaacgtcccatgcagtcaactgttgctacttaaatgcagctgtttctgcattttttgatcgctgcagaacatctgaggtagtagaaatccaagcactgagaacagatggagagcacatgaaaaaggaagaattaaatgtgtgcaaccacatggaggtgggccaaacaggtagccagaacttgaccacaggaacagacaaaccggaggcagcaagtccctttggccctgatctggtccctgtagcacagaggtccgaagaaccgccttcagaaagaggaggcatatttggaagtgatgggaaagactttgtggacaaggatggagaacactttggaaaattgcattgtgccaagagacaacaaataatgagcaacagtgaaaatgcaattgaggaacagattgcctcaaatactactacgactcctcaaacattcatttctacggatgacttgctggactgcttggtgaatccacaagtaaccaggatagtggcacaacttttgatacaaggaagaagtttatgattcaagtggaagatgacttttaaaataatattttttaaatatatatttttaagtagtatgactaaaataaagatgaaccagcaaaaggtcagtttgcacatttgtaaatgtatttatccttaccgaattacatgtcagtctgttgccaccttctttcatgcacattcctctttggccaaactggctgctctttgtttgtaagcttttgttcctctctcatcccatacttttagcctgtgtcaaatgtaagtcccaagtatttccagcaggaagtaatgtcttcctcagcctcaaccagggaccaaccggctgcttacttttgcaaataaaattttactagaacacggccatgccattcattt

SEQ ID NO: 80279 - DNA, 428 bp, Homo sapiens
ggtaggagccgggcgggagtcgccggggcttcttcctgtggtgcagcttcgggtctcggagtttggcccctactctgaccccaccccagctccgctccgccttgggttccggcagaacccgccttgcggtagccatggcagcaggctccgaggcgaccactcctgtgatcgttgcggctggggctggaggggaggaaggtaggtgccaggctgaggtccgaccctgagtacaaacccaatgccagttgactctcgtggcacccctcgtggggccgtttgccttagccccaacccaggtctctctggccttgcattagactatgaagaaaaatctatattttctagtgagcgtggcatttctcgaattgtggcatccagatttttgatcgtcgtagggtagcctacgagtgctgtttcacgcatggggt

SEQ ID NO: 80280 - DNA, 396 bp, Homo sapiens
tggtctcgaactccaggcttcaagtgatccgcctgccttggcctcccaaagtgctgggattacaggcgtgtaagccactgtgttcggccaatatttattgttttattgaagaaaacatcctgaaatgttaagaaatcttctaagaaatcttctcagaagattaaaagaataaatcttaaatacattcatatgtttagcaaacattagctttatcttttttggcttttttcttttaggagaaaaggatcaaatgtcttcttggttattacagctagatattctgtgtatgtttttcggtaaattgttcattacctatactaaaaggaaaaggatgtcttttctaaacaatagttgtaacatagctgataaacatattgacagtttagcttatcttag

SEQ ID NO: 80281 - DNA, 243 bp, Homo sapiens
gcaagaggattgaggatctggggccacggtctctgaggggaccaaggagacagcctcacagaggaggagagtctggagggctatatggagagagaggagagctgaaaacaaagaggaggaagaagggaaagaagaaggcacatggaagagaaggaggaagaggaaggaaggaaaaacaggagcggggcttgtcttcctctgagtggtagttcctgggatctgtccaatatactcagtctcatt

SEQ ID NO: 80282 - DNA, 274 bp, Homo sapiens
atattccacagatttcaaataggaagctcatacactttgttaatgccacaagtaaggaggaaaacaagaccaccacattcacaatcttaggccattgttagtggctatttggtaactttttccattccttctctaattcgctcagattgaacctaaaaggacaatatgcattactttatttccctcagaacaaatcagtataactacttagataaaacttaacttgtctctgcatcattatagtcttttctctatatcgtagccagcggtcttt

SEQ ID NO: 80283 - DNA, 592 bp, Homo sapiens
ggaatatttccatcattaatgtataagcgctccattgatccataatctctcctaccttggtattatcaaatgtctgatttttgccaacctagtattttaaaatggtgtctcattgtcatcttcatttacttttctctaattactaataggattgataattacattgtttatttggccatatacgtgtcctattctgtgaaatatctatgcccatttttctgtgttttatcttaattgatttgtagaaattctttgtatattctagaatatagataatgttgcaaaatatcttcttgcagtttgtggttcatcttttcaatttcttttcttttgaggaaaaaaaacttttagtgtggaatttatcactatgtttgtgtcttgtttgaatccttctcttctgcaagatactatgtggctaatgatttgcctgaggttttttgtattttctgtgtaagtaatgccaattgcatttctttccagttcttatccttctaattaatttattgttctttattactatgttaaataagaaagacctctaatgcaatatttaattgaagccagttatttaattgtaggggtcatccttctc

SEQ ID NO: 80284 - DNA, 717 bp, Homo sapiens
agcggataaatatatattaggtaggtagtcataacacatttgttttagacatttattcaatcatttgtcagtcttattaaatacctatcatgtgtcaagaaccaatgctaggttttgaatttaaaaatggaaagggctaaatagctacatgatcttggatgagagtacacacacacacacacacacatacatatatatatgtggtccttcataaatctaaaatgctgtaattattaggtaatctgcagagtgtattttttttcctcagtccctttgggtgtgactgctgtacacattttcatgttaccattgacatcttcagtttttcaatgtgatgtgtaatgcatataagcagcatatgtagtggttgaagagtacaggctgtctggagtggcacagcctgggattcagtttacatctctgtgcctcagtattctcagctctagcatgttgataataatttccttcttcctagggttttggtaggattaaatgagttaatacatgtaacacatttagaacaatgcatgacacgtaataagcatttagtaaaagctattattagtatacatgtgtgaaacaggaaacataatttttaaaagtatatcaggcagtagtgtaaaggtagatccctttgtatactggtaaatgccaaaaataactttaggtagcctctttttgttgggtagtgtcatcacttcctcactgggaagaaat

SEQ ID NO: 80285 - DNA, 412 bp, Homo sapiens
gtttccaaacaaaaaaataaataagtgaagtagaaagggtttgatgtttacatttttaattattttccaggccttatgtgtaaatattgtggtggtagaataagatccagatagcaatttattggaccaggtgtggtggcttatgcctgtaatcccagtgctttggaaagctgaggcaagaggatcacttaagaccaggagttcgagaccagcctgggcaacatagtaagactacatctctacaagaaagttttaaaattagccaggtatggtgtcatgtgcctgtagtaccagctactcaggaggctgaggcgggaggatcctttgaggccctgagttggaggctacagtgatacggtcacaccactgccttccagcctgagtgacagagtgagaccccatctcaaaaaaa

SEQ ID NO: 80286 - DNA, 415 bp, Homo sapiens
atgtcaccaacaccgacatgtttcacagaacctgaccagcacctgcaaggtctgacttaatatgatagggttgaagagaaaataaaaacttttaaatttaactccattagtaaaaagaagatcatgttataaaggataaggtaaaattatccataaatggttgtcagcaaaatttgacaatctcctctttaaagtacactgaaccaagaaaaatctgttcaagtatttagaagctcattttagaaagtattactacaaattaggcttctttatctccagtataccatacactatgtccatgatttgacaagttcttcctaattgcccaccttaattacagtaattatatatattatagtaaatgcaagtaacaaggttcatttgaaagataaattgtgaactacagggtttttaa

SEQ ID NO: 80287 - DNA, 355 bp, Homo sapiens
actgggccaaaaaaggcactaaaacttccttaatctctttcctggacctcttggtgcaggggtgcgagatgccatgttgtagggacgctcaagcagcattacagagttcacatggtaagatactgaggtctcttagtaacagtgacgtgagtgagccacgttggaaacagacccaccaggtccaatcaaaccttcagatgactttagctcaggcagtgtcttaactgcaaccacatgacggacactgtgccagaaccatccagctaaaccacatcccaaatcctgacctataaaaactgtaagaaactaatgcttgttgttttaagctgctaaattctcgcgttatttgctacgt

SEQ ID NO: 80288 - DNA, 586 bp, Homo sapiens
atctgtaaaaccaactgtgacctttatcctagagcttcaagaaagtggcttaataggggattacaatattcatgtttcatgtcatcccaggaatggtctttggtccttattctactgcgttctcactgtagggaaccactgtagattcctaccacaccactaattccagttctggaaatgaattcataaaaattattcaacagaagcaaaaaaaacctacatgtttgaagatgttcactgtgcttaaaaattggaaatgatacagcacatagaagatataaaatattagaggactaattgtgcaagttataggaaatctgtgtgtggtatattatttaaacattagaaatgataatgacaatgcctttgccacatagtggaagatgtctcttatatcatagtaaacagaaaaggtagaatataaatcagtatgtacctttggcaatcagttggcatgcatgttgaaggctgtttgcaaaagataattatgttaggataatgaggtataggtgccaagcacggtggctcacacctataatctagcacattgggaagccaaggcaagaggatcacttgaggccagaag

SEQ ID NO: 80289 - DNA, 642 bp, Homo sapiens
atgccagtaagttgtgtctgttaatcaagttgaagtactggtggcagttctcaagcttttctgtctgctgatgatttcacacttactgcttctaattaaatagtgtgtagtcgatttgaagaagccttgcttctctttgacccaccagttctgtaaaggtaaaagccttcttagagtgttgcccaggtaacaacacatacagagactgcttaatagctcatcatggaagtgtgtggaaaattttggaaatgttggtaaagaagttgctatagtaaataactacttggttggtaaaaagctgggctacttctggatagttgataaagagtttttgagatgagccgtggttctaaaataaatatgaattgtgtcattgccacacgattttcttcagttatgtaagctcctaatatgtaaatgttgtcctaccattttagaaggtgtcagcagtttcatgtgacctgttccacaatatagcacaccccaaacaccacgataagagttcaaatatggcatggcccagatgcctcacaccagttaaatgataaagctaatcatgtcagcacagtgtttctgttaaagttttttccccctcttttttgaggcatgttagttttcacgaattgaggttattagaatctt

SEQ ID NO: 80290 - DNA, 2518 bp, Homo sapiens
acaatttgcttctggaaacaggacagccggggccgtgttcctgcaacagcagaccaagcaccgcggcggacccaggcaagcacggaacaagctgagacggatgataatatggatacaaaatctattctagaagaacttcttctcaaaagatcacagcaaaagaagaaaatgtcaccaaataattacaaagaacggctttttgttttgaccaaaacaaacctttcctactatgaatatgacaaaatgaaaaggggcagcagaaaaggatccattgaaattaagaaaatcagatgtgtggagaaagtaaatctcgaggagcagacgcctgtagagagacagtacccatttcagattgtctataaagatgggcttctctatgtctatgcatcaaatgaagagagccgaagtcagtggttgaaagcattacaaaaagagataaggggtaacccccacctgctggtcaagtaccatagtgggttcttcgtggacgggaagttcctgtgttgccagcagagctgtaaagcagccccaggatgtaccctctgggaagcatatgctaatctgcatactgcagtcaatgaagagaaacacagagttcccaccttcccagacagagtgctgaagatacctcgggcagttcctgttctcaaaatggatgcaccatcttcaagtaccactctagcccaatatgacaacgaatcaaagaaaaactatggctcccagccaccatcttcaagtaccagtctagcgcaatatgacagcaactcaaagaaaatctatggctcccagccaaacttcaacatgcagtatattccaagggaagacttccctgactggtggcaagtaagaaaactgaaaagtagcagcagcagtgaagatgttgcaagcagtaaccaaaaagaaagaaatgtgaatcacaccacctcaaagatttcatgggaattccctgagtcaagttcatctgaagaagaggaaaacctggatgattatgactggtttgctggtaacatctccagatcacaatctgaacagttactcagacaaaagggaaaagaaggagcatttatggttagaaattcgagccaagtgggaatgtacacagtgtccttatttagtaaggctgtgaatgataaaaaaggaactgtcaaacattaccacgtgcatacaaatgctgagaacaaattatacctggcagaaaactactgttttgattccattccaaagcttattcattatcatcaacacaattcagcaggcatgatcacacggctccgccaccctgtgtcaacaaaggccaacaaggtccccgactctgtgtccctgggaaatggaatctgggaactgaaaagagaagagattaccttgttgaaggagctgggaagtggccagtttggagtggtccagctgggcaagtggaaggggcagtatgatgttgctgttaagatgatcaaggagggctccatgtcagaagatgaattctttcaggaggcccagactatgatgaaactcagccatcccaagctggttaaattctatggagtgtgttcaaaggaataccccatatacatagtgactgaatatataagcaatggctgcttgctgaattacctgaggagtcacggaaaaggacttgaaccttcccagctcttagaaatgtgctacgatgtctgtgaaggcatggccttcttggagagtcaccaattcatacaccgggacttggctgctcgtaactgcttggtggacagagatctctgtgtgaaagtatctgactttggaatgacaaggtatgttcttgatgaccagtatgtcagttcagtcggaacaaagtttccagtcaagtggtcagctccagaggtgtttcattacttcaaatacagcagcaagtcagacgtatgggcatttgggatcctgatgtgggaggtgttcagcctggggaagcagccctatgacttgtatgacaactcccaggtggttctgaaggtctcccagggccacaggctttaccggccccacctggcatcggacaccatctaccagatcatgtacagctgctggcacgagcttccagaaaagcgtcccacatttcagcaactcctgtcttccattgaaccacttcgggaaaaagacaagcattgaagaagaaattaggagtgctgataagaatgaatatagatgctggccagcattttcattcattttaaggaaagtagcaaggcataatgtaatttagctagtttttaatagtgttctctgtattgtctattatttagaaatgaacaaggcaggaaacaaaagattcccttgaaatttagatcaaattagtaattttgtttatgctgctcctgatataacactttccagcctatagcagaagcacattttcagactgcaatatagagactgtgttcatgtgtaaagactgagcagaactgaaaaattacttattggatattcattcttttctttatattgtcattgtcacaacaattaaatatactaccaagtacagaaatgtgga

SEQ ID NO: 80291 - DNA, 2611 bp, Homo sapiens
tggaggtgcccggatgaacatacatcacaatgtgaacagtggtcatctccagatagtagaatttcagatatgtttctttccatttttctgacagtttgaattttctgtaataattaattgacttttatacaatggaaacaacttttttgttttggaaaaaagaaagatgctgccgctaatcagtggatgaaagatgataatatggatacaaaatctattctagaagaacttcttctcaaaagatcacagcaaaagaagaaaatgtcaccaaataattacaaagaacggctttttgttttgaccaaaacaaacctttcctactatgaatatgacaaaatgaaaaggggcagcagaaaaggatccattgaaattaagaaaatcagatgtgtggagaaagtaaatctcgaggagcagacgcctgtagagagacagtacccatttcagattgtctataaagatgggcttctctatgtctatgcatcaaatgaagagagccgaagtcagtggttgaaagcattacaaaaagagataaggggtaacccccacctgctggtcaagtaccatagtgggttcttcgtggacgggaagttcctgtgttgccagcagagctgtaaagcagccccaggatgtaccctctgggaagcatatgctaatctgcatactgcagtcaatgaagagaaacacagagttcccaccttcccagacagagtgctgaagatacctcgggcagttcctgttctcaaaatggatgcaccatcttcaagtaccactctagcccaatatgacaacgaatcaaagaaaaactatggctcccagccaccatcttcaagtaccagtctagcgcaatatgacagcaactcaaagaaaatctatggctcccagccaaacttcaacatgcagtatattccaagggaagacttccctgactggtggcaagtaagaaaactgaaaagtagcagcagcagtgaagatgttgcaagcagtaaccaaaaagaaagaaatgtgaatcacaccacctcaaagatttcatgggaattccctgagtcaagttcatctgaagaagaggaaaacctggatgattatgactggtttgctggtaacatctccagatcacaatctgaacagttactcagacaaaagggaaaagaaggagcatttatggttagaaattcgagccaagtgggaatgtacacagtgtccttatttagtaaggctgtgaatgataaaaaaggaactgtcaaacattaccacgtgcatacaaatgctgagaacaaattatacctggcagaaaactactgttttgattccattccaaagcttattcattatcatcaacacaattcagcaggcatgatcacacggctccgccaccctgtgtcaacaaaggccaacaaggtccccgactctgtgtccctgggaaatggaatctgggaactgaaaagagaagagattaccttgttgaaggagctgggaagtggccagtttggagtggtccagctgggcaagtggaaggggcagtatgatgttgctgttaagatgatcaaggagggctccatgtcagaagatgaattctttcaggaggcccagactatgatgaaactcagccatcccaagctggttaaattctatggagtgtgttcaaaggaataccccatatacatagtgactgaatatataagcaatggctgcttgctgaattacctgaggagtcacggaaaaggacttgaaccttcccagctcttagaaatgtgctacgatgtctgtgaaggcatggccttcttggagagtcaccaattcatacaccgggacttggctgctcgtaactgcttggtggacagagatctctgtgtgaaagtatctgactttggaatgacaaggtatgttcttgatgaccagtatgtcagttcagtcggaacaaagtttccagtcaagtggtcagctccagaggtgtttcattacttcaaatacagcagcaagtcagacgtatgggcatttgggatcctgatgtgggaggtgttcagcctggggaagcagccctatgacttgtatgacaactcccaggtggttctgaaggtctcccagggccacaggctttaccggccccacctggcatcggacaccatctaccagatcatgtacagctgctggcacgagcttccagaaaagcgtcccacatttcagcaactcctgtcttccattgaaccacttcgggaaaaagacaagcattgaagaagaaattaggagtgctgataagaatgaatatagatgctggccagcattttcattcattttaaggaaagtagcaaggcataatgtaatttagctagtttttaatagtgttctctgtattgtctattatttagaaatgaacaaggcaggaaacaaaagattcccttgaaatttagatcaaattagtaattttgtttatgctgctcctgatataacactttccagcctatagcagaagcacattttcagactgcaatatagagactgtgttcatgtgtaaagactgagcagaactgaaaaattacttattggatattcattcttttctttatattgtcattgtcacaacaattaaatatactaccaagtacagaaatgtgga

SEQ ID NO: 80292 - DNA, 2510 bp, Homo sapiens
tgatggtgcctcaaagcagtaactttttgcttagagcttgagagtcaaagttaaggacccacatgtatacttcggctctagcgagtctaaggatgataatatggatacaaaatctattctagaagaacttcttctcaaaagatcacagcaaaagaagaaaatgtcaccaaataattacaaagaacggctttttgttttgaccaaaacaaacctttcctactatgaatatgacaaaatgaaaaggggcagcagaaaaggatccattgaaattaagaaaatcagatgtgtggagaaagtaaatctcgaggagcagacgcctgtagagagacagtacccatttcagattgtctataaagatgggcttctctatgtctatgcatcaaatgaagagagccgaagtcagtggttgaaagcattacaaaaagagataaggggtaacccccacctgctggtcaagtaccatagtgggttcttcgtggacgggaagttcctgtgttgccagcagagctgtaaagcagccccaggatgtaccctctgggaagcatatgctaatctgcatactgcagtcaatgaagagaaacacagagttcccaccttcccagacagagtgctgaagatacctcgggcagttcctgttctcaaaatggatgcaccatcttcaagtaccactctagcccaatatgacaacgaatcaaagaaaaactatggctcccagccaccatcttcaagtaccagtctagcgcaatatgacagcaactcaaagaaaatctatggctcccagccaaacttcaacatgcagtatattccaagggaagacttccctgactggtggcaagtaagaaaactgaaaagtagcagcagcagtgaagatgttgcaagcagtaaccaaaaagaaagaaatgtgaatcacaccacctcaaagatttcatgggaattccctgagtcaagttcatctgaagaagaggaaaacctggatgattatgactggtttgctggtaacatctccagatcacaatctgaacagttactcagacaaaagggaaaagaaggagcatttatggttagaaattcgagccaagtgggaatgtacacagtgtccttatttagtaaggctgtgaatgataaaaaaggaactgtcaaacattaccacgtgcatacaaatgctgagaacaaattatacctggcagaaaactactgttttgattccattccaaagcttattcattatcatcaacacaattcagcaggcatgatcacacggctccgccaccctgtgtcaacaaaggccaacaaggtccccgactctgtgtccctgggaaatggaatctgggaactgaaaagagaagagattaccttgttgaaggagctgggaagtggccagtttggagtggtccagctgggcaagtggaaggggcagtatgatgttgctgttaagatgatcaaggagggctccatgtcagaagatgaattctttcaggaggcccagactatgatgaaactcagccatcccaagctggttaaattctatggagtgtgttcaaaggaataccccatatacatagtgactgaatatataagcaatggctgcttgctgaattacctgaggagtcacggaaaaggacttgaaccttcccagctcttagaaatgtgctacgatgtctgtgaaggcatggccttcttggagagtcaccaattcatacaccgggacttggctgctcgtaactgcttggtggacagagatctctgtgtgaaagtatctgactttggaatgacaaggtatgttcttgatgaccagtatgtcagttcagtcggaacaaagtttccagtcaagtggtcagctccagaggtgtttcattacttcaaatacagcagcaagtcagacgtatgggcatttgggatcctgatgtgggaggtgttcagcctggggaagcagccctatgacttgtatgacaactcccaggtggttctgaaggtctcccagggccacaggctttaccggccccacctggcatcggacaccatctaccagatcatgtacagctgctggcacgagcttccagaaaagcgtcccacatttcagcaactcctgtcttccattgaaccacttcgggaaaaagacaagcattgaagaagaaattaggagtgctgataagaatgaatatagatgctggccagcattttcattcattttaaggaaagtagcaaggcataatgtaatttagctagtttttaatagtgttctctgtattgtctattatttagaaatgaacaaggcaggaaacaaaagattcccttgaaatttagatcaaattagtaattttgtttatgctgctcctgatataacactttccagcctatagcagaagcacattttcagactgcaatatagagactgtgttcatgtgtaaagactgagcagaactgaaaaattacttattggatattcattcttttctttatattgtcattgtcacaacaattaaatatactaccaagtacagaaatgtgga

SEQ ID NO: 80293 - DNA, 2479 bp, Homo sapiens
tgatggtgcctcaaagcagtaactttttgcttagagcttgagagtcaaagttaaggacccacatgtatacttcggctctagcgagtctaagaagaacttcttctcaaaagatcacagcaaaagaagaaaatgtcaccaaataattacaaagaacggctttttgttttgaccaaaacaaacctttcctactatgaatatgacaaaatgaaaaggggcagcagaaaaggatccattgaaattaagaaaatcagatgtgtggagaaagtaaatctcgaggagcagacgcctgtagagagacagtacccatttcagattgtctataaagatgggcttctctatgtctatgcatcaaatgaagagagccgaagtcagtggttgaaagcattacaaaaagagataaggggtaacccccacctgctggtcaagtaccatagtgggttcttcgtggacgggaagttcctgtgttgccagcagagctgtaaagcagccccaggatgtaccctctgggaagcatatgctaatctgcatactgcagtcaatgaagagaaacacagagttcccaccttcccagacagagtgctgaagatacctcgggcagttcctgttctcaaaatggatgcaccatcttcaagtaccactctagcccaatatgacaacgaatcaaagaaaaactatggctcccagccaccatcttcaagtaccagtctagcgcaatatgacagcaactcaaagaaaatctatggctcccagccaaacttcaacatgcagtatattccaagggaagacttccctgactggtggcaagtaagaaaactgaaaagtagcagcagcagtgaagatgttgcaagcagtaaccaaaaagaaagaaatgtgaatcacaccacctcaaagatttcatgggaattccctgagtcaagttcatctgaagaagaggaaaacctggatgattatgactggtttgctggtaacatctccagatcacaatctgaacagttactcagacaaaagggaaaagaaggagcatttatggttagaaattcgagccaagtgggaatgtacacagtgtccttatttagtaaggctgtgaatgataaaaaaggaactgtcaaacattaccacgtgcatacaaatgctgagaacaaattatacctggcagaaaactactgttttgattccattccaaagcttattcattatcatcaacacaattcagcaggcatgatcacacggctccgccaccctgtgtcaacaaaggccaacaaggtccccgactctgtgtccctgggaaatggaatctgggaactgaaaagagaagagattaccttgttgaaggagctgggaagtggccagtttggagtggtccagctgggcaagtggaaggggcagtatgatgttgctgttaagatgatcaaggagggctccatgtcagaagatgaattctttcaggaggcccagactatgatgaaactcagccatcccaagctggttaaattctatggagtgtgttcaaaggaataccccatatacatagtgactgaatatataagcaatggctgcttgctgaattacctgaggagtcacggaaaaggacttgaaccttcccagctcttagaaatgtgctacgatgtctgtgaaggcatggccttcttggagagtcaccaattcatacaccgggacttggctgctcgtaactgcttggtggacagagatctctgtgtgaaagtatctgactttggaatgacaaggtatgttcttgatgaccagtatgtcagttcagtcggaacaaagtttccagtcaagtggtcagctccagaggtgtttcattacttcaaatacagcagcaagtcagacgtatgggcatttgggatcctgatgtgggaggtgttcagcctggggaagcagccctatgacttgtatgacaactcccaggtggttctgaaggtctcccagggccacaggctttaccggccccacctggcatcggacaccatctaccagatcatgtacagctgctggcacgagcttccagaaaagcgtcccacatttcagcaactcctgtcttccattgaaccacttcgggaaaaagacaagcattgaagaagaaattaggagtgctgataagaatgaatatagatgctggccagcattttcattcattttaaggaaagtagcaaggcataatgtaatttagctagtttttaatagtgttctctgtattgtctattatttagaaatgaacaaggcaggaaacaaaagattcccttgaaatttagatcaaattagtaattttgtttatgctgctcctgatataacactttccagcctatagcagaagcacattttcagactgcaatatagagactgtgttcatgtgtaaagactgagcagaactgaaaaattacttattggatattcattcttttctttatattgtcattgtcacaacaattaaatatactaccaagtacagaaatgtgga

SEQ ID NO: 80294 - DNA, 2483 bp, Homo sapiens
tggaggtgcccggatgaacatacatcacaatgtgaacagtggtcatctccagatagtagaatttcagatatgtttctttccatttttctgacagtttgaattttctgtaataattaattgacttttatacaatggaaacaacttttttgttttggaaaaaagaaagatgctgccgctaatcagtggatgaaagatgataatatggatacaaaatctattctagaagaacttcttctcaaaagatcacagcaaaagaagaaaatgtcaccaaataattacaaagaacggctttttgttttgaccaaaacaaacctttcctactatgaatatgacaaaatgaaaaggggcagcagaaaaggatccattgaaattaagaaaatcagatgtgtggagaaagtaaatctcgaggagcagacgcctgtagagagacagtacccatttcagattgtctataaagatgggcttctctatgtctatgcatcaaatgaagagagccgaagtcagtggttgaaagcattacaaaaagagataaggggtaacccccacctgctggtcaagtaccatagtgggttcttcgtggacgggaagttcctgtgttgccagcagagctgtaaagcagccccaggatgtaccctctgggaagcatatgctaatctgcatactgcagtcaatgaagagaaacacagagttcccaccttcccagacagagtgctgaagatacctcgggcagttcctgttctcaaaatggatgcaccatcttcaagtaccactctagcccaatatgacaacgaatcaaagaaaaactatggctcccagccaccatcttcaagtaccagtctagcgcaatatgacagcaactcaaagaaaatctatggctcccagccaaacttcaacatgcagtatattccaagggaagacttccctgactggtggcaagtaagaaaactgaaaagtagcagcagcagtgaagatgttgcaagcagtaaccaaaaagaaagaaatgtgaatcacaccacctcaaagatttcatgggaattccctgagtcaagttcatctgaagaagaggaaaacctggatgattatgactggtttgctggtaacatctccagatcacaatctgaacagttactcagacaaaagggaaaagaaggagcatttatggttagaaattcgagccaagtgggaatgtacacagtgtccttatttagtaaggctgtgaagcatgatcacacggctccgccaccctgtgtcaacaaaggccaacaaggtccccgactctgtgtccctgggaaatggaatctgggaactgaaaagagaagagattaccttgttgaaggagctgggaagtggccagtttggagtggtccagctgggcaagtggaaggggcagtatgatgttgctgttaagatgatcaaggagggctccatgtcagaagatgaattctttcaggaggcccagactatgatgaaactcagccatcccaagctggttaaattctatggagtgtgttcaaaggaataccccatatacatagtgactgaatatataagcaatggctgcttgctgaattacctgaggagtcacggaaaaggacttgaaccttcccagctcttagaaatgtgctacgatgtctgtgaaggcatggccttcttggagagtcaccaattcatacaccgggacttggctgctcgtaactgcttggtggacagagatctctgtgtgaaagtatctgactttggaatgacaaggtatgttcttgatgaccagtatgtcagttcagtcggaacaaagtttccagtcaagtggtcagctccagaggtgtttcattacttcaaatacagcagcaagtcagacgtatgggcatttgggatcctgatgtgggaggtgttcagcctggggaagcagccctatgacttgtatgacaactcccaggtggttctgaaggtctcccagggccacaggctttaccggccccacctggcatcggacaccatctaccagatcatgtacagctgctggcacgagcttccagaaaagcgtcccacatttcagcaactcctgtcttccattgaaccacttcgggaaaaagacaagcattgaagaagaaattaggagtgctgataagaatgaatatagatgctggccagcattttcattcattttaaggaaagtagcaaggcataatgtaatttagctagtttttaatagtgttctctgtattgtctattatttagaaatgaacaaggcaggaaacaaaagattcccttgaaatttagatcaaattagtaattttgtttatgctgctcctgatataacactttccagcctatagcagaagcacattttcagactgcaatatagagactgtgttcatgtgtaaagactgagcagaactgaaaaattacttattggatattcattcttttctttatattgtcattgtcacaacaattaaatatactaccaagtacagaaatgtgga

SEQ ID NO: 80295 - DNA, 1029 bp, Homo sapiens
acaatttgcttctggaaacaggacagccggggccgtgttcctgcaacagcagaccaagcaccgcggcggacccaggcaagcacggaacaagctgagacggatgataatatggatacaaaatctattctagaagaacttcttctcaaaagatcacactcttagaaatgtgctacgatgtctgtgaaggcatggccttcttggagagtcaccaattcatacaccgggacttggctgctcgtaactgcttggtggacagagatctctgtgtgaaagtatctgactttggaatgacaaggtatgttcttgatgaccagtatgtcagttcagtcggaacaaagtttccagtcaagtggtcagctccagaggtgtttcattacttcaaatacagcagcaagtcagacgtatgggcatttgggatcctgatgtgggaggtgttcagcctggggaagcagccctatgacttgtatgacaactcccaggtggttctgaaggtctcccagggccacaggctttaccggccccacctggcatcggacaccatctaccagatcatgtacagctgctggcacgagcttccagaaaagcgtcccacatttcagcaactcctgtcttccattgaaccacttcgggaaaaagacaagcattgaagaagaaattaggagtgctgataagaatgaatatagatgctggccagcattttcattcattttaaggaaagtagcaaggcataatgtaatttagctagtttttaatagtgttctctgtattgtctattatttagaaatgaacaaggcaggaaacaaaagattcccttgaaatttagatcaaattagtaattttgtttatgctgctcctgatataacactttccagcctatagcagaagcacattttcagactgcaatatagagactgtgttcatgtgtaaagactgagcagaactgaaaaattacttattggatattcattcttttctttatattgtcattgtcacaacaattaaatatactaccaagtacagaaatgtgga

SEQ ID NO: 80296 - DNA, 1878 bp, Homo sapiens
tggaggtgcccggatgaacatacatcacaatgtgaacagtggtcatctccagatagtagaatttcagatatgtttctttccatttttctgacagtttgaattttctgtaataattaattgacttttatacaatggaaacaacttttttgttttggaaaaaagaaagatgctgccgctaatcagtggatgaaagatgataatatggatacaaaatctattctagaagaacttcttctcaaaagatcacagcaaaagaagaaaatgtcaccaaataattacaaagaacggctttttgttttgaccaaaacaaacctttcctactatgaatatgacaaaatgaaaaggggcagcagaaaaggatccattgaaattaagaaaatcagatgtgtggagaaagtaaatctcgaggagcagacgcctgtagagagacagtacccatttcagattgtctataaagatgggcttctctatgtctatgcatcaaatgaagagagccgaagtcagtggttgaaagcattacaaaaagagataaggggtaacccccacctgctggtcaagtaccatagtgggttcttcgtggacgggaagttcctgtgttgccagcagagctgtaaagcagccccaggatgtaccctctgggaagcatatgctaatctgcatactgcagtcaatgaagagaaacacagagttcccaccttcccagacagagtgctgaagatacctcgggcagttcctgttctcaaaatggatgcaccatcttcaagtaccactctagcccaatatgacaacgaatcaaagaaaaactatggctcccagccaccatcttcaagtaccagtctagcgcaatatgacagcaactcaaagaaaatctatggctcccagccaaacttcaacatgcagtatattccaagggaagacttccctgactggtggcaagtaagaaaactgaaaagtagcagcagcagtgaagatgttgcaagcagtaaccaaaaagaaagaaatgtgaatcacaccacctcaaagatttcatgggaattccctgagtcaagttcatctgaagaagaggaaaacctggatgattatgactggtttgctggtaacatctccagatcacaatctgaacagttactcagacaaaagggaaaagaaggagcatttatggttagaaattcgagccaagtgggaatgtacacagtgtccttatttagtaaggctgtgaatgataaaaaaggaactgtcaaacattaccacgtgcatacaaatgctgagaacaaattatacctggcagaaaactactgttttgattccattccaaagcttattcattatcatcaacacaattcagcaggcatgatcacacggctccgccaccctgtgtcaacaaaggccaacaaggtccccgactctgtgtccctgggaaatggaatctgggaactgaaaagagaagagattaccttgttgaaggagctgggaagtggccagtttggagtggtccagctgggcaagtggaaggggcagtatgatgttgctgttaagatgatcaaggagggctccatgtcagaagatgaattctttcaggaggcccagactatgatgaaactcagccatcccaagctggttaaattctatggagtgtgttcaaaggaataccccatatacatagtgactgaatatataagcaatggctgcttgctgaattacctgaggagtcacggaaaaggacttgaaccttcccagctcttagaaatgtgctacgatgtctgtgaaggcatggccttcttggagagtcaccaattcatacaccgggacttgctgctgtatttgaagtaatgaaacacctctggagctgaccacttgactggaaacttggttccgact

SEQ ID NO: 80297 - DNA, 572 bp, Homo sapiens
gctgggattatagacacatgccaccacatccggctaagttttgtattttttagtagagacagggtttcaccatgttggccaggctggtcttgaactcctgacctcaagtgatccgcctgcctcctcccagagtgctgaaattacaggcgtgagcccctatttctgttctttaccaggagaaatgtgtaagttagacttgattgactattataatagtcaaaccaagccttaatttcattgatgtctttaaatcctcaagttctaggactttcaccaacaacatattcattattattcattatggaaaagcagctaggtctgaatttgctgtccgtgatctttggtgtcactgaccacaatttttaattgtcttgcctctgagagctcataaaagataccccatgagaatattaataagtaaattactgttaatccccatagacatttatgtattaggttctgttttgtcatcgaggttttggtgtacatgcccagtcccaggagacagaatgtagtcttttcatctgtaatatcattaatttgatttggtactgagttttttgcttttttct

SEQ ID NO: 80298 - DNA, 2297 bp, Homo sapiens
  misc_feature (1135)..(1135): n is a, c, g, or t
aaaagaaacaaaattaacctcatagtctgcatactctcgaaatggcaaaaaagcctgcaactttccgttgtggaaaataatatacctgggtgataaactgagcaaacatcacccttgcccttgcctctgaaagagagcctgttctagttcatcctggggccagcttggctggaaccccactggccagctctgtccacaccttgcatattaggacagaaatctgcctaccacattccagctacataaagaaggtggccagcacctgactgcctctttctccttgtgaaattccttggaaataccatttgtgactgcttgggcttgttctgaagaaaattcaaatcttgttctgtttaacaaggattgattgaagaacccgtaggctcagtgctagtacaaagataagcaaggaaggaactcagaataagagagaaaaaacttggataataattatcaaaaccagtatttattgagcacctactgtgcccagtagagtagtaattacaggaggtaaatatctaaaacttacatagctcttcacagaacatacatctgttcttgcttctgtgtttgattttattagctttcctctgtacacataagcttttagtgtatgtcctattattgaagtccagagttttattatttttcacttatttgggcatagatagttccagaatttacttgtcttcctcattctcattgttaatctcatttttcttccctggagaatatggactttcaaaactatttttcaatcaaggccaaaatatttcttaaaattcacttctatttaaaacacagataacatccaggagaaaatctgagaagaaaaaaaaaaacgattttgatggtacctgattataaaagactcacagtactaagttattctttggcacgtgtagcaaaatactatgtaggtgtcatttcgagttcatagtaaggggagaaatggtgtcatttttcctgcagagaaatttaatctttcactttaatctttcattggcctatagcagccagtggggtcttttaaaaaattcttttccttcatattccccgtttgagcttaaggtacaaaaaaagaaaatactcttgaaatgctgtgaccagatctagactgtaacatgccccttcnctcctctggtgaggaagtgcgggaaggtggaagacattgaggggttgattatttacttcgtttggaagtaagaagggaggtagctcttatttggaataagagctgtcttcagaacaggtgtgtgctctcctgaagcccagagctgtgactccctgggtgtgtctcttacctgtgcccttgggcaggtggcacgggagaagaatacgataagaggaggatggtacagacagaggagtcacaggctgaacaggctgtcaccggggcaagatgactgacaggtggatggaattcaccatcctttcctttcaatcaaaaaaaaggtagaaagttgctcataagtaagtttgagttatatcatcttcttcatagccgttgctcttcagacacaggtgctggtaatcaggaaaatgcaaggaaacagctctggggaaaaggaacaagcctcgttggccttgagagccccagtagaccatcaggccttgctttggatattgggaggtgacagtgccttctcacgtgcctgacagtttccctgcaccaccaagactctgtgtgactgaggccgtggcccgggtttcaggatgggcattcagaggaaggaagttccccctccttcacttacctcacgcttactagatgctgggttgcctatgcccatgttaaaggaagccagataactttctgtccccatgtgatccaggcccatcctgaagcctgggggttctgaacataagtatggcggttgcagccttccttctgtgacttctggaattcctgacagagagggtcatatctagccactgtcaaccggatgctagacttgttttgttaggcccttcctccttcccttcctctacttatcttccaataaccttaggatttggaggaaattaaaataaaccttcttctagaaaggtgtcagggacccatgcacaaatgtagcctttttgatgcttgagaaagaatgcctttttgacttccgtgaataaagaataagtcacggctaatgagtaagtaacagcacgtgcctgtggtcccagttattcaggagactgaggcaggaggattgcttgatcccatgagttcaaggctgcagtgagccatgattgtgccactgcactccagcctgaacaacagagcaagaccccatctcttaaaaaaa

SEQ ID NO: 80299 - DNA, 835 bp, Homo sapiens
gttttgttgtataaaggacatgtaggagggaatgtgttcgaatgcacatgttagaactgtgttcactctgcaaatatggatatgatctccactctgggatgaatttgaggccaagctacagggataaagaggaaatgtcaaggtctctgcccttaaggggctcctagtcctagaagcaggctataacaagcagagtgataaactcttttgttgtgggaaatcagggaccccaaatggagggaccagctgaagccatggcagaagaacgtggattgtaaagattccatggacatttattagttccccaaattaatacttttataatttcttatgcctgtctttattgcagtctctaaacataaattgtaaagatttcatggacacttaacacttccccagtcagtacccttgtgatttcctatgcctgtctttactttaatctcttaatcctgtcagctgaggaggatgtatatcgcctcaggaccctgtaataattgcattaactgcacaaattgtacagcatgtgtgcttgagcaatatgaaatgtgggcaccttgaaaaaagaacaggataacagcaattgttcagggaataagagagataaccttaaactctgactgccggtgagccgggcggaacagagccatatttctcttctttcaaaagcaaatgggagaaatatcgctgaattctttttctcagcatggaacatccctgggaaagagaatacgtgcctggaggtataggcttataaacagcccccctaggtgcgcctgtctcttatggtcgagactgcaggggtgaaagagactccagtctcccatagctctcccag

SEQ ID NO: 80300 - DNA, 894 bp, Homo sapiens
agcttatcttgaagatcacatcttgcaacacagagcttaccttactataatatgctggatcttagtagggatgattttccttagataaactatgcaccctccagttctccacagcccccaccattccctcttgcctccccaaagactgaggaaaaggatcatctactgtttatcattttacacccagcctgagcaatacacatgtattcatttatatttcttcttggctaatgtaggcttatgaatatttaaccctgatgttttagtttcttaatgctgccatctaacaaattaccacaattttaatggcttaaaacaacactcattaattatctcacagtctgtaattcagaagtctagacactgcatggctcaactggttctctgctccaggttccacaaggtcaaaatcaaggtgttggcagggttgtattcctttccagaggccctagggatggattcacttccaagctcacttagttgttggcagaattcagttccatgtggttgtaagactgagatccttatttcctggctggttgtcagccaggagctgttctcagcaactaggggtgcttgcatttcctggttggcggcccttttcctccatctgtaaaatcagcaatggcaggtgaagtccttctcattcctagaatctctctgacctccccttctgcctcatctctcctctcccttcctcttccaccacatcttctaccttcctcttctcttgctaagggcttgtgggattacatttgtattagtcagggttctctaaagggacctaataggatagatgtgtatataaaggggagtttattaaggagcattaacttacaccattacaaagtgaggtcccacaataggccatctgcaagctgaggagaaaagaag

SEQ ID NO: 80301 - DNA, 1818 bp, Homo sapiens
  misc_feature (858)..(858): n is a, c, g, or t
tccgggccacgtggtgcgcgcggcgggcgcgtccgaggagcctgcggctgctcctggctcacagcgctccgggcgaggagagcgggcggacgcggggggctgggccggtgcgggcggcgaggcaggcggacgaggcgcagagacagcggggcggccggggcgcggcacgccggcggcgtcggggccgcggcctctgccttgccgctcccctcgcgtcggatccccgcgcccagggcagcacggtggagagggacgcggcggagccggccggcagccatggaaccggccccctccgccggcgccgagctgcagcccccgctcttcgccaacgcctcggacgcctaccctagcgccttccccagcgctggcgccaatgcgtcggggccgccaggcgcgcggagcgcctcgtccctcgccctggcaatcgccatcaccgcgctctactcggccgtgtgcgccgtggggctgctgggcaacgtgcttgtcatgttcggcatcgtccggtacactaagatgaagacggccaccaacatctacatcttcaacctggccttagccgatgcgctggccaccagcacgctgcctttccagagtgccaagtacctgatggagacgtggcccttcggcgagctgctctgcaaggctgtgctctccatcgactactacaatatgttcaccagcatcttcacgctcaccatgatgagtgttgaccgctacatcgctgtctgccaccctgtcaaggccctggacttccgcacgcctgccaaggccaagctgatcaacatctgtatctgggtcctggcctcaggcgttggcgtgcccatcatggtcatggctgtgacccgtccccgggacggngcagtggtgtgcatgctccagttccccagccccagctggtactgggacacggtgaccaagatctgcgtgttcctcttcgccttcgtggtgcccatcctcatcatcaccgtgtgctatggcctcatgctgctgcgcctgcgcagtgtgcgcctgctgtcgggctccaaggagaaggaccgcagcctgcggcgcatcacgcgcatggtgctggtggttgtgggcgccttcgtggtgtgttgggcgcccatccacatcttcgtcatcgtctggacgctggtggacatcgaccggcgcgacccgctggtggtggctgcgctgcacctgtgcatcgcgctgggctacgccaatagcagcctcaaccccgtgctctacgctttcctcgacgagaacttcaagcgctgcttccgccagctctgccgcaagccctgcggccgcccagaccccagcagcttcagccggcgcccgcgaagccacggcccgcgagcgtgtcaccgcctgcaccccgtccgatggtcccggcggtggccgctgccgcctgaccaggccatccggcccccagacgcccctccctagttgtacccggaggccacatgagtcccagtgggaggcgcgagccatgatgtggagtggggccagtagataggtcggagggctttgggaccgccagatggggcctctgtttcggagacgggaccgggccgctagatgggcatggggtgggcctctggtttggggcgaggcagaggacagatcaatggcgcagtgcctctggtctgggtgcccccgtccacggctctaggtggggcgggaaagccagtgactccaggagaggagcgggacctgtggctctacaactgagtccttaaacagggcatctccaggaaggcggggcttcaaccttgagacagcttcggtttctaacttggagccggactttcggagttggggggtccggggccc

SEQ ID NO: 80302 - DNA, 579 bp, Homo sapiens
gcccacccccgttattcttcactttcacttgacatcgttcttcactcaaggttaggtcctcgctagtgccagagaagcccctgggtccccagtgccctcagccccgcagcgtagggagcagccggcccgggagataaggaggccacagccatggaggccccaggcccggagtccccgcgccgtcgggttttgagccgcgcggctggccaggaccgccggctccttctctgtcccggtcctccgctcgcagccccgcagaggtgacggtacctggaggctggaagcgacggtttcctcgggccggtggagggaaacatgtcagggtcacagcgaaggaaaccgagacccacaggggtccccgggcgtccgggacgcgtcgctggttttgctcctagaaggaaaggccttcccgcttttgttccaccggctcaccaggtcctcccttcctggccaactctaacctcagctttgtgcgtgtcacccggccccgggataatcggatcctcccagacccgggaatccatcagaagcgctacccgtacttggcgccctgaaagttccccaagcgcagcggccgcg

SEQ ID NO: 80303 - DNA, 348 bp, Homo sapiens
tttgccataatctgcataatcagatttcatataaatcatctaatagaatcacagaactttatttttaaaaggtagctgaaaggaaaagtaaaataaacattaaaaccaagggttatttttctaaaatgcttttatttacttttaattccaaacactcacaaaatacaaacactggtcccctacataattgcaaaggattagaattaagatataggcagtagcatttctttaaacaataaattgatatttattctgaataatgacagttaagcattgatgaagtaaagcaaattcctagacattactccctaataaatacgctgggcagtgggggaaaacatggcagtt

SEQ ID NO: 80304 - DNA, 852 bp, Homo sapiens
  misc_feature (400)..(400): n is a, c, g, or t
ggatttcaccatgttaggcaggatggtcttgatctcctaacctcgtgatccacccacctcggcctcccagagtgctgggattacaggcgtgagccactgtgcctggccaattttttttttttttaaagagacagagtctcactttgttgcccaggctggtcttgaactcctgggctcaagtaatcctcctgccttggcctcgcaaagtactgggattacaggtgtgagccaccacacccgggctctgtgatttgtttgttttttgagatggagtctcgcactgtcatccaggctggagtgcaatggtgcaatctccgctcactgcaaactccgcctccctggctcaagtgattctcctgcctcagcctcccgagtagctgggattacaggcacatgccantgcgccaagctaatttttgtatttttagtagaaacggggtttcaccatgttgcctgggctggtcttgaattcctgacctcaggtgatacttgcctcgccctcccaaagtgcttggattacaggcgtgagccagtgcgcccagccgcctctgtgattttttaaattgtgtcactcacactaaatttaacagcaatttttttgataactcattttttttgtagtctttctagaacattaaacttagttttcatagaaattgcaattctctttgtatttaattaacttacataattaaaataacaactggcataaacagacttggggaaaacttaaactcttggtaagtttaaaactcaattgagtggagtagaagtatacagaaaaaaaacaggaattggagaataacctattaaacatgaatatttagtgttcttttggcatcagtcggtatg

SEQ ID NO: 80305 - DNA, 300 bp, Homo sapiens
tttcaccatttaccttttgttttgctgaagtttatcctttagtagtttttttgagaagggattggctaacattcttctgaattctcacctgtttaaaatgtttggctattggctgcatgtggtggcttatgcctgtagtcccagcactttggaggccaaggcagaaagattgcttgaggctaggagtgcaagactagcctgggcaacatagcaagactttgtgcatactaactggtggtggtggtggtgcatatttgcagtctcagctacttgggaggctgaggcaggaggatcgcttga

SEQ ID NO: 80306 - DNA, 811 bp, Homo sapiens
agggagggagggggaagggaggggaagggagggaaagggaagggaagggaggggagggggaaacagacaccagtcagagcaatgcttaaacttaaggaggcaactgaggttagtggaccatgaccttatccacattcctgacccttccttcctccctctgtccctccttcccttccttcctttcttctttcctttcttccttccttcttttccttctttctacaatgaaatactatattattcctgaataattttatgactgaaaatcattatcttttaaaaattttttcaattatttaagctgctctctaaggaggttccagtgcttcctcattggattgactgctgatatgttcagattgacaaaaggccctcagaaaaactcccccagggtaatttaaaaccctgtacttccttagggctcacacaacctttctgaaagtgtttggtttttctgtgccaaattgtgcatggaaatcttggcgatagctctcacaccttcatgcccagggttcagcttcctgtggcacctgcagccatccccattttaggtaccattagccctggggcctttcatatgagctgtgtgcaggtgcttgtcatttacaggatccacaaaccccccatccacccaaggacccagggatccaaatctcctcatgggtcacaccatccctttctctcaaattcatgcttttctggctctagtcttcaatggcccacatatctcaaataaagcactggtgttgctggcttcaggatatctccaagacacaaaaactatattaattatccttaggagtccaagaaa

SEQ ID NO: 80307 - DNA, 439 bp, Homo sapiens
aagtgttcttcccaccgcagcctcccaaagtgctgggattacaggtgtgagccactggacccggcaggaacaatatacctcttaaagcttctgctcagacgtgggaatggctatgtggtgcgtgtcagttcccctcacattgcattggctgaagcaaaccctggggcccaaccagtgttggcggggttagaagtagacccctcccatagggaggccagggagggaggattttgagccaagaccactcaccacgtgctgtgatgagcagttgcctccccctcctttcgtgtcttcgtgcctcctcacgtattcttacaagtagaattgctacattaggaatatgcatatttgtaaagtatttactatttattatgtcagctaggttttaactgtcactgcatttgctgtgaattataggtaattattcatcctgatgacc

SEQ ID NO: 80308 - DNA, 336 bp, Homo sapiens
gggcaccaaaaaaaaaaaaaagttactgaatacaagaagtagtcagaatctagtgcaacaagtagggaattcccctaccccaacctcaatccgagtggaaaaacatcctccagtccaaatcacacacttgcaaaacgcatgatgctcaatcagggtctagctgtacagctcagaacagttctcctggaagcatgtgaatctaacaggctgatgtgagggaggaaaaaagtgactgcacagataaaaagaggaggaaagaaatgtgaaaatattcccgttgtcggttttcattgaatttctaaatgtcacaaatctttgggtaaaaatgtaacacag

SEQ ID NO: 80309 - DNA, 796 bp, Homo sapiens
ggatctggagaacaacactacacaagcatgtgtgaaagaagtctcatggggacttgtttgcattctggataaacctggttttctcattcaatgatagggtaagaaatgagaggtatgtagtaaaacttcaatactacatgatctcctcttctactcctgggtaggcctatttttttttttttttttaccttggtcagagtgtctccacatggcagcaatgttgacacaggcttgcttacagctctcaaactgtggttattaagtttatagtatcatacaaaactcagccaggtgtggtggcgggcacctgtaatcccagctacttgggaggatgaggcaggagaatcgcttgaacctgggaggcagagattgcagtgagcagagatcgtaccactgcactccaccctgggccacagagtgagacttaatctcaaaaataaataaataaataaataaataaataaagtttacaatatcaaaatctaagtcagtcatttaaatgccagttcattttcatgagtggaaaaaatttcaaagataaagttgggctctaagtttaataccttcctacagagtgtacaacatcaataattcacatattttttttgttcctagaccatgaactgttatcttcatctctaaggccatttttctgtttaaaatgaacatccaggccaggtgtgctggctcatgcctgtaatctcagcactttgacaggctgaggcaggaggatgacttgcgctcaggagactaggaccagcctgggcaacacggtgaaaccctacctccaccaaaa

SEQ ID NO: 80310 - DNA, 545 bp, Homo sapiens
caattttattaaattaatggttttttaacataaagatatacttgaaaagataacagacaccacccataatttccccacccaggggtgacagccgacagtcctgggcagctgcttttccatctcatatgtcttatttgtgtgcagtgactgctttccagagcacgctctccagcgcccaggggtccgtgtcctgacagcagtagccgggcctttctctgcactgagtggcatctccctcctaaagatactttgcttcagaatttcatcctttcacttttgaagttcctctgggccagtgtagatactttgtttcagaatttcttcttttcattgtgtaactccttctgggccagcatagcttcgctggatgagctgggctctgcaggtgaagcctccctgttaagtttctgcttttcctgactttctcagaggacagaggggtgaggcggggcagctcatgaataattttttatgttgaagacttgtcgaaataatattttggttatgttgggttaaataaaatataaagttagtctgtaaaaaac

SEQ ID NO: 80311 - DNA, 439 bp, Homo sapiens
ggaggcagaggtagtagtgagctgagatcgtgccattgcactccagcctgggcaacaagagctaaactccatctcataaataaataaataaataaataaataaataaataaataaataaatgtatgtatgtatgtatgtatgttcagaaggacaatgacattctacatgtcagaaggaaagcattctacaaaggaaatgactgacagtatcaaaagccatgaatgaggaagacgagcttgaaaggtatccactgaatttgcaaccaggaaatcattggcaaccttggacagagcagtttcagtaaagtggttaagacgagtaagactgaagtgaacagaggaaagagtagcagataaggttatggagaaactatttgaagatagtcttgctgttcatcattcctaaatacccatgaagggcagctttgcttttttagta

SEQ ID NO: 80312 - DNA, 447 bp, Homo sapiens
tacaccaccgtctattgggccgtcaatggtggaactaaaacagctaattagcacactaacgccccctctggggcttcagggttgtgggtacccctgcccaggtgctgccactttcccctcgaggcaacacgcctggtctggccacaggcccagcatggagcttgctcttgtgtcggtgtttggagtggtcagccagagcccacacttgctcattcatgtgcttcctcctgcaaggggctgagtgtggtggaccgagtagatggggtgcccctgctgcaagtgtggccaaggggctgagagaaaattcctgtcactgtggtttgctggtcttgtgactcagcttacctcattcccacagagaagtgggcagcacagcttccaagctgggctcagagtccagacctacaactctggctatgactccatgctcccaagtctcagtttccc

SEQ ID NO: 80313 - DNA, 596 bp, Homo sapiens
cccttatataactgattgtgtaatggctgaaattgagaaattggggcagaagtattgagtggctctaagaatctccaaggatccaaggtttgaatgattaccatgcacacacaaaggaacctatgcagatgactgcttagtacagagagaaactcagcacaaatggtacattgtggccacggttgaccaggaccctaaaagaagaatctgtaagattctgggagttcctatcacgtacatttctaaccatagatataacatcgaatgaatgccagatgattatggagtccttgggttctaattcttacaagacaaagtttccctgcctttctttgaccaattttcctcttgttgccagtttcctctgcctttctttgaccagttttctcttgctgccagttcattaaacatgtaatagcatgaattattattctattcacccatttgctctattatgagctgagtatgaataattatgctcactttttttaatgctgttttgaaattgatattttgtctcatttaaaaattttaaggccgggtgcagtggctcacgcctgtaatcccagcactttgggaggccaaggcaggtggat

SEQ ID NO: 80314 - DNA, 399 bp, Homo sapiens
gagaacaggaatcattatttttcattgtttaccatttatccccatagtctaccatgcccagcatgttaaggttgtagaagccagcttccaagatggcccccagtgaacctggcctcctggtattcacacccactttggcatgtttttcctttgtgcactgaatagggttagggttccatacaggatggtggttaaatttgaatttcagataattttttagtatttcgcaatattttacgagacatacatatactattattcattgggtttatctgaacttcaagtttaattgggcatcctgtatttttattttactacatcttggcaacccctattttgggctggattgtgtcacccactaaggatatttggaaaaaatgggccaggcgcagccgggaa

SEQ ID NO: 80315 - DNA, 693 bp, Homo sapiens
gtttaaaagaatgaggtacaagtatccataatttttataaaaaggaaacattaataatactcagtgagaagtgcagataacggtattatctgatgttttttatgcatacagtgtgaatctcaacgggtagcaaataggctttaagaggacatagtcgtaaaagaaggggagggagttgatttttaaagcaaaaacaaatatttgatagcagtcgctcctgatctgccaggctctcaccctgatgccttccatgttggtgcaagcctgacctagtttgacagccagagtccctctgtcattatggccgagctcagcctcaggcattcaggaggacgcggtcagatggaattgccatccccaacacttccatcatgctcaccatcgtggcgttactgtcaccgttgacatgctactttcctggccacccctcactttgcaagatcattttataatgacttctcactgtcatgtggggtgttggttagggatattacccttgttttagagttgaggcaacaattccgttccaaacttctggaaggggcttcaattgtatatacagcgacttttaaacttctttgtagctatcgaacattttcattccagcactttgggaggtcaaggcaggaggattgcttgatgccaagagttcgaaaccagcctgggcaacatggcaacaccctgtctataaaa

SEQ ID NO: 80316 - DNA, 324 bp, Homo sapiens
tgtcttagtagtaagggaagagagcaagggagagagagagtgatttgtatcccaatattgcattattactcttcatggatttagtcatttgattcaatgaaatttaaaatgaatcatttaagtttcttcatgttagttaaccagtctatattttgcacaaaatgattcttctatttctttggagtatttcatgaagtgatataaaattatcacccttgtcttgaaaaaaaaaatctcctaaaaaagtaaacaaatggaggtacaaaaacaatcaagcaaatacaaactaagaaagcaggagtgggccgggtgcagtggttcaca

SEQ ID NO: 80317 - DNA, 946 bp, Homo sapiens
ttcaagcatttgggaaaacaatgaggaggcagcttattcccagctccaggcaggaggagacctgcagagggtgagattctcaggggaggaactgccagaagcctaagagcctttttccagagctgcctccaggagagaaggtgatctacctggctccggatcaagtcctttctgctcagaacaagctttctgcacttgtagggtgggtgattttagagatttggagagtcaatctttgcttctttccttttttctctctctccttcccagtcccacccactctaatcccagctcctgtttgtccaagcccctcaagcaagactctctttagtgagtgaaagctgacaatgtgagtctcagcctccttcccaggagcagctaagctgacagatccttgatcttgagaagccctcgcagctcccttctctgactctcagccacccctggagggagacccctattatcaccattttacaagtgaggctcaggtgataacttgtccaaggccaggcagccagattgccgggaagcaggtgttcccagcgccgctgctttcaccctgttccacatctctggtccttgtgtttagaaccattcttgagtgggtttgccaaaggcaaaaagcaaaaccaaggcttggctgacagttactgaggccctctgaaatgtgcattggcaattccagaaacacaagctcagatcagatccttagcatttaaatgaacttatgtcaggtttgctacaatatgatctgctggaacagctttctaactccttaacgggatgaggtatattttccttggcctattctaggcaaagatcagcaacttcaaacaaggagctgttcttcaaataaattcctcattgatacacatttttgaagaacactgggaagtaaaaacctggaggactgaattgtgttgttgggcagatagttcttaagaaa

SEQ ID NO: 80318 - DNA, 534 bp, Homo sapiens
gatctcaagggtccagagctcaggagcttctgttcctgtgaagttggagtgtgccattctcctagcacatgggtgagttcttgtttaccttcatgtaatcctccatgagttcagctgtctggaggcttgcggtaccctgtcctcttgagtcttttttggagacttcattggataaacatgattgaagaatggacaatcgtatggaaatcttattggacaaaaagggcatgatctaatactaatagactgtgcagagaattgtaacaagtcctgtgcatttagattcttcttggcccctctgtgtagcattatttcctcctggataaggaaggggcaggaccccttcagaaatgcgggtcttatgacctgctgtcgggtaaggtaattcagaggatttttttatgaccagttccaagacagaaagatgggggaagattggagtatatttttagtgtgtgtggcctgccttggagagaaaaaggcgcaggtaaaaggaggacagaaggtcagagagagattctgttttctgaggcc

SEQ ID NO: 80319 - DNA, 793 bp, Homo sapiens
ggtgcgtcccccaacctgatgctagcccctttcctgttacttctcacccacagcaggagccccttgtctttcaggccatgcagccatgttccgggagccctaattgcacagaagcccatggggagctccagactggcagccctgctcctggcctctcctcctcatagtcatcgacctctctgactctgctgggattggctttcgccacctgccccactggaacacccgctgtcctctggcctcccacacggatgacagtttcactggaagttctgcctatatcccttgccgcacctggtgggccctcttctccacaaagccttggtgtgtgcgagtctggcactgttcccgctgtttgtgccagcatctgctgtcaggtggctcaggtcttcaacggggcctcttccacctcctggtgcagaaatccaaaaagtcttccacattcaagttctataggagacacaagatgccagcacctgctcagaggaagctgctgcctcgtcgtcacctgtctgagaagagccatcacatttccatcccctccccagacatctcccacaagggacttcgctctaaaaggacccaaccttcggatccagagacatgggaaagtcttcccagattggactcacaaaggcatggaggacccgagttctcctttgatttgctgcctgaggcccgggctattcgggtgaccatatcttcaggccctgaggtcagcgtgcgtctttgtcaccagtgggcactggagtgtgaagagctgagcagtccctatgatgtccaggtatggtgt

SEQ ID NO: 80320 - DNA, 639 bp, Homo sapiens
tagggtgatatcactggttgatatgattagtgagatgaacattattaaggcaaattcttccgataattattgttatacaacatgattaatatatattcaatctgaaagagtcatatatacaaatatgaaataaacacctcaaatgagaagaagagagaaaacatggagaatgaagaaagttgggtgtattcttttcagtcttcccctcccatatctccgtctgaggccagcatggctaatattgagaaagagtaaggcaaatgagtaattattgtgctctgtcttttactgttattgaaggtcactgtttaacactccctcgccattcccctaaccactcccctttgccttaaattcattaagctgtattctttgtatttcctgataacagctgacaaggacccactctcatctgtaatgacaggtgagggtattgatgataagtagagttaataaagcttctccagtgatttagaattataacgctctgagtattatcatcaggggaatagatgaaaaagcccatttcattttgtgcagtgtccttcaaactgctggttatgaaatcattttagagggtctgtgaaatcactgtggaatacgatgaaacgtaatagaaagtatcagcagacactgtgg

SEQ ID NO: 80321 - DNA, 361 bp, Homo sapiens
ggtcgacctaacaaagcttgaaaacaaatcccaaaagggccaaactaaaccacaagtacctttctgcctgccactacaaaacacgacagtctttgaaggaagatgtaagatctagacactcaataatataaaactgacaatgttcagcatccaataaaaaatgactaaacaagtcaagaagcagaaatatgtgacccataaccagaaaaataatcactcaaaggaaacagacccagaaatgacagatacagaattagcagagaagaatattaaaacacctattataattattgttgactatttaaatgaaaacatgaacaaagtgaggaaagaaattgaaggcattaaaaaaaagtcgacg

SEQ ID NO: 80322 - DNA, 644 bp, Homo sapiens
gccagagatgatggtgtcttggaccaagaccaattatgaagggcgtgagagcaggtgcattttggacttattgaagatagtgtgtgagatttcctgacagattggatgtgtaaatgaaagaaaaaaaaagaactattttgattcttgttgttttgttttggtttttattttttaacccaggcaactaccattagtcaagaatgaagtctacaggtggacaggattttgggggatgattagaagctcaacttgtggtatcctgaggttaagatatttattaaaataaaatcagctaagtaagatcccagtatctgcctcatggaagatgttacaagttattgcacaaatattatatatatataatctctctcaatatattaagtacccctagagtatgaatgaattaatgaataagtattcattgagcagatggtactcaatgaacgacagacaccatgctgtgccctgtcaagtagatggcttaacagaatccatgttagagcttcatcaggtaaatggtattgtctacatctcacagaagaagaaactcaggacaagtaacttgactgaagttcacatggttagtaagtagttctaactttaagattgaaactcatttttccacaacttcaaataaaacccct

SEQ ID NO: 80323 - DNA, 598 bp, Homo sapiens
cagcgaaggtctgcagcttcactcctgaagccagcgagaccacgaacccaccgggagaaacgaacaactccagacgcatcactttaagaactgtgacgctcaccgcgaaggtttgcaacttcactcctgagccaccgagaccacgaacccaccggaaggaagaaactccgaacacatccgaacatcagaaggaacaaactccagacacgccgcctttaagaactgtaacactcaccgcgagggtccgcggtttattcttgaggtcagtgagaccaagaacccaccaattctggacacaccaccttgcccttctacttttcacaggtactaaggtctcaaactcataagtttttccagggttttctgcattgaacaactttttgtttgtttggtggtggtagtgaggaatagaccttccccctttgaaagcttcccttgtttcctttagtctgataaatcagttaccacttaaatatctgcttcctagcttctgaactcatgctgataatgcccatctgctgtctttacatgcctggtgtctctgatggccatttttcttaggggcttgttcagtgcaaataaatgactctctatggaa

SEQ ID NO: 80324 - DNA, 801 bp, Homo sapiens
tgagtgacccagtagtgaccgggatagaggtctgagcctggaaaggcagctgtgagggggtggaagagactgagcacatagtggctcatcgcggtcacggacttccagacgcgctcgcgcttgctgcgctccgggctcagtccccgcgggcttgcgcaccagatcgtgcgccacgacgacctcctgctgggcgactaccgcctgcacctgcgccgctccctggtccggcggcgcatgctcgaggccctgggggcggagccgaacgaggaggcctgacgcccgggcgggccccggcagcgcttgcgcaccgccccgcgggctggggccacccacccggagccccggaggacagggggcgttgccttcccaggaaggaggcggggccggctcgagggggtggatactgtgagtttaattataaagaatgacctggtacaaaagccatttctctctgcaaaatcttggtggggagtcaggggaagggaggtgatggggggtaggaatgaacccccatgttataatcccgcgtccctaatcttcctccagtccctgtacgtggacgcctgggtcccaatcccttgagggatgaactgaagcccgcgaaagggaagacctgggcaccggggctttcagcgcgtgccgagccctgtctcagcgagaatcagacgtcctcatccgcccccctcctcttcccctcccacccccccttggaagacaattctcgggcttttatttcaggttttttttctggatttttttgtgtgttctaggggttttgtgttttttttttctgttttttat

SEQ ID NO: 80325 - DNA, 794 bp, Homo sapiens
agagcgggcgcgtgagcagcatccgctttgagaacatgaacgtcatctgtgggactgctgggcgccggaaccggtggctcatcgcggtcacggacttccagacgcgctcgcgcttgctgcgctccgggctcagtccccgcgggcttgcgcaccagatcgtgcgccacgacgacctcctgctgggcgactaccgcctgcacctgcgccgctccctggtccggcggcgcatgctcgaggccctgggggcggagccgaacgaggaggcctgacgcccgggcgggccccggcagcgcttgcgcaccgccccgcgggctggggccacccacccggagccccggaggacagggggcgttgccttcccaggaaggaggcggggccggctcgagggggtggatactgtgagtttaattataaagaatgacctggtacaaaagccatttctctctgcaaaatcttggtggggagtcaggggaagggaggtgatggggggtaggaatgaacccccatgttataatcccgcgtccctaatcttcctccagtccctgtacgtggacgcctgggtcccaatcccttgagggatgaactgaagcccgcgaaagggaagacctgggcaccggggctttcagcgcgtgccgagccctgtctcagcgagaatcagacgtcctcatccgcccccctcctcttcccctcccacccccccttggaagacaattctcgggcttttatttcaggttttttttctggatttttttgtgtgttctaggggttttgtgttttttttttctgttttttat

SEQ ID NO: 80326 - DNA, 422 bp, Homo sapiens
agtaggggcccgagtttgagtgacccagtagtgaccgggatagaggtctgagcctggaaaggcagctgtgagggggtggaagagactgagcacatagtaggtgtggggccaggggtgatagggtggggacaggcctggagtgcctagggtagagcgcagcctgcagtcgccagtggagggtcgggcctttgggcggtttgagatggagcctcgacagacagtgattaggacgcagaaccaggctaagagagcgtaaggagcctagagcgacccaggcgagagggcagggctggaggggagtttagggacggagcgatggtccgctggaccagggcctgtaaacgactccagggaccaggcagggactcttcgacgatcaaagccagggctgaaacgacctgcgagttccttttccgtcccca

SEQ ID NO: 80327 - DNA, 465 bp, Homo sapiens
  misc_feature (114)..(114): n is a, c, g, or t
  misc_feature (116)..(116): n is a, c, g, or t
  misc_feature (399)..(399): n is a, c, g, or t
  misc_feature (415)..(415): n is a, c, g, or t
  misc_feature (465)..(465): n is a, c, g, or t
atagagacctctactgggcatatctatgctaggttttctcagacttctcagtcactatgtctcattaactttttaatcttataagaattcctcgatttctgaactgcggatagnantagtgttctttttttttttccagccgagttaaggatttcttactcacttaatggtaacaatagtagcaataccacctgccactaataatagtgatttaaaagggattataggcagaaatgtaagtagatatgtctgttcagactgctgtctgtcttgaaacaaggttatcttttcaatactcatagcttttagcctttagcttttagtcttattatttgctaggaacacattctgattttggacagcttctaacattttttgcagatgcatgtctgccttttnggaaagcgtgggatgnaaagccaatggcaacctttggggggaaattggtgtagggtgggattttgn

SEQ ID NO: 80328 - DNA, 941 bp, Homo sapiens
ctcccaccttcaaagttcatatctaagaaaacccctactaaatcctttagaatggaactgctcaatatagtagccactagccacattgactactgagtacttaaatgtgactagtgcaactgaggaactgaatttttaattttatttaactgtaactaattttaattgaaaaactgatactctattcaattactggaaaacttttaagtacatttggaccaacctggactcgtgaatttacttttgttcccagtgtttttttctatttttttattgataacataatagatatacatattttgagtgtgtattcaaacatttaatattaatacattcatataatttgtaaagatcaaatcagtgtaactgggatatccattaccttaaatgaatctactttttaaatggtatttataaaatctaaatatatgtgaagtgtttctgcttaaatttagtgtttgaattgagatgtgctccaagtgtacaacacacaccaaatttcaaagacttagttaaaaaaaaaacactgggaagggcaggaggaagggagagatagggagagatttgttaaaggatataaaattatagctagataggaggaataggttctagtgtagtatggccatagttaacaataatatatagcttcaaagagctagaaggaggatattgaatgtttccaacataagcatcaatatttgagattatagatatgctaattacagtgttctgatcactatacattgtatattgaaacatcaatatgtaccccatgaatatgtacaattattacatgaatatgtatcaaaacaaattaaatttaaagacaaaacaaagaacataaaacatcttcttaataatgttttatattatgtgttgaaatgataacatcttgtatatattgggtaaagtaaaatatatcattaagataaattttacct

SEQ ID NO: 80329 - DNA, 531 bp, Homo sapiens
acatgagaaaatgagaagaaaatggttttttgatcagactgggacagaatttaagacattaagcctaggctaacaagatacttagaccagtggtttaagatgtaggcatgataccttagctgcaattgcatgagtagctaagaccacacacttgggaccagagacgacctgcctatcacatcagctccccagcttccttcccacacacaggggagtaactcctctgtcaaagcccactagagagatcccagagcctccctgggaatcattttactgtttgacaattatatctgccagaaagtacctcttgtgctgccaaagagaccattttcactattgtgcttcattctttagtcgtgaggatgcagcatctttaacaaaggaagctattgattggctgcagttcaagcttttattacctttttttaagactaccattttcttttttaaagtaaaaatactcattgggtcgccatactgagtaatttgacattgaaaaccattttataaatacagcctcctcagagtaaa

SEQ ID NO: 80330 - DNA, 597 bp, Homo sapiens
ttttcctgttagaatgacttgctagtctacttcttgtaagaaccatcaaaaccctaagcatgtatactaggatacttagatctactggtatattgttacaatgtaagtcaaagagcagatattaaaagtcttaaagcactatgagattgcttgtaaaatagccagatgtgtctgttacctaaatatttttgtttaaactggatcttaatctgttttctttgaggtaaaattatctttatagatgcatttttctgtatttgtgttgatacaatttagaccatgtcttgtatgtaatattcctgatactactgaacccttaatatactttcagtaaatactagttacagtttgtcatgcattttttcattgtttcaccttttcctgccttagagttaatgtttttggagctagaatgtccttaggaatgatacagtagaatttctgcattttatagatgagaatgagactgtgacttgtttagaattgttctttttctgcagatgtagatttgaaaggaaataacaattctaatgctactgtccatcgaagtataaagcgttgagaagtataaagcgttgaggaagtataaagcgttga

SEQ ID NO: 80331 - DNA, 560 bp, Homo sapiens
cacactgaatccagcaatataaaatataatatatatatatttaaagccaaagatgtattaaagccaaggatgtattatagccaaggtgcaattatactagaaattcaaagttggtttaacattagaaaatcaaccaatatatttcacccacaccaacactttaaagaagaaaaactgagtggtcttttccatagaaaaatgtaattgataaaattcaccatccattcattttattttatttacttatttatctttttttctggagacggtgtttcactctgtcgcccaggctggagagcagtggcgtgatctcagctcactgtaacatccgcctcccaagttcaagcgattctcctgactcagcctccagtgtagctgggattataggcatgcgccaccacacacagctaattttgtatttttagtagagacggggtttcaccatgttggtcagggtggtgtcgatctcctgacttcaggtgatccacctgcctcggcctcccaaagtgtgtgagccagcttgcctggcctcaccatccattcatgatttaaaaaaaaaa

SEQ ID NO: 80332 - DNA, 1571 bp, Homo sapiens
gtggtccgcggcggcgccattaaagcgaggaggaggcgagagcggccgccgctggtgcttattcttttttagtgcagcgggagagagcgggagtgtgcgccgcgcgagagtgggaggcgaagggggcaggccagggagaggcgcaggagcctttgcagccacgcgcgcgccttccctgtcttgtgtgcttcgcgaggtagagcgggcgcgcggcagcgcggggattactttgctgctagtttcggttcgcggcaggcgggtgtagtctcggcggcagcggcggagacactagcactatgtcggaggagcagttcggcggggacggggcggcggcagcggcaacggcggcggtaggcggctcggcgggcgagcaggagggagccatggtggcggcgacacagggggcagcggcggcggcgggaagcggagccgggaccgggggcggaaccgcgtctggaggcaccgaagggggcagcgccgagtcggagggggcgaagattgacgccagtaagaacgaggaggatgaaggccattcaaactcctccccacgacactctgaagcagcgacggcacagcgggaagaatggaaaatgtttataggaggccttagctgggacactacaaagaaagatctgaaggactacttttccaaatttggtgaagttgtagactgcactctgaagttagatcctatcacagggcgatcaaggggttttggctttgtgctatttaaagaatcggagagtgtagataaggtcatggatcaaaaagaacataaattgaatgggaaggtgattgatcctaaaagggccaaagccatgaaaacaaaagagccggttaaaaaaatttttgttggtggcctttctccagatacacctgaagagaaaataagggagtactttggtggttttggtgaggtggaatccatagagctccccatggacaacaagaccaataagaggcgtgggttctgctttattacctttaaggaagaagaaccagtgaagaagataatggaaaagaaataccacaatgttggtcttagtaaatgtgaaataaaagtagccatgtcgaaggaacaatatcagcaacagcaacagtggggatctagaggaggatttgcaggaagagctcgtggaagaggtggtgaccagcagagtggttatgggaaggtatccaggcgaggtggtcatcaaaatagctacaaaccatactaaattattccatttgcaacttatccccaacaggtggtgaagcagtattttccaatttgaagattcatttgaaggtggctcctgccacctgctaatagcagttcaaactaaattttttgtatcaagtccctgaatggaagtatgacgttgggtccctctgaagtttaattctgagttctcattaaaagaaatttgctttcattgttttatttcttaattgctatgcttcagaatcaatttgtgttttatgccctttcccccagtattgtagagcaagtcttgtgttaaaagcccagtgtgacagtgtcatgatgtagtagtgtcttactggttttttaataaatccttttgtataaa

SEQ ID NO: 80333 - DNA, 1085 bp, Homo sapiens
gaattcgaggatccgggtaccatggcggctcggcgggcgagcaggagggagccatggtggcggcgacacagggggcagcggcggcggcgggaagcggagccgggaccgggggcggaaccgcgtctggaggcaccgaagggggcagcgccgagtcggagggggcgaagattgacgccagtaagaacgaggaggatgaaggccattcaaactcctccccacgacactctgaagcagcgacggcacagcgggaagaatggaaaatgtttataggaggccttagctgggacactacaaagaaagatctgaaggactacttttccaaatttggtgaagttgtagactgcactctgaagttagatcctatcacagggcgatcaaggggttttggctttgtgctatttaaagaatcggagagtgtagataaggtcatggatcaaaaagaacataaattgaatgggaaggtgattgatcctaaaagggccaaagccatgaaaacaaaagagccggttaaaaaaatttttgttggtggcctttctccagatacacctgaagagaaaataagggagtactttggtggttttggtgaggtggaatccatagagctccccatggacaacaagaccaataagaggcgtgggttctgctttattacctttaaggaagaagaaccagtgaagaagataatggaaaagaaataccacaatgttggtcttagtaaatgtgaaataaaagtagccatgtcgaaggaacaatatcagcaacagcaacagtggggatctagaggaggatttgcaggaagagctcgtggaagaggtggtgaccagcagagtggttatgggaaggtatccaggcgaggtggtcatcaaaatagctacaaaccatactaaattattccatttgcaacttatccccaacaggtggtgaagcagtattttccaatttgaagattcatttgaaggtggctcctgccacctgctaatagcagttcaaactaaattttttgtatcaagtccctgaatggaagtatgacgttgggtccctctgaagtttaattctgagttctcattaaaagaaatttgctttca

SEQ ID NO: 80334 - DNA, 319 bp, Homo sapiens
gcggccgctactactactaaattcgcggccgctcgaccgtggaagaggtggtgaccagcagagtggttatgggaaggtatccaggcgaggtggtcatcaaaatagctacaaaccatactaaattattccatttgcaacttatccccaacaggtggtgaagcagtattttccaatttgaagattcatttgaaggtggctcctgccacctgctaatagcagttcaaactaaattttttgtatcaagtccctgaatggaagtatgacgttgggtccctctgaagtttaattctgagttctcattaaaagaaatttgctttca

SEQ ID NO: 80335 - DNA, 810 bp, Homo sapiens
agaaaaaaaaaaaaaaaaaaaaaaaaaaaaaacagaactaatttaaatcttgaaccctacgtaccgagtgccctcccggtggttatcgtgcacaggcgggggcggaaccgcgtctggaggcaccgaagggggcagcgccgagtcggagggggcgaagattgacgccagtaagaacgaggaggatgaaggccattcaaactcctccccacgacactctgaagcagcgacggcacagcgggaagaatggaaaatgtttataggaggccttagctgggacactacaaagaaagatctgaaggactacttttccaaatttggtgaagttgtagactgcactctgaagttagatcctatcacagggcgatcaaggggttttggctttgtgctatttaaagaatcggagagtgtagataaggtcatggatcaaaaagaacataaattgaatgggaaggtgattgatcctaaaagggccaaagccatgaaaacaaaagagccggttaaaaaaatttttgttggtggcctttctccagatacacctgaagagaaaataagggagtactttggtggttttggtgaggtggaatccatagagctccccatggacaacaagaccaataagaggcgtgggttctgctttattacctttaaggaagaagaaccagtgaagaagataatggaaaagaaataccacaatgttggtcttagtaaatgtgaaataaaagtagccatgtcgaaggaacaatatcagcaacagcaacagtggggatctagaggaggatttgcaggaagagctcgtggaagaggtggtgg

SEQ ID NO: 80336 - DNA, 1072 bp, Homo sapiens
ggctcggcacctcatgctttatacttcccgcagcgccgagtcggagggggcgaagattgacgccagtaagaacgaggaggatgaagggaaaatgtttataggaggccttagctgggacactacaaagaaagatctgaaggactacttttccaaatttggtgaagttgtagactgcactctgaagttagatcctatcacagggcgatcaaggggttttggctttgtgctatttaaagaatcggagagtgtagataaggtcatggatcaaaaagaacataaattgaatgggaaggtgattgatcctaaaagggccaaagccatgaaaacaaaagagccggttaaaaaaatttttgttggtggcctttctccagatacacctgaagagaaaataagggagtactttggtggttttggtgaggtggaatccatagagctccccatggacaacaagaccaataagaggcgtgggttctgctttattacctttaaggaagaagaaccagtgaagaagataatggaaaagaaataccacaatgttggtcttagtaaatgtgaaataaaagtagccatgtcgaaggaacaatatcagcaacagcaacagtggggatctagaggaggatttgcaggaagagctcgtggaagaggtggtgaccagcagagtggttatgggaaggtatccaggcgaggtggtcatcaaaatagctacaaaccatactaaattattccatttgcaacttatccccaacaggtggtgaagcagtattttccaatttgaagattcatttgaaggtggctcctgccacctgctaatagcagttcaaactaaattttttgtatcaagtccctgaatggaagtatgacgttgggtccctctgaagtttaattctgagttctcattaaaagaaatttgctttcattgttttatttcttaattgctatgcttcagaatcaatttgtgttttatgccctttcccccagtattgtagagcaagtcttgtgttaaaagcccagtgtgacagtgtcatgatgtagtagtgtcttactggttttttaataaatccttttgtataaa

SEQ ID NO: 80337 - DNA, 1219 bp, Homo sapiens
ggctcggcacctcatgctttatacttcccgcagcgccgagtcggagggggcgaagattgacgccagtaagaacgaggaggatgaagggaaaatgtttataggaggccttagctgggacactacaaagaaagatctgaaggactacttttccaaatttggtgaagttgtagactgcactctgaagttagatcctatcacagggcgatcaaggggttttggctttgtgctatttaaagaatcggagagtgtagataaggtcatggatcaaaaagaacataaattgaatgggaaggtgattgatcctaaaagggccaaagccatgaaaacaaaagagccggttaaaaaaatttttgttggtggcctttctccagatacacctgaagagaaaataagggagtactttggtggttttggtgaggtggaatccatagagctccccatggacaacaagaccaataagaggcgtgggttctgctttattacctttaaggaagaagaaccagtgaagaagataatggaaaagaaataccacaatgttggtcttagtaaatgtgaaataaaagtagccatgtcgaaggaacaatatcagcaacagcaacagtggggatctagaggaggatttgcaggaagagctcgtggaagaggtggtggccccagtcaaaactggaaccagggatatagtaactattggaatcaaggctatggcaactatggatataacagccaaggttacggtggttatggaggatatgactacactggttacaacaactactatggatatggtgattatagcaaccagcagagtggttatgggaaggtatccaggcgaggtggtcatcaaaatagctacaaaccatactaaattattccatttgcaacttatccccaacaggtggtgaagcagtattttccaatttgaagattcatttgaaggtggctcctgccacctgctaatagcagttcaaactaaattttttgtatcaagtccctgaatggaagtatgacgttgggtccctctgaagtttaattctgagttctcattaaaagaaatttgctttcattgttttatttcttaattgctatgcttcagaatcaatttgtgttttatgccctttcccccagtattgtagagcaagtcttgtgttaaaagcccagtgtgacagtgtcatgatgtagtagtgtcttactggttttttaataaatccttttgtataaa

SEQ ID NO: 80338 - DNA, 1276 bp, Homo sapiens
ggctcggcacctcatgctttatacttcccgcagcgccgagtcggagggggcgaagattgacgccagtaagaacgaggaggatgaaggccattcaaactcctccccacgacactctgaagcagcgacggcacagcgggaagaatggaaaatgtttataggaggccttagctgggacactacaaagaaagatctgaaggactacttttccaaatttggtgaagttgtagactgcactctgaagttagatcctatcacagggcgatcaaggggttttggctttgtgctatttaaagaatcggagagtgtagataaggtcatggatcaaaaagaacataaattgaatgggaaggtgattgatcctaaaagggccaaagccatgaaaacaaaagagccggttaaaaaaatttttgttggtggcctttctccagatacacctgaagagaaaataagggagtactttggtggttttggtgaggtggaatccatagagctccccatggacaacaagaccaataagaggcgtgggttctgctttattacctttaaggaagaagaaccagtgaagaagataatggaaaagaaataccacaatgttggtcttagtaaatgtgaaataaaagtagccatgtcgaaggaacaatatcagcaacagcaacagtggggatctagaggaggatttgcaggaagagctcgtggaagaggtggtggccccagtcaaaactggaaccagggatatagtaactattggaatcaaggctatggcaactatggatataacagccaaggttacggtggttatggaggatatgactacactggttacaacaactactatggatatggtgattatagcaaccagcagagtggttatgggaaggtatccaggcgaggtggtcatcaaaatagctacaaaccatactaaattattccatttgcaacttatccccaacaggtggtgaagcagtattttccaatttgaagattcatttgaaggtggctcctgccacctgctaatagcagttcaaactaaattttttgtatcaagtccctgaatggaagtatgacgttgggtccctctgaagtttaattctgagttctcattaaaagaaatttgctttcattgttttatttcttaattgctatgcttcagaatcaatttgtgttttatgccctttcccccagtattgtagagcaagtcttgtgttaaaagcccagtgtgacagtgtcatgatgtagtagtgtcttactggttttttaataaatccttttgtataaa

SEQ ID NO: 80339 - DNA, 1641 bp, Homo sapiens
tgggttagcgatggaggtaggattggtgctgtgggtgaaagagtatgatggggtggtggttgtggtaaactttaatagtgtaggaagctgaataatttatgaaggagaggggtcaggcttgattcgggaggatcctattggtgcgggggctttgtatgattatgggcgttgattagtagtgtgttacgtgttctgatcagttaataatataaaatattaacatatggatagtttgatacaatgagtttgcctatttgtggttccccattttgatagtataggaaggaagaatagttcttgccccaatacgttttatgaagatagaggtaggttcaggaattatttcctgaataatttgtgttccaggctctgctaaattttgaaattaactttaaagatactatagacttaaagatgcctagttaaaaggatgtgttttagcaattcacagaagtccatattttgaaattttgttaggcaagcaacttttaactgaatcattattttgatcctgggctaaagggaagtagcagttatgtttgtatatagtgctaaagggaagtagcagtcatgtttgtatatattgaaggtaatggttatctagtaattggttaaatttgtgtatgtcctaccattcttacctttagatttaaacagtatatgttagttgatgttacatcaccaccatgacttgacagtttaatcttgagcaagtcaacatatgcttggcattatctgtatttatagttatttttaagtaagttaatagtctctgaacttcagttaagatatatattttttaaatgaaaacttcaatttccttaggtcatggatcaaaaagaacataaattgaatgggaaggtgattgatcctaaaagggccaaagccatgaaaacaaaagagccggttaaaaaaatttttgttggtggcctttctccagatacacctgaagagaaaataagggagtactttggtggttttggtgaggtggaatccatagagctccccatggacaacaagaccaataagaggcgtgggttctgctttattacctttaaggaagaagaaccagtgaagaagataatggaaaagaaataccacaatgttggtcttagtaaatgtgaaataaaagtagccatgtcgaaggaacaatatcagcaacagcaacagtggggatctagaggaggatttgcaggaagagctcgtggaagaggtggtgaccagcagagtggttatgggaaggtatccaggcgaggtggtcatcaaaatagctacaaaccatactaaattattccatttgcaacttatccccaacaggtggtgaagcagtattttccaatttgaagattcatttgaaggtggctcctgccacctgctaatagcagttcaaactaaattttttgtatcaagtccctgaatggaagtatgacgttgggtccctctgaagtttaattctgagttctcattaaaagaaatttgctttcattgttttatttcttaattgctatgcttcagaatcaatttgtgttttatgccctttcccccagtattgtagagcaagtcttgtgttaaaagcccagtgtgacagtgtcatgatgtagtagtgtcttactggttttttaataaatccttttgtataaa

SEQ ID NO: 80340 - DNA, 1788 bp, Homo sapiens
tgggttagcgatggaggtaggattggtgctgtgggtgaaagagtatgatggggtggtggttgtggtaaactttaatagtgtaggaagctgaataatttatgaaggagaggggtcaggcttgattcgggaggatcctattggtgcgggggctttgtatgattatgggcgttgattagtagtgtgttacgtgttctgatcagttaataatataaaatattaacatatggatagtttgatacaatgagtttgcctatttgtggttccccattttgatagtataggaaggaagaatagttcttgccccaatacgttttatgaagatagaggtaggttcaggaattatttcctgaataatttgtgttccaggctctgctaaattttgaaattaactttaaagatactatagacttaaagatgcctagttaaaaggatgtgttttagcaattcacagaagtccatattttgaaattttgttaggcaagcaacttttaactgaatcattattttgatcctgggctaaagggaagtagcagttatgtttgtatatagtgctaaagggaagtagcagtcatgtttgtatatattgaaggtaatggttatctagtaattggttaaatttgtgtatgtcctaccattcttacctttagatttaaacagtatatgttagttgatgttacatcaccaccatgacttgacagtttaatcttgagcaagtcaacatatgcttggcattatctgtatttatagttatttttaagtaagttaatagtctctgaacttcagttaagatatatattttttaaatgaaaacttcaatttccttaggtcatggatcaaaaagaacataaattgaatgggaaggtgattgatcctaaaagggccaaagccatgaaaacaaaagagccggttaaaaaaatttttgttggtggcctttctccagatacacctgaagagaaaataagggagtactttggtggttttggtgaggtggaatccatagagctccccatggacaacaagaccaataagaggcgtgggttctgctttattacctttaaggaagaagaaccagtgaagaagataatggaaaagaaataccacaatgttggtcttagtaaatgtgaaataaaagtagccatgtcgaaggaacaatatcagcaacagcaacagtggggatctagaggaggatttgcaggaagagctcgtggaagaggtggtggccccagtcaaaactggaaccagggatatagtaactattggaatcaaggctatggcaactatggatataacagccaaggttacggtggttatggaggatatgactacactggttacaacaactactatggatatggtgattatagcaaccagcagagtggttatgggaaggtatccaggcgaggtggtcatcaaaatagctacaaaccatactaaattattccatttgcaacttatccccaacaggtggtgaagcagtattttccaatttgaagattcatttgaaggtggctcctgccacctgctaatagcagttcaaactaaattttttgtatcaagtccctgaatggaagtatgacgttgggtccctctgaagtttaattctgagttctcattaaaagaaatttgctttcattgttttatttcttaattgctatgcttcagaatcaatttgtgttttatgccctttcccccagtattgtagagcaagtcttgtgttaaaagcccagtgtgacagtgtcatgatgtagtagtgtcttactggttttttaataaatccttttgtataaa

SEQ ID NO: 80341 - DNA, 2425 bp, Homo sapiens
ggctcggcacctcatgctttatacttcccgcagcgccgagtcggagggggcgaagattgacgccagtaagaacgaggaggatgaaggccattcaaactcctccccacgacactctgaagcagcgacggcacagcgggaagaatggaaaatgtttataggaggccttagctgggacactacaaagaaagatctgaaggactacttttccaaatttggtgaagttgtagactgcactctgaagttagatcctatcacagggcgatcaaggggttttggctttgtgctatttaaagaatcggagagtgtagataaggtcatggatcaaaaagaacataaattgaatgggaaggtgattgatcctaaaagggccaaagccatgaaaacaaaagagccggttaaaaaaatttttgttggtggcctttctccagatacacctgaagagaaaataagggagtactttggtggttttggtgaggtggaatccatagagctccccatggacaacaagaccaataagaggcgtgggttctgctttattacctttaaggaagaagaaccagtgaagaagataatggaaaagaaataccacaatgttggtcttagtaaatgtgaaataaaagtagccatgtcgaaggaacaatatcagcaacagcaacagtggggatctagaggaggatttgcaggaagagctcgtggaagaggtggtggccccagtcaaaactggaaccagggatatagtaactattggaatcaaggctatggcaactatggatataacagccaaggttacggtggttatggaggatatgactacactggttacaacaactactatggatatggtgattatagcaaccagcagagtggttatgggaaggtatccaggcgaggtggtcatcaaaatagctacaaaccatactaaattattccatttgcaacttatccccaacaggtatgttctaaaaatagtttttttttgtcatttacaatagtagtttttataatctatattgttcataaaacaatgcttaatttaagagtttcacagcacccagaagtgcttaccatattataacatagtgactttcaaagatatgtaacacaggtgctcttaagcttttgcctttttgtcctattattaacaagtcagtaaagttaacaggtaaagtactgctaatgggtacaaattaaggaattgcagcaaaaaagtattgcctactaactctgacattataccttgtttgtacccgccagcgggaacttcattgcaggccctgtgtcgcgctgacttcacgattctcacaggcccgctcaatgcggacagggtacgagatgctcacgctctcgaatgctgccgtttggtatggtctcttccaacatcctgtatcagcattataaaataaaatggatacttcaagctttgccttcacttatttctttgctttttaaaaactatttgtaatgtaattttaatgcattttttacaggcccagtaatggttaaatacgtcagcttactgaataattttaactatttattcttctaaggatacagcttgtctctggattttccagtcttaattttatattttattaatctattttaatgcttgcttttcccatttatagacgttgtagcagtaattgcaagaagttcttgagctgaattcctgttgtgacaacttcctataattacagtagataactttttcttttagtcgtatataacttttctataacttgtgatggacaagagatatgcttatccaataaaataagcttaaatattagatgctcttgggtcaaaatgtccttttaccaaattgacctttttatgagttctttgggtaaatactttaaagctttttatattttaaagaatacttgtaaaagcatatcacatcttaaaccagtggtgcacatgtggatttacagctcatggactctactgttcagctttaatttataaaacatatcacacatttaatgttatacagtatttacatatagtggaacatagggataactcagttttatgtaaatttttgttaagtgttgtagcctgcccagagtgacttctattttttcttctttgtctccaggtggtgaagcagtattttccaatttgaagattcatttgaaggtggctcctgccacctgctaatagcagttcaaactaaattttttgtatcaagtccctgaatggaagtatgacgttgggtccctctgaagtttaattctgagttctcattaaaagaaatttgctttcattgttttatttcttaattgctatgcttcagaatcaatttgtgttttatgccctttcccccagtattgtagagcaagtcttgtgttaaaagcccagtgtgacagtgtcatgatgtagtagtgtcttactggttttttaataaatccttttgtataaa

SEQ ID NO: 80342 - DNA, 1422 bp, Homo sapiens
ggctcggcacctcatgctttatacttcccgcagcgccgagtcggagggggcgaagattgacgccagtaagaacgaggaggatgaaggccattcaaactcctccccacgacactctgaagcagcgacggcacagcgggaagaatggaaaatgtttataggaggccttagctgggacactacaaagaaagatctgaaggactacttttccaaatttggtgaagttgtagactgcactctgaagttagatcctatcacagggcgatcaaggggttttggctttgtgctatttaaagaatcggagagtgtagataaggtcatggatcaaaaagaacataaattgaatgggaaggtgattgatcctaaaagggccaaagccatgaaaacaaaagagccggttaaaaaaatttttgttggtggcctttctccagatacacctgaagagaaaataagggagtactttggtggttttggtgaggtggaatccatagagctccccatggacaacaagaccaataagaggcgtgggttctgctttattacctttaaggaagaagaaccagtgaagaagataatggaaaagaaataccacaatgttggtcttagtaaatgtgaaataaaagtagccatgtcgaaggaacaatatcagcaacagcaacagtggggatctagaggaggatttgcaggaagagctcgtggaagaggtggtggccccagtcaaaactggaaccagggatatagtaactattggaatcaaggctatggcaactatggatataacagccaaggttacggtggttatggaggatatgactacactggttacaacaactactatggatatggtgattatagcaaccagcagagtggttatgggaaggtatccaggcgaggtggtcatcaaaatagctacaaaccatactaaattattccatttgcaacttatccccaacaggtggtgaagcagtattttccaatttgaagattcatttgaaggtggctcctgccacctgctaatagcagttcaaactaaattttttgtatcaagtccctgaatggaagtatgacgttgggtccctctgaagtttaattctgagttctcattaaaagaaatttgctttcattgttttatttcttaattgctatgcttcagaatcaatttgtgttttatgccctttcccccagtattgtagagcaagtcttgtgttaaaagcccagtgtgacagtgtcatgatgtagtagtgtcttactggttttttaataaatccttttgtataaatttttaattcaagaagtaggctgggcccggtggctcatgcctgtaatcctggcactttgggaggctgcggcaggcggatcacttgaggtcaggagtccaagaccagcctggccaacatggtgaaaccccatctctaccaaaaaaaa

SEQ ID NO: 80343 - DNA, 1516 bp, Homo sapiens
ggctcggcacctcatgctttatacttcccgcagcgccgagtcggagggggcgaagattgacgccagtaagaacgaggaggatgaaggccattcaaactcctccccacgacactctgaagcagcgacggcacagcgggaagaatggaaaatgtttataggaggccttagctgggacactacaaagaaagatctgaaggactacttttccaaatttggtgaagttgtagactgcactctgaagttagatcctatcacagggcgatcaaggggttttggctttgtgctatttaaagaatcggagagtgtagataaggtcatggatcaaaaagaacataaattgaatgggaaggtgattgatcctaaaagggccaaagccatgaaaacaaaagagccggttaaaaaaatttttgttggtggcctttctccagatacacctgaagagaaaataagggagtactttggtggttttggtgaggtggaatccatagagctccccatggacaacaagaccaataagaggcgtgggttctgctttattacctttaaggaagaagaaccagtgaagaagataatggaaaagaaataccacaatgttggtcttagtaaatgtgaaataaaagtagccatgtcgaaggaacaatatcagcaacagcaacagtggggatctagaggaggatttgcaggaagagctcgtggaagaggtggtggccccagtcaaaactggaaccagggatatagtaactattggaatcaaggctatggcaactatggatataacagccaaggttacggtggttatggaggatatgactacactggttacaacaactactatggatatggtgattatagcaaccagcagagtggttatgggaaggtatccaggcgaggtggtcatcaaaatagctacaaaccatactaaattattccatttgcaacttatccccaacaggtggtgaagcagtattttccaatttgaagattcatttgaaggtggctcctgccacctgctaatagcagttcaaactaaattttttgtatcaagtccctgaatggaagtatgacgttgggtccctctgaagtttaattctgagttctcattaaaagaaatttgctttcattgttttatttcttaattgctatgcttcagaatcaatttgtgttttatgccctttcccccagtattgtagagcaagtcttgtgttaaaagcccagtgtgacagtgtcatgatgtagtagtgtcttactggttttttaataaatccttttgtataaaaaaaaaaaaaaaaaaaaaaaaaaaaaaaaaaaaaaaaaaaaaaaaaaaaaaaaaaaaaaaaaaaaaaaaagggaaaaaaaaaaaacccaaaaaaaaaaaaaaccttgtcgcccgcttgggcccagtcgattttaaactcgaccaagtttatccttgcggccgaatttcggcctcattggcccaattccccctatagggagccgttttacaattcattgcccgccgtttaacaacgtcgga

SEQ ID NO: 80344 - DNA, 2916 bp, Homo sapiens
ggctcggcacctcatgctttatacttcccgcagcgccgagtcggagggggcgaagattgacgccagtaagaacgaggaggatgaaggccattcaaactcctccccacgacactctgaagcagcgacggcacagcgggaagaatggaaaatgtttataggaggccttagctgggacactacaaagaaagatctgaaggactacttttccaaatttggtgaagttgtagactgcactctgaagttagatcctatcacagggcgatcaaggggttttggctttgtgctatttaaagaatcggagagtgtagataaggtcatggatcaaaaagaacataaattgaatgggaaggtgattgatcctaaaagggccaaagccatgaaaacaaaagagccggttaaaaaaatttttgttggtggcctttctccagatacacctgaagagaaaataagggagtactttggtggttttggtgaggtggaatccatagagctccccatggacaacaagaccaataagaggcgtgggttctgctttattacctttaaggaagaagaaccagtgaagaagataatggaaaagaaataccacaatgttggtcttagtaaatgtgaaataaaagtagccatgtcgaaggaacaatatcagcaacagcaacagtggggattaactattggaatcaaggctatggcaactatggatataacagccaaggttacggtggttatggaggatatgactacactggttacaacaactactatggatatggtgattatagcaaccagcagagtggttatgggaaggtatccaggcgaggtggtcatcaaaatagctacaaaccatactaaattattccatttgcaacttatccccaacaggtggtgaagcagtattttccaatttgaagattcatttgaaggtggctcctgccacctgctaatagcagttcaaactaaattttttgtatcaagtccctgaatggaagtatgacgttgggtccctctgaagtttaattctgagttctcattaaaagaaatttgctttcattgttttatttcttaattgctatgcttcagaatcaatttgtgttttatgccctttcccccagtattgtagagcaagtcttgtgttaaaagcccagtgtgacagtgtcatgatgtagtagtgtcttactggttttttaataaatccttttgtataaaaatgtattggctcttttatcatcagaataggaaaaattgtcatggattcaagttattaaaagcataagtttggaagacaggcttgccgaaattgaggacatgattaaaattgcagtgaagtttgaaatgtttttagcaaaatctaatttttgccataatgtgtcctccctgtccaaattgggaatgacttaatgtcaatttgtttgttggttgttttaataatacttccttatgtagccattaagatttatatgaatattttcccaaatgcccagtttttgcttaatatgtattgtgctttttagaacaaatctggataaatgtgcaaaagtacccctttgcacagatagttaatgttttatgcttccattaaataaaaaggacttaaaatctgttaattataatagaaatgcggctagttcagagagatttttagagctgtggtggacttcatagatgaattcaagtgttgagggaggattaaagaaatatataccgtgtttatgtgtgtgtgcttatttgtttgaatgattttattttccatttctcaaaggttttatttttttggttagggccttaaaatttcaggactgtgattattagtatgtgtgcctaaggaactttttgagtcactcttaagaaagtgaaactgaagagtctaagtgataactataggattaagtcagaattgtttttcctgtcatttgttggaagcttcttgagttctgttattagcattcagggaattgatacccatcaacttgaatggaaaatcgtttgtaggtattacttaagtgaatgttaagagttccaccctgagtggtaatctaaggctgtgcagtcagttacttcagactgctcagaatagttcattagaaaggtaacaaatgagaaatgtattattatacagttctatagtagtgaagtgatggaatacctttcttacttttgtggagttacatctgatgctaagaatttgacctccaactaagcaaacattttaatgagcaaaagttagtgttattaaagttttttatgatagatccaaattgaggacctgtgtcctgtttttataagattgcaacccagctatgctcatttgtttatgttttgtatatggctgcttttgtgttacagtggtagagtttagtagttaggacagagacctgcaaagcaaaataatttacagtctggccctttacagaaaagtttgctgactcatggtcaaaataaatgaaaattttttgtgttagggttgttaagctagggttctttttggtatcatatgcttattttatgtaaatctctcaataaaaaattatttttaagagaaaaaaaaaaaaaaaaaaaaaaaaaaaaaaaaaggggggggggtaaaaatttccctgggggggcccaggttaggggtcccggtttttgttaaggggggcccctattggggggcccgattttaaaccgcaagggaccggggccgggcggttaacccacggtccgggcctgtggacaccctggcgttccctggggaccctgtggggaggggaccccttactttcttggggtgggccttatctgtgcgcgacttacctacggggagttaaggcacccggcgggaattttaacattttcaggtctttctgctgtgatccaacgctggatatgtctcgcggtggaaagtttcggtcacgggttgctttagacatttttcccagcggc

SEQ ID NO: 80345 - DNA, 2752 bp, Homo sapiens
ggctcggcacctcatgctttatacttcccgcagcgccgagtcggagggggcgaagattgacgccagtaagaacgaggaggatgaaggccattcaaactcctccccacgacactctgaagcagcgacggcacagcgggaagaatggaaaatgtttataggaggccttagctgggacactacaaagaaagatctgaaggactacttttccaaatttggtgaagttgtagactgcactctgaagttagatcctatcacagggcgatcaaggggttttggctttgtgctatttaaagaatcggagagtgtagataaggtcatggatcaaaaagaacataaattgaatgggaaggtgattgatcctaaaagggccaaagccatgaaaacaaaagagccggttaaaaaaatttttgttggtggcctttctccagatacacctgaagagaaaataagggagtactttggtggttttggtgaggtggaatccatagagctccccatggacaacaagaccaataagaggcgtgggttctgctttattacctttaaggaagaagaaccagtgaagaagataatggaaaagaaataccacaatgttggtcttagtaaatgtgaaataaaagtagccatgtcgaaggaacaatatcagcaacagcaacagtggggatctagaggaggatttgcaggaagagctcgtggaagaggtggtgaccagcagagtggttatgggaaggtatccaggcgaggtggtcatcaaaatagctacaaaccatactaaattattccatttgcaacttatccccaacaggtggtgaagcagtattttccaatttgaagattcatttgaaggtggctcctgccacctgctaatagcagttcaaactaaattttttgtatcaagtccctgaatggaagtatgacgttgggtccctatgccctttcccccagtattgtagagcaagtcttgtgttaaaagcccagtgtgacagtgtcatgatgtagtagtgtcttactggttttttaataaatccttttgtataaaaatgtattggctcttttatcatcagaataggaaaaattgtcatggattcaagttattaaaagcataagtttggaagacaggcttgccgaaattgaggacatgattaaaattgcagtgaagtttgaaatgtttttagcaaaatctaatttttgccataatgtgtcctccctgtccaaattgggaatgacttaatgtcaatttgtttgttggttgttttaataatacttccttatgtagccattaagatttatatgaatattttcccaaatgcccagtttttgcttaatatgtattgtgctttttagaacaaatctggataaatgtgcaaaagtacccctttgcacagatagttaatgttttatgcttccattaaataaaaaggacttaaaatctgttaattataatagaaatgcggctagttcagagagatttttagagctgtggtggacttcatagatgaattcaagtgttgagggaggattaaagaaatatataccgtgtttatgtgtgtgtgcttatttgtttgaatgattttattttccatttctcaaaggttttatttttttggttagggccttaaaatttcaggactgtgattattagtatgtgtgcctaaggaactttttgagtcactcttaagaaagtgaaactgaagagtctaagtgataactataggattaagtcagaattgtttttcctgtcatttgttggaagcttcttgagttctgttattagcattcagggaattgatacccatcaacttgaatggaaaatcgtttgtaggtattacttaagtgaatgttaagagttccaccctgagtggtaatctaaggctgtgcagtcagttacttcagactgctcagaatagttcattagaaaggtaacaaatgagaaatgtattattatacagttctatagtagtgaagtgatggaatacctttcttacttttgtggagttacatctgatgctaagaatttgacctccaactaagcaaacattttaatgagcaaaagttagtgttattaaagttttttatgatagatccaaattgaggacctgtgtcctgtttttataagattgcaacccagctatgctcatttgtttatgttttgtatatggctgcttttgtgttacagtggtagagtttagtagttaggacagagacctgcaaagcaaaataatttacagtctggccctttacagaaaagtttgctgactcatggtcaaaataaatgaaaattttttgtgttagggttgttaagctagggttctttttggtatcatatgcttattttatgtaaatctctcaataaaaaattatttttaagagaaaaaaaaaaaaaaaaaaaaaaaaaaaaaaaaaggggggggggtaaaaatttccctgggggggcccaggttaggggtcccggtttttgttaaggggggcccctattggggggcccgattttaaaccgcaagggaccggggccgggcggttaacccacggtccgggcctgtggacaccctggcgttccctggggaccctgtggggaggggaccccttactttcttggggtgggccttatctgtgcgcgacttacctacggggagttaaggcacccggcgggaattttaacattttcaggtctttctgctgtgatccaacgctggatatgtctcgcggtggaaagtttcggtcacgggttgctttagacatttttcccagcggc

SEQ ID NO: 80346 - DNA, 1220 bp, Homo sapiens
ggctcggcacctcatgctttatacttcccgcagcgccgagtcggagggggcgaagattgacgccagtaagaacgaggaggatgaaggccattcaaactcctccccacgacactctgaagcagcgacggcacagcgggaagaatggaaaatgtttataggaggccttagctgggacactacaaagaaagatctgaaggactacttttccaaatttggtgaagttgtagactgcactctgaagttagatcctatcacagggcgatcaaggggttttggctttgtgctatttaaagaatcggagagtgtagataaggtcatggatcaaaaagaacataaattgaatgggaaggtgattgatcctaaaagggccaaagccatgaaaacaaaagagccggttaaaaaaatttttgttggtggcctttctccagatacacctgaagagaaaataagggagtactttggtggttttggtgaggtggaatccatagagctccccatggacaacaagaccaataagaggcgtgggttctgctttattacctttaaggaagaagaaccagtgaagaagataatggaaaagaaataccacaatgttggtcttagtaaatgtgaaataaaagtagccatgtcgaaggaacaatatcagcaacagcaacagtggggatctagaggaggatttgcaggaagagctcgtggaagaggtggtggccccagtcaaaactggaaccagggatatagtaactattggaatcaaggctatggcaactatggatataacagccaaggttacggtggttatggaggatatgactacactggttacaacaactactatggatatggtgattatagcaaccagcagagtggttatgggaaggtatccaggcgaggtggtcatcaaaatagctacaaaccatactaaattattccatttgcaacttatccccaacaggtggtgaagcagtattttccaatttgaagattcatttgaaggtggctcctgccacctgctaatagcagttcaaactaaattttttgtatcaagtccctgaatggaagtatgacgttgggtccctctgaagtttaattctgagttctcattaaaagaaatttgctttcattgttttatttcttaattgctatgcttcagaatcaatttgtgttttatgccctttcccccagtattgtagagcctgtaggggactcctctagacgccacc

SEQ ID NO: 80347 - DNA, 4018 bp, Homo sapiens
ggctcggcacctcatgctttatacttcccgcagcgccgagtcggagggggcgaagattgacgccagtaagaacgaggaggatgaaggccattcaaactcctccccacgacactctgaagcagcgacggcacagcgggaagaatggaaaatgtttataggaggccttagctgggacactacaaagaaagatctgaaggactacttttccaaatttggtgaagttgtagactgcactctgaagttagatcctatcacagggcgatcaaggggttttggctttgtgctatttaaagaatcggagagtgtagataaggtcatggatcaaaaagaacataaattgaatgggaaggtgattgatcctaaaagggccaaagccatgaaaacaaaagagccggttaaaaaaatttttgttggtggcctttctccagatacacctgaagagaaaataagggagtactttggtggttttggtgaggtggaatccatagagctccccatggacaacaagaccaataagaggcgtgggttctgctttattacctttaaggaagaagaaccagtgaagaagataatggaaaagaaataccacaatgttggtcttagtaaatttaataatgtaatttttctcttttagtgtgaaataaaagtagccatgtcgaaggaacaatatcagcaacagcaacagtggggatctagaggaggatttgcaggaagagctcgtggaagaggtggtgaccagcagagtggttatgggaaggtatccaggcgaggtggtcatcaaaatagctacaaaccatactaaattattccatttgcaacttatccccaacaggtatgttctaaaaatagtttttttttgtcatttacaatagtagtttttataatctatattgttcataaaacaatgcttaatttaagagtttcacagcacccagaagtgcttaccatattataacatagtgactttcaaagatatgtaacacaggtgctcttaagcttttgcctttttgtcctattattaacaagtcagtaaagttaacaggtaaagtactgctaatgggtacaaattaaggaattgcagcaaaaaagtattgcctactaactctgacattataccttgtttgtacccgccagcgggaacttcattgcaggccctgtgtcgcgctgacttcacgattctcacaggcccgctcaatgcggacagggtacgagatgctcacgctctcgaatgctgccgtttggtatggtctcttccaacatcctgtatcagcattataaaataaaatggatacttcaagctttgccttcacttatttctttgctttttaaaaactatttgtaatgtaattttaatgcattttttacaggcccagtaatggttaaatacgtcagcttactgaataattttaactatttattcttctaaggatacagcttgtctctggattttccagtcttaattttatattttattaatctattttaatgcttgcttttcccatttatagacgttgtagcagtaattgcaagaagttcttgagctgaattcctgttgtgacaacttcctataattacagtagataactttttcttttagtcgtatataacttttctataacttgtgatggacaagagatatgcttatccaataaaataagcttaaatattagatgctcttgggtcaaaatgtccttttaccaaattgacctttttatgagttctttgggtaaatactttaaagctttttatattttaaagaatacttgtaaaagcatatcacatcttaaaccagtggtgcacatgtggatttacagctcatggactctactgttcagctttaatttataaaacatatcacacatttaatgttatacagtatttacatatagtggaacatagggataactcagttttatgtaaatttttgttaagtgttgtagcctgcccagagtgacttctattttttcttctttgtctccaggtggtgaagcagtattttccaatttgaagattcatttgaaggtggctcctgccacctgctaatagcagttcaaactaaattttttgtatcaagtccctgaatggaagtatgacgttgggtccctctgaagtttaattctgagttctcattaaaagaaatttgctttcattgttttatttcttaattgctatgcttcagaatcaatttgtgttttatgccctttcccccagtattgtagagcaagtcttgtgttaaaagcccagtgtgacagtgtcatgatgtagtagtgtcttactggttttttaataaatccttttgtataaaaatgtattggctcttttatcatcagaataggaaaaattgtcatggattcaagttattaaaagcataagtttggaagacaggcttgccgaaattgaggacatgattaaaattgcagtgaagtttgaaatgtttttagcaaaatctaatttttgccataatgtgtcctccctgtccaaattgggaatgacttaatgtcaatttgtttgttggttgttttaataatacttccttatgtagccattaagatttatatgaatattttcccaaatgcccagtttttgcttaatatgtattgtgctttttagaacaaatctggataaatgtgcaaaagtacccctttgcacagatagttaatgttttatgcttccattaaataaaaaggacttaaaatctgttaattataatagaaatgcggctagttcagagagatttttagagctgtggtggacttcatagatgaattcaagtgttgagggaggattaaagaaatatataccgtgtttatgtgtgtgtgcttatttgtttgaatgattttattttccatttctcaaaggttttatttttttggttagggccttaaaatttcaggactgtgattattagtatgtgtgcctaaggaactttttgagtcactcttaagaaagtgaaactgaagagtctaagtgataactataggattaagtcagaattgtttttcctgtcatttgttggaagcttcttgagttctgttattagcattcagggaattgatacccatcaacttgaatggaaaatcgtttgtaggtattacttaagtgaatgttaagagttccaccctgagtggtaatctaaggctgtgcagtcagttacttcagactgctcagaatagttcattagaaaggtaacaaatgagaaatgtattattatacagttctatagtagtgaagtgatggaatacctttcttacttttgtggagttacatctgatgctaagaatttgacctccaactaagcaaacattttaatgagcaaaagttagtgttattaaagttttttatgatagatccaaattgaggacctgtgtcctgtttttataagattgcaacccagctatgctcatttgtttatgttttgtatatggctgcttttgtgttacagtggtagagtttagtagttaggacagagacctgcaaagcaaaataatttacagtctggccctttacagaaaagtttgctgactcatggtcaaaataaatgaaaattttttgtgttagggttgttaagctagggttctttttggtatcatatgcttattttatgtaaatctctcaataaaaaattatttttaagagaaaaaaaaaaaaaaaaaaaaaaaaaaaaaaaaaggggggggggtaaaaatttccctgggggggcccaggttaggggtcccggtttttgttaaggggggcccctattggggggcccgattttaaaccgcaagggaccggggccgggcggttaacccacggtccgggcctgtggacaccctggcgttccctggggaccctgtggggaggggaccccttactttcttggggtgggccttatctgtgcgcgacttacctacggggagttaaggcacccggcgggaattttaacattttcaggtctttctgctgtgatccaacgctggatatgtctcgcggtggaaagtttcggtcacgggttgctttagacatttttcccagcggc

SEQ ID NO: 80348 - DNA, 2269 bp, Homo sapiens
ggctcggcacctcatgctttatacttcccgcagcgccgagtcggagggggcgaagattgacgccagtaagaacgaggaggatgaaggccattcaaactcctccccacgacactctgaagcagcgacggcacagcgggaagaatggaaaatgtttataggaggccttagctgggacactacaaagaaagatctgaaggactacttttccaaatttggtgaagttgtagactgcactctgaagttagatcctatcacagggcgatcaaggggttttggctttgtgctatttaaagaatcggagagtgtagataaggtcatggatcaaaaagaacataaattgaatgggaaggtgattgatcctaaaagggccaaagccatgaaaacaaaagagccggttaaaaaaatttttgttggtggcctttctccagatacacctgaagagaaaataagggagtactttggtggttttggtgaggtggaatccatagagctccccatggacaacaagaccaataagaggcgtgggttctgctttattacctttaaggaagaagaaccagtgaagaagataatggaaaagaaataccacaatgttggtcttagtaaatgtgaaataaaagtagccatgtcgaaggaacaatatcagcaacagcaacagtggggatctagaggaggatttgcaggaagagctcgtggaagaggtggtggccccagtcaaaactggaaccagggatatagtaactattggaatcaaggctatggcaactatggatataacagccaaggttacggtggttatggaggatatgactacactggttacaacaactactatggatatggtgattatagcaaccagcagagtggttatgggaaggtatccaggcgaggtggtcatcaaaatagctacaaaccatactaaattattccatttgcaacttatccccaacaggtatgttctaaaaatagtttttttttgtcatttacaatagtagtttttataatctatattgttcataaaacaatgcttaatttaagagtttcacagcacccagaagtgcttaccatattataacatagtgactttcaaagatatgtaacacaggtgctcttaagcttttgcctttttgtcctattattaacaagtcagtaaagttaacaggtaaagtactgctaatgggtacaaattaaggaattgcagcaaaaaagtattgcctactaactctgacattataccttgtttgtacccgccagcgggaacttcattgcaggccctgtgtcgcgctgacttcacgattctcacaggcccgctcaatgcggacagggtacgagatgctcacgctctcgaatgctgccgtttggtatggtctcttccaacatcctgtatcagcattataaaataaaatggatacttcaagctttgccttcacttatttctttgctttttaaaaactatttgtaatgtaattttaatgcattttttacaggcccagtaatggttaaatacgtcagcttactgaataattttaactatttattcttctaaggatacagcttgtctctggattttccagtcttaattttatattttattaatctattttaatgcttgcttttcccatttatagacgttgtagcagtaattgcaagaagttcttgagctgaattcctgttgtgacaacttcctataattacagtagataactttttcttttagtcgtatataacttttctataacttgtgatggacaagagatatgcttatccaataaaataagcttaaatattagatgctcttgggtcaaaatgtccttttaccaaattgacctttttatgagttctttgggtaaatactttaaagctttttatattttaaagaatacttgtaaaagcatatcacatcttaaaccagtggtgcacatgtggatttacagctcatggactctactgttcagctttaatttataaaacatatcacacatttaatgttatacagtatttacatatagtggaacatagggataactcagttttatgtaaatttttgttaagtgttgtagcctgcccagagtgacttctattttttcttctttgtctccaggtggtgaagcagtattttccaatttgaagattcatttgaaggtggctcctgccacctgctaatagcagttcaaactaaattttttgtatcaagtccctgaatggaagtatgacgttgggtccctctgaagtttaattctgagttctcattaaaagaaatttgctttca

SEQ ID NO: 80349 - DNA, 1186 bp, Homo sapiens
ggctcggcacctcatgctttatacttcccgcagcgccgagtcggagggggcgaagattgacgccagtaagaacgaggaggatgaaggccattcaaactcctccccacgacactctgaagcagcgacggcacagcgggaagaatggaaaatgtttataggaggccttagctgggacactacaaagaaagatctgaaggactacttttccaaatttggtgaagttgtagactgcactctgaagttagatcctatcacagggcgatcaaggggttttggctttgtgctatttaaagaatcggagagtgtagataaggtcatggatcaaaaagaacataaattgaatgggaaggtgattgatcctaaaagggccaaagccatgaaaacaaaagagccggttaaaaaaatttttgttggtggcctttctccagatacacctgaagagaaaataagggagtactttggtggttttggtgaggtggaatccatagagctccccatggacaacaagaccaataagaggcgtgggttctgctttattacctttaaggaagaagaaccagtgaagaagataatggaaaagaaataccacaatgttggtcttagtaaatgtgaaataaaagtagccatgtcgaaggaacaatatcagcaacagcaacagtggggatctagaggaggatttgcaggaagagctcgtggaagaggtggtggccccagtcaaaactggaaccagggatatagtaactattggaatcaaggctatggcaactatggatataacagccaaggttacggtggttatggaggatatgactacactggttacaacaactactatggatatggtgattatagcaaccagcagagtggttatgggaaggtatccaggcgaggtggtcatcaaaatagctacaaaccatactaaattattccatttgcaacttatccccaacaggtggtgaagcagtattttccaatttgaagattcatttgaaggtggctcctgccacctgctaatagcagttcaaactaaattttttgtatcaagtccctgaatggaagtatgacgttgggtccctatgccctttcccccagtattgtagagcaagtcttgtgttaaaagcccagtgtgacagtgtcatgatgtagtagtgtcttactggttttttaataaatccttttgtataaa

SEQ ID NO: 80350 - DNA, 1383 bp, Homo sapiens
ggctcggcacctcatgctttatacttcccgcagcgccgagtcggagggggcgaagattgacgccagtaagaacgaggaggatgaaggccattcaaactcctccccacgacactctgaagcagcgacggcacagcgggaagaatggaaaatgtttataggaggccttagctgggacactacaaagaaagatctgaaggactacttttccaaatttggtgaagttgtagactgcactctgaagttagatcctatcacagggcgatcaaggggttttggctttgtgctatttaaagaatcggagagtgtagataaggtcatggatcaaaaagaacataaattgaatgggaaggtgattgatcctaaaagggccaaagccatgaaaacaaaagagccggttaaaaaaatttttgttggtggcctttctccagatacacctgaagagaaaataagggagtactttggtggttttggtgaggtggaatccatagagctccccatggacaacaagaccaataagaggcgtgggttctgctttattacctttaaggaagaagaaccagtgaagaagataatggaaaagaaataccacaatgttggtcttagtaaatgtgaaataaaagtagccatgtcgaaggaacaatatcagcaacagcaacagtggggatctagaggaggatttgcaggaagagctcgtggaagaggtggtggccccagtcaaaactggaaccagggatatagtaactattggaatcaaggctatggcaactatggatataacagccaaggttacggtggttatggaggatatgactacactggttacaacaactactatggatatggtgattatagcaaccagcagagtggttatgggaaggtatccaggcgaggtggtcatcaaaatagctacaaaccatactaaattattccatttgcaacttatccccaacagcgggaacttcattgcaggccctgtgtcgcgctgacttcacgattctcacaggcccgctcaatgcggacagggtacgagatgctcacgctctcgaatgctgccgtttggtggtgaagcagtattttccaatttgaagattcatttgaaggtggctcctgccacctgctaatagcagttcaaactaaattttttgtatcaagtccctgaatggaagtatgacgttgggtccctctgaagtttaattctgagttctcattaaaagaaatttgctttcattgttttatttcttaattgctatgcttcagaatcaatttgtgttttatgccctttcccccagtattgtagagcaagtcttgtgttaaaagcccagtgtgacagtgtcatgatgtagtagtgtcttactggttttttaataaatccttttgtataaa

SEQ ID NO: 80351 - DNA, 1236 bp, Homo sapiens
ggctcggcacctcatgctttatacttcccgcagcgccgagtcggagggggcgaagattgacgccagtaagaacgaggaggatgaaggccattcaaactcctccccacgacactctgaagcagcgacggcacagcgggaagaatggaaaatgtttataggaggccttagctgggacactacaaagaaagatctgaaggactacttttccaaatttggtgaagttgtagactgcactctgaagttagatcctatcacagggcgatcaaggggttttggctttgtgctatttaaagaatcggagagtgtagataaggtcatggatcaaaaagaacataaattgaatgggaaggtgattgatcctaaaagggccaaagccatgaaaacaaaagagccggttaaaaaaatttttgttggtggcctttctccagatacacctgaagagaaaataagggagtactttggtggttttggtgaggtggaatccatagagctccccatggacaacaagaccaataagaggcgtgggttctgctttattacctttaaggaagaagaaccagtgaagaagataatggaaaagaaataccacaatgttggtcttagtaaatgtgaaataaaagtagccatgtcgaaggaacaatatcagcaacagcaacagtggggatctagaggaggatttgcaggaagagctcgtggaagaggtggtgaccagcagagtggttatgggaaggtatccaggcgaggtggtcatcaaaatagctacaaaccatactaaattattccatttgcaacttatccccaacagcgggaacttcattgcaggccctgtgtcgcgctgacttcacgattctcacaggcccgctcaatgcggacagggtacgagatgctcacgctctcgaatgctgccgtttggtggtgaagcagtattttccaatttgaagattcatttgaaggtggctcctgccacctgctaatagcagttcaaactaaattttttgtatcaagtccctgaatggaagtatgacgttgggtccctctgaagtttaattctgagttctcattaaaagaaatttgctttcattgttttatttcttaattgctatgcttcagaatcaatttgtgttttatgccctttcccccagtattgtagagcaagtcttgtgttaaaagcccagtgtgacagtgtcatgatgtagtagtgtcttactggttttttaataaatccttttgtataaa

SEQ ID NO: 80352 - DNA, 1501 bp, Homo sapiens
ggctcggcacctcatgctttatacttcccgcagcgccgagtcggagggggcgaagattgacgccagtaagaacgaggaggatgaaggccattcaaactcctccccacgacactctgaagcagcgacggcacagcgggaagaatggaaaatgtttataggaggccttagctgggacactacaaagaaagatctgaaggactacttttccaaatttggtgaagttgtagactgcactctgaagttagatcctatcacagggcgatcaaggggttttggctttgtgctatttaaagaatcggagagtgtagataaggtcatggatcaaaaagaacataaattgaatgggaaggtgattgatcctaaaagggccaaagccatgaaaacaaaagagccggttaaaaaaatttttgttggtggcctttctccagatacacctgaagagaaaataagggagtactttggtggttttggtgaggtggaatccatagagctccccatggacaacaagaccaataagaggcgtgggttctgctttattacctttaaggaagaagaaccagtgaagaagataatggaaaagaaataccacaatgttggtcttagtaaatgtgaaataaaagtagccatgtcgaaggaacaatatcagcaacagcaacagtggggatctagaggaggatttgcaggaagagctcgtggaagaggtggtggccccagtcaaaactggaaccagggatatagtaactattggaatcaaggctatggcaactatggatataacagccaaggttacggtggttatggaggatatgactacactggttacaacaactactatggatatggtgattatagcaaccagcagagtggttatgggaaggtatccaggcgaggtggtcatcaaaatagctacaaaccatactaaattattccatttgcaacttatccccaacagggtgaacgccgtacttttccacatttgaagattccatttgacacgtggctccgtggccacctggctacaatacgccgttcacacctaacattcaaggtactcacggtccctgacatgcgcagttattggacgtcgggtacctctgcagctacactcctgaagtactcactaacacgacactatggcatcattggcctacattactaacttgtaaagcaacacgaagccaaactggcgatacatgaacaacccccccagtcttgtaccacaagaccgtggcgtcaacgtccaacaggacacggcaaacagcccacacgcgaccccgagcaccaacaaaccgttaggtaacacaaaactaaaccaacacaaacaccaaaagcagccaaacaacagcgcacacaaaaacacggggagccccagcaacgcatagacgccccgaacctataaccaagcacgaagcaaaaaagagaaacgctaacagcatacggagaagtaaaccaccagccaaaagataagccaacaccacgatcgcacgaggacacgacgaac

SEQ ID NO: 80353 - DNA, 1047 bp, Homo sapiens
ggctcggcacctcatgctttatacttcccgcagcgccgagtcggagggggcgaagattgacgccagtaagaacgaggaggatgaaggccattcaaactcctccccacgacactctgaagcagcgacggcacagcgggaagaatggaaaatgtttataggaggccttagctgggacactacaaagaaagatctgaaggactacttttccaaatttggtgaagttgtagactgcactctgaagttagatcctatcacagggcgatcaaggggttttggctttgtgctatttaaagaatcggagagtgtagataaggtcatggatcaaaaagaacataaattgaatgggaaggtgattgatcctaaaagggccaaagccatgaaaacaaaagagccggttaaaaaaatttttgttggtggcctttctccagatacacctgaagagaaaataagggagtactttggtggttttggtgaggtggaatccatagagctccccatggacaacaagaccaataagaggcgtgggttctgctttattacctttaaggaagaagaaccagtgaagaagataatggaaaagaaataccacaatgttggtcttagtaaatgtgaaataaaagtagccatgtcgaaggaacaatatcagcaacagcaacagtggggatctagaggaggatttgcaggaagagctcgtggaagaggtggtgaccagcagagtggttatgggaaggtatccaggcgaggtggtcatcaaaatagctacaaaccatactaaattattccatttgcaacttatccccaacagggtgaagcagtattttccactttgaagattcattgaattctgctgtgctttcagggtggttttggttgaaagctttgccaagtgatagatcagaaacatcaatgggcccatttagaagttcagagagtgaatggcttaaagtagcaggtgagggcatgctgttgctgatactgggctcagctatgaaagcagaataaaattcatcaccaaaatctgtgttgactgtgcggtaagtatgtagt

SEQ ID NO: 80354 - DNA, 841 bp, Homo sapiens
ggctcggcacctcatgctttatacttcccgcagcgccgagtcggagggggcgaagattgacgccagtaagaacgaggaggatgaaggccattcaaactcctccccacgacactctgaagcagcgacggcacagcgggaagaatggaaaatgtttataggaggccttagctgggacactacaaagaaagatctgaaggactacttttccaaatttggtgaagttgtagactgcactctgaagttagatcctatcacagggcgatcaaggggttttggctttgtgctatttaaagaatcggagagtgtagataaggtcatggatcaaaaagaacataaattgaatgggaaggtgattgatcctaaaagggccaaagccatgaaaacaaaagagccggttaaaaaaatttttgttggtggcctttctccagatacacctgaagagaaaataagggagtactttggtggttttggtgaggtggaatccatagagctccccatggacaacaagaccaataagaggcgtgggttctgctttattacctttaaggaagaagaaccagtgaagaagataatgggaatttaccgaaacccgtggaagcctttaaggaatggaaagagtggataataaaatgcctggctgttctccaaaaatgaggaccttcaaataggagtgattgaaataaataactacttgcatgttatgctttcatttgggtggaatacttcattggaataaactactgatcttgtgctgtgtcaaagtaacagactagaaccttctttcaagtacctgaattgaaatgaaactcattttgaataataaaaactctagaaactcaaa

SEQ ID NO: 80355 - DNA, 683 bp, Homo sapiens
gtgaaataaaagtagccatgtcgaaggaacaatatcagcaacagcaacagtggggatctagaggaggatttgcaggaagagctcgtggaagaggtggtggtaagctagagcctaagtttactctatcttaagcttttctgctttttaattatcctgaagtaaagatctttgctgatcttctgactttagtgaacctattaatgtgctgcaggccccagtcaaaactggaaccagggatatagtaactattggaatcaaggctatggcaactatggatataacagccaaggttacggtggttatggaggatatgactacactggttacaacaactactatggatatggtgattatagcagtaagtactatactttttatattaactgctatttgacatttattttgtacaaatttggataggcagaaaggttagtgtagccttgccaagtgcaaatgtcttcaggtttcaaattcctggaaacttgaaactgcagccattttattgcttggttcctcccagcctatatcacacacacattataagggtagggtgtatgtgtggttctatatatgtttgctgggcatttgttttacttggatttaaaaattttaagctcagttcagatcttttaagctcaaggtattctaaatgtcacttcttggaccaaccaataatcttggca

SEQ ID NO: 80356 - DNA, 678 bp, Homo sapiens
gtggtccgcggcggcgccattaaagcgaggaggaggcgagagcggccgccgctggtgcttattcttttttagtgcagcgggagagagcgggagtgtgcgccgcgcgagagtgggaggcgaagggggcaggccagggagaggcgcaggagcctttgcagccacgcgcgcgccttccctgtcttgtgtgcttcgcgaggtagagcgggcgcgcggcagcgcggggattactttgctgctagtttcggttcgcggcaggcgggtgtagtctcggcggcagcggcggagacactagcactatgtcggaggagcagttcggcggggacggggcggcggcagcggcaacggcggcggtaggtggtgaagcagtattttccaatttgaagattcatttgaaggtggctcctgccacctgctaatagcagttcaaactaaattttttgtatcaagtccctgaatggaagtatgacgttgggtccctctgaagtttaattctgagttctcattaaaagaaatttgctttcattgttttatttcttaattgctatgcttcagaatcaatttgtgttttatgccctttcccccagtattgtagagcaagtcttgtgttaaaagcccagtgtgacagtgtcatgatgtagtagtgtcttactggttttttaataaatccttttgtataaa

SEQ ID NO: 80357 - DNA, 1718 bp, Homo sapiens
gtggtccgcggcggcgccattaaagcgaggaggaggcgagagcggccgccgctggtgcttattcttttttagtgcagcgggagagagcgggagtgtgcgccgcgcgagagtgggaggcgaagggggcaggccagggagaggcgcaggagcctttgcagccacgcgcgcgccttccctgtcttgtgtgcttcgcgaggtagagcgggcgcgcggcagcgcggggattactttgctgctagtttcggttcgcggcaggcgggtgtagtctcggcggcagcggcggagacactagcactatgtcggaggagcagttcggcggggacggggcggcggcagcggcaacggcggcggtaggcggctcggcgggcgagcaggagggagccatggtggcggcgacacagggggcagcggcggcggcgggaagcggagccgggaccgggggcggaaccgcgtctggaggcaccgaagggggcagcgccgagtcggagggggcgaagattgacgccagtaagaacgaggaggatgaaggccattcaaactcctccccacgacactctgaagcagcgacggcacagcgggaagaatggaaaatgtttataggaggccttagctgggacactacaaagaaagatctgaaggactacttttccaaatttggtgaagttgtagactgcactctgaagttagatcctatcacagggcgatcaaggggttttggctttgtgctatttaaagaatcggagagtgtagataaggtcatggatcaaaaagaacataaattgaatgggaaggtgattgatcctaaaagggccaaagccatgaaaacaaaagagccggttaaaaaaatttttgttggtggcctttctccagatacacctgaagagaaaataagggagtactttggtggttttggtgaggtggaatccatagagctccccatggacaacaagaccaataagaggcgtgggttctgctttattacctttaaggaagaagaaccagtgaagaagataatggaaaagaaataccacaatgttggtcttagtaaatgtgaaataaaagtagccatgtcgaaggaacaatatcagcaacagcaacagtggggatctagaggaggatttgcaggaagagctcgtggaagaggtggtggccccagtcaaaactggaaccagggatatagtaactattggaatcaaggctatggcaactatggatataacagccaaggttacggtggttatggaggatatgactacactggttacaacaactactatggatatggtgattatagcaaccagcagagtggttatgggaaggtatccaggcgaggtggtcatcaaaatagctacaaaccatactaaattattccatttgcaacttatccccaacaggtggtgaagcagtattttccaatttgaagattcatttgaaggtggctcctgccacctgctaatagcagttcaaactaaattttttgtatcaagtccctgaatggaagtatgacgttgggtccctctgaagtttaattctgagttctcattaaaagaaatttgctttcattgttttatttcttaattgctatgcttcagaatcaatttgtgttttatgccctttcccccagtattgtagagcaagtcttgtgttaaaagcccagtgtgacagtgtcatgatgtagtagtgtcttactggttttttaataaatccttttgtataaa

SEQ ID NO: 80358 - DNA, 657 bp, Homo sapiens
atacgctaggtgcgaggctgggttagggacacagagaccaataagaggcgtgggttctgctttattacctttaaggaagaagaaccagtgaagaagataatggaaaagaaataccacaatgttggtcttagtaaatgtgaaataaaagtagccatgtcgaaggaacaatatcagcaacagcaacagtggggatctagaggaggatttgcaggaagagctcgtggaagaggtggtgaccagcagagtggttatgggaaggtatccaggcgaggtggtcatcaaaatagctacaaaccatactaaattattccatttgcaacttatccccaacaggtggtgaagcagtattttccaatttgaagattcatttgaaggtggctcctgccacctgctaatagcagttcaaactaaattttttgtatcaagtccctgaatggaagtatgacgttgggtccctctgaagtttaattctgagttctcattaaaagaaatttgctttcattgttttatttcttaattgctatgcttcagaatcaatttgtgttttatgccctttcccccagtattgtagagcaagtcttgtgttaaaagcccagtgtgacagtgtcatgatgtagtagtgtcttactggttttttaataaatccttttgtataaa

SEQ ID NO: 80359 - DNA, 1129 bp, Homo sapiens
ggctcggcacctcatgctttatacttcccgcagcgccgagtcggagggggcgaagattgacgccagtaagaacgaggaggatgaaggccattcaaactcctccccacgacactctgaagcagcgacggcacagcgggaagaatggaaaatgtttataggaggccttagctgggacactacaaagaaagatctgaaggactacttttccaaatttggtgaagttgtagactgcactctgaagttagatcctatcacagggcgatcaaggggttttggctttgtgctatttaaagaatcggagagtgtagataaggtcatggatcaaaaagaacataaattgaatgggaaggtgattgatcctaaaagggccaaagccatgaaaacaaaagagccggttaaaaaaatttttgttggtggcctttctccagatacacctgaagagaaaataagggagtactttggtggttttggtgaggtggaatccatagagctccccatggacaacaagaccaataagaggcgtgggttctgctttattacctttaaggaagaagaaccagtgaagaagataatggaaaagaaataccacaatgttggtcttagtaaatgtgaaataaaagtagccatgtcgaaggaacaatatcagcaacagcaacagtggggatctagaggaggatttgcaggaagagctcgtggaagaggtggtgaccagcagagtggttatgggaaggtatccaggcgaggtggtcatcaaaatagctacaaaccatactaaattattccatttgcaacttatccccaacaggtggtgaagcagtattttccaatttgaagattcatttgaaggtggctcctgccacctgctaatagcagttcaaactaaattttttgtatcaagtccctgaatggaagtatgacgttgggtccctctgaagtttaattctgagttctcattaaaagaaatttgctttcattgttttatttcttaattgctatgcttcagaatcaatttgtgttttatgccctttcccccagtattgtagagcaagtcttgtgttaaaagcccagtgtgacagtgtcatgatgtagtagtgtcttactggttttttaataaatccttttgtataaa

SEQ ID NO: 80360 - DNA, 2989 bp, Homo sapiens
ggctcggcacctcatgctttatacttcccgcagcgccgagtcggagggggcgaagattgacgccagtaagaacgaggaggatgaaggccattcaaactcctccccacgacactctgaagcagcgacggcacagcgggaagaatggaaaatgtttataggaggccttagctgggacactacaaagaaagatctgaaggactacttttccaaatttggtgaagttgtagactgcactctgaagttagatcctatcacagggcgatcaaggggttttggctttgtgctatttaaagaatcggagagtgtagataaggtcatggatcaaaaagaacataaattgaatgggaaggtgattgatcctaaaagggccaaagccatgaaaacaaaagagccggttaaaaaaatttttgttggtggcctttctccagatacacctgaagagaaaataagggagtactttggtggttttggtgaggtggaatccatagagctccccatggacaacaagaccaataagaggcgtgggttctgctttattacctttaaggaagaagaaccagtgaagaagataatggaaaagaaataccacaatgttggtcttagtaaatgtgaaataaaagtagccatgtcgaaggaacaatatcagcaacagcaacagtggggatctagaggaggatttgcaggaagagctcgtggaagaggtggtggccccagtcaaaactggaaccagggatatagtaactattggaatcaaggctatggcaactatggatataacagccaaggttacggtggttatggaggatatgactacactggttacaacaactactatggatatggtgattatagcaaccagcagagtggttatgggaaggtatccaggcgaggtggtcatcaaaatagctacaaaccatactaaattattccatttgcaacttatccccaacaggtggtgaagcagtattttccaatttgaagattcatttgaaggtggctcctgccacctgctaatagcagttcaaactaaattttttgtatcaagtccctgaatggaagtatgacgttgggtccctctgaagtttaattctgagttctcattaaaagaaatttgctttcattgttttatttcttaattgctatgcttcagaatcaatttgtgttttatgccctttcccccagtattgtagagcaagtcttgtgttaaaagcccagtgtgacagtgtcatgatgtagtagtgtcttactggttttttaataaatccttttgtataaaaatgtattggctcttttatcatcagaataggaaaaattgtcatggattcaagttattaaaagcataagtttggaagacaggcttgccgaaattgaggacatgattaaaattgcagtgaagtttgaaatgtttttagcaaaatctaatttttgccataatgtgtcctccctgtccaaattgggaatgacttaatgtcaatttgtttgttggttgttttaataatacttccttatgtagccattaagatttatatgaatattttcccaaatgcccagtttttgcttaatatgtattgtgctttttagaacaaatctggataaatgtgcaaaagtacccctttgcacagatagttaatgttttatgcttccattaaataaaaaggacttaaaatctgttaattataatagaaatgcggctagttcagagagatttttagagctgtggtggacttcatagatgaattcaagtgttgagggaggattaaagaaatatataccgtgtttatgtgtgtgtgcttatttgtttgaatgattttattttccatttctcaaaggttttatttttttggttagggccttaaaatttcaggactgtgattattagtatgtgtgcctaaggaactttttgagtcactcttaagaaagtgaaactgaagagtctaagtgataactataggattaagtcagaattgtttttcctgtcatttgttggaagcttcttgagttctgttattagcattcagggaattgatacccatcaacttgaatggaaaatcgtttgtaggtattacttaagtgaatgttaagagttccaccctgagtggtaatctaaggctgtgcagtcagttacttcagactgctcagaatagttcattagaaaggtaacaaatgagaaatgtattattatacagttctatagtagtgaagtgatggaatacctttcttacttttgtggagttacatctgatgctaagaatttgacctccaactaagcaaacattttaatgagcaaaagttagtgttattaaagttttttatgatagatccaaattgaggacctgtgtcctgtttttataagattgcaacccagctatgctcatttgtttatgttttgtatatggctgcttttgtgttacagtggtagagtttagtagttaggacagagacctgcaaagcaaaataatttacagtctggccctttacagaaaagtttgctgactcatggtcaaaataaatgaaaattttttgtgttagggttgttaagctagggttctttttggtatcatatgcttattttatgtaaatctctcaataaaaaattatttttaagagaaaaaaaaaaaaaaaaaaaaaaaaaaaaaaaaaggggggggggtaaaaatttccctgggggggcccaggttaggggtcccggtttttgttaaggggggcccctattggggggcccgattttaaaccgcaagggaccggggccgggcggttaacccacggtccgggcctgtggacaccctggcgttccctggggaccctgtggggaggggaccccttactttcttggggtgggccttatctgtgcgcgacttacctacggggagttaaggcacccggcgggaattttaacattttcaggtctttctgctgtgatccaacgctggatatgtctcgcggtggaaagtttcggtcacgggttgctttagacatttttcccagcggc

SEQ ID NO: 80361 - DNA, 2842 bp, Homo sapiens
ggctcggcacctcatgctttatacttcccgcagcgccgagtcggagggggcgaagattgacgccagtaagaacgaggaggatgaaggccattcaaactcctccccacgacactctgaagcagcgacggcacagcgggaagaatggaaaatgtttataggaggccttagctgggacactacaaagaaagatctgaaggactacttttccaaatttggtgaagttgtagactgcactctgaagttagatcctatcacagggcgatcaaggggttttggctttgtgctatttaaagaatcggagagtgtagataaggtcatggatcaaaaagaacataaattgaatgggaaggtgattgatcctaaaagggccaaagccatgaaaacaaaagagccggttaaaaaaatttttgttggtggcctttctccagatacacctgaagagaaaataagggagtactttggtggttttggtgaggtggaatccatagagctccccatggacaacaagaccaataagaggcgtgggttctgctttattacctttaaggaagaagaaccagtgaagaagataatggaaaagaaataccacaatgttggtcttagtaaatgtgaaataaaagtagccatgtcgaaggaacaatatcagcaacagcaacagtggggatctagaggaggatttgcaggaagagctcgtggaagaggtggtgaccagcagagtggttatgggaaggtatccaggcgaggtggtcatcaaaatagctacaaaccatactaaattattccatttgcaacttatccccaacaggtggtgaagcagtattttccaatttgaagattcatttgaaggtggctcctgccacctgctaatagcagttcaaactaaattttttgtatcaagtccctgaatggaagtatgacgttgggtccctctgaagtttaattctgagttctcattaaaagaaatttgctttcattgttttatttcttaattgctatgcttcagaatcaatttgtgttttatgccctttcccccagtattgtagagcaagtcttgtgttaaaagcccagtgtgacagtgtcatgatgtagtagtgtcttactggttttttaataaatccttttgtataaaaatgtattggctcttttatcatcagaataggaaaaattgtcatggattcaagttattaaaagcataagtttggaagacaggcttgccgaaattgaggacatgattaaaattgcagtgaagtttgaaatgtttttagcaaaatctaatttttgccataatgtgtcctccctgtccaaattgggaatgacttaatgtcaatttgtttgttggttgttttaataatacttccttatgtagccattaagatttatatgaatattttcccaaatgcccagtttttgcttaatatgtattgtgctttttagaacaaatctggataaatgtgcaaaagtacccctttgcacagatagttaatgttttatgcttccattaaataaaaaggacttaaaatctgttaattataatagaaatgcggctagttcagagagatttttagagctgtggtggacttcatagatgaattcaagtgttgagggaggattaaagaaatatataccgtgtttatgtgtgtgtgcttatttgtttgaatgattttattttccatttctcaaaggttttatttttttggttagggccttaaaatttcaggactgtgattattagtatgtgtgcctaaggaactttttgagtcactcttaagaaagtgaaactgaagagtctaagtgataactataggattaagtcagaattgtttttcctgtcatttgttggaagcttcttgagttctgttattagcattcagggaattgatacccatcaacttgaatggaaaatcgtttgtaggtattacttaagtgaatgttaagagttccaccctgagtggtaatctaaggctgtgcagtcagttacttcagactgctcagaatagttcattagaaaggtaacaaatgagaaatgtattattatacagttctatagtagtgaagtgatggaatacctttcttacttttgtggagttacatctgatgctaagaatttgacctccaactaagcaaacattttaatgagcaaaagttagtgttattaaagttttttatgatagatccaaattgaggacctgtgtcctgtttttataagattgcaacccagctatgctcatttgtttatgttttgtatatggctgcttttgtgttacagtggtagagtttagtagttaggacagagacctgcaaagcaaaataatttacagtctggccctttacagaaaagtttgctgactcatggtcaaaataaatgaaaattttttgtgttagggttgttaagctagggttctttttggtatcatatgcttattttatgtaaatctctcaataaaaaattatttttaagagaaaaaaaaaaaaaaaaaaaaaaaaaaaaaaaaaggggggggggtaaaaatttccctgggggggcccaggttaggggtcccggtttttgttaaggggggcccctattggggggcccgattttaaaccgcaagggaccggggccgggcggttaacccacggtccgggcctgtggacaccctggcgttccctggggaccctgtggggaggggaccccttactttcttggggtgggccttatctgtgcgcgacttacctacggggagttaaggcacccggcgggaattttaacattttcaggtctttctgctgtgatccaacgctggatatgtctcgcggtggaaagtttcggtcacgggttgctttagacatttttcccagcggc

SEQ ID NO: 80362 - DNA, 4138 bp, Homo sapiens
ggctcggcacctcatgctttatacttcccgcagcgccgagtcggagggggcgaagattgacgccagtaagaacgaggaggatgaaggccattcaaactcctccccacgacactctgaagcagcgacggcacagcgggaagaatggaaaatgtttataggaggccttagctgggacactacaaagaaagatctgaaggactacttttccaaatttggtgaagttgtagactgcactctgaagttagatcctatcacagggcgatcaaggggttttggctttgtgctatttaaagaatcggagagtgtagataaggtcatggatcaaaaagaacataaattgaatgggaaggtgattgatcctaaaagggccaaagccatgaaaacaaaagagccggttaaaaaaatttttgttggtggcctttctccagatacacctgaagagaaaataagggagtactttggtggttttggtgaggtggaatccatagagctccccatggacaacaagaccaataagaggcgtgggttctgctttattacctttaaggaagaagaaccagtgaagaagataatggaaaagaaataccacaatgttggtcttagtaaatgtgaaataaaagtagccatgtcgaaggaacaatatcagcaacagcaacagtggggatctagaggaggatttgcaggaagagctcgtggaagaggtggtggccccagtcaaaactggaaccagggatatagtaactattggaatcaaggctatggcaactatggatataacagccaaggttacggtggttatggaggatatgactacactggttacaacaactactatggatatggtgattatagcaaccagcagagtggttatgggaaggtatccaggcgaggtggtcatcaaaatagctacaaaccatactaaattattccatttgcaacttatccccaacaggtatgttctaaaaatagtttttttttgtcatttacaatagtagtttttataatctatattgttcataaaacaatgcttaatttaagagtttcacagcacccagaagtgcttaccatattataacatagtgactttcaaagatatgtaacacaggtgctcttaagcttttgcctttttgtcctattattaacaagtcagtaaagttaacaggtaaagtactgctaatgggtacaaattaaggaattgcagcaaaaaagtattgcctactaactctgacattataccttgtttgtacccgccagcgggaacttcattgcaggccctgtgtcgcgctgacttcacgattctcacaggcccgctcaatgcggacagggtacgagatgctcacgctctcgaatgctgccgtttggtatggtctcttccaacatcctgtatcagcattataaaataaaatggatacttcaagctttgccttcacttatttctttgctttttaaaaactatttgtaatgtaattttaatgcattttttacaggcccagtaatggttaaatacgtcagcttactgaataattttaactatttattcttctaaggatacagcttgtctctggattttccagtcttaattttatattttattaatctattttaatgcttgcttttcccatttatagacgttgtagcagtaattgcaagaagttcttgagctgaattcctgttgtgacaacttcctataattacagtagataactttttcttttagtcgtatataacttttctataacttgtgatggacaagagatatgcttatccaataaaataagcttaaatattagatgctcttgggtcaaaatgtccttttaccaaattgacctttttatgagttctttgggtaaatactttaaagctttttatattttaaagaatacttgtaaaagcatatcacatcttaaaccagtggtgcacatgtggatttacagctcatggactctactgttcagctttaatttataaaacatatcacacatttaatgttatacagtatttacatatagtggaacatagggataactcagttttatgtaaatttttgttaagtgttgtagcctgcccagagtgacttctattttttcttctttgtctccaggtggtgaagcagtattttccaatttgaagattcatttgaaggtggctcctgccacctgctaatagcagttcaaactaaattttttgtatcaagtccctgaatggaagtatgacgttgggtccctctgaagtttaattctgagttctcattaaaagaaatttgctttcattgttttatttcttaattgctatgcttcagaatcaatttgtgttttatgccctttcccccagtattgtagagcaagtcttgtgttaaaagcccagtgtgacagtgtcatgatgtagtagtgtcttactggttttttaataaatccttttgtataaaaatgtattggctcttttatcatcagaataggaaaaattgtcatggattcaagttattaaaagcataagtttggaagacaggcttgccgaaattgaggacatgattaaaattgcagtgaagtttgaaatgtttttagcaaaatctaatttttgccataatgtgtcctccctgtccaaattgggaatgacttaatgtcaatttgtttgttggttgttttaataatacttccttatgtagccattaagatttatatgaatattttcccaaatgcccagtttttgcttaatatgtattgtgctttttagaacaaatctggataaatgtgcaaaagtacccctttgcacagatagttaatgttttatgcttccattaaataaaaaggacttaaaatctgttaattataatagaaatgcggctagttcagagagatttttagagctgtggtggacttcatagatgaattcaagtgttgagggaggattaaagaaatatataccgtgtttatgtgtgtgtgcttatttgtttgaatgattttattttccatttctcaaaggttttatttttttggttagggccttaaaatttcaggactgtgattattagtatgtgtgcctaaggaactttttgagtcactcttaagaaagtgaaactgaagagtctaagtgataactataggattaagtcagaattgtttttcctgtcatttgttggaagcttcttgagttctgttattagcattcagggaattgatacccatcaacttgaatggaaaatcgtttgtaggtattacttaagtgaatgttaagagttccaccctgagtggtaatctaaggctgtgcagtcagttacttcagactgctcagaatagttcattagaaaggtaacaaatgagaaatgtattattatacagttctatagtagtgaagtgatggaatacctttcttacttttgtggagttacatctgatgctaagaatttgacctccaactaagcaaacattttaatgagcaaaagttagtgttattaaagttttttatgatagatccaaattgaggacctgtgtcctgtttttataagattgcaacccagctatgctcatttgtttatgttttgtatatggctgcttttgtgttacagtggtagagtttagtagttaggacagagacctgcaaagcaaaataatttacagtctggccctttacagaaaagtttgctgactcatggtcaaaataaatgaaaattttttgtgttagggttgttaagctagggttctttttggtatcatatgcttattttatgtaaatctctcaataaaaaattatttttaagagaaaaaaaaaaaaaaaaaaaaaaaaaaaaaaaaaggggggggggtaaaaatttccctgggggggcccaggttaggggtcccggtttttgttaaggggggcccctattggggggcccgattttaaaccgcaagggaccggggccgggcggttaacccacggtccgggcctgtggacaccctggcgttccctggggaccctgtggggaggggaccccttactttcttggggtgggccttatctgtgcgcgacttacctacggggagttaaggcacccggcgggaattttaacattttcaggtctttctgctgtgatccaacgctggatatgtctcgcggtggaaagtttcggtcacgggttgctttagacatttttcccagcggc

SEQ ID NO: 80363 - DNA, 1706 bp, Homo sapiens
  misc_feature (1324)..(1324): n is a, c, g, or t
  misc_feature (1334)..(1334): n is a, c, g, or t
  misc_feature (1336)..(1336): n is a, c, g, or t
ggctcggcacctcatgctttatacttcccgcagcgccgagtcggagggggcgaagattgacgccagtaagaacgaggaggatgaaggccattcaaactcctccccacgacactctgaagcagcgacggcacagcgggaagaatggaaaatgtttataggaggccttagctgggacactacaaagaaagatctgaaggactacttttccaaatttggtgaagttgtagactgcactctgaagttagatcctatcacagggcgatcaaggggttttggctttgtgctatttaaagaatcggagagtgtagataaggtcatggatcaaaaagaacataaattgaatgggaaggtgattgatcctaaaagggccaaagccatgaaaacaaaagagccggttaaaaaaatttttgttggtggcctttctccagatacacctgaagagaaaataagggagtactttggtggttttggtgaggtggaatccatagagctccccatggacaacaagaccaataagaggcgtgggttctgctttattacctttaaggaagaagaaccagtgaagaagataatggaaaagaaataccacaatgttggtcttagtaaatgtgaaataaaagtagccatgtcgaaggaacaatatcagcaacagcaacagtggggatctagaggaggatttgcaggaagagctcgtggaagaggtggtggccccagtcaaaactggaaccagggatatagtaactattggaatcaaggctatggcaactatggatataacagccaaggttacggtggttatggaggatatgactacactggttacaacaactactatggatatggtgattatagcaaccagcagagtggttatgggaaggtatccaggcgaggtggtcatcaaaatagctacaaaccatactaaattattccatttgcaacttatccccaacaggtggtgaagcagtattttccaatttgaagattcatttgaaggtggctcctgccacctgctaatagcagttcaaactaaattttttgtatcaagtccctgaatggaagtatgacgttgggtccctctgaagtttaattctgagttctcattaaaagaaatttgctttcattgttttatttcttaattgctatgcttcagaatcaatttgtgttttatgccctttcccccagtattgtagagcaagtcttgtgttaaaagcccagtgtgacagtgtcatgatgtagtagtgtcttactggttttttaataaatccttttgtataaaaaaaaaaaaaaaaaaaaaaaaaaaaaaaaaaagaaaaaaaaaaaaaanaaaaaaaaananaaaaaaaaagaaaaagagaaaaaaagaaaagagagaaagggagggggaaaaaagagacggggcgaggcaaaaaagagggggggggggagaagaaaacaaggggcaacaacacaacgaacacgtaagcaacgaccacgcgacgagacagccgatagaaaacaaggacgaggcttcgtacaaaacaggcaggcagagacaaaagaagaaaaccacgctagatccgcgcgtccaaccacacgaagcaagcaacacacacacgacacaagtagcagcacatgaaaaacaaaaccccaccgaagagggagacacccgcgacatagcagacgggcacaaaaggccacacactagtcagtcagacaccaaggacacc

SEQ ID NO: 80364 - DNA, 2958 bp, Homo sapiens
ggctcggcacctcatgctttatacttcccgcagcgccgagtcggagggggcgaagattgacgccagtaagaacgaggaggatgaaggccattcaaactcctccccacgacactctgaagcagcgacggcacagcgggaagaatggaaaatgtttataggaggccttagctgggacactacaaagaaagatctgaaggactacttttccaaatttggtgaagttgtagactgcactctgaagttagatcctatcacagggcgatcaaggggttttggctttgtgctatttaaagaatcggagagtgtagataaggtcatggatcaaaaagaacataaattgaatgggaaggtgattgatcctaaaagggccaaagccatgaaaacaaaagagccggttaaaaaaatttttgttggtggcctttctccagatacacctgaagagaaaataagggagtactttggtggttttggtgaggtggaatccatagagctccccatggacaacaagaccaataagaggcgtgggttctgctttattacctttaaggaagaagaaccagtgaagaagataatggaaaagaaataccacaatgttggtcttagtaaatgtgaaataaaagtagccatgtcgaaggaacaatatcagcaacagcaacagtggggatctagaggaggatttgcaggaagagctcgtggaagaggtggtgtaactattggaatcaaggctatggcaactatggatataacagccaaggttacggtggttatggaggatatgactacactggttacaacaactactatggatatggtgattatagcaaccagcagagtggttatgggaaggtatccaggcgaggtggtcatcaaaatagctacaaaccatactaaattattccatttgcaacttatccccaacaggtggtgaagcagtattttccaatttgaagattcatttgaaggtggctcctgccacctgctaatagcagttcaaactaaattttttgtatcaagtccctgaatggaagtatgacgttgggtccctctgaagtttaattctgagttctcattaaaagaaatttgctttcattgttttatttcttaattgctatgcttcagaatcaatttgtgttttatgccctttcccccagtattgtagagcaagtcttgtgttaaaagcccagtgtgacagtgtcatgatgtagtagtgtcttactggttttttaataaatccttttgtataaaaatgtattggctcttttatcatcagaataggaaaaattgtcatggattcaagttattaaaagcataagtttggaagacaggcttgccgaaattgaggacatgattaaaattgcagtgaagtttgaaatgtttttagcaaaatctaatttttgccataatgtgtcctccctgtccaaattgggaatgacttaatgtcaatttgtttgttggttgttttaataatacttccttatgtagccattaagatttatatgaatattttcccaaatgcccagtttttgcttaatatgtattgtgctttttagaacaaatctggataaatgtgcaaaagtacccctttgcacagatagttaatgttttatgcttccattaaataaaaaggacttaaaatctgttaattataatagaaatgcggctagttcagagagatttttagagctgtggtggacttcatagatgaattcaagtgttgagggaggattaaagaaatatataccgtgtttatgtgtgtgtgcttatttgtttgaatgattttattttccatttctcaaaggttttatttttttggttagggccttaaaatttcaggactgtgattattagtatgtgtgcctaaggaactttttgagtcactcttaagaaagtgaaactgaagagtctaagtgataactataggattaagtcagaattgtttttcctgtcatttgttggaagcttcttgagttctgttattagcattcagggaattgatacccatcaacttgaatggaaaatcgtttgtaggtattacttaagtgaatgttaagagttccaccctgagtggtaatctaaggctgtgcagtcagttacttcagactgctcagaatagttcattagaaaggtaacaaatgagaaatgtattattatacagttctatagtagtgaagtgatggaatacctttcttacttttgtggagttacatctgatgctaagaatttgacctccaactaagcaaacattttaatgagcaaaagttagtgttattaaagttttttatgatagatccaaattgaggacctgtgtcctgtttttataagattgcaacccagctatgctcatttgtttatgttttgtatatggctgcttttgtgttacagtggtagagtttagtagttaggacagagacctgcaaagcaaaataatttacagtctggccctttacagaaaagtttgctgactcatggtcaaaataaatgaaaattttttgtgttagggttgttaagctagggttctttttggtatcatatgcttattttatgtaaatctctcaataaaaaattatttttaagagaaaaaaaaaaaaaaaaaaaaaaaaaaaaaaaaaggggggggggtaaaaatttccctgggggggcccaggttaggggtcccggtttttgttaaggggggcccctattggggggcccgattttaaaccgcaagggaccggggccgggcggttaacccacggtccgggcctgtggacaccctggcgttccctggggaccctgtggggaggggaccccttactttcttggggtgggccttatctgtgcgcgacttacctacggggagttaaggcacccggcgggaattttaacattttcaggtctttctgctgtgatccaacgctggatatgtctcgcggtggaaagtttcggtcacgggttgctttagacatttttcccagcggc

SEQ ID NO: 80365 - DNA, 1559 bp, Homo sapiens
  misc_feature (1177)..(1177): n is a, c, g, or t
  misc_feature (1187)..(1187): n is a, c, g, or t
  misc_feature (1189)..(1189): n is a, c, g, or t
ggctcggcacctcatgctttatacttcccgcagcgccgagtcggagggggcgaagattgacgccagtaagaacgaggaggatgaaggccattcaaactcctccccacgacactctgaagcagcgacggcacagcgggaagaatggaaaatgtttataggaggccttagctgggacactacaaagaaagatctgaaggactacttttccaaatttggtgaagttgtagactgcactctgaagttagatcctatcacagggcgatcaaggggttttggctttgtgctatttaaagaatcggagagtgtagataaggtcatggatcaaaaagaacataaattgaatgggaaggtgattgatcctaaaagggccaaagccatgaaaacaaaagagccggttaaaaaaatttttgttggtggcctttctccagatacacctgaagagaaaataagggagtactttggtggttttggtgaggtggaatccatagagctccccatggacaacaagaccaataagaggcgtgggttctgctttattacctttaaggaagaagaaccagtgaagaagataatggaaaagaaataccacaatgttggtcttagtaaatgtgaaataaaagtagccatgtcgaaggaacaatatcagcaacagcaacagtggggatctagaggaggatttgcaggaagagctcgtggaagaggtggtgaccagcagagtggttatgggaaggtatccaggcgaggtggtcatcaaaatagctacaaaccatactaaattattccatttgcaacttatccccaacaggtggtgaagcagtattttccaatttgaagattcatttgaaggtggctcctgccacctgctaatagcagttcaaactaaattttttgtatcaagtccctgaatggaagtatgacgttgggtccctctgaagtttaattctgagttctcattaaaagaaatttgctttcattgttttatttcttaattgctatgcttcagaatcaatttgtgttttatgccctttcccccagtattgtagagcaagtcttgtgttaaaagcccagtgtgacagtgtcatgatgtagtagtgtcttactggttttttaataaatccttttgtataaaaaaaaaaaaaaaaaaaaaaaaaaaaaaaaaaagaaaaaaaaaaaaaanaaaaaaaaananaaaaaaaaagaaaaagagaaaaaaagaaaagagagaaagggagggggaaaaaagagacggggcgaggcaaaaaagagggggggggggagaagaaaacaaggggcaacaacacaacgaacacgtaagcaacgaccacgcgacgagacagccgatagaaaacaaggacgaggcttcgtacaaaacaggcaggcagagacaaaagaagaaaaccacgctagatccgcgcgtccaaccacacgaagcaagcaacacacacacgacacaagtagcagcacatgaaaaacaaaaccccaccgaagagggagacacccgcgacatagcagacgggcacaaaaggccacacactagtcagtcagacaccaaggacacc

SEQ ID NO: 80366 - DNA, 3991 bp, Homo sapiens
ggctcggcacctcatgctttatacttcccgcagcgccgagtcggagggggcgaagattgacgccagtaagaacgaggaggatgaaggccattcaaactcctccccacgacactctgaagcagcgacggcacagcgggaagaatggaaaatgtttataggaggccttagctgggacactacaaagaaagatctgaaggactacttttccaaatttggtgaagttgtagactgcactctgaagttagatcctatcacagggcgatcaaggggttttggctttgtgctatttaaagaatcggagagtgtagataaggtcatggatcaaaaagaacataaattgaatgggaaggtgattgatcctaaaagggccaaagccatgaaaacaaaagagccggttaaaaaaatttttgttggtggcctttctccagatacacctgaagagaaaataagggagtactttggtggttttggtgaggtggaatccatagagctccccatggacaacaagaccaataagaggcgtgggttctgctttattacctttaaggaagaagaaccagtgaagaagataatggaaaagaaataccacaatgttggtcttagtaaatgtgaaataaaagtagccatgtcgaaggaacaatatcagcaacagcaacagtggggatctagaggaggatttgcaggaagagctcgtggaagaggtggtgaccagcagagtggttatgggaaggtatccaggcgaggtggtcatcaaaatagctacaaaccatactaaattattccatttgcaacttatccccaacaggtatgttctaaaaatagtttttttttgtcatttacaatagtagtttttataatctatattgttcataaaacaatgcttaatttaagagtttcacagcacccagaagtgcttaccatattataacatagtgactttcaaagatatgtaacacaggtgctcttaagcttttgcctttttgtcctattattaacaagtcagtaaagttaacaggtaaagtactgctaatgggtacaaattaaggaattgcagcaaaaaagtattgcctactaactctgacattataccttgtttgtacccgccagcgggaacttcattgcaggccctgtgtcgcgctgacttcacgattctcacaggcccgctcaatgcggacagggtacgagatgctcacgctctcgaatgctgccgtttggtatggtctcttccaacatcctgtatcagcattataaaataaaatggatacttcaagctttgccttcacttatttctttgctttttaaaaactatttgtaatgtaattttaatgcattttttacaggcccagtaatggttaaatacgtcagcttactgaataattttaactatttattcttctaaggatacagcttgtctctggattttccagtcttaattttatattttattaatctattttaatgcttgcttttcccatttatagacgttgtagcagtaattgcaagaagttcttgagctgaattcctgttgtgacaacttcctataattacagtagataactttttcttttagtcgtatataacttttctataacttgtgatggacaagagatatgcttatccaataaaataagcttaaatattagatgctcttgggtcaaaatgtccttttaccaaattgacctttttatgagttctttgggtaaatactttaaagctttttatattttaaagaatacttgtaaaagcatatcacatcttaaaccagtggtgcacatgtggatttacagctcatggactctactgttcagctttaatttataaaacatatcacacatttaatgttatacagtatttacatatagtggaacatagggataactcagttttatgtaaatttttgttaagtgttgtagcctgcccagagtgacttctattttttcttctttgtctccaggtggtgaagcagtattttccaatttgaagattcatttgaaggtggctcctgccacctgctaatagcagttcaaactaaattttttgtatcaagtccctgaatggaagtatgacgttgggtccctctgaagtttaattctgagttctcattaaaagaaatttgctttcattgttttatttcttaattgctatgcttcagaatcaatttgtgttttatgccctttcccccagtattgtagagcaagtcttgtgttaaaagcccagtgtgacagtgtcatgatgtagtagtgtcttactggttttttaataaatccttttgtataaaaatgtattggctcttttatcatcagaataggaaaaattgtcatggattcaagttattaaaagcataagtttggaagacaggcttgccgaaattgaggacatgattaaaattgcagtgaagtttgaaatgtttttagcaaaatctaatttttgccataatgtgtcctccctgtccaaattgggaatgacttaatgtcaatttgtttgttggttgttttaataatacttccttatgtagccattaagatttatatgaatattttcccaaatgcccagtttttgcttaatatgtattgtgctttttagaacaaatctggataaatgtgcaaaagtacccctttgcacagatagttaatgttttatgcttccattaaataaaaaggacttaaaatctgttaattataatagaaatgcggctagttcagagagatttttagagctgtggtggacttcatagatgaattcaagtgttgagggaggattaaagaaatatataccgtgtttatgtgtgtgtgcttatttgtttgaatgattttattttccatttctcaaaggttttatttttttggttagggccttaaaatttcaggactgtgattattagtatgtgtgcctaaggaactttttgagtcactcttaagaaagtgaaactgaagagtctaagtgataactataggattaagtcagaattgtttttcctgtcatttgttggaagcttcttgagttctgttattagcattcagggaattgatacccatcaacttgaatggaaaatcgtttgtaggtattacttaagtgaatgttaagagttccaccctgagtggtaatctaaggctgtgcagtcagttacttcagactgctcagaatagttcattagaaaggtaacaaatgagaaatgtattattatacagttctatagtagtgaagtgatggaatacctttcttacttttgtggagttacatctgatgctaagaatttgacctccaactaagcaaacattttaatgagcaaaagttagtgttattaaagttttttatgatagatccaaattgaggacctgtgtcctgtttttataagattgcaacccagctatgctcatttgtttatgttttgtatatggctgcttttgtgttacagtggtagagtttagtagttaggacagagacctgcaaagcaaaataatttacagtctggccctttacagaaaagtttgctgactcatggtcaaaataaatgaaaattttttgtgttagggttgttaagctagggttctttttggtatcatatgcttattttatgtaaatctctcaataaaaaattatttttaagagaaaaaaaaaaaaaaaaaaaaaaaaaaaaaaaaaggggggggggtaaaaatttccctgggggggcccaggttaggggtcccggtttttgttaaggggggcccctattggggggcccgattttaaaccgcaagggaccggggccgggcggttaacccacggtccgggcctgtggacaccctggcgttccctggggaccctgtggggaggggaccccttactttcttggggtgggccttatctgtgcgcgacttacctacggggagttaaggcacccggcgggaattttaacattttcaggtctttctgctgtgatccaacgctggatatgtctcgcggtggaaagtttcggtcacgggttgctttagacatttttcccagcggc

SEQ ID NO: 80367 - DNA, 1120 bp, Homo sapiens
ggctcggcacctcatgctttatacttcccgcagcgccgagtcggagggggcgaagattgacgccagtaagaacgaggaggatgaaggccattcaaactcctccccacgacactctgaagcagcgacggcacagcgggaagaatggaaaatgtttataggaggccttagctgggacactacaaagaaagatctgaaggactacttttccaaatttggtgaagttgtagactgcactctgaagttagatcctatcacagggcgatcaaggggttttggctttgtgctatttaaagaatcggagagtgtagataaggtcatggatcaaaaagaacataaattgaatgggaaggtgattgatcctaaaagggccaaagccatgaaaacaaaagagccggttaaaaaaatttttgttggtggcctttctccagatacacctgaagagaaaataagggagtactttggtggttttggtgaggtggaatccatagagctccccatggacaacaagaccaataagaggcgtgggttctgctttattacctttaaggaagaagaaccagtgaagaagataatggaaaagaaataccacaatgttggtcttagtaaatgtgaaataaaagtagccatgtcgaaggaacaatatcagcaacagcaacagtggggatctagaggaggatttgcaggaagagctcgtggaagaggtggtggccccagtcaaaactggaaccagggatatagtaactattggaatcaaggctatggcaactatggatataacagccaaggttacggtggttatggaggatatgactacactggttacaacaactactatggatatggtgattatagcaaccagcagagtggttatgggaaggtatccaggcgaggtggtcatcaaaatagctacaaaccatactaaattattccatttgcaacttatccccaacaggtggtgaagcagtattttccaatttgaagattcatttgaaggtggctcctgccacctgctaatagcagttcaaactaaattttttgtatcaagtccctgaatggaagtatgacgttgggtccctctgaagtttaattctgagttctcattaaaagaaatttgctttca

SEQ ID NO: 80368 - DNA, 2460 bp, Homo sapiens
ggctcggcacctcatgctttatacttcccgcagcgccgagtcggagggggcgaagattgacgccagtaagaacgaggaggatgaaggccattcaaactcctccccacgacactctgaagcagcgacggcacagcgggaagaatggaaaatgtttataggaggccttagctgggacactacaaagaaagatctgaaggactacttttccaaatttggtgaagttgtagactgcactctgaagttagatcctatcacagggcgatcaaggggttttggctttgtgctatttaaagaatcggagagtgtagataaggtcatggatcaaaaagaacataaattgaatgggaaggtgattgatcctaaaagggccaaagccatgaaaacaaaagagccggttaaaaaaatttttgttggtggcctttctccagatacacctgaagagaaaataagggagtactttggtggttttggtgaggtggaatccatagagctccccatggacaacaagaccaataagaggcgtgggttctgctttattacctttaaggaagaagaaccagtgaagaagataatggaaaagaaataccacaatgttggtcttagtaaatgtgaaataaaagtagccatgtcgaaggaacaatatcagcaacagcaacagtggggatctagaggaggatttgcaggaagagctcgtggaagaggtggtggccccagtcaaaactggaaccagggatatagtaactattggaatcaaggctatggcaactatggatataacagccaaggttacggtggttatggaggatatgactacactggttacaacaactactatggatatggtgattatagcaaccagcagagtggttatgggaaggtatccaggcgaggtggtcatcaaaatagctacaaaccatactaaattattccatttgcaacttatccccaacaggtatgttctaaaaatagtttttttttgtcatttacaatagtagtttttataatctatattgttcataaaacaatgcttaatttaagagtttcacagcacccagaagtgcttaccatattataacatagtgactttcaaagatatgtaacacaggtgctcttaagcttttgcctttttgtcctattattaacaagtcagtaaagttaacaggtaaagtactgctaatgggtacaaattaaggaattgcagcaaaaaagtattgcctactaactctgacattataccttgtttgtacccgccagcgggaacttcattgcaggccctgtgtcgcgctgacttcacgattctcacaggcccgctcaatgcggacagggtacgagatgctcacgctctcgaatgctgccgtttggtatggtctcttccaacatcctgtatcagcattataaaataaaatggatacttcaagctttgccttcacttatttctttgctttttaaaaactatttgtaatgtaattttaatgcattttttacaggcccagtaatggttaaatacgtcagcttactgaataattttaactatttattcttctaaggatacagcttgtctctggattttccagtcttaattttatattttattaatctattttaatgcttgcttttcccatttatagacgttgtagcagtaattgcaagaagttcttgagctgaattcctgttgtgacaacttcctataattacagtagataactttttcttttagtcgtatataacttttctataacttgtgatggacaagagatatgcttatccaataaaataagcttaaatattagatgctcttgggtcaaaatgtccttttaccaaattgacctttttatgagttctttgggtaaatactttaaagctttttatattttaaagaatacttgtaaaagcatatcacatcttaaaccagtggtgcacatgtggatttacagctcatggactctactgttcagctttaatttataaaacatatcacacatttaatgttatacagtatttacatatagtggaacatagggataactcagttttatgtaaatttttgttaagtgttgtagcctgcccagagtgacttctattttttcttctttgtctccaggtggtgaagcagtattttccaatttgaagattcatttgaaggtggctcctgccacctgctaatagcagttcaaactaaattttttgtatcaagtccctgaatggaagtatgacgttgggtccctctgaagtttaattctgagttctcattaaaagaaatttgctttcattgttttatttcttaattgctatgcttcagaatcaatttgtgttttatgccctttcccccagtattgtagagcaagtcttgtgttaaaagcccagtgtgacagtgtcatgatgtagtagtgtcttactggttttttaataaatccttttgtataaaacacaaaaaaaaagtcgaggcggccggaagtttag

SEQ ID NO: 80369 - DNA, 973 bp, Homo sapiens
ggctcggcacctcatgctttatacttcccgcagcgccgagtcggagggggcgaagattgacgccagtaagaacgaggaggatgaaggccattcaaactcctccccacgacactctgaagcagcgacggcacagcgggaagaatggaaaatgtttataggaggccttagctgggacactacaaagaaagatctgaaggactacttttccaaatttggtgaagttgtagactgcactctgaagttagatcctatcacagggcgatcaaggggttttggctttgtgctatttaaagaatcggagagtgtagataaggtcatggatcaaaaagaacataaattgaatgggaaggtgattgatcctaaaagggccaaagccatgaaaacaaaagagccggttaaaaaaatttttgttggtggcctttctccagatacacctgaagagaaaataagggagtactttggtggttttggtgaggtggaatccatagagctccccatggacaacaagaccaataagaggcgtgggttctgctttattacctttaaggaagaagaaccagtgaagaagataatggaaaagaaataccacaatgttggtcttagtaaatgtgaaataaaagtagccatgtcgaaggaacaatatcagcaacagcaacagtggggatctagaggaggatttgcaggaagagctcgtggaagaggtggtgaccagcagagtggttatgggaaggtatccaggcgaggtggtcatcaaaatagctacaaaccatactaaattattccatttgcaacttatccccaacaggtggtgaagcagtattttccaatttgaagattcatttgaaggtggctcctgccacctgctaatagcagttcaaactaaattttttgtatcaagtccctgaatggaagtatgacgttgggtccctctgaagtttaattctgagttctcattaaaagaaatttgctttca

SEQ ID NO: 80370 - DNA, 2106 bp, Homo sapiens
ggctcggcacctcatgctttatacttcccgcagcgccgagtcggagggggcgaagattgacgccagtaagaacgaggaggatgaaggccattcaaactcctccccacgacactctgaagcagcgacggcacagcgggaagaatggaaaatgtttataggaggccttagctgggacactacaaagaaagatctgaaggactacttttccaaatttggtgaagttgtagactgcactctgaagttagatcctatcacagggcgatcaaggggttttggctttgtgctatttaaagaatcggagagtgtagataaggtcatggatcaaaaagaacataaattgaatgggaaggtgattgatcctaaaagggccaaagccatgaaaacaaaagagccggttaaaaaaatttttgttggtggcctttctccagatacacctgaagagaaaataagggagtactttggtggttttggtgaggtggaatccatagagctccccatggacaacaagaccaataagaggcgtgggttctgctttattacctttaaggaagaagaaccagtgaagaagataatggaaaagaaataccacaatgttggtcttagtaaatgtgaaataaaagtagccatgtcgaaggaacaatatcagcaacagcaacagtggggatctagaggaggatttgcaggaagagctcgtggaagaggtggtggccccagtcaaaactggaaccagggatatagtaactattggaatcaaggctatggcaactatggatataacagccaaggttacggtggttatggaggatatgactacactggttacaacaactactatggatatggtgattatagcaaccagcagagtggttatgggaaggtatccaggcgaggtggtcatcaaaatagctacaaaccatactaaattattccatttgcaacttatccccaacaggtatgttctaaaaatagtttttttttgtcatttacaatagtagtttttataatctatattgttcataaaacaatgcttaatttaagagtttcacagcacccagaagtgcttaccatattataacatagtgactttcaaagatatgtaacacaggtgctcttaagcttttgcctttttgtcctattattaacaagtcagtaaagttaacaggtaaagtactgctaatgggtacaaattaaggaattgcagcaaaaaagtattgcctactaactctgacattataccttgtttgtacccgccagcgggaacttcattgcaggccctgtgtcgcgctgacttcacgattctcacaggcccgctcaatgcggacagggtacgagatgctcacgctctcgaatgctgccgtttggtatggtctcttccaacatcctgtatcagcattataaaataaaatggatacttcaagctttgccttcacttatttctttgctttttaaaaactatttgtaatgtaattttaatgcattttttacaggcccagtaatggttaaatacgtcagcttactgaataattttaactatttattcttctaaggatacagcttgtctctggattttccagtcttaattttatattttattaatctattttaatgcttgcttttcccatttatagacgttgtagcagtaattgcaagaagttcttgagctgaattcctgttgtgacaacttcctataattacagtagataactttttcttttagtcgtatataacttttctataacttgtgatggacaagagatatgcttatccaataaaataagcttaaatattagatgctcttgggtcaaaatgtccttttaccaaattgacctttttatgagttctttgggtaaatactttaaagctttttatattttaaagaatacttgtaaaagcatatcacatcttaaaccagtggtgcacatgtggatttacagctcatggactctactgttcagctttaatttataaaacatatcacacatttaatgttatacagtatttacatatagtggaacatagggataactcagttttatgtaaatttttgttaagtgttgtagcctgcccgtcgacgcggccgcgaatttagtagtagtaggcggccgc

SEQ ID NO: 80371 - DNA, 1347 bp, Homo sapiens
ggctcggcacctcatgctttatacttcccgcagcgccgagtcggagggggcgaagattgacgccagtaagaacgaggaggatgaaggccattcaaactcctccccacgacactctgaagcagcgacggcacagcgggaagaatggaaaatgtttataggaggccttagctgggacactacaaagaaagatctgaaggactacttttccaaatttggtgaagttgtagactgcactctgaagttagatcctatcacagggcgatcaaggggttttggctttgtgctatttaaagaatcggagagtgtagataaggtcatggatcaaaaagaacataaattgaatgggaaggtgattgatcctaaaagggccaaagccatgaaaacaaaagagccggttaaaaaaatttttgttggtggcctttctccagatacacctgaagagaaaataagggagtactttggtggttttggtgaggtggaatccatagagctccccatggacaacaagaccaataagaggcgtgggttctgctttattacctttaaggaagaagaaccagtgaagaagataatggaaaagaaataccacaatgttggtcttagtaaatgtgaaataaaagtagccatgtcgaaggaacaatatcagcaacagcaacagtggggatctagaggaggatttgcaggaagagctcgtggaagaggtggtgaccagcagagtggttatgggaaggtatccaggcgaggtggtcatcaaaatagctacaaaccatactaaattattccatttgcaacttatccccaacaggtggtgaagcagtattttccaatttgaagattcatttgaaggtggctcctgccacctgctaatagcagttcaaactaaattttttgtatcaagtccctgaatggaagtatgacgttgggtccctctgaagtttaattctgagttctcattaaaagaaatttgctttcaaaaaaaaaaaaaaggggcggccgccctttttttttttttttttttttttttttttttttttttttttttttttttttttttttttttttttttttttttttttttttttttttttttttttttttttttttttttctttcccctgaaaaaaaaaaattcttttttctaccgcggcgaggaagtagcccacatacagttccttgttgctgggtgcacttactccggcacaaaccaccgatcgactatttaaaagccagtagggatcaacctaaacgctcacactagaatatggcgtcacatacctgcttactacagcggctagacaaacaagaaacaggcaggaccaacaaagtatatatacaaccgtaaagaaa

SEQ ID NO: 80372 - DNA, 2351 bp, Homo sapiens
ggctcggcacctcatgctttatacttcccgcagcgccgagtcggagggggcgaagattgacgccagtaagaacgaggaggatgaaggccattcaaactcctccccacgacactctgaagcagcgacggcacagcgggaagaatggaaaatgtttataggaggccttagctgggacactacaaagaaagatccgaaggaacaatatcagcaacagcaacagtggggatctagaggaggatttgcaggaagagctcgtggaagaggtggtgaccagcagagtggttatgggaaggtatccaggcgaggtggtcatcgtggtgaagcagtattttccaatttgaagattcatttgaaggtggctcctgccacctgctaatagcagttcaaactaaattttttgtatcaagtccctgaatggaagtatgacgttgggtccctctgaagtttaattctgagttctcattaaaagaaatttgctttcattgttttatttcttaattgctatgcttcagaatcaatttgtgttttatgccctttcccccagtattgtagagcaagtcttgtgttaaaagcccagtgtgacagtgtcatgatgtagtagtgtcttactggttttttaataaatccttttgtataaaaatgtattggctcttttatcatcagaataggaaaaattgtcatggattcaagttattaaaagcataagtttggaagacaggcttgccgaaattgaggacatgattaaaattgcagtgaagtttgaaatgtttttagcaaaatctaatttttgccataatgtgtcctccctgtccaaattgggaatgacttaatgtcaatttgtttgttggttgttttaataatacttccttatgtagccattaagatttatatgaatattttcccaaatgcccagtttttgcttaatatgtattgtgctttttagaacaaatctggataaatgtgcaaaagtacccctttgcacagatagttaatgttttatgcttccattaaataaaaaggacttaaaatctgttaattataatagaaatgcggctagttcagagagatttttagagctgtggtggacttcatagatgaattcaagtgttgagggaggattaaagaaatatataccgtgtttatgtgtgtgtgcttatttgtttgaatgattttattttccatttctcaaaggttttatttttttggttagggccttaaaatttcaggactgtgattattagtatgtgtgcctaaggaactttttgagtcactcttaagaaagtgaaactgaagagtctaagtgataactataggattaagtcagaattgtttttcctgtcatttgttggaagcttcttgagttctgttattagcattcagggaattgatacccatcaacttgaatggaaaatcgtttgtaggtattacttaagtgaatgttaagagttccaccctgagtggtaatctaaggctgtgcagtcagttacttcagactgctcagaatagttcattagaaaggtaacaaatgagaaatgtattattatacagttctatagtagtgaagtgatggaatacctttcttacttttgtggagttacatctgatgctaagaatttgacctccaactaagcaaacattttaatgagcaaaagttagtgttattaaagttttttatgatagatccaaattgaggacctgtgtcctgtttttataagattgcaacccagctatgctcatttgtttatgttttgtatatggctgcttttgtgttacagtggtagagtttagtagttaggacagagacctgcaaagcaaaataatttacagtctggccctttacagaaaagtttgctgactcatggtcaaaataaatgaaaattttttgtgttagggttgttaagctagggttctttttggtatcatatgcttattttatgtaaatctctcaataaaaaattatttttaagagaaaaaaaaaaaaaaaaaaaaaaaaaaaaaaaaaggggggggggtaaaaatttccctgggggggcccaggttaggggtcccggtttttgttaaggggggcccctattggggggcccgattttaaaccgcaagggaccggggccgggcggttaacccacggtccgggcctgtggacaccctggcgttccctggggaccctgtggggaggggaccccttactttcttggggtgggccttatctgtgcgcgacttacctacggggagttaaggcacccggcgggaattttaacattttcaggtctttctgctgtgatccaacgctggatatgtctcgcggtggaaagtttcggtcacgggttgctttagacatttttcccagcggc

SEQ ID NO: 80373 - DNA, 296 bp, Homo sapiens
taaaaaaaaaagaaaaaaattatccaggcgtgatggtgcaagcctgtagtcccagctactcaggaagctgaggtgagaggatggcttgagcccaggagatcaataactgcactgagcctttatcgtgccactgcactccagcatgggcaactgagcaagaccctgtctcaaaaaaaaaaaagccaaaaataaagagaaaacacttaaaacagaacaagaaaaatgacctgccacatgtaagataaatacaataaaattaacacctgagatccaatcaggaactatggaggccggaa

SEQ ID NO: 80374 - DNA, 352 bp, Homo sapiens
aggagtatactgtaagagtctatcagtttgaaagcttagaaaccctaatgtccaacattccgataacctctgggtaaactaagtgacagcaaaatctaagtagtctgtctggatttgtaccacttactggaagaaattttattatttttcagccattcactgaactcccaggattttggagttgaatcataaaacgggaaaaaataagacagattatgcaatgcttcttttaatttactgtttttggggggttttgttttgttttgttttgtttttgttttttgagacagaacctccctctcttgcctaagctggaatgcaatggcacaatctcagctcactgcaacctctg

SEQ ID NO: 80375 - DNA, 321 bp, Homo sapiens
  misc_feature (112)..(112): n is a, c, g, or t
  misc_feature (222)..(222): n is a, c, g, or t
gcacaacttgcatgacttggctttgctgtccttactctaatcccaaccctgtctgatcctcctttatttaaaatgcccatattctggctaggcatggtggctcatgcctgtnaccccagcactttgggaggctgaggcaggcggatctcttgagctcaggagtttgagaccagcctggccaacatggtgaaaccacgtgtctactaaaaatacaaaaattanttgggtgtggtggcacatgcctgtagtcccagctactcaggagagtgaagcaggagaattgctggagcccgggaggcggagaggttgcagtgagccgag

SEQ ID NO: 80376 - DNA, 851 bp, Homo sapiens
ggcggcggcacagacatgggtctcagtgccggacgctaaccccacatgtggaggccccgtgagccccagccagctggaagcacggccacagtctctttaagacaagatcccggcctgagccgtccttggtcgtccacctggacagcatgacagatgccgcatccctcattatgaaaggctggggctcagggcagcagccatgatcgagaagccaaacactaaaggcgttttgccagaggtggctggtggaacacaatcctgggggtaaagcagtggcggtgagtgcactttgcaggcgcaggggccaccaggcctgggaaagacagctttggaacggacctaaacaaagcgtggccagtggggcaaagaacgtctgtcaccagggtgaaatagacaagctgcggtacacagccagctggaacgcatgacggcatccgtgaatgtgcacagaatagattcttaacgctgtgttttttcagatatcatattccagagtgagttaaaatgaaattagtgatgagaggtggaatttccatatttatctgcctctgggctgaaatttctcaggctgaggagaaagcggtgctaagaacccagcgtttacaagcaggaaaataatgaagatgggaagcaaagtaccacttcctcatcacacgcctgctgcaagcaggttcccccttatctgtctccgcttgagaatctatttttggaaaccctgctggacagggacgatcgtactgagtgtcctcaaacagcatttaatcagcgctggggctgcagaccagatgcacactgagagggaggccgaggagcacgggtacctcgtgtcctcaccagcacatgatgtgccc

SEQ ID NO: 80377 - DNA, 331 bp, Homo sapiens
aaaaaaaaaaaaaaaaaaggagagagagagagacgggatctcgctatgttacccaggctggtcttgaacttctaggctcaagcaatcctcctgcctcggtctcctacagtgttgagattacaggtgtgagccattgttccaaaaattgatatacttggcctcacatcaatttttggaacaatgcaggtaataatgagggggaaaaaattttaaaagtcccaattaccctttaaacaaatattacctcctccaaaaaatatttttctagattcctgaatgtattttttggtggaggaggaactcaaagtagaattcatttacatattcattc

SEQ ID NO: 80378 - DNA, 482 bp, Homo sapiens
tgaaaacacaacccacaatcatcctcctgaggcagattccgctgggactgcattcaacttagggccaactattaagcaaactgagacaaaatgggaatacaacaacgtgggcactgacctgtcccccgagcccaaaagcttcaattacccattgttctcgtccccaggtgatcagtttgaaattcagctaacccaacagccacgttccctcatccccaacaacaatgtgagaaggctcatttctcatgttatccggaccttgaagatggactgctctgagacccatgtgcaattgacctgtgccaagctcatctccaggacaggcctcctgatgaagcttctcagtgagcagcaagaagtaaaggtgtccaaggcagaatgggatacggaccagtggaaaactgagaactatatcaatgacagcacagaagcccagaatgaacagaaagagcagaagtcgagtgagctcacaaaagaagttc

SEQ ID NO: 80379 - DNA, 2659 bp, Homo sapiens
cctcatggccctgtccactgagcatcctcccgccacacagaaacccgcccagccggggccaccgaccccaccccctgcctggaaacttaaaggaggccggagctgtggggagctcagagctgagatcctacaggagtccagggctggagagaaaacctctgcgaggaaagggaaggagcaagccgtgaatttaagggacgctgtgaagcaatcatggatgcaatgaagagagggctctgctgtgtgctgctgctgtgtggagcagtcttcgtttcgcccagccaggaaatccatgcccgattcagaagaggagccagatcttaccaagtgatctgcagagatgaaaaaacgcagatgatataccagcaacatcagtcatggctgcgccctgtgctcagaagcaaccgggtggaatattgctggtgcaacagtggcagggcacagtgccactcagtgcctgtcaaaagttgcagcgagccaaggtgtttcaacgggggcacctgccagcaggccctgtacttctcagatttcgtgtgccagtgccccgaaggatttgctgggaagtgctgtgaaatagataccagggccacgtgctacgaggaccagggcatcagctacaggggcacgtggagcacagcggagagtggcgccgagtgcaccaactggaacagcagcgcgttggcccagaagccctacagcgggcggaggccagacgccatcaggctgggcctggggaaccacaactactgcagaaacccagatcgagactcaaagccctggtgctacgtctttaaggcggggaagtacagctcagagttctgcagcacccctgcctgctctgagggaaacagtgactgctactttgggaatgggtcagcctaccgtggcacgcacagcctcaccgagtcgggtgcctcctgcctcccgtggaattccatgatcctgataggcaaggtttacacagcacagaaccccagtgcccaggcactgggcctgggcaaacataattactgccggaatcctgatggggatgccaagccctggtgccacgtgctgaagaaccgcaggctgacgtgggagtactgtgatgtgccctcctgctccacctgcggcctgagacagtacagccagcctcagtttcgcatcaaaggagggctcttcgccgacatcgcctcccacccctggcaggctgccatctttgccaagcacaggaggtcgcccggagagcggttcctgtgcgggggcatactcatcagctcctgctggattctctctgccgcccactgcttccaggagaggtttccgccccaccacctgacggtgatcttgggcagaacataccgggtggtccctggcgaggaggagcagaaatttgaagtcgaaaaatacattgtccataaggaattcgatgatgacacttacgacaatgacattgcgctgctgcagctgaaatcggattcgtcccgctgtgcccaggagagcagcgtggtccgcactgtgtgccttcccccggcggacctgcagctgccggactggacggagtgtgagctctccggctacggcaagcatgaggccttgtctcctttctattcggagcggctgaaggaggctcatgtcagactgtacccatccagccgctgcacatcacaacatttacttaacagaacagtcaccgacaacatgctgtgtgctggagacactcggagcggcgggccccaggcaaacttgcacgacgcctgccagggcgattcgggaggccccctggtgtgtctgaacgatggccgcatgactttggtgggcatcatcagctggggcctgggctgtggacagaaggatgtcccgggtgtgtacaccaaggttaccaactacctagactggattcgtgacaacatgcgaccgtgaccaggaacacccgactcctcaaaagcaaatgagatcccgcctcttcttcttcagaagacactgcaaaggcgcagtgcttctctacagacttctccagacccaccacaccgcagaagcgggacgagaccctacaggagagggaagagtgcattttcccagatacttcccattttggaagttttcaggacttggtctgatttcaggatactctgtcagatgggaagacatgaatgcacactagcctctccaggaatgcctcctccctgggcagaaagtggccatgccaccctgttttcagctaaagcccaacctcctgacctgtcaccgtgagcagctttggaaacaggaccacaaaaatgaaagcatgtctcaatagtaaaagataacaagatctttcaggaaagacggattgcattagaaatagacagtatatttatagtcacaagagcccagcagggcctcaaagttggggcaggctggctggcccgtcatgttcctcaaaagcacccttgacgtcaagtctccttcccctttccccactccctggctctcagaaggtattccttttgtgtacagtgtgtaaagtgtaaatcctttttctttataaactttagagtagcatgagagaattgtatcatttgaacaactaggcttcagcatatttatagcaatccatgttagtttttactttctgttgccacaaccctgttttatactgtacttaataaattcagatatatttttcacagtttttcca

SEQ ID NO: 80380 - DNA, 2521 bp, Homo sapiens
cctcatggccctgtccactgagcatcctcccgccacacagaaacccgcccagccggggccaccgaccccaccccctgcctggaaacttaaaggaggccggagctgtggggagctcagagctgagatcctacaggagtccagggctggagagaaaacctctgcgaggaaagggaaggagcaagccgtgaatttaagggacgctgtgaagcaatcatggatgcaatgaagagagggctctgctgtgtgctgctgctgtgtggagcagtcttcgtttcgcccagccaggaaatccatgcccgattcagaagaggagccagatcttaccaaggttgcagcgagccaaggtgtttcaacgggggcacctgccagcaggccctgtacttctcagatttcgtgtgccagtgccccgaaggatttgctgggaagtgctgtgaaatagataccagggccacgtgctacgaggaccagggcatcagctacaggggcacgtggagcacagcggagagtggcgccgagtgcaccaactggaacagcagcgcgttggcccagaagccctacagcgggcggaggccagacgccatcaggctgggcctggggaaccacaactactgcagaaacccagatcgagactcaaagccctggtgctacgtctttaaggcggggaagtacagctcagagttctgcagcacccctgcctgctctgagggaaacagtgactgctactttgggaatgggtcagcctaccgtggcacgcacagcctcaccgagtcgggtgcctcctgcctcccgtggaattccatgatcctgataggcaaggtttacacagcacagaaccccagtgcccaggcactgggcctgggcaaacataattactgccggaatcctgatggggatgccaagccctggtgccacgtgctgaagaaccgcaggctgacgtgggagtactgtgatgtgccctcctgctccacctgcggcctgagacagtacagccagcctcagtttcgcatcaaaggagggctcttcgccgacatcgcctcccacccctggcaggctgccatctttgccaagcacaggaggtcgcccggagagcggttcctgtgcgggggcatactcatcagctcctgctggattctctctgccgcccactgcttccaggagaggtttccgccccaccacctgacggtgatcttgggcagaacataccgggtggtccctggcgaggaggagcagaaatttgaagtcgaaaaatacattgtccataaggaattcgatgatgacacttacgacaatgacattgcgctgctgcagctgaaatcggattcgtcccgctgtgcccaggagagcagcgtggtccgcactgtgtgccttcccccggcggacctgcagctgccggactggacggagtgtgagctctccggctacggcaagcatgaggccttgtctcctttctattcggagcggctgaaggaggctcatgtcagactgtacccatccagccgctgcacatcacaacatttacttaacagaacagtcaccgacaacatgctgtgtgctggagacactcggagcggcgggccccaggcaaacttgcacgacgcctgccagggcgattcgggaggccccctggtgtgtctgaacgatggccgcatgactttggtgggcatcatcagctggggcctgggctgtggacagaaggatgtcccgggtgtgtacaccaaggttaccaactacctagactggattcgtgacaacatgcgaccgtgaccaggaacacccgactcctcaaaagcaaatgagatcccgcctcttcttcttcagaagacactgcaaaggcgcagtgcttctctacagacttctccagacccaccacaccgcagaagcgggacgagaccctacaggagagggaagagtgcattttcccagatacttcccattttggaagttttcaggacttggtctgatttcaggatactctgtcagatgggaagacatgaatgcacactagcctctccaggaatgcctcctccctgggcagaaagtggccatgccaccctgttttcagctaaagcccaacctcctgacctgtcaccgtgagcagctttggaaacaggaccacaaaaatgaaagcatgtctcaatagtaaaagataacaagatctttcaggaaagacggattgcattagaaatagacagtatatttatagtcacaagagcccagcagggcctcaaagttggggcaggctggctggcccgtcatgttcctcaaaagcacccttgacgtcaagtctccttcccctttccccactccctggctctcagaaggtattccttttgtgtacagtgtgtaaagtgtaaatcctttttctttataaactttagagtagcatgagagaattgtatcatttgaacaactaggcttcagcatatttatagcaatccatgttagtttttactttctgttgccacaaccctgttttatactgtacttaataaattcagatatatttttcacagtttttcca

SEQ ID NO: 80381 - DNA, 2151 bp, Homo sapiens
cctcatggccctgtccactgagcatcctcccgccacacagaaacccgcccagccggggccaccgaccccaccccctgcctggaaacttaaaggaggccggagctgtggggagctcagagctgagatcctacaggagtccagggctggagagaaaacctctgcgaggaaagggaaggagcaagccgtgaatttaagggacgctgtgaagcaatcatggatgcaatgaagagagggctctgctgtgtgctgctgctgtgtggagcagtcttcgtttcgcccagccaggaaatccatgcccgattcagaagaggagccagatcttaccaagtgatctgcagagatgaaaaaacgcagatgatataccagcaacatcagtcatggctgcgccctgtgctcagaagcaaccgggtggaatattgctggtgcaacagtggcagggcacagtgccactcagtgcctgtcaaaagttgcagcgagccaaggtgtttcaacgggggcacctgccagcaggccctgtacttctcagatttcgtgtgccagtgccccgaaggatttgctgggaagtgctgtgaaatagataccagggccacgtgctacgaggaccagggcatcagctacaggggcacgtggagcacagcggagagtggcgccgagtgcaccaactggaacagcagcgcgttggcccagaagccctacagcgggcggaggccagacgccatcaggctgggcctggggaaccacaactactgcagaaacccagatcgagactcaaagccctggtgctacgtctttaaggcggggaagtacagctcagagttctgcagcacccctgcctgctctgagggaaacagtgactgctactttgggaatgggtcagcctaccgtggcacgcacagcctcaccgagtcgggtgcctcctgcctcccgtggaattccatgatcctgataggcaaggtttacacagcacagaaccccagtgcccaggcactgggcctgggcaaacataattactgccgctgccggactggacggagtgtgagctctccggctacggcaagcatgaggccttgtctcctttctattcggagcggctgaaggaggctcatgtcagactgtacccatccagccgctgcacatcacaacatttacttaacagaacagtcaccgacaacatgctgtgtgctggagacactcggagcggcgggccccaggcaaacttgcacgacgcctgccagggcgattcgggaggccccctggtgtgtctgaacgatggccgcatgactttggtgggcatcatcagctggggcctgggctgtggacagaaggatgtcccgggtgtgtacaccaaggttaccaactacctagactggattcgtgacaacatgcgaccgtgaccaggaacacccgactcctcaaaagcaaatgagatcccgcctcttcttcttcagaagacactgcaaaggcgcagtgcttctctacagacttctccagacccaccacaccgcagaagcgggacgagaccctacaggagagggaagagtgcattttcccagatacttcccattttggaagttttcaggacttggtctgatttcaggatactctgtcagatgggaagacatgaatgcacactagcctctccaggaatgcctcctccctgggcagaaagtggccatgccaccctgttttcagctaaagcccaacctcctgacctgtcaccgtgagcagctttggaaacaggaccacaaaaatgaaagcatgtctcaatagtaaaagataacaagatctttcaggaaagacggattgcattagaaatagacagtatatttatagtcacaagagcccagcagggcctcaaagttggggcaggctggctggcccgtcatgttcctcaaaagcacccttgacgtcaagtctccttcccctttccccactccctggctctcagaaggtattccttttgtgtacagtgtgtaaagtgtaaatcctttttctttataaactttagagtagcatgagagaattgtatcatttgaacaactaggcttcagcatatttatagcaatccatgttagtttttactttctgttgccacaaccctgttttatactgtacttaataaattcagatatatttttcacagtttttcca

SEQ ID NO: 80382 - DNA, 442 bp, Homo sapiens
taatgacaataatttcggaattttaaattccacctcacaataagggaattttggccttcgaggccaaagaattgggcacgaggagaaagacggattgcattagaaatagacagtatatttatagtcacaagagcccagcagggcctcaaagttggggcaggctggctggcccgtcatgttcctcaaaagcacccttgacgtcaagtctccttcccctttccccactccctggctctcagaaggtattccttttgtgtacagtgtgtaaagtgtaaatcctttttctttataaactttagagtagcatgagagaattgtatcatttgaacaactaggcttcagcatatttatagcaatccatgttagtttttactttctgttgccacaaccctgttttatactgtacttaataaattcagatatatttttcacagtttttcca

SEQ ID NO: 80383 - DNA, 343 bp, Homo sapiens
ttaatgtaagaaatattaaataaatgtaataggtatagtaggattattaatgtataaactaagagaaataataaaagaaattgaaatagaaagtatgaaagtcaagtctccttcccctttccccactccctggctctcagaaggtattccttttgtgtacagtgtgtaaagtgtaaatcctttttctttataaactttagagtagcatgagagaattgtatcatttgaacaactaggcttcagcatatttatagcaatccatgttagtttttactttctgttgccacaaccctgttttatactgtacttaataaattcagatatatttttcacagtttttcca

SEQ ID NO: 80384 - DNA, 2939 bp, Homo sapiens
cctcatggccctgtccactgagcatcctcccgccacacagaaacccgcccagccggggccaccgaccccaccccctgcctggaaacttaaaggaggccggagctgtggggagctcagagctgagatcctacaggagtccagggctggagagaaaacctctgcgaggaaagggaaggagcaagccgtgaatttaagggacgctgtgaagcaatcatggatgcaatgaagagagggctctgctgtgtgctgctgctgtgtggagcagtcttcgtttcgcccagccaggaaatccatgcccgattcagaagaggagccagatcttaccaagtgatctgcagagatgaaaaaacgcagatgatataccagcaacatcagtcatggctgcgccctgtgctcagaagcaaccgggtggaatattgctggtgcaacagtggcagggcacagtgccactcagtgcctgtcaaaagttgcagcgagccaaggtgtttcaacgggggcacctgccagcaggccctgtacttctcagatttcgtgtgccagtgccccgaaggatttgctgggaagtgctgtgaaatagataccagggccacgtgctacgaggaccagggcatcagctacaggggcacgtggagcacagcggagagtggcgccgagtgcaccaactggaacagcagcgcgttggcccagaagccctacagcgggcggaggccagacgccatcaggctgggcctggggaaccacaactactgcagaaacccagatcgagactcaaagccctggtgctacgtctttaaggcggggaagtacagctcagagttctgcagcacccctgcctgctctgagggaaacagtgactgctactttgggaatgggtcagcctaccgtggcacgcacagcctcaccgagtcgggtgcctcctgcctcccgtggaattccatgatcctgataggcaaggtttacacagcacagaaccccagtgcccaggcactgggcctgggcaaacataattactgccggaatcctgatggggatgccaagccctggtgccacgtgctgaagaaccgcaggctgacgtgggagtactgtgatgtgccctcctgctccacctgcggcctgagacagtacagccagcctcagtttcgcatcaaaggagggctcttcgccgacatcgcctcccacccctggcaggctgccatctttgccaagcacaggaggtcgcccggagagcggttcctgtgcgggggcatactcatcagctcctgctggattctctctgccgcccactgcttccaggagaggtttccgccccaccacctgacggtgatcttgggcagaacataccgggtggtccctggcgaggaggagcagaaatttgaagtcgaaaaatacattgtccataaggaattcgatgatgacacttacgacaatgacattgcgctgctgcagctgaaatcggattcgtcccgctgtgcccaggagagcagcgtggtccgcactgtgtgccttcccccggcggacctgcagctgccggactggacggagtgtgagctctccggctacggcaagcatgaggccttgtctcctttctattcggagcggctgaaggaggctcatgtcagactgtacccatccagccgctgcacatcacaacatttacttaacagaacagtcaccgacaacatgctgtgtgctggagacactcggagcggcgggccccaggcaaacttgcacgacgcctgccagggcgattcgggaggccccctggtgtgtctgaacgatggccgcatgactttggtgggcatcatcagctggggcctgggctgtggacagaaggatgtcccgggtgtgtacaccaaggttaccaactacctagactggattcgtgacaacatgcgaccgtgaccaggaacacccgactcctcaaaagcaaatgagatcccgcctcttcttcttcagaagacactgcaaaggcgcagtgcttctctacagacttctccagacccaccacaccgcagaagcgggacgagaccctacaggagagggaagagtgcattttcccagatacttcccattttggaagttttcaggacttggtctgatttcaggatactctgtcagatgggaagacatgaatgcacactagcctctccaggaatgcctcctccctgggcagaaagtggccatgccaccctgttttcagctaaagcccaacctcctgacctgtcaccgtgagcagctttggaaacaggaccacaaaaatgaaagcatgtctcaatagtaaaagataacaagatctttcaggaaagacggattgcattagaaatagacagtatatttatagtcacaagagcccagcagggcctcaaagttggggcaggctggctggcccgtcatgttcctcaaaagcacccttgacgtcaagtctccttcccctttccccactccctggctctcagaaggtattccttttgtgtacagtgtgtaaagtgtaaatcctttttctttataaactttagagtagcatgagagaattgtatcatttgaacaactaggcttcagcatatttatagcaatccatgttagtttttactttctgttgccacaaccctgttttatactgtacttaataaattcagatatatttttcacagtttttccaaaatcagagtggaatggttttgttatagatgctgtatcccactctttattcatgttcacattttaaaatcatttggaattctgcttcactcgcttaacatatacacaacacctgtaacatacaaggcaatgggctaggtgctccagaccgggaaaaggagggacaggaatgcttggtctgatgggctaatatggcatttagagaagtaccaaggtacagtggagccggtcacaaaagggcagacttgtagtagaattcagttgcaagagggattggggaa

SEQ ID NO: 80385 - DNA, 2417 bp, Homo sapiens
ttccggcaacgacgggccagtgatgttcccagtggccttgcgacgagaaaacctctgcgaggaaagggaaggagcaagccgtgaatttaagggacgctgtgaagcaatcatggatgcaatgaagagagggctctgctgtgtgctgctgctgtgtggagcagtcttcgtttcgcccagccaggaaatccatgcccgattcagaagaggagccagatcttaccaaggttgcagcgagccaaggtgtttcaacgggggcacctgccagcaggccctgtacttctcagatttcgtgtgccagtgccccgaaggatttgctgggaagtgctgtgaaatagataccagggccacgtgctacgaggaccagggcatcagctacaggggcacgtggagcacagcggagagtggcgccgagtgcaccaactggaacagcagcgcgttggcccagaagccctacagcgggcggaggccagacgccatcaggctgggcctggggaaccacaactactgcagaaacccagatcgagactcaaagccctggtgctacgtctttaaggcggggaagtacagctcagagttctgcagcacccctgcctgctctgagggaaacagtgactgctactttgggaatgggtcagcctaccgtggcacgcacagcctcaccgagtcgggtgcctcctgcctcccgtggaattccatgatcctgataggcaaggtttacacagcacagaaccccagtgcccaggcactgggcctgggcaaacataattactgccggaatcctgatggggatgccaagccctggtgccacgtgctgaagaaccgcaggctgacgtgggagtactgtgatgtgccctcctgctccacctgcggcctgagacagtacagccagcctcagtttcgcatcaaaggagggctcttcgccgacatcgcctcccacccctggcaggctgccatctttgccaagcacaggaggtcgcccggagagcggttcctgtgcgggggcatactcatcagctcctgctggattctctctgccgcccactgcttccaggagaggtttccgccccaccacctgacggtgatcttgggcagaacataccgggtggtccctggcgaggaggagcagaaatttgaagtcgaaaaatacattgtccataaggaattcgatgatgacacttacgacaatgacattgcgctgctgcagctgaaatcggattcgtcccgctgtgcccaggagagcagcgtggtccgcactgtgtgccttcccccggcggacctgcagctgccggactggacggagtgtgagctctccggctacggcaagcatgaggccttgtctcctttctattcggagcggctgaaggaggctcatgtcagactgtacccatccagccgctgcacatcacaacatttacttaacagaacagtcaccgacaacatgctgtgtgctggagacactcggagcggcgggccccaggcaaacttgcacgacgcctgccagggcgattcgggaggccccctggtgtgtctgaacgatggccgcatgactttggtgggcatcatcagctggggcctgggctgtggacagaaggatgtcccgggtgtgtacaccaaggttaccaactacctagactggattcgtgacaacatgcgaccgtgaccaggaacacccgactcctcaaaagcaaatgagatcccgcctcttcttcttcagaagacactgcaaaggcgcagtgcttctctacagacttctccagacccaccacaccgcagaagcgggacgagaccctacaggagagggaagagtgcattttcccagatacttcccattttggaagttttcaggacttggtctgatttcaggatactctgtcagatgggaagacatgaatgcacactagcctctccaggaatgcctcctccctgggcagaaagtggccatgccaccctgttttcagctaaagcccaacctcctgacctgtcaccgtgagcagctttggaaacaggaccacaaaaatgaaagcatgtctcaatagtaaaagataacaagatctttcaggaaagacggattgcattagaaatagacagtatatttatagtcacaagagcccagcagggcctcaaagttggggcaggctggctggcccgtcatgttcctcaaaagcacccttgacgtcaagtctccttcccctttccccactccctggctctcagaaggtattccttttgtgtacagtgtgtaaagtgtaaatcctttttctttataaactttagagtagcatgagagaattgtatcatttgaacaactaggcttcagcatatttatagcaatccatgttagtttttactttctgttgccacaaccctgttttatactgtacttaataaattcagatatatttttcacagtttttcca

SEQ ID NO: 80386 - DNA, 2281 bp, Homo sapiens
cctcatggccctgtccactgagcatcctcccgccacacagaaacccgcccagccggggccaccgaccccaccccctgcctggaaacttaaaggaggccggagctgtggggagctcagagctgagatcctacaggagtccagggctggagagaaaacctctgcgaggaaagggaaggagcaagccgtgaatttaagggacgctgtgaagcaatcatggatgcaatgaagagagggctctgctgtgtgctgctgctgtgtggagcagtcttcgtttcgcccagccaggaaatccatgcccgattcagaagaggagccagatcttaccaagtgatctgcagagatgaaaaaacgcagatgatataccagcaacatcagtcatggctgcgccctgtgctcagaagcaaccgggtggaatattgctggtgcaacagtggcagggcacagtgccactcagtgcctgtcaaaagaaacagtgactgctactttgggaatgggtcagcctaccgtggcacgcacagcctcaccgagtcgggtgcctcctgcctcccgtggaattccatgatcctgataggcaaggtttacacagcacagaaccccagtgcccaggcactgggcctgggcaaacataattactgccggaatcctgatggggatgccaagccctggtgccacgtgctgaagaaccgcaggctgacgtgggagtactgtgatgtgccctcctgctccacctgcggcctgagacagtacagccagcctcagtttcgcatcaaaggagggctcttcgccgacatcgcctcccacccctggcaggctgccatctttgccaagcacaggaggtcgcccggagagcggttcctgtgcgggggcatactcatcagctcctgctggattctctctgccgcccactgcttccaggagaggtttccgccccaccacctgacggtgatcttgggcagaacataccgggtggtccctggcgaggaggagcagaaatttgaagtcgaaaaatacattgtccataaggaattcgatgatgacacttacgacaatgacattgcgctgctgcagctgaaatcggattcgtcccgctgtgcccaggagagcagcgtggtccgcactgtgtgccttcccccggcggacctgcagctgccggactggacggagtgtgagctctccggctacggcaagcatgaggccttgtctcctttctattcggagcggctgaaggaggctcatgtcagactgtacccatccagccgctgcacatcacaacatttacttaacagaacagtcaccgacaacatgctgtgtgctggagacactcggagcggcgggccccaggcaaacttgcacgacgcctgccagggcgattcgggaggccccctggtgtgtctgaacgatggccgcatgactttggtgggcatcatcagctggggcctgggctgtggacagaaggatgtcccgggtgtgtacaccaaggttaccaactacctagactggattcgtgacaacatgcgaccgtgaccaggaacacccgactcctcaaaagcaaatgagatcccgcctcttcttcttcagaagacactgcaaaggcgcagtgcttctctacagacttctccagacccaccacaccgcagaagcgggacgagaccctacaggagagggaagagtgcattttcccagatacttcccattttggaagttttcaggacttggtctgatttcaggatactctgtcagatgggaagacatgaatgcacactagcctctccaggaatgcctcctccctgggcagaaagtggccatgccaccctgttttcagctaaagcccaacctcctgacctgtcaccgtgagcagctttggaaacaggaccacaaaaatgaaagcatgtctcaatagtaaaagataacaagatctttcaggaaagacggattgcattagaaatagacagtatatttatagtcacaagagcccagcagggcctcaaagttggggcaggctggctggcccgtcatgttcctcaaaagcacccttgacgtcaagtctccttcccctttccccactccctggctctcagaaggtattccttttgtgtacagtgtgtaaagtgtaaatcctttttctttataaactttagagtagcatgagagaattgtatcatttgaacaactaggcttcagcatatttatagcaatccatgttagtttttactttctgttgccacaaccctgttttatactgtacttaataaattcagatatatttttcacagtttttcca

SEQ ID NO: 80387 - DNA, 2126 bp, Homo sapiens
atactctgatgaggctggcctgtcttttctcatagtgatctgcagagatgaaaaaacgcagatgatataccagcaacatcactacaggggcacgtggagcacagcggagagtggcgccgagtgcaccaactggaacagcagcgcgttggcccagaagccctacagcgggcggaggccagacgccatcaggctgggcctggggaaccacaactactgcagaaacccagatcgagactcaaagccctggtgctacgtctttaaggcggggaagtacagctcagagttctgcagcacccctgcctgctctgagggaaacagtgactgctactttgggaatgggtcagcctaccgtggcacgcacagcctcaccgagtcgggtgcctcctgcctcccgtggaattccatgatcctgataggcaaggtttacacagcacagaaccccagtgcccaggcactgggcctgggcaaacataattactgccggaatcctgatggggatgccaagccctggtgccacgtgctgaagaaccgcaggctgacgtgggagtactgtgatgtgccctcctgctccacctgcggcctgagacagtacagccagcctcagtttcgcatcaaaggagggctcttcgccgacatcgcctcccacccctggcaggctgccatctttgccaagcacaggaggtcgcccggagagcggttcctgtgcgggggcatactcatcagctcctgctggattctctctgccgcccactgcttccaggagaggtttccgccccaccacctgacggtgatcttgggcagaacataccgggtggtccctggcgaggaggagcagaaatttgaagtcgaaaaatacattgtccataaggaattcgatgatgacacttacgacaatgacattgcgctgctgcagctgaaatcggattcgtcccgctgtgcccaggagagcagcgtggtccgcactgtgtgccttcccccggcggacctgcagctgccggactggacggagtgtgagctctccggctacggcaagcatgaggccttgtctcctttctattcggagcggctgaaggaggctcatgtcagactgtacccatccagccgctgcacatcacaacatttacttaacagaacagtcaccgacaacatgctgtgtgctggagacactcggagcggcgggccccaggcaaacttgcacgacgcctgccagggcgattcgggaggccccctggtgtgtctgaacgatggccgcatgactttggtgggcatcatcagctggggcctgggctgtggacagaaggatgtcccgggtgtgtacaccaaggttaccaactacctagactggattcgtgacaacatgcgaccgtgaccaggaacacccgactcctcaaaagcaaatgagatcccgcctcttcttcttcagaagacactgcaaaggcgcagtgcttctctacagacttctccagacccaccacaccgcagaagcgggacgagaccctacaggagagggaagagtgcattttcccagatacttcccattttggaagttttcaggacttggtctgatttcaggatactctgtcagatgggaagacatgaatgcacactagcctctccaggaatgcctcctccctgggcagaaagtggccatgccaccctgttttcagctaaagcccaacctcctgacctgtcaccgtgagcagctttggaaacaggaccacaaaaatgaaagcatgtctcaatagtaaaagataacaagatctttcaggaaagacggattgcattagaaatagacagtatatttatagtcacaagagcccagcagggcctcaaagttggggcaggctggctggcccgtcatgttcctcaaaagcacccttgacgtcaagtctccttcccctttccccactccctggctctcagaaggtattccttttgtgtacagtgtgtaaagtgtaaatcctttttctttataaactttagagtagcatgagagaattgtatcatttgaacaactaggcttcagcatatttatagcaatccatgttagtttttactttctgttgccacaaccctgttttatactgtacttaataaattcagatatatttttcacagtttttcca

SEQ ID NO: 80388 - DNA, 2135 bp, Homo sapiens
cctcatggccctgtccactgagcatcctcccgccacacagaaacccgcccagccggggccaccgaccccaccccctgcctggaaacttaaaggaggccggagctgtggggagctcagagctgagatcctacaggagtccagggctggagagaaaacctctgcgaggaaagggaaggagcaagccgtgaatttaagggacgctgtgaagcaatcatggatgcaatgaagagagggctctgctgtgtgctgctgctgtgtggagcagtcttcgtttcgcccagccaggaaatccatgcccgattcagaagaggagccagatcttaccaagtgatctgcagagatgaaaaaacgcagatgatataccagcaacatcagtcatggctgcgccctgtgctcagaagcaaccgggtggaatattgctggtgcaacagtggcagggcacagtgccactcagtgcctgtcaaaagttgcagcgagccaaggtgtttcaacgggggcacctgccagcaggcccccctggtgccacgtgctgaagaaccgcaggctgacgtgggagtactgtgatgtgccctcctgctccacctgcggcctgagacagtacagccagcctcagtttcgcatcaaaggagggctcttcgccgacatcgcctcccacccctggcaggctgccatctttgccaagcacaggaggtcgcccggagagcggttcctgtgcgggggcatactcatcagctcctgctggattctctctgccgcccactgcttccaggagaggtttccgccccaccacctgacggtgatcttgggcagaacataccgggtggtccctggcgaggaggagcagaaatttgaagtcgaaaaatacattgtccataaggaattcgatgatgacacttacgacaatgacattgcgctgctgcagctgaaatcggattcgtcccgctgtgcccaggagagcagcgtggtccgcactgtgtgccttcccccggcggacctgcagctgccggactggacggagtgtgagctctccggctacggcaagcatgaggccttgtctcctttctattcggagcggctgaaggaggctcatgtcagactgtacccatccagccgctgcacatcacaacatttacttaacagaacagtcaccgacaacatgctgtgtgctggagacactcggagcggcgggccccaggcaaacttgcacgacgcctgccagggcgattcgggaggccccctggtgtgtctgaacgatggccgcatgactttggtgggcatcatcagctggggcctgggctgtggacagaaggatgtcccgggtgtgtacaccaaggttaccaactacctagactggattcgtgacaacatgcgaccgtgaccaggaacacccgactcctcaaaagcaaatgagatcccgcctcttcttcttcagaagacactgcaaaggcgcagtgcttctctacagacttctccagacccaccacaccgcagaagcgggacgagaccctacaggagagggaagagtgcattttcccagatacttcccattttggaagttttcaggacttggtctgatttcaggatactctgtcagatgggaagacatgaatgcacactagcctctccaggaatgcctcctccctgggcagaaagtggccatgccaccctgttttcagctaaagcccaacctcctgacctgtcaccgtgagcagctttggaaacaggaccacaaaaatgaaagcatgtctcaatagtaaaagataacaagatctttcaggaaagacggattgcattagaaatagacagtatatttatagtcacaagagcccagcagggcctcaaagttggggcaggctggctggcccgtcatgttcctcaaaagcacccttgacgtcaagtctccttcccctttccccactccctggctctcagaaggtattccttttgtgtacagtgtgtaaagtgtaaatcctttttctttataaactttagagtagcatgagagaattgtatcatttgaacaactaggcttcagcatatttatagcaatccatgttagtttttactttctgttgccacaaccctgttttatactgtacttaataaattcagatatatttttcacagtttttcca

SEQ ID NO: 80389 - DNA, 1609 bp, Homo sapiens
taagaaaggttaataaaaacaaacatggtatttatttacccaatttttggagaataagtggatgatggcggccataatagtggtgggttaattcagggaataaatgtttgcaaggcaggaatggtaaggaacacctcttactaccatgaagttcaaaaacaatcacaaatagggcaggctccctgactgcctccacacctcacagtttatcatgcattcgtgtatttagcacagactagacagatttttactttataacactttgtattcattcattttccaacgtgcttattccggttcagggtcttgggtggggtggccagagccacctggcagctcagggcgccaggcgggaccagccctggacagacgccaccatcctattgcagagccactaacacccacactcactcagactgggcccacgtagatacatcctcagttggcttaatgtgcaagctttgggatgtggaaggaaaccggggtacctggacaaaacccaggcagacagtgtccccagacaggaattgatttttgttttcctcatcaaagttataatgaaatgacactgaatggaatattattgaagggcctgctgtattttgaagattacgatgttcatgctacacatactgactttctccagatagtctgctttttttgcaaacgccaaacctgctatctcctttgcagggcgattcgggaggccccctggtgtgtctgaacgatggccgcatgactttggtgggcatcatcagctggggcctgggctgtggacagaaggatgtcccgggtgtgtacaccaaggttaccaactacctagactggattcgtgacaacatgcgaccgtgaccaggaacacccgactcctcaaaagcaaatgagatcccgcctcttcttcttcagaagacactgcaaaggcgcagtgcttctctacagacttctccagacccaccacaccgcagaagcgggacgagaccctacaggagagggaagagtgcattttcccagatacttcccattttggaagttttcaggacttggtctgatttcaggatactctgtcagatgggaagacatgaatgcacactagcctctccaggaatgcctcctccctgggcagaaagtggccatgccaccctgttttcagctaaagcccaacctcctgacctgtcaccgtgagcagctttggaaacaggaccacaaaaatgaaagcatgtctcaatagtaaaagataacaagatctttcaggaaagacggattgcattagaaatagacagtatatttatagtcacaagagcccagcagggcctcaaagttggggcaggctggctggcccgtcatgttcctcaaaagcacccttgacgtcaagtctccttcccctttccccactccctggctctcagaaggtattccttttgtgtacagtgtgtaaagtgtaaatcctttttctttataaactttagagtagcatgagagaattgtatcatttgaacaactaggcttcagcatatttatagcaatccatgttagtttttactttctgttgccacaaccctgttttatactgtacttaataaattcagatatatttttcacagtttttcca

SEQ ID NO: 80390 - DNA, 1055 bp, Homo sapiens
cctcatggccctgtccactgagcatcctcccgccacacagaaacccgcccagccggggccaccgaccccaccccctgcctggaaacttaaaggaggccggagctgtggggagctcagagctgagatcctacaggagtccagggctggagagaaaacctctgcgaggaaagggaaggagcaagccgtgaatttaagggacgctgtgaagcaatcatggatgcaatgaagagagggctctgctgtgtgctgctgctgtgtggagcagtcttcgtttcgcccagccaggaaatccatgcccgattcagaagaggagccagatcttaccaagtgatctgcagagatgaaaaaacgcagatgatataccagcaacatcagtcatggctgcgccctgtgctcagaagcaaccgggtggaatattgctggtgcaacagtggcagggcacagtgccactcagtgcctgtcaaaagttgcagcgagccaaggtgtttcaacgggggcacctgccagcaggccctgtacttctcagatttcgtgtgccagtgccccgaaggatttgctgggaagtgctgtgaaatagataccagggccacgtgctacgaggaccagggcatcagctacaggggcacgtggagcacagcggagagtggcgccgagtgcaccaactggaacagcagcgcgttggcccagaagccctacagcgggcggaggccagacgccatcaggctgggcctggggaaccacaactactgcagaaacccagatcgagactcaaagccctggtgctacgtctttaaggcggggaagtacagctcagagttctgcagcacccctgcctgctctgagggaaacagtgactgctactttgggaatgggtcagcctaccgtggcacgcccacaacccggttgtgggcgcgaggtgtagcgctccgggggacggtcggggtcccggctttcgttcagggtgtccccaaacacctccttggccagcgacgtctttccgcaaacggtgatgcgcgccactcgccggaacttggcgtccgcctgcgcgcccacaa

SEQ ID NO: 80391 - DNA, 599 bp, Homo sapiens
ttccggcaacgacgggccagtgatgttcccagtggccttgcgacgagaaaacctctgcgaggaaagggaaggagcaagccgtgaatttaagggacgctgtgaagcaatcatggatgcaatgaagagagggctctgctgtgtgctgctgctgtgtggagcagtcttcgtttcgcccagccaggaaacaggaccacaaaaatgaaagcatgtctcaatagtaaaagataacaagatctttcaggaaagacggattgcattagaaatagacagtatatttatagtcacaagagcccagcagggcctcaaagttggggcaggctggctggcccgtcatgttcctcaaaagcacccttgacgtcaagtctccttcccctttccccactccctggctctcagaaggtattccttttgtgtacagtgtgtaaagtgtaaatcctttttctttataaactttagagtagcatgagagaattgtatcatttgaacaactaggcttcagcatatttatagcaatccatgttagtttttactttctgttgccacaaccctgttttatactgtacttaataaattcagatatatttttcacagtttttcca

SEQ ID NO: 80392 - DNA, 234 bp, Homo sapiens
caagggtagtgaggcatttcattttgagtcatactctgatgaggctggcctgtcttttctcatagtgatctgcagagatgaaaaaacgcagatgatataccagcaacatcagtcatggctgcgccctgtgctcagaagcaaccgggtggaatattgctggtgcaacagtggcagggcacagtgccactcagtgcctgtcaaaaaagtatgtgctgaggctggaaggtggtgcat

SEQ ID NO: 80393 - DNA, 1042 bp, Homo sapiens
  misc_feature (799)..(799): n is a, c, g, or t
  misc_feature (807)..(807): n is a, c, g, or t
  misc_feature (817)..(817): n is a, c, g, or t
  misc_feature (823)..(823): n is a, c, g, or t
  misc_feature (834)..(834): n is a, c, g, or t
  misc_feature (841)..(841): n is a, c, g, or t
aatggatataggctaggtacgagctggtggaatcggcaccgaggcgcagatgatataccagcaacatcagtcatggctgcgccctgtgctcagaagcaaccgggtggaatattgctggtgcaacagtggcagggcacagtgccactcagtgcctgtcaaaagttgcagcgagccaaggtgtttcaacgggggcacctgccagcaggccctgtacttctcagatttcgtgtgccagtgccccgaaggatttgctgggaagtgctgtgaaatagataccagggccacgtgctacgaggaccagggcatcagctacaggggcacgtggagcacagcggagagtggcgccgagtgcaccaactggaacagcagcgcgttggcccagaagccctacagcgggcggaggccagacgccatcaggctgggcctggggaaccacaactactgcagaaacccagatcgagactcaaagccctggtgctacgtctttaaggcggggaagtacagctcagagttctgcagcacccctgcctgctctgagggaaacagtgactgctactttgggaatgggtcagcctaccgtggcacgcacagcctcaccgagtcgggtgcctcctgcctcccgtggaattccatgatcctgataggcaaggtttacacagcacagaaccccagtgcccaggcactgggcctgggcaaacataattactgccggaatcctgatggggatgccaagccctggtgccacgtgctgaagaaccgcaggctgacgtgggagtactgtgatgtgccctcctgctcnacctgggnctgagacagncagcangctcagttcgntcaaggngggtcttcgcggatcgcttccacctgggggttgcatcttgcaggaaaggggtgccgggacggtctgggggggtacctcaggctgggttttcttggccccggtcaggagtgtcgcacctacgttttggacatcgggctgggggggagtttccatttccgatgtgggacaggggattctcggaagtgactcccgcgggggtag

SEQ ID NO: 80394 - DNA, 2584 bp, Homo sapiens
aaagaaaaaaaaaaaaggacatgctacagcatggatgcaccttgaagacatttgcaaagtgaaacaaaccagtcgcaaaagaagaaacactgtctgattccacttctaggataatttaagggacgctgtgaagcaatcatggatgcaatgaagagagggctctgctgtgtgctgctgctgtgtggagcagtcttcgtttcgcccagccaggaaatccatgcccgattcagaagaggagccagatcttaccaagtgatctgcagagatgaaaaaacgcagatgatataccagcaacatcagtcatggctgcgccctgtgctcagaagcaaccgggtggaatattgctggtgcaacagtggcagggcacagtgccactcagtgcctgtcaaaagttgcagcgagccaaggtgtttcaacgggggcacctgccagcaggccctgtacttctcagatttcgtgtgccagtgccccgaaggatttgctgggaagtgctgtgaaatagataccagggccacgtgctacgaggaccagggcatcagctacaggggcacgtggagcacagcggagagtggcgccgagtgcaccaactggaacagcagcgcgttggcccagaagccctacagcgggcggaggccagacgccatcaggctgggcctggggaaccacaactactgcagaaacccagatcgagactcaaagccctggtgctacgtctttaaggcggggaagtacagctcagagttctgcagcacccctgcctgctctgagggaaacagtgactgctactttgggaatgggtcagcctaccgtggcacgcacagcctcaccgagtcgggtgcctcctgcctcccgtggaattccatgatcctgataggcaaggtttacacagcacagaaccccagtgcccaggcactgggcctgggcaaacataattactgccggaatcctgatggggatgccaagccctggtgccacgtgctgaagaaccgcaggctgacgtgggagtactgtgatgtgccctcctgctccacctgcggcctgagacagtacagccagcctcagtttcgcatcaaaggagggctcttcgccgacatcgcctcccacccctggcaggctgccatctttgccaagcacaggaggtcgcccggagagcggttcctgtgcgggggcatactcatcagctcctgctggattctctctgccgcccactgcttccaggagaggtttccgccccaccacctgacggtgatcttgggcagaacataccgggtggtccctggcgaggaggagcagaaatttgaagtcgaaaaatacattgtccataaggaattcgatgatgacacttacgacaatgacattgcgctgctgcagctgaaatcggattcgtcccgctgtgcccaggagagcagcgtggtccgcactgtgtgccttcccccggcggacctgcagctgccggactggacggagtgtgagctctccggctacggcaagcatgaggccttgtctcctttctattcggagcggctgaaggaggctcatgtcagactgtacccatccagccgctgcacatcacaacatttacttaacagaacagtcaccgacaacatgctgtgtgctggagacactcggagcggcgggccccaggcaaacttgcacgacgcctgccagggcgattcgggaggccccctggtgtgtctgaacgatggccgcatgactttggtgggcatcatcagctggggcctgggctgtggacagaaggatgtcccgggtgtgtacaccaaggttaccaactacctagactggattcgtgacaacatgcgaccgtgaccaggaacacccgactcctcaaaagcaaatgagatcccgcctcttcttcttcagaagacactgcaaaggcgcagtgcttctctacagacttctccagacccaccacaccgcagaagcgggacgagaccctacaggagagggaagagtgcattttcccagatacttcccattttggaagttttcaggacttggtctgatttcaggatactctgtcagatgggaagacatgaatgcacactagcctctccaggaatgcctcctccctgggcagaaagtggccatgccaccctgttttcagctaaagcccaacctcctgacctgtcaccgtgagcagctttggaaacaggaccacaaaaatgaaagcatgtctcaatagtaaaagataacaagatctttcaggaaagacggattgcattagaaatagacagtatatttatagtcacaagagcccagcagggcctcaaagttggggcaggctggctggcccgtcatgttcctcaaaagcacccttgacgtcaagtctccttcccctttccccactccctggctctcagaaggtattccttttgtgtacagtgtgtaaagtgtaaatcctttttctttataaactttagagtagcatgagagaattgtatcatttgaacaactaggcttcagcatatttatagcaatccatgttagtttttactttctgttgccacaaccctgttttatactgtacttaataaattcagatatatttttcacagtttttcca

SEQ ID NO: 80395 - DNA, 2811 bp, Homo sapiens
cctcatggccctgtccactgagcatcctcccgccacacagaaacccgcccagccggggccaccgaccccaccccctgcctggaaacttaaaggaggccggagctgtggggagctcagagctgagatcctacaggagtccagggctggagagaaaacctctgcgaggaaagggaaggagcaagccgtgaatttaagggacgctgtgaagcaatcatggatgcaatgaagagagggctctgctgtgtgctgctgctgtgtggagcagtcttcgtttcgcccagccaggaaatccatgcccgattcagaagaggagccagatcttaccaagtgatctgcagagatgaaaaaacgcagatgatataccagcaacatcagtcatggctgcgccctgtgctcagaagcaaccgggtggaatattgctggtgcaacagtggcagggcacagtgccactcagtgcctgtcaaaagttgcagcgagccaaggtgtttcaacgggggcacctgccagcaggccctgtacttctcagatttcgtgtgccagtgccccgaaggatttgctgggaagtgctgtgaaatagataccagggccacgtgctacgaggaccagggcatcagctacaggggcacgtggagcacagcggagagtggcgccgagtgcaccaactggaacagcagcgcgttggcccagaagccctacagcgggcggaggccagacgccatcaggctgggcctggggaaccacaactactgcagaaacccagatcgagactcaaagccctggtgctacgtctttaaggcggggaagtacagctcagagttctgcagcacccctgcctgctctgagggaaacagtgactgctactttgggaatgggtcagcctaccgtggcacgcacagcctcaccgagtcgggtgcctcctgcctcccgtggaattccatgatcctgataggcaaggtttacacagcacagaaccccagtgcccaggcactgggcctgggcaaacataattactgccggaatcctgatggggatgccaagccctggtgccacgtgctgaagaaccgcaggctgacgtgggagtactgtgatgtgccctcctgctccacctgcggcctgagacagtacagccagcctcagtttcgcatcaaaggagggctcttcgccgacatcgcctcccacccctggcaggctgccatctttgccaagcacaggaggtcgcccggagagcggttcctgtgcgggggcatactcatcagctcctgctggattctctctgccgcccactgcttccaggagaggtttccgccccaccacctgacggtgatcttgggcagaacataccgggtggtccctggcgaggaggagcagaaatttgaagtcgaaaaatacattgtccataaggaattcgatgatgacacttacgacaatgacattgcgctgctgcagctgaaatcggattcgtcccgctgtgcccaggagagcagcgtggtccgcactgtgtgccttcccccggcggacctgcagctgccggactggacggagtgtgagctctccggctacggcaagcatgaggccttgtctcctttctattcggagcggctgaaggaggctcatgtcagactgtacccatccagccgctgcacatcacaacatttacttaacagaacagtcaccgacaacatgctgtgtgctggagacactcggagcggcgggccccaggcaaacttgcacgacgcctgccagggcgattcgggaggccccctggtgtgtctgaacgatggccgcatgactttggtgggcatcatcagctggggcctgggctgtggacagaaggatgtcccgggtgtgtacaccaaggttaccaactacctagactggattcgtgacaacatgcgaccgtgaccaggaacacccgactcctcaaaagcaaatgagatcccgcctcttcttcttcagaagacactgcaaaggcgcagtgcttctctacagacttctccagacccaccacaccgcagaagcgggacgagaccctacaggagagggaagagtgcattttcccagatacttcccattttggaagttttcaggacttggtctgatttcaggatactctgtcagatgggaagacatgaatgcacactagcctctccaggaatgcctcctccctgggcagaaagtggccatgccaccctgttttcagctaaagcccaacctcctgacctgtcaccgtgagcagctttggaaacaggaccacaaaaatgaaagcatgtctcaaaagcacccttgacgtcaagtctccttcccctttccccactccctggctctcagaaggtattccttttgtgtacagtgtgtaaagtgtaaatcctttttctttataaactttagagtagcatgagagaattgtatcatttgaacaactaggcttcagcatatttatagcaatccatgttagtttttactttctgttgccacaaccctgttttatactgtacttaataaattcagatatatttttcacagtttttccaaaatcagagtggaatggttttgttatagatgctgtatcccactctttattcatgttcacattttaaaatcatttggaattctgcttcactcgcttaacatatacacaacacctgtaacatacaaggcaatgggctaggtgctccagaccgggaaaaggagggacaggaatgcttggtctgatgggctaatatggcatttagagaagtaccaaggtacagtggagccggtcacaaaagggcagacttgtagtagaattcagttgcaagagggattggggaa

SEQ ID NO: 80396 - DNA, 2149 bp, Homo sapiens
cctcatggccctgtccactgagcatcctcccgccacacagaaacccgcccagccggggccaccgaccccaccccctgcctggaaacttaaaggaggccggagctgtggggagctcagagctgagatcctacaggagtccagggctggagagaaaacctctgcgaggaaagggaaggagcaagccgtgaatttaagggacgctgtgaagcaatcatggatgcaatgaagagagggctctgctgtgtgctgctgctgtgtggagcagtcttcgtttcgcccagccaggaaatccatgcccgattcagaagaggagccagatcttaccaagtgatctgcagagatgaaaaaacgcagatgatataccagcaacatcagtcatggctgcgccctgtgctcagaagcaaccgggtggaatattgctggtgcaacaatggcaagaccccatctctacaaaaattaaaaaataagaagataaaaaggaaaccttaaactctcttatcatttaggaatcctgatggggatgccaagccctggtgccacgtgctgaagaaccgcaggctgacgtgggagtactgtgatgtgccctcctgctccacctgcggcctgagacagtacagccagcctcagtttcgcatcaaaggagggctcttcgccgacatcgcctcccacccctggcaggctgccatctttgccaagcacaggaggtcgcccggagagcggttcctgtgcgggggcatactcatcagctcctgctggattctctctgccgcccactgcttccaggagaggtttccgccccaccacctgacggtgatcttgggcagaacataccgggtggtccctggcgaggaggagcagaaatttgaagtcgaaaaatacattgtccataaggaattcgatgatgacacttacgacaatgacattgcgctgctgcagctgaaatcggattcgtcccgctgtgcccaggagagcagcgtggtccgcactgtgtgccttcccccggcggacctgcagctgccggactggacggagtgtgagctctccggctacggcaagcatgaggccttgtctcctttctattcggagcggctgaaggaggctcatgtcagactgtacccatccagccgctgcacatcacaacatttacttaacagaacagtcaccgacaacatgctgtgtgctggagacactcggagcggcgggccccaggcaaacttgcacgacgcctgccagggcgattcgggaggccccctggtgtgtctgaacgatggccgcatgactttggtgggcatcatcagctggggcctgggctgtggacagaaggatgtcccgggtgtgtacaccaaggttaccaactacctagactggattcgtgacaacatgcgaccgtgaccaggaacacccgactcctcaaaagcaaatgagatcccgcctcttcttcttcagaagacactgcaaaggcgcagtgcttctctacagacttctccagacccaccacaccgcagaagcgggacgagaccctacaggagagggaagagtgcattttcccagatacttcccattttggaagttttcaggacttggtctgatttcaggatactctgtcagatgggaagacatgaatgcacactagcctctccaggaatgcctcctccctgggcagaaagtggccatgccaccctgttttcagctaaagcccaacctcctgacctgtcaccgtgagcagctttggaaacaggaccacaaaaatgaaagcatgtctcaatagtaaaagataacaagatctttcaggaaagacggattgcattagaaatagacagtatatttatagtcacaagagcccagcagggcctcaaagttggggcaggctggctggcccgtcatgttcctcaaaagcacccttgacgtcaagtctccttcccctttccccactccctggctctcagaaggtattccttttgtgtacagtgtgtaaagtgtaaatcctttttctttataaactttagagtagcatgagagaattgtatcatttgaacaactaggcttcagcatatttatagcaatccatgttagtttttactttctgttgccacaaccctgttttatactgtacttaataaattcagatatatttttcacagtttttcca

SEQ ID NO: 80397 - DNA, 1412 bp, Homo sapiens
cctcatggccctgtccactgagcatcctcccgccacacagaaacccgcccagccggggccaccgaccccaccccctgcctggaaacttaaaggaggccggagctgtggggagctcagagctgagatcctacaggagtccagggctggagagaaaacctctgcgaggaaagggaaggagcaagccgtgaatttaagggacgctgtgaagcaatcatggatgcaatgaagagagggctctgctgtgtgctgctgctgtgtggagcagtcttcgtttcgcccagccaggaaatccatgcccgattcagaagaggagccagatcttaccaagtgatctgcagagatgaaaaaacgcagatgatataccagcaacatcagtcatggctgcgccctgtgctcagaagcaaccgggtggaatattgctggtgcaacagtggcagggcacagtgccactcagtgcctgtcaaaagttgcagcgagccaaggtgtttcaacgggggcacctgccagcaggcccctggtgtgtctgaacgatggccgcatgactttggtgggcatcatcagctggggcctgggctgtggacagaaggatgtcccgggtgtgtacaccaaggttaccaactacctagactggattcgtgacaacatgcgaccgtgaccaggaacacccgactcctcaaaagcaaatgagatcccgcctcttcttcttcagaagacactgcaaaggcgcagtgcttctctacagacttctccagacccaccacaccgcagaagcgggacgagaccctacaggagagggaagagtgcattttcccagatacttcccattttggaagttttcaggacttggtctgatttcaggatactctgtcagatgggaagacatgaatgcacactagcctctccaggaatgcctcctccctgggcagaaagtggccatgccaccctgttttcagctaaagcccaacctcctgacctgtcaccgtgagcagctttggaaacaggaccacaaaaatgaaagcatgtctcaatagtaaaagataacaagatctttcaggaaagacggattgcattagaaatagacagtatatttatagtcacaagagcccagcagggcctcaaagttggggcaggctggctggcccgtcatgttcctcaaaagcacccttgacgtcaagtctccttcccctttccccactccctggctctcagaaggtattccttttgtgtacagtgtgtaaagtgtaaatcctttttctttataaactttagagtagcatgagagaattgtatcatttgaacaactaggcttcagcatatttatagcaatccatgttagtttttactttctgttgccacaaccctgttttatactgtacttaataaattcagatatatttttcacagtttttcca

SEQ ID NO: 80398 - DNA, 349 bp, Homo sapiens
cctggcctgtgctttgatagagacgcagctcttcacttgggaacaccggaagcctcgtgagccccccaggtcttgcatgacactttgaataatctcttctgttcagccatgagtagtacgatgttactgatggcttgtggtctgaccacgtgcgtgctcattgtcagtctcattggcttttcctttgttctagaacatggcaggggagctgcagacagacaggtacagcgcctagctttacagttacatgcacgctgtgtcatcagtttctttccccccttcatagcagccagagctctaaacactcattgctaaactaaccccaaggcgctggtgaagtgttggacta

SEQ ID NO: 80399 - DNA, 4952 bp, Homo sapiens
cagccgccggcggcgctagcacctcggagtcgggcggccggagcagcggagcgcagcgcggcgcagggaacggcactgggggtggggagaccagcccggccgagccgagggccaccccctggtcctctgccctcgcgccccgctagggccaggtgcacaaaaagctttaaacaagttaaaatctaggcaacagactccctgaagtgttgactgcccaacttaatcatgactgtgattcaaaaatgttaataaataaaccaaggtgtagatcatggggaattcatatgctgggcaactgaaatctgctcgatttgaggaagctctccacaactccatagaagcctccctcagatgtagtagtgtggtaccacggccaattttttcccagctatacctggaccctgaccagcatcctttctcatctgcagatgtcaaacccaaggtggaggatctggacaaagatttggtaaaccgctacactcaaaatggaagtctggatttttctaacaatctaacagttaatgaaatggaagatgatgaagacgatgaagaaatgtctgattcaaacagcccaccaattccctattcacaaaaacctgccccagaaggatcttgcactacagatggtttttgtcaagcaggaaaggatttgcgtttggtatcactgtgtatggaacaaattgacatcccagcaggattcctcctggtgggggccaagtctcccaatctgcctgaacacatcctagtttgtgctgtggacaagcgatttctaccagatgatcatggaaaaaatgcacttttagggttttctggaaattgtatcggctgtggagaaagaggatttcgatatttcacggaattttccaaccacattaacttgaagctcaccactcagccaaagaagcagaagcacttaaagtactacctagtcagaagctcccagggtgtactgtctaaaggacctcttatctgctggaaagaatgtagaagccgacaatcctctgcttcttgccactctattaagccaagctcttcagtgtcgtcaactgtgaccccagaaaatgggacaactaatggatacaaatcaggattcactcagacagatgctgctaatggaaacagtagccatggagggaagggcagtgcatccagctccactccagcccacacagggaattactctttgtcaccacgacctagctatgcatcaggagatcaagctaccatgttcatttctgggccaccaaagaaacgacaccggggatggtatcctgggtcacctctcccccaacctggcttagttgtacctgtccctacagttcgccctctttcaagaacggagccccttttatctgccccagttccacagaccccactaactggaattttacaacccaggcccattcctgcaggggaaactgtaattgttcctgaaaacctgctgagtaactcaggagttagaccagtaattctgataggctatggcactttaccctatttctatggaaatgttggtgacattgttgtgagtcctctgctggtgaattgctacaagattccacagttggaaaacaaagatttggaaaaattagggttgaccggcagccaatttctgagcgtggaaaacatgattcttctgacgatacagtatcttgtgcggctgggtcctgatcaggtacctctcagggaagaatttgagcaaattatgctgaaagctatgcaagaatttactctgagagaaagagccctgcagataggtgctcagtgtgtccctgtgtcaccaggacaactcccctggcttgctagattaattgccagcgtatctcaagacttggttcatgtggttgtgacccagaactctttggcggagggcatttcagagaccttaaggactctcagtgaaatgagacactatcaaaggctgccagattatgtggtggtaatttgtgcatcgaaaatcagaggaaatgaattttgtgtggtagtgttaggtcagcaccagtcccgagctctggcagagagcatgctcaccacaagtgagtttttgaaagaaattagttatgagctgtatcacaggaaaggtcagtttcctggcatcacatttcaaaaccacatcattaggcgatgacctagacaagctgctggaaaaaatgcaacaaagaagaggagacagtgtggttacccctttcgatggagaccttaatgaatgtgtgtcaccccaggaggctgctgctatgattcccacacaaaacctggatttagataatgaaaccttccacatttatcaaccgcagcaacagttgccagaaaactcttatcccaggtgtgtgctatagcggacagtggcagccagagcctggacctcggtcacttcagcaaagtagacttcatcatcattgttcccagatcggaggtgttggttcagcaaactcttcagcggattcgacaatcagtgtcatttcaggctctttgtcacatagcgaacccagtcatgggctagctgatagagtcattaattgcagagaagttctggaagctttcaacctcctggtgctccaggtcagctccttcccatacactctgcagacccaacagtcccgcattagctctagcaatgaggttcactggatacagctggatactggggaggacgtgggctgcgaggagaagctgtactttggcttgagtgagtacagcaagtctctgcagtgggggatcacgagcccacttctgagatgtgacgagacttttgaaaaaatggtgaacacactcttggagaggtaccccaggctgcacagcatggtcgtccgctgctatcttctcatccagcagtactctgaggccctgatggctctcaccaccatggcgtcactccgcgaccacagcacaccagaaacactcagcattatggatgacctcatcagctccccaggcaaaaacaaaagtgggaggggacacatgctcattatcagggtgccctcggtgcagctggcgatgttagccaaggagcggctacaggaggtgcgcgacaaactgggtctgcagtatcggtttgagatcatccttgggaacccggccaccgaactcagtgttgcaactcactttgtggcgcgattaaagagttggagaggaaatgaaccagaagagtggatccctcggacataccaagatttagacggtctaccttgtattgtgatattaactggcaaagatcctcttggagaaacctttcccaggtctttgaagtactgtgacctccggttaattgactcaagctatttaactcgcacggccttggagcaggaggtgggtctggcatgctgctatgtctcaaaagaggtcatccggggacccactgttgccctggacctcagcgggaaggagcaggagagagctgctgtcagtgagaatgactccgatgagctgctcatcgacctggagcggccccagagcaacagcagcgctgtcacagggacctcgggttccatcatggagaatggagtgagctcttccagcacagctgacaagtcccagaagcagtccctgacccccagctttcagagcccagccaccagcttggggctggatgaaggggtctccgccagctcagctggagccggagccggggagactctgaagcaggagtgtgactccctgggcccccagatggcgagcagcaccacctccaagccgtcatcatcatcctcaggacccaggaccctcccatggccgggacagcccatcagaggctgccggggcccacaggcagccctgccaccagtggtgatcctatccaaagcggcctacagtctcctgggctcccagaagagtggcaagctgccatcctcctcctccctgctgccccacgccgacgtggcctgggtgagctccctgcggccactcctgaacaaggacatgagcagtgaggagcagtccctctactacaggcagtggaccttggcccggcagcaccacgctgactatagcaaccagctggacccggcctctggcacccgaaacttccacccccgacggctcctgctgacagggcccccacaggtgggaaagacgggctcctatttacagttcctcaggatcctcttccgcatgctcatcaggctcctggaggtggacgtgtatgatgaggaggagatcaacaccgatcacaatgaaagcagtgaagtgagccagtcagagggagagccctggcctgacatcgagagcttcagtaaaatgccttttgatgtcagtgtgcatgaccccaagtacagtttgatgagcctggtgtatactgagaagctggcaggggtcaaacaagaagtgataaaggaatccaaagttgaagagcccaggaaacgggaaactgtatccataatgctgaccaaatatgcagcctataacacctttcaccactgtgaacagtgccgccagtacatggacttcacctctgcctcccagatgtctgactccacccttcatgccttcacattctcttcttctatgctgggagaagaggttcagctctatttcatcattcccaaatccaaagagagtcattttgtcttcagcaagcagggcaagcacctggagagcatgcggctgcccctggtttcagacaagaatttgaatgcagtcaagagccctattttcactccttccagtggtcgacatgagcacggactcctaaaccttttccacgccatggagggcatcagccaccttcacctcctggtggtcaaagagtatgagatgcctctgtaccgcaagtactggcccaaccacatcatgctggtgcttcccggcatgttcaataatgcaggcgtgggtaaggggcccccctgggatggggagaagggcttcgaagataaactgagctccattcccctggcatgaaactttcagattcccctgcctctagaaattgtcctgccctcctcaccactcttcggaaa

SEQ ID NO: 80400 - DNA, 1147 bp, Homo sapiens
  misc_feature (748)..(748): n is a, c, g, or t
cagccgccggcggcgctagcacctcggagtcgggcggccggagcagcggagcgcagcgcggcgcagggaacggcactgggggtggggagaccagcccggccgagccgagggccaccccctggtcctctgccctcgcgccccgctagggccaggtgcacaaaaagctttaaacaagttaaaatctaggcaacagactccctgaagtgttgactgcccaacttaatcatgactgtgattcaaaaatgttaataaataaaccaaggtgtagatcatggggaattcatatgctgggcaactgaaatctgctcgatttgaggaagctctccacaactccatagaagcctccctcagatgtagtagtgtggtaccacggccaattttttcccagctatacctggaccctgaccagcatcctttctcatctgcaggagtggtcgaggagagcgcgcgagaggttgggagggaatctggagcaaaggagttttggtaaacccggcgtacgagcgtgccagaaagtgggtaaggtcgtgggattgtgtgtcctaaaccagagtgcttaagacagttttaagtgcacaatgggagagcattgactgcaaagaacgagtgcaagaaaatgtgtccctggaggtatcaaaaaaacaatggcccccaaaccccccgaagaaggttttccccctttaattttcccagcgtagagaggaagaagccccttttgtacgccccccaaagaggaaaagggggcacnttcattttggaccaacacataaaaccaaaggaaattatgggggttattatgtagtgggttccagaaaagggccaacgggaacaaaacagggaagttctcgcaaggttttgtgggcttcacttcagctaggtgtgtagttaccttggggagaagcaaaagagtttgagaagccgagttcaccaccaaaggcacaaaggaggcaattattcccccgtttccactattgggggaattgaggagggggggggccccccaaaaaagtgggggttttccttttttcaccccctacccaaaaaaaaatatcccatttggggccaccccgtggggaaagaagccgagctgaagttccctttaagggattttatgcttggcccttgattggggcgaacccaaggccgg

SEQ ID NO: 80401 - DNA, 3020 bp, Homo sapiens
cagccgccggcggcgctagcacctcggagtcgggcggccggagcagcggagcgcagcgcggcgcagggaacggcactgggggtggggagaccagcccggccgagccgagggccaccccctggtcctctgccctcgcgccccgctagggccaggtgcacaaaaagctttaaacaagttaaaatctaggcaacagactccctgaagtgttgactgcccaacttaatcatgactgtgattcaaaaatgttaataaataaaccaaggtgtagatcatggggaattcatatgctgggcaactgaaatctgctcgatttgaggaagctctccacaactccatagaagcctccctcagatgtagtagtgtggtaccacggccaattttttcccagctatacctggaccctgaccagcatcctttctcatctgcagatgtcaaacccaaggtggaggatctggacaaagatttggtaaaccgctacactcaaaatggaagtctggatttttctaacaatctaacagttaatgaaatggaagatgatgaagacgatgaagaaatgtctgattcaaacagcccaccaattccctattcacaaaaacctgccccagaaggatcttgcactacagatggtttttgtcaagcaggaaaggatttgcgtttggtatcactgtgtatggaacaaattgacatcccagcaggattcctcctggtgggggccaagtctcccaatctgcctgaacacatcctagtttgtgctgtggacaagcgatttctaccagatgatcatggaaaaaatgcacttttagggttttctggaaattgtatcggctgtggagaaagaggatttcgatatttcacggaattttccaaccacattaacttgaagctcaccactcagccaaagaagcagaagcacttaaagtactacctagtcagaagctcccagggtgtactgtctaaaggacctcttatctgctggaaagaatgtagaagccgacaatcctctgcttcttgccactctattaagccaagctcttcagtgtcgtcaactgtgaccccagaaaatgggacaactaatggatacaaatcaggattcactcagacagatgctgctaatggaaacagtagccatggagggaagggcagtgcatccagctccactccagcccacacagggaattactctttgtcaccacgacctagctatgcatcaggagatcaagctaccatgttcatttctgggccaccaaagaaacgacaccggggatggtatcctgggtcacctctcccccaacctggcttagttgtacctgtccctacagttcgccctctttcaagaacggagccccttttatctgccccagttccacagaccccactaactggaattttacaacccaggcccattcctgcaggggaaactgtaattgttcctgaaaacctgctgagtaactcaggagttagaccagtaattctgataggctatggcactttaccctatttctatggaaatgttggtgacattgttgtgagtcctctgctggtgaattgctacaagattccacagttggaaaacaaagatttggaaaaattagggttgaccggcagccaatttctgagcgtggaaaacatgattcttctgacgatacagtatcttgtgcggctgggtcctgatcaggtacctctcagggaagaatttgagcaaattatgctgaaagctatgcaagaatttactctgagagaaagagccctgcagataggtgctcagtgtgtccctgtgtcaccaggacaactcccctggcttgctagattaattgccagcgtatctcaagacttggttcatgtggttgtgacccagaactctttggcggagggcatttcagagaccttaaggactctcagtgaaatgagacactatcaaaggctgccagattatgtggtggtaatttgtgcatcgaaaatcagaggaaatgaattttgtgtggtagtgttaggtcagcaccagtcccgagctctggcagagagcatgctcaccacaagtgagtttttgaaagaaattagttatgagctgtatcacaggaaaggtcagtttcctggcatcacatttcaaaaccacatcattaggcgatgacctagacaagctgctggaaaaaatgcaacaaagaagaggagacagtgtggttacccctttcgatggagaccttaatgaatgtgtgtcaccccaggaggctgctgctatgattcccacacaaaacctggatttagataatgaaaccttccacatttatcaaccgcagcaacagttgccagaaaactcttatcccaggtgtgtgctatagcggacagtggcagccagagcctggacctcggtcacttcagcaaagtagacttcatcatcattgttcccagatcggaggtgttggttcagcaaactcttcagcggattcgacaatcaggtaagagtgaactttcaaagaggagcccacctagatccagcttcagatcccctctgcctctttcttttgcttaatccaaacgtctagaggatgcttaaaaccttcttcagtaataaaaatcataaaagcactttgttattttgggtttatctgaagttttccctcaaagtactctgtcctttttccctcaaggtcaagggtaaattgttgtgcatgtttgccaggtatcattaagttcatgatgtaatctgtgggactagaatctggtcatttatggatgaagagaaattttctcaaggcgaggatggccctgcatgggttgatggcgtctgtgccacctgaactcctcccacctgcaggcctcatttgcataggtggattcttggccatctagcacattaacagcacgtctgggacctggaaaccagaacaccatcccccatgtcagcaatgacgttctttaagaaaaaaaggttagcgttatttctaataactttaagtgtaaagaaaaaaaaatgtttttcccagaaaatgtgaaaaggtagagagcaaaaattttacaagtct

SEQ ID NO: 80402 - DNA, 2348 bp, Homo sapiens
cagccgccggcggcgctagcacctcggagtcgggcggccggagcagcggagcgcagcgcggcgcagggaacggcactgggggtggggagaccagcccggccgagccgagggccaccccctggtcctctgccctcgcgccccgctagggccaggtgcacaaaaagctttaaacaagttaaaatctaggcaacagactccctgaagtgttgactgcccaacttaatcatgactgtgattcaaaaatgttaataaataaaccaaggtgtagatcatggggaattcatatgctgggcaactgaaatctgctcgatttgaggaagctctccacaactccatagaagcctccctcagatgtagtagtgtggtaccacggccaattttttcccagctatacctggaccctgaccagcatcctttctcatctgcagatgtcaaacccaaggtggaggatctggacaaagatttggtaaaccgctacactcaaaatggaagtctggatttttctaacaatctaacagttaatgaaatggaagatgatgaagacgatgaagaaatgtctgattcaaacagcccaccaattccctattcacaaaaacctgccccagaaggatcttgcactacagatggtttttgtcaagcaggaaaggatttgcgtttggtatcactgtgtatggaacaaattgacatcccagcaggattcctcctggtgggggccaagtctcccaatctgcctgaacacatcctagtttgtgctgtggacaagcgatttctaccagatgatcatggaaaaaatgcacttttagggttttctggaaattgtatcggctgtggagaaagaggatttcgatatttcacggaattttccaaccacattaacttgaagctcaccactcagccaaagaagcagaagcacttaaagtactacctagtcagaagctcccagggtgtactgtctaaaggacctcttatctgctggaaagaatgtagaagccgacaatcctctgcttcttgccactctattaagccaagctcttcagtgtcgtcaactgtgaccccagaaaatgggacaactaatggatacaaatcaggattcactcagacagatgctgctaatggaaacagtagccatggagggaagggcagtgcatccagctccactccagcccacacagggaattactctttgtcaccacgacctagctatgcatcaggagatcaagctaccatgttcatttctgggccaccaaagaaacgacaccggggatggtatcctgggtcacctctcccccaacctggcttagttgtacctgtccctacagttcgccctctttcaagaacggagccccttttatctgccccagttccacagaccccactaactggaattttacaacccaggcccattcctgcaggggaaactgtaattgttcctgaaaacctgctgagtaactcaggagttagaccagtaattctgataggctatggcactttaccctatttctatggaaatgttggtgacattgttgtgagtcctctgctggtgaattgctacaagattccacagttggaaaacaaagatttggaaaaattagggttgaccggcagccaatttctgagcgtggaaaacatgattcttctgacgatacagtatcttgtgcggctgggtcctgatcaggtacctctcagggaagaatttgagcaaattatgctgaaagctatgcaagaatttactctgagagaaagagccctgcagataggtgctcagtgtgtccctgtgtcaccaggacaactcccctggcttgctagattaattgccagcgtatctcaagacttggttcatgtggttgtgacccagaactctttggcggagggcatttcagagaccttaaggactctcagtgaaatgagacactatcaaaggctgccagattatgtggtggtaatttgtgcatcgaaaatcagaggaaatgaattttgtgtggtagtgttaggtcagcaccagtcccgagctctggcagagagcatgctcaccacaagtgagtttttgaaagaaattagttatgagctgtatcacaggaaaggtcagtttcctggcatcacatttcaaaaccacatcattaggtgagtggttgtaagatttggcaacactggcagcccctagttgtatgattttctgagtttaaatcttagcctgtcaagatgagtgtggagctcaagcttgccagctgatctttcatttgaaatggtttatcctaagtattttgtcactaacaccacaggaagcagtaagggggtctagaggaaggcccattggtactggattcaaaagtctcagctcagccacaacc

SEQ ID NO: 80403 - DNA, 262 bp, Homo sapiens
taccggtgccaattagctgtgccctgttaaccatgctgtgagccagaaatagaagcaacctgttttcaatgaacagatcaaaatttagtgctgtgttgatggttcagaaatgaagattttttgacacggtgggcggggggtgagctaaacaattacagtgcggctgtacatggcagggcagggaaaagagcgacgtggaggccccatgacccagggaaacccgctgagtttacaccaaggatgatgcagagctgtgtgcgat

SEQ ID NO: 80404 - DNA, 175 bp, Homo sapiens
actctgtcctccagcatctgaggcttgggatctcccagaaagtcacaccaggatgggagcccaggtcgtttgagctgggtgctcttggctgctcacttgccttcttcctgtctaggccccttataggttcacctggcactgggacttgaagtagttatggcctgaggtctcactt

SEQ ID NO: 80405 - DNA, 850 bp, Homo sapiens
atttaaagtttattcacacgtacaaagcaatgacaaccaccaggcattttcgagatctctttttctcttggcaggctctatcttgtgtaatgatcactgaacgttgttgaccgcgacactcaccagctgcagccttttccttagtgcttcccttaaaaaaataaaaaagagaaaagaaaaaaaataggagaagaaaaaccacacctaactgtgtatcttacttccttgggggggaaaggattacataattgtgggtctgaattcccatattgtatcagtacttgtggtttgtcatctctctaattgttgtaagtttacatgcttgtattatttcatcacaatttgctataaactattgaaaatgactgtgggatctgtctgtgttgtttgccttttgaaagtgtacttttctttaatcatctcttaatccagaaataataatgcagaacatcccaggaactgatcctgatcctcagtgctctgatctcaacacgtgcatcttaaatcctttgctagatatagtgcctaaaaagcccaagcacgctcggctttgaaccagtgttgatcagttttgtttattaaacaatgttgatgtcctcagatatggtgtatgaaggataacaaaaagcatattaagaatttacaattatttttgagattattttttaaaatcgacatcttggcctttaactctgtgcttctaatcagtctctaattgaataaggtcctaatcttttacctgataggtaaataaagatggaataatctgatgctgaaactccttcacatatctctgttttaagagcaagtcaagacgtgttttttgctgccgaataaaatgttgcaacca

SEQ ID NO: 80406 - DNA, 757 bp, Homo sapiens
catggtggcccatgagtgtaatcctagcactctgggagaccaaggcaggaggatcacttgagcccaggagttcgagacccttggcaacatagtgagaccctgtctctacaaaaaaattataaaattaggtgtggtggtgcgtgtttgtagttccagttacatgggaggctaaggagagaggattgcttgagactgggaggtcaaggctatagtgaccatctcgtaccacggcactgcaacctggtgacagggcaagaccctgcctcaaaaagaagaagaagaaaaaaaaagacaagtttccagattgaaaggcactaacaagtgcaggcttgaccagcagcttgattccattcagactaattgtaaaaacaggcacttactctaggcatcaacatgagtgacccagcccttccaaatggcagttcatagcttatgtctccatggaggggtgtctctgtaatctactattactacccaagtgaagtaactggcaagagcccaacactcaggaaaaagatatcataacttaatccttaggaatactgtctaaggtaggagttagaaaacttgttttctgaaaagagcagatagtaaatagttttggctttgcaagccccatacagtctcaagtgtgtattctttttcccccaatgctttaaaaaatgtaaaaatcctcccaagctaagagcaatagaaaaacagattgtagccaaatttggcacacagactgaagtctctcaacccctggtccaagaaa

SEQ ID NO: 80407 - DNA, 548 bp, Homo sapiens
ctaaagatttaaatatatatacagatacagaaggtttgtttctgagtttctgtagtgaccttggcaataccttgtagttcaggacaatcctgaggaacacagaagtgctggcttccttgaggaatcagtgatcaggactctcgagccccttgaaccccagcatagggcgggagggggtgagggcagcaggggtgggtgtctgaattaatgtcaggtctacgtgatggtgtcatcaagtgttccagataaaaagttttattgagccgggcgcggtggctaatgcctgtaatcccagcaccttgggaggccaaggcgggtggattgcttgagcccaggagttcgagaccagcttggggcaacatggtgaaaccctatctctataaaaaaaaaaaaaaaaattagccaggtatggtggcgtgcacctgtggtcccagctactcaggaggctgaggcaggaggatggcttgagccaggaagcagagattgcagtgagctgagatggtgccattgcaccccagcctaggcaacagagtgagaccctgtctcaa

SEQ ID NO: 80408 - DNA, 424 bp, Homo sapiens
agaaattctaacaacccggattggatgtccccaagttgcccaacctgctaaggtcaccctatcatctaaaatcaaaattaaaatggtcgaaccgaaccccagcttacctgtagtgggaaacccaacacccttccccgtaatatctccaaaagaggcttgtggtggtgggttagacaaggggcagtggtgattggtttaggcaaatcaggatcaatcccttgaaacttagatatgcttaagtatgcataagtgaaatgaatgacagcaaccatagaaaggaatgagagggaggaattaggattattttgttattataaagcacttgtattacctgtgaagtgacacattgttatttggaagtggacttgaattaattgtaaatgtatattgcaaacttttggggaaccactaagaaaaagttttt

SEQ ID NO: 80409 - DNA, 200 bp, Homo sapiens
gatattttcaagggataggattgttcagggttgaattcccaattatctcctgctgtcagaggctggataaaacaaagccttcggcatcaaatgtaattagctctattgacttatgtttttaatgttaaaattatattcctttttggggaggatgaacaaatacccccctttctcactatacactaatatccttgaaaact

SEQ ID NO: 80410 - DNA, 282 bp, Homo sapiens
tgaaaggcaaaaaataaataaataaaaataaataccatttgcagagacagagaaaccatcagaagaagacaagcaaggttgtttgaattaccacgcctagaatttagaataactactatgattaaaacgaaaaaggctttaatagataaaatagatagctcctaataacagatagtaataacatatgggtaatgtgagcagagagatggaaatcttagaacaacaacagcaacaacgacaaagcgttagggatcaaaaacactgtaacaaaaattaagaatc

SEQ ID NO: 80411 - DNA, 1762 bp, Homo sapiens
  misc_feature (791)..(791): n is a, c, g, or t
  misc_feature (1160)..(1160): n is a, c, g, or t
catgcacaggtatgttcattgcagcactactcgcaatagcaaagacttggaaccaaccgaaatgtccatcaatgatagagtggataaagaaaatgtggcacatatacaccatggaatactatgcagtcataaaaaggatgagttcatgtcctttgcagggacatggatgaagctggaaaccatcattctcagcaagctatcacaaactatcgtaggaacagaaaaccaaacaccacatgttctcacttataaatgggagttgaacaagaacacatggacacagggaagggaactcacacacccgggcctgttagggggtgggggcctaaggaagggataacattaggagaaatacctaatgtaggtgacaggttgatgggtgcagcaaacgaccatggcatgtgcatacctatgtaacaaaactgcacgttctgcacatgtaccgcagaacttaaagtataataaataaatatataaatatttataaataaataataaatacataaatatcagaaagtaaaagaggaaaaaaactgaaccttgaatttttttcttttagaatatttataatatttaacgtatttgaaggtgaaggccatcctacatggacatctgaagctttagctaagtattatcttttctgtaatgtgactattggtttgcagttcggttcttcttttcgaatagtatgagattaattttctcagtacttaaatcactcctcagttaagttggatgttcatggaggaacattctttccttcaggttgctgatacatttgctgcactgtnggggagggagtgggtatctgagttagtcagttttaccatttataaaatgtttggtggaggaaattgaaactaattgctaaattgttagtaaccagtgcattaactaggaccctactgagtggactgaaagaatcgaaaatgtttaactggttgagaggcaatgatgttgcaaatggggtattcttcaaagctccttctttttttaaatcttcaaaggcaattattctgaatgtaaactacagaccaaattgcagtcttctgtaagcatttcagagattacctcaaatattttttgattaaaaaactcttccgtggtcttttgtgcttcagaactacccagtacaacagggtcttcagcctgctcagganctctaaagagagctagcacacagtcagccaactttggctgcttcaactcctaggaacaagaaatgatgctgagataatttgtctggcaggtattatcagcccacaatgactgctgtcatttagcctcaaaatgtttatttttccttttacaatgctgtatttctttagaaccttcctattccgagtgtggaccctaggccagccccatagacttcccctggggacttgtcagaaatgcataattttaggccccaccccagacctgttggaccagaatcttcatttaacaagatgcccagaaaacctgagataatcaaagacccacaactaagtaagacctctcaggatctcaaagccaagtgttttacagagaagagaagatagaaaaggcatattatctaggagtggaaaagaattttatgctgaaaatgttgaagagagaattcaaaatcaaattcaacattccacctaggaggcttccatctctgcttaggagctgagtaatggaggtgattggtgtaagtgttcagtacctatgaagacctaactcttgagggagagactccaatgtaaacttcctactcaatactgccttaaaaaaa

SEQ ID NO: 80412 - DNA, 443 bp, Homo sapiens
aagtattatgttgataccagtgttttaatttgaatcaaaagtaatgatttaaccaaagttgtgcttccattattaactcagaaacactaagaaacgaaatcactttttcacttcttatttcccactgatgctgacaaaagaaaacctgagataatcaaagacccacaactaagtaagacctctcaggatctcaaagccaagtgttttacagagaagagaagatagaaaaggcatattatctaggagtggaaaagaattttatgctgaaaatgttgaagagagaattcaaaatcaaattcaacattccacctaggaggcttccatctctgcttaggagctgagtaatggaggtgattggtgtaagtgttcagtacctatgaagacctaactcttgagggagagactccaatgtaaacttcctactcaatactgccttaaaaaaa

SEQ ID NO: 80413 - DNA, 1745 bp, Homo sapiens
  misc_feature (791)..(791): n is a, c, g, or t
  misc_feature (1160)..(1160): n is a, c, g, or t
catgcacaggtatgttcattgcagcactactcgcaatagcaaagacttggaaccaaccgaaatgtccatcaatgatagagtggataaagaaaatgtggcacatatacaccatggaatactatgcagtcataaaaaggatgagttcatgtcctttgcagggacatggatgaagctggaaaccatcattctcagcaagctatcacaaactatcgtaggaacagaaaaccaaacaccacatgttctcacttataaatgggagttgaacaagaacacatggacacagggaagggaactcacacacccgggcctgttagggggtgggggcctaaggaagggataacattaggagaaatacctaatgtaggtgacaggttgatgggtgcagcaaacgaccatggcatgtgcatacctatgtaacaaaactgcacgttctgcacatgtaccgcagaacttaaagtataataaataaatatataaatatttataaataaataataaatacataaatatcagaaagtaaaagaggaaaaaaactgaaccttgaatttttttcttttagaatatttataatatttaacgtatttgaaggtgaaggccatcctacatggacatctgaagctttagctaagtattatcttttctgtaatgtgactattggtttgcagttcggttcttcttttcgaatagtatgagattaattttctcagtacttaaatcactcctcagttaagttggatgttcatggaggaacattctttccttcaggttgctgatacatttgctgcactgtnggggagggagtgggtatctgagttagtcagttttaccatttataaaatgtttggtggaggaaattgaaactaattgctaaattgttagtaaccagtgcattaactaggaccctactgagtggactgaaagaatcgaaaatgtttaactggttgagaggcaatgatgttgcaaatggggtattcttcaaagctccttctttttttaaatcttcaaaggcaattattctgaatgtaaactacagaccaaattgcagtcttctgtaagcatttcagagattacctcaaatattttttgattaaaaaactcttccgtggtcttttgtgcttcagaactacccagtacaacagggtcttcagcctgctcagganctctaaagagagctagcacacagtcagccaactttggctgcttcaactcctaggaacaagaaatgatgctgagataatttgtctggcaggtattatcagcccacaatgactgctgtcatttagcctcaaaatgtttatttttccttttacaatgctgtatttctttagaaccttcctattccgagtgtggaccctaggccagccccatagacttcccctggggacttgtcagaaatgcataattttaggccccaccccagacctgttggaccagaatcttcatttaacaagatgcccaggtgattcattcatgtttgagaagctctgctttaaatcactaaagcagttactgagtaattactaccatcatgactctgaagagctcctatagccttcaaatgcacctaactctactctaaaggcaaatgtcctcactgggaaatctgatctgctgtttcagagaagtgcagggctacacagtgtcttacactcctatctattgatgtttcttggttttgcctggtaatctgctgcttaaatggattatttgatgacatattgatattaaaacagtcctatttttag

SEQ ID NO: 80414 - DNA, 1912 bp, Homo sapiens
  misc_feature (167)..(167): n is a, c, g, or t
gctttttttttaatggcttttttatctgtgaacattcagataagtggattttcaagtactggttggggatgggaatcgtgcttttctttaaacttcagtttacgagatgctttgagagcgttaggcaaaagcagaaataaatatcaggagcaacggggaaagctttntaaaagatcatggtggccactgttgcagctttgaagaatgagtgctggcttgaacagttctttgcctgcatcattggtagctgcactgaaaggaaaaaactttcaccttaagaatttgaaaaggaagaaacctgggctctggtcttcatggcatttagactgagatgcttaaacagaacagaagtaatacgcatttcctgccataggatagggaaaatgtaacaagctggttgctcttgaggttagaaaattgtctgtttctctgtggatgaagctggatttacttgaaaatggagagttggcttattgtttgaatattgggacatcaagctatctatagccaagtttcagtcgcaaccagttttccctttgtctggggtaaattcgatacaaaatgattctttttgaatcctgaatccataaattacactttttttttcaaattcacaaaattcacagtggtgctgactgtgtaataaccactattgggaaacatcccgtaaacctgcctgttgccatgccaatggagtgactgaactggtgacatctgtttgagcatgctttgtgtggctggtagaatgccaccgttgtgcatacactttgtacatcaggggtgaagggagggttttctagattattgggggagggtaaaattgggatttttttgttgttccttttttgatggggtgtgggggtatagtactcagcttatgccctaaaataacatgtataaaaacccctgaagtattgtgtgggtgtgtacgtgtgagtgtgtgtttgtatacgtctggcaattaaagctttgtcttctggaacttagtgaattcttttctctttttcctccagaagtatttgttacaagatttgtaaataagagctctacttagtttgtttaccatgaacatgttgcagcaaaccttatgcatctaattcctacaaggttaaagaaaggcttttagacttgccaggttaagcaacagccaagttctcagtaattgtttgccttgatttatcttttagacttcattttgccagctctaaaactcccagtcttccttgattttagtccttaatcttttatgttctgagcaggaagggtaaaagacaggaacctgcttcactgtattaactagtccatgggctgagaccggggcatctcttttcttcatactgcaatgttgctagatacatgatcagacaccagagggttgggcattcttgcaataccttaacagtgctgaaatctgcagcatggtactaaggaagttaaagtttgaatgtaaccactttatttaaaaggtttttttctttaatttaaatgaaatggggttgaagtgaacatgattttgttgaccatgttcgtgaattacagatgcaacatgcattggtagaatcgtgtgatggtcttttgtgatacttaatttttacatatcccagtctctgtatgtatctgcatagacaaagaaaaaacaaactcctgctttgcttttattgaagggtttccaggactgcgtgtctgctcctgagctctgttttaagtatgtgtatcctttgcttgtattttgtattaaaaaaataagaaaaagaagcctttattgttgagcatgttggcattgtcccctttatttttttctctttttgggacatatgaagcaagttattctttttctgtatctttttttcttttgtaaactttttttttgttttgtttaaaaatggctttataaaagggcttttataaccca

SEQ ID NO: 80415 - DNA, 510 bp, Homo sapiens
aagcagtggtatcaacgcagactggccattacggcgggttgaatgtaaccactttatttaaaaggtttttttctttaatttaaatgaaatggggttgaagtgaacatgattttgttgaccatgttcgtgaattacagatgcaacatgcattggtagaatcgtgtgatggtcttttgtgatacttaatttttacatatcccagtctctgtatgtatctgcatagacaaagaaaaaacaaactcctgctttgcttttattgaagggtttccaggactgcgtgtctgctcctgagctctgttttaagtatgtgtatcctttgcttgtattttgtattaaaaaaataagaaaaagaagcctttattgttgagcatgttggcattgtcccctttatttttttctctttttgggacatatgaagcaagttattctttttctgtatctttttttcttttgtaaactttttttttgttttgtttaaaaatggctttataaaagggcttttataaccca

SEQ ID NO: 80416 - DNA, 503 bp, Homo sapiens
ttgcccctggaggccaagaatttcggcacgattgaatgtaaccactttatttaaaaggtttttttctttaatttaaatgaaatggggttgaagtgaacatgattttgttgaccatgttcgtgaattacagatgcaacatgcattggtagaatcgtgtgatggtcttttgtgatacttaatttttacatatcccagtctctgtatgtatctgcatagacaaagaaaaaacaaactcctgctttgcttttattgaagggtttccaggactgcgtgtctgctcctgagctctgttttaagtatgtgtatcctttgcttgtattttgtattaaaaaaataagaaaaagaagcctttattgttgagcatgttggcattgtcccctttatttttttctctttttgggacatatgaagcaagttattctttttctgtatctttttttcttttgtaaactttttttttgttttgtttaaaaatggctttataaaagggcttttataaccca

SEQ ID NO: 80417 - DNA, 981 bp, Homo sapiens
  misc_feature (167)..(167): n is a, c, g, or t
gctttttttttaatggcttttttatctgtgaacattcagataagtggattttcaagtactggttggggatgggaatcgtgcttttctttaaacttcagtttacgagatgctttgagagcgttaggcaaaagcagaaataaatatcaggagcaacggggaaagctttntaaaagatcatggtggccactgttgcagctttgaagaatgagtgctggcttgaacagttctttgcctgcatcattggtagctgcactgaaaggaaaaaactttcaccttaagaatttgaaaaggaagaaacctgggctctggtcttcatggcatttagactgagatgcttaaacagaacagaagtaatacgcatttcctgccataggatagggaaaatgtaacaagctggttgctcttgaggttagaaaattgtctgtttctctgtggatgaagctggatttacttgaaaatggagagttggcttattgtttgaatattgggacatcaagctatctatagccaagtttcagtcgcaaccagttttccctttgtctggggtaaattcgatacaaaatgattctttttgaatcctgaatccataaattacactttttttttcaaattcacaaaattcacagtggtgctgactgtgtaataaccactattgggaaacatcccgtaaacctgcctgttgccatgccaatggagtgactgaactggtgacatctgtttgagcatgctttgtgtggctggtagaatgccaccgttgtgcatacactttgtacatcaggggtgaagggagggttttctagattattgggggagggtaaaattgggatttttttgttgttccttttttgatggggtgtgggggtatagtactcagcttatgccctaaaataacatgtataaaaacccctgaagtattgtgtgggtgtgtacgtgtgagtgtgtgtttgtatacgtctggcaattaaagctttgtcttctgga

SEQ ID NO: 80418 - DNA, 483 bp, Homo sapiens
gtgatgctgctgtgatctagaggatcccggttttccctttgtctggggtaaattcgatacaaaatgattctttttgaatcctgaatccataaattacactttttttttcaaattcacaaaattcacagtggtgctgactgtgtaataaccactattgggaaacatcccgtaaacctgcctgttgccatgccaatggagtgactgaactggtgacatctgtttgagcatgctttgtgtggctggtagaatgccaccgttgtgcatacactttgtacatcaggggtgaagggagggttttctagattattgggggagggtaaaattgggatttttttgttgttccttttttgatggggtgtgggggtatagtactcagcttatgccctaaaataacatgtataaaaacccctgaagtattgtgtgggtgtgtacgtgtgagtgtgtgtttgtatacgtctggcaattaaagctttgtcttctgga

SEQ ID NO: 80419 - DNA, 779 bp, Homo sapiens
catagaaagattttagttcaaaatgattgctcctttctctacctggacttttaaaaaatcaattgtcatctaatatgagtttatttgtctatagacacaagtatcaatgtctaaaaaaaatcatgactttaaacttccaccgatgaggcaggtaggagataaagatgaattctgaactgttactaaaagtactcattttttaccttgtagggagggtgggcaatggggttacctgaccttatttgagggtatgggctttcttttttatttcatcacttgttatctcaaagagactcggagccagtgatccttttatcctgctacagtctttagggagctaaaaaaaaaaaaaaaagcaggggctgccaaaactcttgatttcatatttccttctctaaatatatatgtatcctgttttttggataaaattttaccaagaatccaaaaaaaaaaaaaaccctagaatttaatcaacaagatcagtctacaggtcacagtggatttcttttcaaactgacaatgtttaggttttaagcaaataaagttccagttaatgtgaaactcagtcacaaagagttgagatttttcctttatgaaatagaattgacattcttttatgctataaatgtgcattcaggtcccattaaccatgctctgcttttatttggggatagaacattttctttttcatatcccgatcttcccatttcttcatagaaatgtgataagaagtacatccctgtgatcctgtagactgatcttgttgattaaattctagg

SEQ ID NO: 80420 - DNA, 656 bp, Homo sapiens
catagaaagattttagttcaaaatgattgctcctttctctacctggacttttaaaaaatcaattgtcatctaatatgagtttatttgtctatagacacaagtatcaatgtctaaaaaaaatcatgactttaaacttccaccgatgaggcaggtaggagataaagatgaattctgaactgttactaaaagtactcattttttaccttgtagggagggtgggcaatggggttacctgaccttatttgagggtatgggctttcttttttatttcatcacttgttatctcaaagagactcggagccagtgatccttttatcctgctacagtctttagggagctaaaaaaaaaaaaaaaagcaggggctgccaaaactcttgatttcatatttccttctctaaatatatatgtatcctgttttttggataaaattttaccaagaatccaaaaaaaaaaaaaaccctagaatttaatcaacaagatcagtctacaggtcacagtggatttcttttcaaactgacaatgtttaggttttaagcaaataaagttccagttaatgtgaaactcagtcacaaagagttgagatttttcctttatgaaatagaattgacattcttttatgctataaatgaaaaatctcaactctttgtgactgagtt

SEQ ID NO: 80421 - DNA, 550 bp, Homo sapiens
agttttcagttacatggccaaaaatacaggacttgaacataaatagaattgacattcttttatgctataaatgtgcattcaggtcccattaaccatgctctgcttttatttggggatagaacattttctttttcatatcccgatcttcccatttcttcatagaaatgtgataagaagtacatccctgtgatcctgctgcttcgtagagcaccactgcacaccctaccccgagtgccaaccacctctgctataggacactattttcctggccctattcttcacttacttcccatcctgtccttgactaggaatatgttaaatgctgtcctgagctctgttttaagtatgtgtatcctttgcttgtattttgtattaaaaaaataagaaaaagaagcctttattgttgagcatgttggcattgtcccctttatttttttctctttttgggacatatgaagcaagttattctttttctgtatctttttttcttttgtaaactttttttttgttttgtttaaaaatggctttataaaagggcttttataaccca

SEQ ID NO: 80422 - DNA, 1414 bp, Homo sapiens
gtgatgctgctgtgatctagaggatcccggttttccctttgtctggggtaaattcgatacaaaatgattctttttgaatcctgaatccataaattacactttttttttcaaattcacaaaattcacagtggtgctgactgtgtaataaccactattgggaaacatcccgtaaacctgcctgttgccatgccaatggagtgactgaactggtgacatctgtttgagcatgctttgtgtggctggtagaatgccaccgttgtgcatacactttgtacatcaggggtgaagggagggttttctagattattgggggagggtaaaattgggatttttttgttgttccttttttgatggggtgtgggggtatagtactcagcttatgccctaaaataacatgtataaaaacccctgaagtattgtgtgggtgtgtacgtgtgagtgtgtgtttgtatacgtctggcaattaaagctttgtcttctggaacttagtgaattcttttctctttttcctccagaagtatttgttacaagatttgtaaataagagctctacttagtttgtttaccatgaacatgttgcagcaaaccttatgcatctaattcctacaaggttaaagaaaggcttttagacttgccaggttaagcaacagccaagttctcagtaattgtttgccttgatttatcttttagacttcattttgccagctctaaaactcccagtcttccttgattttagtccttaatcttttatgttctgagcaggaagggtaaaagacaggaacctgcttcactgtattaactagtccatgggctgagaccggggcatctcttttcttcatactgcaatgttgctagatacatgatcagacaccagagggttgggcattcttgcaataccttaacagtgctgaaatctgcagcatggtactaaggaagttaaagtttgaatgtaaccactttatttaaaaggtttttttctttaatttaaatgaaatggggttgaagtgaacatgattttgttgaccatgttcgtgaattacagatgcaacatgcattggtagaatcgtgtgatggtcttttgtgatacttaatttttacatatcccagtctctgtatgtatctgcatagacaaagaaaaaacaaactcctgctttgcttttattgaagggtttccaggactgcgtgtctgctcctgagctctgttttaagtatgtgtatcctttgcttgtattttgtattaaaaaaataagaaaaagaagcctttattgttgagcatgttggcattgtcccctttatttttttctctttttgggacatatgaagcaagttattctttttctgtatctttttttcttttgtaaactttttttttgttttgtttaaaaatggctttataaaagggcttttataaccca

SEQ ID NO: 80423 - DNA, 1768 bp, Homo sapiens
gtgatgctgctgtgatctagaggatcccggttttccctttgtctggggtaaattcgatacaaaatgattctttttgaatcctgaatccataaattacactttttttttcaaattcacaaaattcacagtggtgctgactgtgtaataaccactattgggaaacatcccgtaaacctgcctgttgccatgccaatggagtgactgaactggtgacatctgtttgagcatgctttgtgtggctggtagaatgccaccgttgtgcatacactttgtacatcaggggtgaagggagggttttctagattattgggggagggtaaaattgggatttttttgttgttccttttttgatggggtgtgggggtatagtactcagcttatgccctaaaataacatgtataaaaacccctgaagtattgtgtgggtgtgtacgtgtgagtgtgtgtttgtatacgtctggcaattaaagctttgtcttctggaacttagtgaattcttttctctttttcctccagaagtatttgttacaagatttgtaaataagagctctacttagtttgtttaccatgaacatgttgcagcaaaccttatgcatctaattcctacaaggttaaagaaaggcttttagacttgccaggttaagcaacagccaagttctcagtaattgtttgccttgatttatcttttagacttcattttgccagctctaaaactcccagtcttccttgattttagtccttaatcttttatgttctgagcaggaagggtaaaagacaggaacctgcttcactgtattaactagtccatgggctgagaccggggcatctcttttcttcatactgcaatgttgctagatacatgatcagacaccagagggttgggcattcttgcaataccttaacagtgctgaaatctgcagcatggtactaaggaagttaaagtttgaatgtaaccactttatttaaaaggtttttttctttaatttaaatgaaatggggttgaagtgaacatgattttgttgaccatgttcgtgaattacagatgcaacatgcattggtagaatcgtgtgatggtcttttgtgatacttaatttttacatatcccagtctctgtatgtatctgcatagacaaagaaaaaacaaactcctgctttgcttttattgaagggtttccaggactgcgtgtctgctcctgagctctgttttaagtatgtgtatcctttgcttgtattttgtattaaaaaaataagaaaaagaagcctttattgttgagcatgttggcattgtcccctttatttttttctctttttgggacatatgaagcaagttattctttttctgtatctttttttcttttgtaaactttttttttgttttgtttaaaaatggctttataaaagggcttttataacccaaaaaaaaaaaaaaaaaaaaaaaaaaaaaaaaaaaaaaaaaaaaaagggggggggggcaaaaaaatccccgggggggggcacaaattatccagcggacaccccagcgttttctttgtgtaacaaggggggccccaaaagggagagagcagataaaaagaagagggcgaggagggccgatatataaaacaagcgtggggtgtgcggaaaaaacggcaccggggatctttggaaaagaacccaactccgggcgggggccatatggggaaagcaccaaagaaaattaaggccagggaataaactgcgaggtatgtggtgaacagagcaaggggcgcgaaatgggaccgaagatggaat

SEQ ID NO: 80424 - DNA, 1795 bp, Homo sapiens
gtgatgctgctgtgatctagaggatcccggttttccctttgtctggggtaaattcgatacaaaatgattctttttgaatcctgaatccataaattacactttttttttcaaattcacaaaattcacagtggtgctgactgtgtaataaccactattgggaaacatcccgtaaacctgcctgttgccatgccaatggagtgactgaactggtgacatctgtttgagcatgctttgtgtggctggtagaatgccaccgttgtgcatacactttgtacatcaggggtgaagggagggttttctagattattgggggagggtaaaattgggatttttttgttgttccttttttgatggggtgtgggggtatagtactcagcttatgccctaaaataacatgtataaaaacccctgaagtattgtgtgggtgtgtacgtgtgagtgtgtgtttgtatacgtctggcaattaaagctttgtcttctggaacttagtgaattcttttctctttttcctccagaagtatttgttacaagatttgtaaataagagctctacttagtttgtttaccatgaacatgttgcagcaaaccttatgcatctaattcctacaaggttaaagaaaggcttttagacttgccaggttaagcaacagccaagttctcagtaattgtttgccttgatttatcttttagacttcattttgccagctctaaaactcccagtcttccttgattttagtccttaatcttttatgttctgagcaggaagggtaaaagacaggaacctgcttcactgtattaactagtccatgggctgagaccggggcatctcttttcttcatactgcaatgttgctagatacatgatcagacaccagagggttgggcattcttgcaataccttaacagtgctgaaatctgcagcatggtactaaggaagttaaagtttgaatgtaaccactttatttaaaaggtttttttctttaatttaaatgaaatggggttgaagtgaacatgattttgttgaccatgttcgtgaattacagatgcaacatgcattggtagaatcgtgtgatggtcttttgtgatacttaatttttacatatcccagtctctgtatgtatctgcatagacaaagaaaaaacaaactcctgctttgcttttattgaagggtttccaggactgcgtgtctgctcctgagctctgttttaagtatgtgtatcctttgcttgtattttgtattaaaaaaataagaaaaagaagcctttattgttgagcatgttggcattgtcccctttatttttttctctttttgggacatatgaagcaagttattctttttctgtatctttttttcttttgtaaactttttttttgttttgtttaaaaatggctttataaaagggcttttataacccagatgtgtgctctgtgtacttcttgtaataccttaaagcaaacacactaacttacacagctttgttaatcagctcccagttcagcctgactttgtgggaacttatttccctaataaattatttagaaactttaacagtgaccatccctgttgttggtaaaagataaacatgtcttggttcaaaagttaatacctcaggatggaatcaagaagcagtagacttaccagtttgattaattaagggagcactggactgggtgcgtaaggattcttaattagcattttttctcatgtttacatccaaggttatgaagtgttgtggaaagcaaagtttaacaatcatatataataaaagataatgtttatactcacagaaaaaactt

SEQ ID NO: 80425 - DNA, 1928 bp, Homo sapiens
gtgatgctgctgtgatctagaggatcccggttttccctttgtctggggtaaattcgatacaaaatgattctttttgaatcctgaatccataaattacactttttttttcaaattcacaaaattcacagtggtgctgactgtgtaataaccactattgggaaacatcccgtaaacctgcctgttgccatgccaatggagtgactgaactggtgacatctgtttgagcatgctttgtgtggctggtagaatgccaccgttgtgcatacactttgtacatcaggggtgaagggagggttttctagattattgggggagggtaaaattgggatttttttgttgttccttttttgatggggtgtgggggtatagtactcagcttatgccctaaaataacatgtataaaaacccctgaagtattgtgtgggtgtgtacgtgtgagtgtgtgtttgtatacgtctggcaattaaagctttgtcttctggaacttagtgaattcttttctctttttcctccagaagtatttgttacaagatttgtaaataagagctctacttagtttgtttaccatgaacatgttgcagcaaaccttatgcatctaattcctacaaggttaaagaaaggcttttagacttgccaggttaagcaacagccaagttctcagtaattgtttgccttgatttatcttttagacttcattttgccagctctaaaactcccagtcttccttgattttagtccttaatcttttatgttctgagcaggaagggtaaaagacaggaacctgcttcactgtattaactagtccatgggctgagaccggggcatctcttttcttcatactgcaatgttgctagatacatgatcagacaccagagggttgggcattcttgcaataccttaacagtgctgaaatctgcagcatggtactaaggaagttaaagtttgaatgtaaccactttatttaaaaggtttttttctttaatttaaatgaaatggggttgaagtgaacatgattttgttgaccatgttcgtgaattacagatgcaacatgcattggtagaatcgtgtgatggtcttttgtgatacttaatttttacatatcccagtctctgtatgtatctgcatagacaaagaaaaaacaaactcctgctttgcttttattgaagggtttccaggactgcgtgtctgctcctgagctctgttttaagtatgtgtatcctttgcttgtattttgtattaaaaaaataagaaaaagaagcctttattgttgagcatgttggcattgtcccctttatttttttctctttttgggacatatgaagcaagttattctttttctgtatctttttttcttttgtaaactttttttttgttttgtttaaaaatggctttataaaagggcttttataacccaaaaaaaacaaagaagaaggaagctccgtgcccctcctaaagctgaagccaaagcgaaggcttacaaaggccacaaaggcaagtgtgtgaacaggtgtccacagcacagaaaagagcaacagaacgatcacagtacccaacttccggggccgaagacactgcgactccggacgaaagcccacatatctcgggaagagcgctccaggagcaacaggctgacaatatgcaatactaaaagattacagctgaccactggagtctgacctgcacgaaagatagaaaaaacaccgaccactgtgttccattggtggatgttaaagccaaaaccacgaattaccggctgtgaacaagcgattgcctctgtggccaggccaaccctgaatcgccctggcaaacaggcattgtcccggtcctatccagctgcattgcacaatggacaccaggatccggcacgaaattatcatctcacaacaaaagcaatcaccacccccctaccacacaaacgcccacggaca

SEQ ID NO: 80426 - DNA, 1358 bp, Homo sapiens
gtgatgctgctgtgatctagaggatcccggttttccctttgtctggggtaaattcgatacaaaatgattctttttgaatcctgaatccataaattacactttttttttcaaattcacaaaattcacagtggtgctgactgtgtaataaccactattgggaaacatcccgtaaacctgcctgttgccatgccaatggagtgactgaactggtgacatctgtttgagcatgctttgtgtggctggtagaatgccaccgttgtgcatacactttgtacatcaggggtgaagggagggttttctagattattgggggagggtaaaattgggatttttttgttgttccttttttgatggggtgtgggggtatagtactcagcttatgccctaaaataacatgtataaaaacccctgaagtattgtgtgggtgtgtacgtgtgagtgtgtgtttgtatacgtctggcaattaaagctttgtcttctggaacttagtgaattcttttctctttttcctccagaagtatttgttacaagatttgtaaataagagctctacttagtttgtttaccatgaacatgttgcagcaaaccttatgcatctaattcctacaaggttaaagaaaggcttttagacttgccaggttaagcaacagccaagttctcagtaattgtttgccttgatttatcttttagacttcattttgccagctctaaaactcccagtcttccttgattttagtccttaatcttttatgttctgagcaggaagggtaaaagacaggaacctgcttcactgtattaactagtccatgggctgagaccggggcatctcttttcttcatactgcaatagtgctgaaatctgcagcatggtactaaggaagttaaagtttgaatgtaaccactttatttaaaaggtttttttctttaatttaaatgaaatggggttgaagtgaacatgattttgttgaccatgttcgtgaattacagatgcaacatgcattggtagaatcgtgtgatggtcttttgtgatacttaatttttacatatcccagtctctgtatgtatctgcatagacaaagaaaaaacaaactcctgctttgcttttattgaagggtttccaggactgcgtgtctgctcctgagctctgttttaagtatgtgtatcctttgcttgtattttgtattaaaaaaataagaaaaagaagcctttattgttgagcatgttggcattgtcccctttatttttttctctttttgggacatatgaagcaagttattctttttctgtatctttttttcttttgtaaactttttttttgttttgtttaaaaatggctttataaaagggcttttataaccca

SEQ ID NO: 80427 - DNA, 1270 bp, Homo sapiens
  misc_feature (1240)..(1240): n is a, c, g, or t
  misc_feature (1245)..(1245): n is a, c, g, or t
  misc_feature (1260)..(1261): n is a, c, g, or t
  misc_feature (1267)..(1267): n is a, c, g, or t
gtgatgctgctgtgatctagaggatcccggttttccctttgtctggggtaaattcgatacaaaatgattctttttgaatcctgaatccataaattacactttttttttcaaattcacaaaattcacagtggtgctgactgtgtaataaccactattgggaaacatcccgtaaacctgcctgttgccatgccaatggagtgactgaactggtgacatctgtttgagcatgctttgtgtggctggtagaatgccaccgttgtgcatacactttgtacatcaggggtgaagggagggttttctagattattgggggagggtaaaattgggatttttttgttgttccttttttgatggggtgtgggggtatagtactcagcttatgccctaaaataacatgtataaaaacccctgaagtattgtgtgggtgtgtacgtgtgagtgtgtgtttgtatacgtctggcaattaaagctttgtcttctggaacttagtgaattcttttctctttttcctccagaagtatttgttacaagatttgtaaataagagctctacttagtttgtttaccatgaacatgttgcagcaaaccttatgcatctaattcctacaaggttaaagaaaggcttttagacttgccaggttaagcaacagccaagttctcagtaattgtttgccttgatttatcttttagacttcattttgccagctctaaaactcccagtcttccttgattttagtccttaatcttttatgttctgagcaggaagggtaaaagacaggaacctgcttcactgtattaactagtccatgggctgagaccggggcatctcttttcttcatactgcaatgttgctagatacatgatcagacaccagagggttgggcattcttgcaataccttaacagtgctgaaatctgcagcatggtactaaggaagttaaagtttgaatgtaaccactttatttaaaaggtttttttctttaatttaaatgaaatggggttgaagtgaacatgattttgttgaccatgttcgtgaattacagatgcaacatgcattggtagaatcgtgtgatggtcttttgtgatacttaatttttacatatcccagtctctgtatgtatctgcatagacaaagaaaaaacaaactcctgctttgcttttattgaagggtttccaggactgcgtgtctgctcctgagctctgttttaagtatgtgtatcctttgcttgtattttgtattanggggngggggggggggaagnnctgggncgg

SEQ ID NO: 80428 - DNA, 1309 bp, Homo sapiens
gtgatgctgctgtgatctagaggatcccggttttccctttgtctggggtaaattcgatacaaaatgattctttttgaatcctgaatccataaattacactttttttttcaaattcacaaaattcacagtggtgctgactgtgtaataaccactattgggaaacatcccgtaaacctgcctgttgccatgccaatggagtgactgaactggtgacatctgtttgagcatgctttgtgtggctggtagaatgccaccgttgtgcatacactttgtacatcaggggtgaagggagggttttctagattattgggggagggtaaaattgggatttttttgttgttccttttttgatggggtgtgggggtatagtactcagcttatgccctaaaataacatgtataaaaacccctgaagtattgtgtgggtgtgtacgtgtgagtgtgtgtttgtatacgtctggcaattaaagctttgtcttctggaacttagtgaattcttttctctttttcctccagaagtatttgttacaagatttgtaaataagagctctacttagtttgtttaccatgaacatgttgcagcaaaccttatgcatctaattcctacaaggttaaagaaaggcttttagacttgccaggttaagcaacagccaagttctcagtaattgtttgccttgatttatcttttagacttcattttgccagctctaaaactcccagtcttccttgattttagtccttaatcttttatgttctgagcaggaagggtaaaagacaggaacctgcttcactgtattaactagtccatgggctgagaccggggcatctcttttcttcatactgcaatgttgctagatacatgatcagacaccagagggttgggcattcttgcaataccttaacagtgctgaaatctgcagcatggtactaaggaagttaaagtttgaatgtaaccactttatttaaaaggtttttttctttaatttaaatgaaatggggttgaagtgaacatgattttgttgaccatgttcgtgaattacagatgcaacatgcattggtagaatcgtgtgatggtcttttgtgatacttaatttttacatatcccagtctctgtatgtatctgcatagacaaagaaaaaacaaactcctgctttgctttattgttgagcatgttggcattgtcccctttatttttttctctttttgggacatatgaagcaagttattctttttctgtatctttttttcttttgtaaactttttttttgttttgtttaaaaatggctttataaaagggcttttataaccca

SEQ ID NO: 80429 - DNA, 1416 bp, Homo sapiens
gtgatgctgctgtgatctagaggatcccggttttccctttgtctggggtaaattcgatacaaaatgattctttttgaatcctgaatccataaattacactttttttttcaaattcacaaaattcacagtggtgctgactgtgtaataaccactattgggaaacatcccgtaaacctgcctgttgccatgccaatggagtgactgaactggtgacatctgtttgagcatgctttgtgtggctggtagaatgccaccgttgtgcatacactttgtacatcaggggtgaagggagggttttctagattattgggggagggtaaaattgggatttttttgttgttccttttttgatggggtgtgggggtatagtactcagcttatgccctaaaataacatgtataaaaacccctgaagtattgtgtgggtgtgtacgtgtgagtgtgtgtttgtatacgtctggcaattaaagctttgtcttctggaacttagtgaattcttttctctttttcctccagaagtatttgttacaagatttgtaaataagagctctacttagtttgtttaccatgaacatgttgcagcaaaccttatgcatctaattcctacaaggttaaagaaaggcttttagacttgccaggttaagcaacagccaagttctcagtaattgtttgccttgatttatcttttagacttcattttgccagctctaaaactcccagtcttccttgattttagtccttaatcttttatgttctgagcaggaagggtaaaagacaggaacctgcttcactgtattaactagtccatgggctgagaccggggcatctcttttcttcatactgcaatgttgctagatacatgatcagacaccagagggttgggcattcttgcaataccttaacagtgctgaaatctgcagcatggtactaaggaagttaaagtttgaatgtaaccactttatttaaaaggtttttttctttaatttaaatgaaatggggttgaagtgaacatgattttgttgaccatgttcgtgaattacagatgcaacatgcattggtagaatcgtgtgatggtcttttgtgatacttaatttttacatatcccagtctctgtatgtatctgcatagacaaggaaacacctgggctgtttatagtattgagctaataaagatttttacacagtcgtagagaaaagggtcctcagaggtgatctaatgtatcctccctctccaagctgataagtaacttactgtgtgagtgcttgcaagttttccagaatcgtaacccacttattacaaggatatcatttctacacctttcaacatcttcatctcccttctgtgtctattgcagtttactgatgttttccttacccagcacttaaaatagacaccgcaactccagaatgatcagtga

SEQ ID NO: 80430 - DNA, 1429 bp, Homo sapiens
gtgatgctgctgtgatctagaggatcccggttttccctttgtctggggtaaattcgatacaaaatgattctttttgaatcctgaatccataaattacactttttttttcaaattcacaaaattcacagtggtgctgactgtgtaataaccactattgggaaacatcccgtaaacctgcctgttgccatgccaatggagtgactgaactggtgacatctgtttgagcatgctttgtgtggctggtagaatgccaccgttgtgcatacactttgtacatcaggggtgaagggagggttttctagattattgggggagggtaaaattgggatttttttgttgttccttttttgatggggtgtgggggtatagtactcagcttatgccctaaaataacatgtataaaaacccctgaagtattgtgtgggtgtgtacgtgtgagtgtgtgtttgtatacgtctggcaattaaagctttgtcttctggaacttagtgaattcttttctctttttcctccagaagtatttgttacaagatttgtaaataagagctctacttagtttgtttaccatgaacatgttgcagcaaaccttatgcatctaattcctacaaggttaaagaaaggcttttagacttgccaggttaagcaacagccaagttctcagtaattgtttgccttgatttatcttttagacttcattttgccagctctaaaactcccagtcttccttgattttagtccttaatcttttatgttctgagcaggaagggtaaaagacaggaacctgcttcactgtattaactagtccatgggctgagaccggggcatctcttttcttcatactgcaatgttgctagatacatgatcagacaccagagggttgggcattcttgcaataccttaacagtgctgaaatctgcagcatggtactaaggaagttaaagtttgaatgtaaccactttatttaaaaggtttttttctttaatttaaatgaaatggggttgaagtgaacatgattttgttgaccatgttcgtgaattacagatgcaacatgcattggtagaatcgtgtgatggtcttttgtgatacttaatttttacatatcccagtctctgtatgtatctgcatagacaaggaaacaccggtgtttccctttgtctactgtttttttttgtctatagatgtcttgacgaattcagtctcttgccccctgccttgctttaataaattacaaaaactcaaccaaagataacacttctcagataaaaccagcacatttctgtggcctactgtacatggcctattgaatggctctattgaatgggcactttggccgatagtggaataattgctggacgttccatataatacaggtagaaggtgatcactgcacagacagtctgatgatatgagacatccgtggatcctcgga

SEQ ID NO: 80431 - DNA, 1260 bp, Homo sapiens
gtgatgctgctgtgatctagaggatcccggttttccctttgtctggggtaaattcgatacaaaatgattctttttgaatcctgaatccataaattacactttttttttcaaattcacaaaattcacagtggtgctgactgtgtaataaccactattgggaaacatcccgtaaacctgcctgttgccatgccaatggagtgactgaactggtgacatctgtttgagcatgctttgtgtggctggtagaatgccaccgttgtgcatacactttgtacatcaggggtgaagggagggttttctagattattgggggagggtaaaattgggatttttttgttgttccttttttgatggggtgtgggggtatagtactcagcttatgccctaaaataacatgtataaaaacccctgaagtattgtgtgggtgtgtacgtgtgagtgtgtgtttgtatacgtctggcaattaaagctttgtcttctggaacttagtgaattcttttctctttttcctccagaagtatttgttacaagatttgtaaataagagctctacttagtttgtttaccatgaacatgttgcagcaaaccttatgcatctaattcctacaaggttaaagaaaggcttttagacttgccaggttaagcaacagccaagttctcagtaattgtttgccttgatttatcttttagacttcattttgccagctctaaaactcccagtcttccttgattttagtccttaatcttttatgttctgagcaggaagggtaaaagacaggaacctgcttcactgtattaactagtccatgggctgagaccggggcatctcttttcttcatactgcaatgttgctagatacatgatcagacaccagagggttgggcattcttgcaataccttaacagtgctgaaatctgcagcatggtactaaggaagttaaagtttgaatgtaaccactttatttaaaaggtttttttctttaatttaaatgaaatggggttgaagtgaacatgattttgttgaccatgttcgtgaattacagatgcaacatgcattggtagaatcgtgtgatggtcttttgtgatacttaatttttacatatcccagtctctgtatgtatctgcatagacaaggaaacaccggtgtttccctttgtctatgtataggctattttctgataattgtgtaacccactcgttatccttcttatgcatctgccttctggtccattagcggatgatgcgctgtaaaaccacgatgc

SEQ ID NO: 80432 - DNA, 1354 bp, Homo sapiens
gtgatgctgctgtgatctagaggatcccggttttccctttgtctggggtaaattcgatacaaaatgattctttttgaatcctgaatccataaattacactttttttttcaaattcacaaaattcacagtggtgctgactgtgtaataaccactattgggaaacatcccgtaaacctgcctgttgccatgccaatggagtgactgaactggtgacatctgtttgagcatgctttgtgtggctggtagaatgccaccgttgtgcatacactttgtacatcaggggtgaagggagggttttctagattattgggggagggtaaaattgggatttttttgttgttccttttttgatggggtgtgggggtatagtactcagcttatgccctaaaataacatgtataaaaacccctgaagtattgtgtgggtgtgtacgtgtgagtgtgtgtttgtatacgtctggcaattaaagctttgtcttctggaacttagtgaattcttttctctttttcctccagaagtatttgttacaagatttgtaaataagagctctacttagtttgtttaccatgaacatgttgcagcaaaccttatgcatctaattcctacaaggttaaagaaaggcttttagacttgccaggttaagcaacagccaagttctcagtaattgtttgccttgatttatcttttagacttcattttgccagctctaaaactcccagtcttccttgattttagtccttaatcttttatgttctgagcaggaagggtaaaagacaggaacctgcttcactgtattaactagtccatgggctgagaccggggcatctcttttcttcatactgcaatgttgctagatacatgatcagacaccagagggttgggcattcttgcaataccttaacagtgctgaaatctgcagcatggtactaaggaagttaaagtttgaatgtaaccactttatttaaaaggtttttttctttaatttaaatgaaatggggttgaagtgaacatgattttgttgaccatgttcgtgaattacagatgcaacatgcattggtagaatcgtgtgatggtcttttgtgatacttaatttttacatatcccagtctctgtatgtatctgcatagacaaggaaacaccatgatagtctaatccttccaatgtacagttatattcttttagcttgaggccaactagaaatctgtggcatcatactttggctccatgggaatatccattccccacatttttgtctgacagttttagcaccccttaatgatcctggcccacatcaattattcataacgttgtaacaattgcagacaaggaaacccgagatcctctagaacacctc

SEQ ID NO: 80433 - DNA, 1167 bp, Homo sapiens
gtgatgctgctgtgatctagaggatcccggttttccctttgtctggggtaaattcgatacaaaatgattctttttgaatcctgaatccataaattacactttttttttcaaattcacaaaattcacagtggtgctgactgtgtaataaccactattgggaaacatcccgtaaacctgcctgttgccatgccaatggagtgactgaactggtgacatctgtttgagcatgctttgtgtggctggtagaatgccaccgttgtgcatacactttgtacatcaggggtgaagggagggttttctagattattgggggagggtaaaattgggatttttttgttgttccttttttgatggggtgtgggggtatagtactcagcttatgccctaaaataacatgtataaaaacccctgaagtattgtgtgggtgtgtacgtgtgagtgtgtgtttgtatacgtctggcaattaaagctttgtcttctggaacttagtgaattcttttctctttttcctccagaagtatttgttacaagatttgtaaataagagctctacttagtttgtttaccatgaacatgttgcagcaaaccttatgcatctaattcctacaaggttaaagaaaggcttttagacttgccaggttaagcaacagccaagttctcagtaattgtttgccttgatttatcttttagacttcattttgccagctctaaaactcccagtcttccttgattttagtccttaatcttttatgttctgagcaggaagggtaaaagacaggaacctgcttcactgtattaactagtccatgggctgagaccggggcatctcttttcttcatactgcaatgttgctagatacatgatcagacaccagagggttgggcattcttgcaataccttaacagtgctgaaatctgcagcatggtactaaggaagttaaagtttgaatgtaaccactttatttaaaaggtttttttctttaatttaaatgaaatggggttgaagtgaacatgattttgttgaccatgttcgtgaattacagatgcaacatgcattggtagaatcgtgtgatggtcttttgtgatacttaatttttacatatcccagtctctgtatgtatctgcatagacaatctaaactgacactccgagacctctggaatcgtcaa

SEQ ID NO: 80434 - DNA, 1346 bp, Homo sapiens
gtgatgctgctgtgatctagaggatcccggttttccctttgtctggggtaaattcgatacaaaatgattctttttgaatcctgaatccataaattacactttttttttcaaattcacaaaattcacagtggtgctgactgtgtaataaccactattgggaaacatcccgtaaacctgcctgttgccatgccaatggagtgactgaactggtgacatctgtttgagcatgctttgtgtggctggtagaatgccaccgttgtgcatacactttgtacatcaggggtgaagggagggttttctagattattgggggagggtaaaattgggatttttttgttgttccttttttgatggggtgtgggggtatagtactcagcttatgccctaaaataacatgtataaaaacccctgaagtattgtgtgggtgtgtacgtgtgagtgtgtgtttgtatacgtctggcaattaaagctttgtcttctggaacttagtgaattcttttctctttttcctccagaagtatttgttacaagatttgtaaataagagctctacttagtttgtttaccatgaacatgttgcagcaaaccttatgcatctaattcctacaaggttaaagaaaggcttttagacttgccaggttaagcaacagccaagttctcagtaattgtttgccttgatttatcttttagacttcattttgccagctctaaaactcccagtcttccttgattttagtccttaatcttttatgttctgagcaggaagggtaaaagacaggaacctgcttcactgtattaactagtccatgggctgagaccggggcatctcttttcttcatactgcaatgttgctagatacatgatcagacaccagagggttgggcattcttgcaataccttaacagtgctgaaatctgcagcatggtactaaggaagttaaagtttgaatgtaaccactttattttgaattacagatgcaacatgcattggtagaatcgtgtgatggtcttttgtgatacttaatttttacatatcccagtctctgtatgtatctgcatagacaaagaaaaaacaaactcctgctttgcttttattgaagggtttccaggactgcgtgtctgctcctgagctctgttttaagtatgtgtatcctttgcttgtattttgtattaaaaaaataagaaaaagaagcctttattgttgagcatgttggcattgtcccctttatttttttctctttttgggacatatgaagcaagttattctttttctgtatctttttttcttttgtaaactttttttttgttttgtttaaaaatggctttataaaagggcttttataaccca

SEQ ID NO: 80435 - DNA, 1690 bp, Homo sapiens
gtgatgctgctgtgatctagaggatcccggttttccctttgtctggggtaaattcgatacaaaatgattctttttgaatcctgaatccataaattacactttttttttcaaattcacaaaattcacagtggtgctgactgtgtaataaccactattgggaaacatcccgtaaacctgcctgttgccatgccaatggagtgactgaactggtgacatctgtttgagcatgctttgtgtggctggtagaatgccaccgttgtgcatacactttgtacatcaggggtgaagggagggttttctagattattgggggagggtaaaattgggatttttttgttgttccttttttgatggggtgtgggggtatagtactcagcttatgccctaaaataacatgtataaaaacccctgaagtattgtgtgggtgtgtacgtgtgagtgtgtgtttgtatacgtctggcaattaaagctttgtcttctggaacttagtgaattcttttctctttttcctccagaagtatttgttacaagatttgtaaataagagctctacttagtttgtttaccatgaacatgttgcagcaaaccttatgcatctaattcctacaaggttaaagaaaggcttttagacttgccaggttaagcaacagccaagttctcagtaattgtttgccttgatttatcttttagacttcattttgccagctctaaaactcccagtcttccttgattttagtccttaatcttttatgttctgagcaggaagggtaaaagacaggaacctgcttcactgtattaactagtccatgggctgagaccggggcatctcttttcttcatactgcaatgttgctagatacatgatcagacaccagagggttgggcattcttgcaataccttaacagtgctgaaatctgcagcatggtactaaggaagttaaagtttgaatgtaaccactttatttaaaaggtttttttctttaatttaaatgaaatggggttgaagtgaacatgattttgttgaccatgttcgtgaattacagatgcaacatgcattggtagaatcgtgtgatggtcttttgtgatacttaatttttacatatcccaggtgtatcctttgcttgtattttgtattaaaaaaataagaaaaagaagcctttattgttgagcatgttggcattgtcccctttatttttttctctttttgggacatatgaagcaagttattctttttctgtatctttttttcttttgtaaactttttttttgttttgtttaaaaatggctttataaaagggcttttataacccagatgtgtgctctgtgtacttcttgtaataccttaaagcaaacacactaacttacacagctttgttaatcagctcccagttcagcctgactttgtgggaacttatttccctaataaattatttagaaactttaacagtgaccatccctgttgttggtaaaagataaacatgtcttggttcaaaagttaatacctcaggatggaatcaagaagcagtagacttaccagtttgattaattaagggagcactggactgggtgcgtaaggattcttaattagcattttttctcatgtttacatccaaggttatgaagtgttgtggaaagcaaagtttaacaatcatatataataaaagataatgtttatactcacagaaaaaactt

SEQ ID NO: 80436 - DNA, 1246 bp, Homo sapiens
gcatgtgtgaagaaagcacagaggctgaagctgaagccttgtgagtgagaggaagaggccagaaatatgatagggccaggtcacctaaggcctcacaccatttgtacatcaggggtgaagggagggttttctagattattgggggagggtaaaattgggatttttttgttgttccttttttgatggggtgtgggggtatagtactcagcttatgccctaaaataacatgtataaaaacccctgaagtattgtgtgggtgtgtacgtgtgagtgtgtgtttgtatacgtctggcaattaaagctttgtcttctggaacttagtgaattcttttctctttttcctccagaagtatttgttacaagatttgtaaataagagctctacttagtttgtttaccatgaacatgttgcagcaaaccttatgcatctaattcctacaaggttaaagaaaggcttttagacttgccaggttaagcaacagccaagttctcagtaattgtttgccttgatttatcttttagacttcattttgccagctctaaaactcccagtcttccttgattttagtccttaatcttttatgttctgagcaggaagggtaaaagacaggaacctgcttcactgtattaactagtccatgggctgagaccggggcatctcttttcttcatactgcaatgttgctagatacatgatcagacaccagagggttgggcattcttgcaataccttaacagtgctgaaatctgcagcatggtactaaggaagttaaagtttgaatgtaaccactttatttaaaaggtttttttctttaatttaaatgaaatggggttgaagtgaacatgattttgttgaccatgttcgtgaattacagatgcaacatgcattggtagaatcgtgtgatggtcttttgtgatacttaatttttacatatcccagtctctgtatgtatctgcatagacaaagaaaaaacaaactcctgctttgcttttattgaagggtttccaggactgcgtgtctgctcctgagctctgttttaagtatgtgtatcctttgcttgtattttgtattaaaaaaataagaaaaagaagcctttattgttgagcatgttggcattgtcccctttatttttttctctttttgggacatatgaagcaagttattctttttctgtatctttttttcttttgtaaactttttttttgttttgtttaaaaatggctttataaaagggcttttataaccca

SEQ ID NO: 80437 - DNA, 1136 bp, Homo sapiens
cgaccgacgatttcggagttgggggtgtttgggggagggtaaaattgggatttttttgttgttccttttttgatggggtgtgggggtatagtactcagcttatgccctaaaataacatgtataaaaacccctgaagtattgtgtgggtgtgtacgtgtgagtgtgtgtttgtatacgtctggcaattaaagctttgtcttctggaacttagtgaattcttttctctttttcctccagaagtatttgttacaagatttgtaaataagagctctacttagtttgtttaccatgaacatgttgcagcaaaccttatgcatctaattcctacaaggttaaagaaaggcttttagacttgccaggttaagcaacagccaagttctcagtaattgtttgccttgatttatcttttagacttcattttgccagctctaaaactcccagtcttccttgattttagtccttaatcttttatgttctgagcaggaagggtaaaagacaggaacctgcttcactgtattaactagtccatgggctgagaccggggcatctcttttcttcatactgcaatgttgctagatacatgatcagacaccagagggttgggcattcttgcaataccttaacagtgctgaaatctgcagcatggtactaaggaagttaaagtttgaatgtaaccactttatttaaaaggtttttttctttaatttaaatgaaatggggttgaagtgaacatgattttgttgaccatgttcgtgaattacagatgcaacatgcattggtagaatcgtgtgatggtcttttgtgatacttaatttttacatatcccagtctctgtatgtatctgcatagacaaagaaaaaacaaactcctgctttgcttttattgaagggtttccaggactgcgtgtctgctcctgagctctgttttaagtatgtgtatcctttgcttgtattttgtattaaaaaaataagaaaaagaagcctttattgttgagcatgttggcattgtcccctttatttttttctctttttgggacatatgaagcaagttattctttttctgtatctttttttcttttgtaaactttttttttgttttgtttaaaaatggctttataaaagggcttttataaccca

SEQ ID NO: 80438 - DNA, 1070 bp, Homo sapiens
ctgagaccggggcatctcttttcttcatactgctcagaacctaaaataacatgtataaaaacccctgaagtattgtgtgggtgtgtacgtgtgagtgtgtgtttgtatacgtctggcaattaaagctttgtcttctggaacttagtgaattcttttctctttttcctccagaagtatttgttacaagatttgtaaataagagctctacttagtttgtttaccatgaacatgttgcagcaaaccttatgcatctaattcctacaaggttaaagaaaggcttttagacttgccaggttaagcaacagccaagttctcagtaattgtttgccttgatttatcttttagacttcattttgccagctctaaaactcccagtcttccttgattttagtccttaatcttttatgttctgagcaggaagggtaaaagacaggaacctgcttcactgtattaactagtccatgggctgagaccggggcatctcttttcttcatactgcaatgttgctagatacatgatcagacaccagagggttgggcattcttgcaataccttaacagtgctgaaatctgcagcatggtactaaggaagttaaagtttgaatgtaaccactttatttaaaaggtttttttctttaatttaaatgaaatggggttgaagtgaacatgattttgttgaccatgttcgtgaattacagatgcaacatgcattggtagaatcgtgtgatggtcttttgtgatacttaatttttacatatcccagtctctgtatgtatctgcatagacaaagaaaaaacaaactcctgctttgcttttattgaagggtttccaggactgcgtgtctgctcctgagctctgttttaagtatgtgtatcctttgcttgtattttgtattaaaaaaataagaaaaagaagcctttattgttgagcatgttggcattgtcccctttatttttttctctttttgggacatatgaagcaagttattctttttctgtatctttttttcttttgtaaactttttttttgttttgtttaaaaatggctttataaaagggcttttataaccca

SEQ ID NO: 80439 - DNA, 1859 bp, Homo sapiens
  misc_feature (167)..(167): n is a, c, g, or t
gctttttttttaatggcttttttatctgtgaacattcagataagtggattttcaagtactggttggggatgggaatcgtgcttttctttaaacttcagtttacgagatgctttgagagcgttaggcaaaagcagaaataaatatcaggagcaacggggaaagctttntaaaagatcatggtggccactgttgcagctttgaagaatgagtgctggcttgaacagttctttgcctgcatcattggtagctgcactgaaaggaaaaaactttcaccttaagaatttgaaaaggaagaaacctgggctctggtcttcatggcatttagactgagatgcttaaacagaacagaagtaatacgcatttcctgccataggatagggaaaatgtaacaagctggttgctcttgaggttagaaaattgtctgtttctctgtggatgaagctggatttacttgaaaatggagagttggcttattgtttgaatattgggacatcaagctatctatagccaagtttcagtcgcaaccagttttccctttgtctggggtaaattcgatacaaaatgattctttttgaatcctgaatccataaattacactttttttttcaaattcacaaaattcacagtggtgctgactgtgtaataaccactattgggaaacatcccgtaaacctgcctgttgccatgccaatggagtgactgaactggtgacatctgtttgagcatgctttgtgtggctggtagaatgccaccgttgtgcatacactttgtacatcaggggtgaagggagggttttctagattattgggggagggtaaaattgggatttttttgttgttccttttttgatggggtgtgggggtatagtactcagcttatgccctaaaataacatgtatagtctggcaattaaagctttgtcttctggaacttagtgaattcttttctctttttcctccagaagtatttgttacaagatttgtaaataagagctctacttagtttgtttaccatgaacatgttgcagcaaaccttatgcatctaattcctacaaggttaaagaaaggcttttagacttgccaggttaagcaacagccaagttctcagtaattgtttgccttgatttatcttttagacttcattttgccagctctaaaactcccagtcttccttgattttagtccttaatcttttatgttctgagcaggaagggtaaaagacaggaacctgcttcactgtattaactagtccatgggctgagaccggggcatctcttttcttcatactgcaatgttgctagatacatgatcagacaccagagggttgggcattcttgcaataccttaacagtgctgaaatctgcagcatggtactaaggaagttaaagtttgaatgtaaccactttatttaaaaggtttttttctttaatttaaatgaaatggggttgaagtgaacatgattttgttgaccatgttcgtgaattacagatgcaacatgcattggtagaatcgtgtgatggtcttttgtgatacttaatttttacatatcccagtctctgtatgtatctgcatagacaaagaaaaaacaaactcctgctttgcttttattgaagggtttccaggactgcgtgtctgctcctgagctctgttttaagtatgtgtatcctttgcttgtattttgtattaaaaaaataagaaaaagaagcctttattgttgagcatgttggcattgtcccctttatttttttctctttttgggacatatgaagcaagttattctttttctgtatctttttttcttttgtaaactttttttttgttttgtttaaaaatggctttataaaagggcttttataaccca

SEQ ID NO: 80440 - DNA, 925 bp, Homo sapiens
caataagagctactccagcctgggcaataagagctactccagcctgggcaataagagctctacttagtttgtttaccatgaacatgttgcagcaaaccttatgcatctaattcctacaaggttaaagaaaggcttttagacttgccaggttaagcaacagccaagttctcagtaattgtttgccttgatttatcttttagacttcattttgccagctctaaaactcccagtcttccttgattttagtccttaatcttttatgttctgagcaggaagggtaaaagacaggaacctgcttcactgtattaactagtccatgggctgagaccggggcatctcttttcttcatactgcaatgttgctagatacatgatcagacaccagagggttgggcattcttgcaataccttaacagtgctgaaatctgcagcatggtactaaggaagttaaagtttgaatgtaaccactttatttaaaaggtttttttctttaatttaaatgaaatggggttgaagtgaacatgattttgttgaccatgttcgtgaattacagatgcaacatgcattggtagaatcgtgtgatggtcttttgtgatacttaatttttacatatcccagtctctgtatgtatctgcatagacaaagaaaaaacaaactcctgctttgcttttattgaagggtttccaggactgcgtgtctgctcctgagctctgttttaagtatgtgtatcctttgcttgtattttgtattaaaaaaataagaaaaagaagcctttattgttgagcatgttggcattgtcccctttatttttttctctttttgggacatatgaagcaagttattctttttctgtatctttttttcttttgtaaactttttttttgttttgtttaaaaatggctttataaaagggcttttataaccca

SEQ ID NO: 80441 - DNA, 729 bp, Homo sapiens
  misc_feature (699)..(699): n is a, c, g, or t
gtgatgctgctgtgatctagaggatcccggttttccctttgtctggggtaaattcgatacaaaatgattctttttgaatcctgaatccataaattacactttttttttcaaattcacaaaattcacagtggtgctgactgtgtaataaccactattgggaaacatcccgtaaacctgcctgttgccatgccaatggagtgactgaactggtgacatctgtttgagcatgctttgtgtggctggtagaatgccaccgttgtgcatacactttgtacatcaggggtgaagggagggttttctagattattgggggagggtaaaattgggatttttttgttgttccttttttgatggggtgtgggggtatagtactcagcttatgccctaaaataacatgtataaaaacccctgaagtattgtgtgggtgtgtacgtgtgagtgtgtgtttgtatacgtctggcaattaaagctttgtcttctggaacttagtgaattcttttctctttttcctccagaagtatttgttacaagatttgtaaataagagctctacttagtttgtttaccatgaacatgttgcagcaaaccttatgcatctaattcctacaaggttaaagaaaggcttttagacttgccaggttaagcaacagccaagttctcagtaattgtttgccttgatttatcttttagacttcatttntgccatgctggagtggtccgagctctatta

SEQ ID NO: 80442 - DNA, 736 bp, Homo sapiens
gtgatgctgctgtgatctagaggatcccggttttccctttgtctggggtaaattcgatacaaaatgattctttttgaatcctgaatccataaattacactttttttttcaaattcacaaaattcacagtggtgctgactgtgtaataaccactattgggaaacatcccgtaaacctgcctgttgccatgccaatggagtgactgaactggtgacatctgtttgagcatgctttgtgtggctggtagaatgccaccgttgtgcatacactttgtacatcaggggtgaagggagggttttctagattattgggggagggtaaaattgggatttttttgttgttccttttttgatggggtgtgggggtatagtactcagcttatgccctaaaataacatgtataaaaacccctgaagtattgtgtgggtgtgtacgtgtgagtgtgtgtttgtatacgtctggcaattaaagctttgtcttctggaacttagtgaattcttttctctttttcctccagaagtatttgttacaagatttgtaaataagagctctacttagtttgtttaccatgaacatgttgcagcaaaccttatgcatctaattcctacaaggttaaagaaaggcttttagacttgccaggttaagcaacagccaagttctcagtaattgtttgccttgatttatcttttagacttcattccaccagactgtaagctccgtacgaagggggatggacac

SEQ ID NO: 80443 - DNA, 737 bp, Homo sapiens
  misc_feature (701)..(701): n is a, c, g, or t
  misc_feature (725)..(725): n is a, c, g, or t
gtgatgctgctgtgatctagaggatcccggttttccctttgtctggggtaaattcgatacaaaatgattctttttgaatcctgaatccataaattacactttttttttcaaattcacaaaattcacagtggtgctgactgtgtaataaccactattgggaaacatcccgtaaacctgcctgttgccatgccaatggagtgactgaactggtgacatctgtttgagcatgctttgtgtggctggtagaatgccaccgttgtgcatacactttgtacatcaggggtgaagggagggttttctagattattgggggagggtaaaattgggatttttttgttgttccttttttgatggggtgtgggggtatagtactcagcttatgccctaaaataacatgtataaaaacccctgaagtattgtgtgggtgtgtacgtgtgagtgtgtgtttgtatacgtctggcaattaaagctttgtcttctggaacttagtgaattcttttctctttttcctccagaagtatttgttacaagatttgtaaataagagctctacttagtttgtttaccatgaacatgttgcagcaaaccttatgcatctaattcctacaaggttaaagaaaggcttttagacttgccaggttaagcaacagccaagttctcagtaattgtttgccttgatttatcttttagacttcatttatngcccaggctggagtagctcttatngcccaggctggg

SEQ ID NO: 80444 - DNA, 1812 bp, Homo sapiens
  misc_feature (167)..(167): n is a, c, g, or t
gctttttttttaatggcttttttatctgtgaacattcagataagtggattttcaagtactggttggggatgggaatcgtgcttttctttaaacttcagtttacgagatgctttgagagcgttaggcaaaagcagaaataaatatcaggagcaacggggaaagctttntaaaagatcatggtggccactgttgcagctttgaagaatgagtgctggcttgaacagttctttgcctgcatcattggtagctgcactgaaaggaaaaaactttcaccttaagaatttgaaaaggaagaaacctgggctctggtcttcatggcatttagactgagatgcttaaacagaacagaagtaatacgcatttcctgccataggatagggaaaatgtaacaagctggttgctcttgaggttagaaaattgtctgtttctctgtggatgaagctggatttacttgaaaatggagagttggcttattgtttgaatattgggacatcaagctatctatagccaagtttcagtcgcaaccagttttccctttgtctggggtaaattcgatacaaaatgattctttttgaatcctgaatccataaattacactttttttttcaaattcacaaaattcacagtggtgctgactgtgtaataaccactattgggaaacatcccgtaaacctgcctgttgccatgccaatggagtgactgaactggtgacatctgtttgagcatgctttgtgtggctggtagaatgccaccgttgtgcatacactttgtacatcaggggtgaagggagggttttctagattattgggggagggtaaaattgggatttttttgttgttccttttttgatggggtgtgggggtatagtactcagcttatgccctaaaataacatgtataaaaacccctgaagtattgtgtgggtgtgtacgtgtgagtgtgtgtttgtatacgtctggcaattaaagctttgtcttctggaacttagtgaattcttttctctttttcctccagaagtatttgttacaagatttgtaaataagagctctacttagtttgtttaccatgaacatgttgcagcaaaccttatgcatttgccagctctaaaactcccagtcttccttgattttagtccttaatcttttatgttctgagcaggaagggtaaaagacaggaacctgcttcactgtattaactagtccatgggctgagaccggggcatctcttttcttcatactgcaatgttgctagatacatgatcagacaccagagggttgggcattcttgcaataccttaacagtgctgaaatctgcagcatggtactaaggaagttaaagtttgaatgtaaccactttatttaaaaggtttttttctttaatttaaatgaaatggggttgaagtgaacatgattttgttgaccatgttcgtgaattacagatgcaacatgcattggtagaatcgtgtgatggtcttttgtgatacttaatttttacatatcccagtctctgtatgtatctgcatagacaaggaaacacctgggctgtttatagtattgagctaataaagatttttacacagtcgtagagaaaagggtcctcagaggtgatctaatgtatcctccctctccaagctgataagtaacttactgtgtgagtgcttgcaagttttccagaatcgtaacccacttattacaaggatatcatttctacacctttcaacatcttcatctcccttctgtgtctattgcagtttactgatgttttccttacccagcacttaaaatagacaccgcaactccagaatgatcagtga

SEQ ID NO: 80445 - DNA, 1091 bp, Homo sapiens
  misc_feature (167)..(167): n is a, c, g, or t
  misc_feature (960)..(960): n is a, c, g, or t
  misc_feature (964)..(964): n is a, c, g, or t
gctttttttttaatggcttttttatctgtgaacattcagataagtggattttcaagtactggttggggatgggaatcgtgcttttctttaaacttcagtttacgagatgctttgagagcgttaggcaaaagcagaaataaatatcaggagcaacggggaaagctttntaaaagatcatggtggccactgttgcagctttgaagaatgagtgctggcttgaacagttctttgcctgcatcattggtagctgcactgaaaggaaaaaactttcaccttaagaatttgaaaaggaagaaacctgggctctggtcttcatggcatttagactgagatgcttaaacagaacagaagtaatacgcatttcctgccataggatagggaaaatgtaacaagctggttgctcttgaggttagaaaattgtctgtttctctgtggatgaagctggatttacttgaaaatggagagttggcttattgtttgaatattgggacatcaagctatctatagccaagtttcagtcgcaaccagttttccctttgtctggggtaaattcgatacaaaatgattctttttgaatcctgaatccataaattacactttttttttcaaattcacaaaattcacagtggtgctgactgtgtaataaccactattgggaaacatcccgtaaacctgcctgttgccatgccaatggagtgactgaactggtgacatctgtttgagcatgctttgtgtggctggtagaatgccaccgttgtgcatacactttgtacatcaggggtgaagggagggttttctagattattgggggagggtaaaattgggatttttttgttgttccttttttgatggggtgtgggggtatagtactcagcttatgccctaaaataacatgtataaaaacccctgaagtattgtgtgggtgtgtacgtgtgagtgtgtgtttgtatacgtctggcnattnaagctgtggtgctgctggattgatgatgcgtgctgctttttgcctgccagaattgttttacagagggggtagaagagcgcgactaggtgggcaccatgacatggttgccagccaccgatgcatcagg

SEQ ID NO: 80446 - DNA, 1486 bp, Homo sapiens
catagaaagattttagttcaaaatgattgctcctttctctacctggacttttaaaaaatcaattgtcatctaatatgagtttatttgtctatagacacaagtatcaatgtctaaaaaaaatcatgactttaaacttccaccgatgaggcaggtaggagataaagatgaattctgaactgttactaaaagtactcattttttaccttgtagggagggtgggcaatggggttacctgaccttatttgagggtatgggctttcttttttatttcatcacttgttatctcaaagagactcggagccagtgatccttttatcctgctacagtctttagggagctaaaaaaaaaaaaaaaagcaggggctgccaaaactcttgatttcatatttccttctctaaatatatatgtatcctgttttttggataaaattttaccaagaatccaaaaaaaaaaaaaaccctagaatttaatcaacaagatcagtctacaggtcacagtggatttcttttcaaactgacaatgtttaggttttaagcaaataaagttccagttaatgtgaaactcagtcacaaagagttgagatttttcctttatgaaatagaattgacattcttttatgctataaatgtgcattcaggtcccattaaccatgctctgcttttatttggggatagaacattttctttttcatatcccgatcttcccatttcttcatagaaatgtgataagaagtacatccctgtgatcctgctgcttcgtagagcaccactgcacaccctaccccgagtgccaaccacctctgctataggacactattttcctggccctattcttcacttacttcccatcctgtccttgactaggaatatgttaaatgctgtcctgagctctgttttaagtatgtgtatcctttgcttgtattttgtattaaaaaaataagaaaaagaagcctttattgttgagcatgttggcattgtcccctttatttttttctctttttgggacatatgaagcaagttattctttttctgtatctttttttcttttgtaaactttttttttgttttgtttaaaaatggctttataaaagggcttttataacccagatgtgtgctctgtgtacttcttgtaataccttaaagcaaacacactaacttacacagctttgttaatcagctcccagttcagcctgactttgtgggaacttatttccctaataaattatttagaaactttaacagtgaccatccctgttgttggtaaaagataaacatgtcttggttcaaaagttaatacctcaggatggaatcaagaagcagtagacttaccagtttgattaattaagggagcactggactgggtgcgtaaggattcttaattagcattttttctcatgtttacatccaaggttatgaagtgttgtggaaagcaaagtttaacaatcatatataataaaagataatgtttatactcacagaaaaaactt

SEQ ID NO: 80447 - DNA, 282 bp, Homo sapiens
gtattcttcatgtaatagctgaaatctagtatattttaaagatatatctatttaaaaaaaaaaaactctaatgataataagattgattaagtatatatgaaattattgataagtagatatgcagttattgacctggttggttgcacagaatttttcattttcattttgcaggtagcatgttttaatctaaattctaatgtggacattttccattgtaaacagttggctcttcatgaaatgtatatataattaaatatgaataatactaatctttaaggtaaa

SEQ ID NO: 80448 - DNA, 710 bp, Homo sapiens
ttcatccaccagtgaagcttatctcaatcacaagagaagagactagaagcccacaccacacttagacaaatgtcacaaacgatcatctgttcttctaagggccattcatcttttcccaaaatcatttactctgcctgaaattggctacatccctggcttccttctcgcctatgtagagggtatataagctcctaaatctcccggtttttcaggtacttttcttcctgtgatgccaccacacatgtaatcaatttatataccttttctcttattaatttgcctgttgttagtatgtttcagaggctgagttattgaactctcagagggtagagagggaaagtcttcacttttctacaattaagtagatcaatttaacttctaaggataagtctgtctgtttttcccatgttttgaattttgaatcataatgacctgagatccccaattaaggagaaatgggaaacaaatatctgtatgataatctataactgttttcttttatacacaaatctcaatgtcatgaatataaaagtaatgcttgatttggagttcctttacatttattattcaaaaacacccacatggccgggcacagtggctcgtgcctatcatcccagtgatttgggaggctgaaacaagagaaacgcttgagtctaggaatttgagaccagcctgagcaacaaagcaagaccccatttctacaaaaaatt

SEQ ID NO: 80449 - DNA, 895 bp, Homo sapiens
gttagccaggatggtctcgatctcctgacctcgtgatccgcccgcctcggcctcccaaagtgttgggattacaggcgtgagccactgcgcccggcctcttttatgttttttaagggtaagtaatttaaagtgtttctgggacatgatctaaagacccatatcatcaactaattttgttcttttttttgagaccgaatctcactctgtcacccaggctggagtgcagcagcgtgatcttggctctctgcaacctctacctcccgggttcaagtgatgctcctgcctcagcctcccaagtagttggtattacaggtgcccacccagcacgcctggataatttttgtgtttttagtagagatggggtttcaccatgttggccaggctggtctcgaactcctaacctcaggtggtccacccacctcaattaattttgtcttgcggttaagttaaagggacagtggcttctgctgcccttactgatctcacttagtggattagtgtttaaaccgaggctctacaacagcccaagatgtcactttgttgttgggagcaggggagccaggtgtagatggggagtgtgctggggctggcagaattagatcatgattcaggagggtagcatgggggaaaatgtagtcatcagagcctgtgtctgttactcactggacatcactgaacatattcatgtgttctggtggcatctttgaactatttgctcagataactctaatcaaattgtaatgtagaaaactggcttgtcaagacagtttagagatctgttctttagcatctgttgagtataatttaaaaaaaaaatccaagttggaaatgacctgtaaacccatctaattaggcacaataagatattaggttatttttaattatccaaacttta

SEQ ID NO: 80450 - DNA, 351 bp, Homo sapiens
  misc_feature (31)..(31): n is a, c, g, or t
  misc_feature (52)..(52): n is a, c, g, or t
tctcacgagatggttttataaggggcttttncccctttgcttggtatttctncttgccgccacgtgaagaagtacatgtttgctgtctctgtcttttttcctctctctgtgtttcatttcctctctatataagaaaactttatttgaaacagacatggtgaaaactctctttgctctcctatataccttagttcacatacgtaggtagacacattcattttttcatcactttattagaaagcattcaactcacctttttcagccttattatgtgtcaggcactgccctcagcatttcgttataagagaaaataaaacaaaaatggaaggattggtcaatatagccattcta

SEQ ID NO: 80451 - DNA, 668 bp, Homo sapiens
  misc_feature (640)..(640): n is a, c, g, or t
tcaaaacaaaacaaagcaaaacaaaactttagtctctttagggactctctgatagtaatgcagagggagaaaggctttctttgtctcactgggaggaaggttccctacggaaattgaaggcagtgcctgttgacatagcgctgccacctggtggaaataatggtgtaggacatcatgtccagcaccactagcgctgagacactccctgggaagagaaatgtttggagagaaatttgcaagaagttggaagtctcgcagtagcaggtaggaacaagaattataactgctactgtgaccccctaaggctcctcacatcctcttaaggcttggagaaactcacactatgtatattttcctgtatttttgaaaaatgttttcctttatgctttgttgtaatgaaattacctctgatggtcacataccttaaatatttagtatatatatgaatactaaatgtccattttcaggagttagtttacctgcatctaaaatcaggaataggtcacagagagtactgtgagactaaaaaaggtggctgtgtaagggtttgtggccattttcaccccttttgcctggggccattgcagagcgaccctccaatcatccttggttacctaattgacggggaaacaagttgccntcctatcccatgtggatcgcggcgtacg

SEQ ID NO: 80452 - DNA, 746 bp, Homo sapiens
tcaaaacaaaacaaagcaaaacaaaactttagtctctttagggactctctgatagtaatgcagagggagaaaggctttctttgtctcactgggaggaaggttccctacggaaattgaaggcagtgcctgttgacatagcgctgccacctggtggaaataatggtgtaggacatcatgtccagcaccactagcgctgagacactccctgggaagagaaatgtttggagagaaatttgcaagaagttggaagtctcgcagtagcaggtaggaacaagaattataactgctactgtgaccccctaaggctcctcacatcctcttaaggcttggagaaactcacactatgtatattttcctgtatttttgaaaaatgttttcctttatgctttgttgtaatgaaattacctctgatggtcacataccttaaatatttagtatatatatgaatactaaatgtccattttcaggagttagtttacctgcatctaaaatcaggaataggtcacagagtaactgagcaaaaagtgctgttaggtttgtgcatttcaccctttgcctgggatgagaggacctcaatcatcttggtactaatgacaggaaaagtgccctcctatccatgtgtatcggctacgtgactcaagtctccttatttccttttctagcataacaaggggttgttactgttgttttacatctgtgttaatgagataaataagtttaaaataaaaagatgtgtaccaggcaga

SEQ ID NO: 80453 - DNA, 460 bp, Homo sapiens
aagcaggaacctgggaatccaagcagtgggtgttttgaggatgatccagatacacttaggagtattcagatcatgaaactccatgacatgaagggaaaaggtgaggcatcactgcaatatgatgttaaaatagtaatcttggcctggtgtggtggctcacacctgtaatcccagcactttgggaggctgaggtgggaggattggtgaagctaggagtttgagaccagcctgggcaacaaagtgagaccctgtctctacaaaaataaaaaatttagctgggtgtggtggcacctgcctatagttccagctactcgggtggctgaggcgggagtatcacttgagcccaggaggtcaaggctgcgttgagctgtgattacaccactacactccagcctgggcagccgagtgagaccctgtctctgaaaaaataaaacaacaacaacaaaacaaaaaacaaaaa

SEQ ID NO: 80454 - DNA, 482 bp, Homo sapiens
ataccatatatttcagcaaaatattttccctgctacccattaaactacagataaagaatgactgctttgaaagattggctaaagcactggatttaaggttaaaaccctgagtttgatcccatcaccgcatttgctcttacaagtcattttcacttcccttggccatgatttgcctctgtaaaatcatgagccttcggccgtctgccttcagccacagttccagagctcagaaccaggacgtggaaaactgctgtgtaaattatagaggaacaggaacaggaccaggaaggggcaccacgtaaatctcacatctctcctgcctgtccctgttacactaaaaccttttcttgctaaacagaaagcttggctttgtggatcaggacgcgagaggtgtgggtcatttctattttactcttcttcaaattcactgaagagccacattatgtaaacaaagggtgtttggcaggaagtcattttgaaac

SEQ ID NO: 80455 - DNA, 159 bp, Homo sapiens
gtttaagccattactgttttggatgtttttttactcatagccaaagttaatcctaactatacacagttagaattcattcctcataaaggtagtgcctgaatgaaacttttttttttttgagacatagtctcactcttttgcccaggatggagtgcagtg

SEQ ID NO: 80456 - DNA, 606 bp, Homo sapiens
cattcatgtctatcctgactgatttctgtcacagagagaaatttagatattttattaaacttggaagtcattaatgccatataaagcaatgctaagagagtcagcatgtgttactgatgtgttgctgaagattaaagtatttttaagtctcaccaaaaaggtggaaggagccaactgagacacaaaaaaggggctgaggttctattcacggtgagtttctttttttgtttcttccagctctaactaacgtgggtatccaactgcgtggcttttcggtgagccccaatataaaatgtaataattttttttctattcttaggctttatctaccaagaaatgaattggataatccacatcaacaaaaagcatggaaaatttatccaccagaatttgccgtggagatactttttggcgagaaatgacttccaatgacgtagctggatccgattaagtatagtttccccttccccttctgggaaagaattaatgttctttccaacccctgccatgtgcatgttcatatgtcctaagtcttccttgatgatgtatctatatttatatatgtttatatatgttcttcataaatctattaaatatatatagata

SEQ ID NO: 80457 - DNA, 1272 bp, Homo sapiens
agcaacaaagggattcagctgcacgtttgagagctgttggcaagacctcaggacagagtgccctctgtgtctggtggtgattctcagacaccatcacattctgatcctgcattgttagccattctactgactacatctactcctaagttaaggactttcttgagcctatctcatgactggccctttctgaagggaagtatggcagctagttactttaatgagcatttcccaatgggtaaggaacagtctgtgaacctatgagttttgttttgttttgttttgtttttaatttttgagacagagtctcgctctgtcgcccagactagagtgcagtggtgcaatctcagctcactgcaacctcgacgtcttgggttcaagcgattctcctgcctcagcctcccaagtggctgggattataggtgcccatcaccacgcatggcctatttttgtatttttagtagagacaaggtttcaccctgttggcgaggctggtctcaaactcctgacgcccagtgatctgcccacctcggcctcccaaagtgctgggattacaggcgggagccaccatgatggccaacttttgaattctgaaccagttgattgagtaccagagctcttcaataccttgaagaaagattcaggggagagccgttgtgaacagcttgccccagggaaaggacaaggctgagagaattccagggcttccttgagaaaacagaattgaggaaatgcaaagtgaagaattctagcatcaggaacaagagaagaatgatggaaaacctgctactgagatatgttggatattttgcacaagtgaaacatctctacaactggaatctccctccaagacggatactctttataataagattcattatttattcgattcgtgatactgcatgacattgaaacagctggtgtattaactaatgtatatgacagtccatctctgtacgatgatgtgaaagtgcagtttttctcttcggctttatctaccaagaaatgaattggataatccacatcaacaaaaagcatggaaaatttatccaccagaatttgccgtggagatactttttggcgagaaatgacttccaatgacgtagctggatccgattaagtatagtttccccttccccttctgggaaagaattaatgttctttccaacccctgccatgtgcatgttcatatgtcctaagtcttccttgatgatgtatctatatttatatatgtttatatatgttcttcataaatctattaaatatatatagata

SEQ ID NO: 80458 - DNA, 1912 bp, Homo sapiens
  misc_feature (450)..(450): n is a, c, g, or t
  misc_feature (456)..(456): n is a, c, g, or t
  misc_feature (458)..(458): n is a, c, g, or t
tgtccatttgtgtctccaccaatgaccaacactgtgttgggatccacagacttggggaagatgaacttaatagattaagaaaagatgaccactgcagctgcatttctattttggaatcacactctccgtgacctgtgtgagtcacagctaccagaaaacaaagacagcaaagaagagagaacaggaaatgagaatgggtgatgtgggtccccatgaagcaataaacataggaggacctcactctgttgtgcatgctggagtacagtggcgcagtctctgctccctgaaacctcgacttccagggctcaagagatccttccatcttaccaagtggctgggactacagatgtatagttattttccaaacccaccattgtaaaattacattctattaaagagaaaaagaagaaaaagaaacttaatttgttttttgggggatagttgagatgngtttancncagcccctgctggtaaccaaggtcctcctccaatgacgggtatgaatatgaacaacagagcaactatacctggcccaccagtgggtcctggtcctgccatgggaccagaaggagccgcaaatatgggaactccaatgatgccagataatggagcagtggaagaaccggaactatgatttgtgccttccttattgcctccgaaatatttttaactgcagaggaaagcctgtattattttggagaaaggcgaacagataaaacgcacagcagtaaatttcagggactagaaactccttctcagtagagacaaggtttcaccctgttggcgaggctggtctcaaactcctgacgcccagtgatctgcccacctcggcctcccaaagtgctgggattacaggcgggagccaccatgatggccaacttttgaattctgaaccagttgattgagtaccagagctcttcaataccttgaagaaagattcaggggagagccgttgtgaacagcttgccccagggaaaggacaaggctgagagaattccagggcttccttgagaaaacagaattgaggaaatgcaaagtgaagaattctagcatcaggaacaagagaagaatgatggaaaacctgctactgagatatgttggatattttgcacaagtgaaacatctctacaactggaatctccctccaagacggatactctttataataagattcattatttattcgattcgtggtgttggaacaggcgatgtatgtgatctaaaattccaaatagtaatggagaaaaaggttgtcttttccagtacttcattaggaaattgttcaatactgcatgacattgaaacagctggtgtattaactaatgtatatgacagtccatctctgtacgatgatgtgaaagtgcagtttttctcttcgaatcttcctaaatactatgacaattgttcatttttcttctggttcaacacatcttttattcaaaataacagagagaaatttagatattttattaaacttggaagtcattaatgccatataaagcaatgctaagagagtcagcatgtgttactgatgtgttgctgaagattaaagtatttttaagtctcaccaaaaaggtggaaggagccaactgagacacaaaaaaggggctgaggttctattcacggctttatctaccaagaaatgaattggataatccacatcaacaaaaagcatggaaaatttatccaccagaatttgccgtggagatactttttggcgagaaatgacttccaatgacgtagctggatccgattaagtatagtttccccttccccttctgggaaagaattaatgttctttccaacccctgccatgtgcatgttcatatgtcctaagtcttccttgatgatgtatctatatttatatatgtttatatatgttcttcataaatctattaaatatatatagata

SEQ ID NO: 80459 - DNA, 1736 bp, Homo sapiens
  misc_feature (450)..(450): n is a, c, g, or t
  misc_feature (456)..(456): n is a, c, g, or t
  misc_feature (458)..(458): n is a, c, g, or t
tgtccatttgtgtctccaccaatgaccaacactgtgttgggatccacagacttggggaagatgaacttaatagattaagaaaagatgaccactgcagctgcatttctattttggaatcacactctccgtgacctgtgtgagtcacagctaccagaaaacaaagacagcaaagaagagagaacaggaaatgagaatgggtgatgtgggtccccatgaagcaataaacataggaggacctcactctgttgtgcatgctggagtacagtggcgcagtctctgctccctgaaacctcgacttccagggctcaagagatccttccatcttaccaagtggctgggactacagatgtatagttattttccaaacccaccattgtaaaattacattctattaaagagaaaaagaagaaaaagaaacttaatttgttttttgggggatagttgagatgngtttancncagcccctgctggtaaccaaggtcctcctccaatgacgggtatgaatatgaacaacagagcaactatacctggcccaccagtgggtcctggtcctgccatgggaccagaaggagccgcaaatatgggaactccaatgatgccagataatggagcagtggaagaaccggaactatgatttgtgccttccttattgcctccgaaatatttttaactgcagaggaaagcctgtattattttggagaaaggcgaacagataaaacgcacagcagtaaatttcagggactagaaactccttctcagtagagacaaggtttcaccctgttggcgaggctggtctcaaactcctgacgcccagtgatctgcccacctcggcctcccaaagtgctgggattacaggcgggagccaccatgatggccaacttttgaattctgaaccagttgattgagtaccagagctcttcaataccttgaagaaagattcaggggagagccgttgtgaacagcttgccccagggaaaggacaaggctgagagaattccagggcttccttgagaaaacagaattgaggaaatgcaaagtgaagaattctagcatcaggaacaagagaagaatgatggaaaacctgctactgagatatgttggatattttgcacaagtgaaacatctctacaactggaatctccctccaagacggatactctttataataagattcattatttattcgattcgtggtgttggaacaggcgatgtatgtgatctaaaattccaaatagtaatggagaaaaaggttgtcttttccagtacttcattaggaaattgttcaatactgcatgacattgaaacagctggtgtattaactaatgtatatgacagtccatctctgtacgatgatgtgaaagtgcagtttttctcttcgaatcttcctaaatactatgacaattgttcatttttcttctggttcaacacatcttttattcaaaataacaggctttatctaccaagaaatgaattggataatccacatcaacaaaaagcatggaaaatttatccaccagaatttgccgtggagatactttttggcgagaaatgacttccaatgacgtagctggatccgattaagtatagtttccccttccccttctgggaaagaattaatgttctttccaacccctgccatgtgcatgttcatatgtcctaagtcttccttgatgatgtatctatatttatatatgtttatatatgttcttcataaatctattaaatatatatagata

SEQ ID NO: 80460 - DNA, 1072 bp, Homo sapiens
tcctctcactgatcaagaatgagattggagggaaggagaatttaaaacaaaggcaggagaaaaggcaggtctggccacttagagaaaccattcccagccacagaggccagatccagcagccgggggaaaggtcactgcagatgaaacactaaaactaagttcattgccaatactctcccccaagtccctcaagtttctgaatgcctaacaggcctgggtgtgcgtaaggggaaacaaaccagccaaccccacaagaggtgcctcctcccagcctcagtgcaaacagcgtctgggcagtgcctctgtttcctatgccacagggaatctcccaggacaccacctggccagccaacccagactcacccaccccataacccctagtctctgaggcaggctgccagccacactgtcttacaaaagggaaagagctgcttggaggagatcgcatactcaggaaaacccacctggctccaagcacgggccatgtttctgtaaaaggccattctccacttggagggtttgggggtgggtggacagccttaactgaaaggcatctgaactctgtcctgaggactcagatcaagcagaggctacagaaaatgacttgggaagacagagctcagcttcactcctaccaggagaaaaattatgaccatcctcaccctgacaggcttgtcccttttacaaagccctctgatccccaaagtcacctccttggccttttacacttaagaacaaggattagagcagtgggcaagggaagtaccaggatggaagtccaggagccctgcgtcctggggcttggaaactgctgagggagaaggacatgttcgagtcatggcttcaaggcttattagtatatgaccttgaccaacagccatacctgtcctggacctcacttttgtcatctgtaagatgggaacatacagtattagactgaactatatgaaactgttgtttttgcaggtcataaacaattgaaaattggcaatttcatatgactcaacataatgcgcacctaatcagcttggaacctccctagctgagaaaggacctaacagacgaccccgtt

SEQ ID NO: 80461 - DNA, 746 bp, Homo sapiens
aacattgtaagaaactgcctgtttccaagtgtttgtaccatttttcattaccaccagtaatgtatcactgtttcatcctccacaacctcgacagagcttggtataatctgtctttttaatttttttaattctcacaggagtttagtaggatctcattgaaattttcatttacatttcccttataacgagtgatgctgagcatcatttcctgtgcttacatgatatttgtatgtcttctttagtggaatgtctattcaaatattttgcctgtttctttactggtgtgtgttttcttcttactaagattttaaacatattctggatacaagtcctttattaaatatataattttcaaacattttaccccggtcagcagcttacttgtctattttttcaaccatgtagttggaaagctaaagtttttaactttgaggaagtccaatttttcaatttctttgcttatagattgtggttttgttgtctcatctatgaaatcttcacctgacccattgtcaaaaagattttctcctgttttttttttttctgctagaagttttatagcatcaaattttatatttagatctcaggtccattttgaatagacttttgtatatagtgtgatatctgagtcacagtttatatttgtgcatgtcaatattcacttgtcccagcaccatttgttgaaacaataatcctttctccactgaatcaccattgcatctttgtcaaactcagttgtccatata

SEQ ID NO: 80462 - DNA, 1283 bp, Homo sapiens
tagtaatttagcaaaaacattactgttctaatgctgaagtgacttttgccagtgccatgtccaggtggtgaggtataagttacttgctcttagcatttggtctgatttttttgctttgtggacacctttgagagtatccacaaagcaatgtctcaggtgtggacacctgagagcatgttttagaaagctttgtaccctgtcttgtggcaggaaagaaagaacaggggttttacataaggaaataagtcctaggaaattagtcaacgcaaattgcatttgcgtttgtaccttaccacagtcttatattgttttttaaactctgccatgaaatttggagacatgactgtgaaattcctaacttactatcttacaaagccagtagctaatttgttgctctatgtatgatcctgttacaagtccagtttgcaattcatttgtttcctagaacacagaagggtaccagtaatacactaaatgttcaaggtgtgtagagaaataatatggaattagcagctatgactccaacagacaggattgtgtgagcagctgaaaggagcaaaaaagaactcagtgtaagagaaggcacatacatagttaagaatactaaagtatttttaaaaatcaaggaagaaataaatgttacacaatttgcattggaataaatagatctatttagtcctacaaatcaggagtggtgtagagacatccaaatttaaagaaaaaaaaacacaaaacagaatgttaaaaaatgtatgcagatttatggatattatcaatgagaagacatagcatgtaacttctcctatatctctactgtccagcatgtattgttccaaatatgactccctaaaatatatacactttgcagaagctctaggccctcacctcaaaccttgccattggttgccgtatttcaaggtcaatatagtttccctcactttacacaatcattattcttcaatagtggaccatatccttcaccaggtatcctatttctgttatctagaggttagcagaaaatgaaatgaaggaatttccctaagcagttgggaagaacaaattgtatgcatgtaggcaaagattttgaagatacatttgcaagagatatttgtttaaccaaaatatttggaaagtaacaaataaagacatttaaattttctaaaaatggacttgctcttctaggaaaagaatacccctggggcaaaaatataactctagctgtatttcttcttgtcactcttgattcaacttgattataaatacacctgtcactaccagaacca

SEQ ID NO: 80463 - DNA, 469 bp, Homo sapiens
  misc_feature (8)..(8): n is a, c, g, or t
  misc_feature (41)..(41): n is a, c, g, or t
  misc_feature (49)..(49): n is a, c, g, or t
  misc_feature (67)..(67): n is a, c, g, or t
ccccgggngtccatttggtaaatgtgttgccctggaacccncccccctncctagcctaacccctcanaccttacgagacatgtcctgagggtgaaaatgccagtaaaataaaaatcctgtttttttaaagaagagatcccacaatgtcctggtgtttccctaatgtaaacaaaatgatcagatttgatgtgttagaactccctaagcattttgaaggaatttccctaagcagttgggaagaacaaattgtatgcatgtaggcaaagattttgaagatacatttgcaagagatatttgtttaaccaaaatatttggaaagtaacaaataaagacatttaaattttctaaaaatggacttgctcttctaggaaaagaatacccctggggcaaaaatataactctagctgtatttcttcttgtcactcttgattcaacttgattataaatacacctgtcactaccagaacca

SEQ ID NO: 80464 - DNA, 697 bp, Homo sapiens
aatctagcaggatcccctattggtgcacgagaggaaaaagtgaacagtacattggatctgaagtacaaccacccacaaccataccataaagtaccaagggtagagaagtttctcctcctcctcaaaagtttgtgtggttggctttcttctagaatgttggatttccagaagcccactcaaatgtcccactttggctacaggcattagaatttcagaaccagcaaaatccaaaggggcaagagtcccaagtagaggcaatgtattcataaaccaggcactagccattattcatggaagcaaagggaatagttttttgatcgtccaacctatattggttgaatgagtaggctgaggacgatcatttatcatctagactcacatttgtctccttcctgatagcagttaagaaaaaattctaaccacacaatttgtatattgtttttctccgtattatgttaagcaaatgttcactgcagtaaaatgttttggaaattagctttgtcttatttccagtttagttcagagaattaattggaaacctgatttcttttacacataaacctgacaaaaaatgtagcttagagcaaagggtgaatgtttgcttaactcctgcttacttctcaagtacatgaaaactttaatagaatatgccagtattcactgagtttttaaaaatattaccatgtgtaaacatata

SEQ ID NO: 80465 - DNA, 1926 bp, Homo sapiens
tagtaatttagcaaaaacattactgttctaatgctgaagtgacttttgccagtgccatgtccaggtggtgaggtataagttacttgctcttagcatttggtctgatttttttgctttgtggacacctttgagagtatccacaaagcaatgtctcaggtgtggacacctgagagcatgttttagaaagctttgtaccctgtcttgtggcaggaaagaaagaacaggggttttacataaggaaataagtcctaggaaattagtcaacgcaaattgcatttgcgtttgtaccttaccacagtcttatattgttttttaaactctgccatgaaatttggagacatgactgtgaaattcctaacttactatcttacaaagccagtagctaatttgttgctctatgtatgatcctgttacaagtccagtttgcaattcatttgtttcctagaacacagaagggtaccagtaatacactaaatgttcaaggtgtgtagagaaataatatggaattagcagctatgactccaacagacaggattgtgtgagcagctgaaaggagcaaaaaagaactcagtgtaagagaaggcacatacatagttaagaatactaaagtatttttaaaaatcaaggaagaaataaatgttacacaatttgcattggaataaatagatctatttagtcctacaaatcaggagtggtgtagagacatccaaatttaaagaaaaaaaaacacaaaacagaatgttaaaaaatgtatgcagatttatggatattatcaatgagaagacatagcatgtaacttctcctatatctctactgtccagcatgtattgttccaaatatgactccctaaaatatatacactttgcagaagctctaggccctcacctcaaaccttgccattggttgccgtatttcaaggtcaatatagtttccctcactttacacaatcattattcttcaatagtggaccatatccttcaccaggtatcctatttctgttatctagaggttagcagaaaatgaaatgaaggaatttccctaagcagttgggaagaacaaattgtatgcatgtaggcaaagattttgaagatacatttgcaagagatatttgtttaaccaaaatatttggaaagtaacaaataaagacatttaaattttctaaaaatggacttgctcttctaggaaaagaatacccctggggcaaaaatataactctagctgtatttcttcttgtcactcttgattcaacttgattataaatacacctgtcactaccagaaccaaaaaaaaaaagaaaaaaatcccaagcacaaagcttattttatttgaaaaaaataaaaaagaaacttcaacactatgggacactggctcttttagcatgaaatgacttgagcttttgtagtgatgatacacacacatacacactcatcagtaaaacgatggtttcataaataacacaattgatgcaaatcataaaaatcaattacaattatgatttcatgacaaaatatatttaattaagtttgttatgaaaaaaatagagatatgaatcactaacaaaattcctccattttcagtggctattcatcatttatcatctagactcacatttgtctccttcctgatagcagttaagaaaaaattctaaccacacaatttgtatattgtttttctccgtattatgttaagcaaatgttcactgcagtaaaatgttttggaaattagctttgtcttatttccagtttagttcagagaattaattggaaacctgatttcttttacacataaacctgacaaaaaatgtagcttagagcaaagggtgaatgtttgcttaactcctgcttacttctcaagtacatgaaaactttaatagaatatgccagtattcactgagtttttaaaaatattaccatgtgtaaacatata

SEQ ID NO: 80466 - DNA, 1299 bp, Homo sapiens
  misc_feature (462)..(462): n is a, c, g, or t
gctttagggtagaagaaaaggttttatttttctttctcacattggaaaaaatgaaaactttcggacccatgaaattttattacattttgccaaaaacagaaccaataacataagtattcaaagttatgtaaagataattatttaatattaacattatgatggtgagagggaccacggagcaaggggctgccttgcaggcctgccttccagctttgctacagggaccagaagcgggagctgagcgcaggggaggcaggcggaggccatgggcagcgaggcgggtgcgccaaagggcgccagttccggagctgctgggcctgggctgcaggagggcggagctggggccgcaaggctggtgccggccgacaaacgacgcggcgcgggcgagtgggcggaggcggctgcggagaaggctgggctgccgcgggacgcggtgaagatagcctgcggagtgtccgggcngaacacggttgcagcactcccagtagaccaggagctccgggaggcagggccggccccacgtcctctgcgcaccaccctgagttggatcctctgtgcgccacccctgagttggatccagggctagctgctgttgacctccccactcccacgctgccctcctgcctgcagccatgacgcccctgctcaccctgatcctggtggtcctcatgggcttacctctggcccaggccttggactgccacgtgtgtgcctacaacggagacaactgcttcaaccccatgcgctgcccggctatggttgcctactgcatgaccacgcgcacctctgcagccgaagccatatggtgtcaccagtgcacgggcttcggagggtgctcccatggatccagatgcctgagggactccacccactgtgtcaccactgccacccgggtcctcagcaacaccgaggatttgcctctggtcaccaagatgtgccacataggctgccccgatatccccagcctgggcctgggcccctacgtatccatcgcttgctgccagaccagcctctgcaaccatgactgacggctgccctcctccaggcccccggacgctcagcccccacagcccccacagcctggcgccagggctcacggccgcccctccctcgagactggccagcccacctctcccggcctctgcagccaccgtccagcaccgcttgtcctagggaagtcctgcgtggagtcttgcctcaatctgctgccgtccaagcctggggcccatcgtgcctgccgccccttcaggtcccgacctccccacaataaaatgtgattggatcgtgtggtacaagcta

SEQ ID NO: 80467 - DNA, 688 bp, Homo sapiens
gagggggttgggaagctcgaagccgcaggcctgactctggcctttggcatcctggggttggcctgggcaaatgtgtcgtgagagacggatttgttgttctcgggaaggcggttgcagcactcccagtagaccaggagctccgggaggcagggccggccccacgtcctctgcgcaccaccctgagttggatcctctgtgcgccacccctgagttggatccagggctagctgctgttgacctccccactcccacgctgccctcctgcctgcagccatgacgcccctgctcaccctgatcctggtggtcctcatgggcttacctctggcccaggccttggactgccacgtgtgtgcctacaacggagacaactgcttcaaccccatgcgctgcccggctatggttgcctactgcatgaccacgcgcacctactacacccccaccaggatgaaggtcagtaagtcctgcgtgccccgctgcttcgagactgtgtatgatggctactccaagcacgcgtccaccacctcctgctgccagtacgacctctgcaacggcaccggccttgccaccccggacaccctggccctggcccccatcctcctggccaccctctggggtctcctctaaagcccccgaggcagacccactcaagaacaaagctctcgagacacactgctacaccctcgcaccc

SEQ ID NO: 80468 - DNA, 344 bp, Homo sapiens
  misc_feature (318)..(318): n is a, c, g, or t
  misc_feature (320)..(320): n is a, c, g, or t
agtcctgccatggccagccatccggcccccagggccctgcttgggatggggctgcagaccacctcccatgggacctctgcaccaaccatcccctggggttgcagcactcccagtagaccaggagctccgggaggcagggccggccccacgtcctctgcgcaccaccctgagttggatcctctgtgcgccacccctgagttggatccagggctagctgctgttgacctccccactcccacgctgccctcctgcctgcagccatgacgcccctgctcaccctgatcctggtggtcctcatgggcttacctctggcccagncnttggactcacgtgtggccggcacc

SEQ ID NO: 80469 - DNA, 612 bp, Homo sapiens
aggtggggccggggcaggcctggggcggggcctgcggtgagctcgcgctgggcgggctgttccgggggcgggactgggctgggcctgcggtgagcatcaggcgatgcggcacgggtgctgcgggacacacagacacgcctacgattagactcaggcaggcacctaccggcgagcggccgcgggtgactcccaggcgcggcggtacctcacggtggtgaaggtcacagggttgcagcactcccagtagaccaggagctccgggaggcagggccggccccacgtcctctgcgcaccaccctgagttggatcctctgtgcgccacccctgagttggatccagggctagctgctgttgacctccccactcccacgctgccctcctgcctgcagccatgacgcccctgctcaccctgatcctggtggtcctcatgggcttacctctgggtaagatggacaaaggacagagggatgggcagacccactttgagggcagatgggctgacagtagggaaggaggctagaattcccagcgacaacccctccttctagccccctgccccggggaaggtgacgggctgggggcctgatgggctggaggaggggcctctcatgt

SEQ ID NO: 80470 - DNA, 426 bp, Homo sapiens
ctcggtctacctgttctcacttatcctcttgccaaactcgtgtgatatgtgtgcgtcattcacctattttccatcttcgccttctcacatagctcaatgagcgctgtgggagaaagccccgaagcagcccttggcatggtggtcactgcatgaccacgcgcacctactacacccccaccaggatgaaggtcagtaagtcctgcgtgccccgctgcttcgagactgtgtatgatggctactccaagcacgcgtccaccacctcctgctgccagtacgacctctgcaacggcaccggccttgccaccccggacaccctggccctggcccccatcctcctggccaccctctggggtctcctctaaagcccccgaggcagacccactcaagaacaaagctctcgagacacactgctacaccctcgcaccc

SEQ ID NO: 80471 - DNA, 478 bp, Homo sapiens
gagggggttgggaagctcgaagccgcaggcctgactctggcctttggcatcctggggttggcctgggcaaatgtgtcgtgagagacggatttgttgttctcgggaaggcgtaagtttaatttagtcctccaggacggagaccgagggccgagtatcccggcaggggtaggagagccgtaatccaacccccacctccccactgtaaacctctttccagagagggcattcccgttccaaacaccagacccagccggggaaatgcttcttcttgtctggcccaagtgccctcctgggaggggctcaaaatgcattccccccaagctgggcacagctcatccctgctggggagcttctgcagtggccgaggactcagacaaccctaaccagggctctggaggtcttctggaagaaggaaccccaagtagggacaccccaggagcagagaggaggggaacagcgagaagagacccagcttttg

SEQ ID NO: 80472 - DNA, 400 bp, Homo sapiens
cactgggctcctgctggccgccgtcctgagcctgcagctggctgcagccgaagccatatggtgtcaccagtgcacgggcttcggagggtgctcccatggatccagatgcctgagggactccacccactgtgtcaccactgccacccgcccccggacgctcagcccccacagcccccacagcctggcgccagggctcacggccgcccctccctcgagactggccagcccacctctcccggcctctgcagccaccgtccagcaccgcttgtcctagggaagtcctgcgtggagtcttgcctcaatctgctgccgtccaagcctggggcccatcgtgcctgccgccccttcaggtcccgacctccccacaataaaatgtgattggatcgtgtggtacaagcta

SEQ ID NO: 80473 - DNA, 1047 bp, Homo sapiens
  misc_feature (462)..(462): n is a, c, g, or t
gctttagggtagaagaaaaggttttatttttctttctcacattggaaaaaatgaaaactttcggacccatgaaattttattacattttgccaaaaacagaaccaataacataagtattcaaagttatgtaaagataattatttaatattaacattatgatggtgagagggaccacggagcaaggggctgccttgcaggcctgccttccagctttgctacagggaccagaagcgggagctgagcgcaggggaggcaggcggaggccatgggcagcgaggcgggtgcgccaaagggcgccagttccggagctgctgggcctgggctgcaggagggcggagctggggccgcaaggctggtgccggccgacaaacgacgcggcgcgggcgagtgggcggaggcggctgcggagaaggctgggctgccgcgggacgcggtgaagatagcctgcggagtgtccgggcngaacacggttgcagcactcccagtagaccaggagctccgggaggcagggccggccccacgtcctctgcgcaccaccctgagttggatcctctgtgcgccacccctgagttggatccagggctagctgctgttgacctccccactcccacgctgccctcctgcctgcagccatgacgcccctgctcaccctgatcctggtggtcctcatgggcttacctctggcccaggccttggactgccacgtgtgtgcctacaacggagacaactgcttcaaccccatgcgctgcccggctatggttgcctactgcatgaccacgcgcacctactacacccccaccaggatgaaggtcagtaagtcctgcgtgccccgctgcttcgagactgtgtatgatggctactccaagcacgcgtccaccacctcctgctgccagtacgacctctgcaacggcaccggccttgccaccccggacaccctggccctggcccccatcctcctggccaccctctggggtctcctctaaagcccccgaggcagacccactcaagaacaaagctctcgagacacactgctacaccctcgcaccc

SEQ ID NO: 80474 - DNA, 806 bp, Homo sapiens
aggtggggccggggcaggcctggggcggggcctgcggtgagctcgcgctgggcgggctgttccgggggcgggactgggctgggcctgcggtgagcatcaggcgatgcggcacgggtgctgcgggacacacagacacgcctacgattagactcaggcaggcacctaccggcgagcggccgcgggtgactcccaggcgcggcggtacctcacggtggtgaaggtcacagggttgcagcactcccagtagaccaggagctccgggaggcagggccggccccacgtcctctgcgcaccaccctgagttggatcctctgtgcgccacccctgagttggatccagggctagctgctgttgacctccccactcccacgctgccctcctgcctgcagccatgacgcccctgctcaccctgatcctggtggtcctcatgggcttacctctggcccaggccttggactgccacgtgtgtgcctacaacggagacaactgcttcaaccccatgcgctgcccggctatggttgcctactgcatgaccacgcgcacctactacacccccaccaggatgaaggtcagtaagtcctgcgtgccccgctgcttcgagactgtgtatgatggctactccaagcacgcgtccaccacctcctgctgccagtacgacctctgcaacggcaccggccttgccaccccggacaccctggccctggcccccatcctcctggccaccctctggggtctcctctaaagcccccgaggcagacccactcaagaacaaagctctcgagacacactgctacaccctcgcaccc

SEQ ID NO: 80475 - DNA, 554 bp, Homo sapiens
cactgggctcctgctggccgccgtcctgagcctgcagctggctgcagccgaagccatatggtgtcaccagtgcacgggcttcggagggtgctcccatggatccagatgcctgagggactccacccactgtgtcaccactgccacccgggtcctcagcaacaccgaggatttgcctctggtcaccaagatgtgccacataggctgccccgatatccccagcctgggcctgggcccctacgtatccatcgcttgctgccagaccagcctctgcaaccatgactgacggctgccctcctccaggcccccggacgctcagcccccacagcccccacagcctggcgccagggctcacggccgcccctccctcgagactggccagcccacctctcccggcctctgcagccaccgtccagcaccgcttgtcctagggaagtcctgcgtggagtcttgcctcaatctgctgccgtccaagcctggggcccatcgtgcctgccgccccttcaggtcccgacctccccacaataaaatgtgattggatcgtgtggtacaagcta

SEQ ID NO: 80476 - DNA, 842 bp, Homo sapiens
aggtggggccggggcaggcctggggcggggcctgcggtgagctcgcgctgggcgggctgttccgggggcgggactgggctgggcctgcggtgagcatcaggcgatgcggcacgggtgctgcgggacacacagacacgcctacgattagactcaggcaggcacctaccggcgagcggccgcgggtgactcccaggcgcggcggtacctcacggtggtgaaggtcacagcccaggccttggactgccacgtgtgtgcctacaacggagacaactgcttcaaccccatgcgctgcccggctatggttgcctactgcatgaccacgcgcacctctgcagccgaagccatatggtgtcaccagtgcacgggcttcggagggtgctcccatggatccagatgcctgagggactccacccactgtgtcaccactgccacccgggtcctcagcaacaccgaggatttgcctctggtcaccaagatgtgccacataggctgccccgatatccccagcctgggcctgggcccctacgtatccatcgcttgctgccagaccagcctctgcaaccatgactgacggctgccctcctccaggcccccggacgctcagcccccacagcccccacagcctggcgccagggctcacggccgcccctccctcgagactggccagcccacctctcccggcctctgcagccaccgtccagcaccgcttgtcctagggaagtcctgcgtggagtcttgcctcaatctgctgccgtccaagcctggggcccatcgtgcctgccgccccttcaggtcccgacctccccacaataaaatgtgattggatcgtgtggtacaagcta

SEQ ID NO: 80477 - DNA, 360 bp, Homo sapiens
gggttaggtctgtcttcctgctactcacaagggaagacactgggagccacctggaaaagacagatgtggaacaaggagaggtgacccctgagagttctcacttcaccctggcgtgggtcatgacctgtgtcactctggcactctcaaggcatcaacacctaccccacacttgggaagagtcaaacgagctcccccaggcctgacctcatgaagactaatgaaactaatgaagacaaagtttcctggagtttatgtggccacacaaaagcacatccacagccaattatgtcattatgcaatagtcatgtttaataattggaaccattattgaataattaaacttcaccacatgttacagcc

SEQ ID NO: 80478 - DNA, 171 bp, Homo sapiens
ctttactacggtactcctcaaagagtgcaattatccccttgcagtttctacaaaaagagtgtttcaaacctgaactatcaaagaaaggttccacactgtgagttgaatgcagacatcacgaagaaggttctgagaatgcttctgtttagttctgtgcagtttatcccgttt

SEQ ID NO: 80479 - DNA, 354 bp, Homo sapiens
ggtggaactgagctgttgaactgagctgaactgggatcaggagaaggagaagtggggattgagcccctcacctccacacactcctctctgtgcctgaaattcctccattaagcagcatcgctgtcccctgtaaacacccacattaagccattattcatcttatggcttgagtaggcgttagtccctcagatcctttcctgctgaaagcaggatctgatagagagaagggaagagagatggatggatctggggacggcaggctggtccaagagtggggaggaaagatgtctctcggactctgggaaagaaatattttctgggggaatgtggaggcaccagaggcaagctcagagg

SEQ ID NO: 80480 - DNA, 237 bp, Homo sapiens
  misc_feature (99)..(99): n is a, c, g, or t
gacgagatccagttcctgcgaactgatgatgaagtggttctgcagtgcaccgcaaccatccacaaagaacaacagaagctatgcttggcagcagaaggntttggcaacagactttgtttcttggagtccacttccaattccaagaatgtgcccccagacctctccatctgcacctttgtgctggagcagtccctctctgtccgggcgctgcaggagatgctggctaacaccgtggaa

SEQ ID NO: 80481 - DNA, 394 bp, Homo sapiens
tatcagaaatgaccagattgtgtggggttgtgagaactgactttgatttgccaaacttcacgctgatgtatgtatacaaaatgacagtttatttatttattatggaatagagacattttcagtgaccagaatactcagacctgtatctactgtcttctagaatgacagtatctggagggttgaaataatcagaaaatggaatttttaagggatggttcaactagtctgtggaaaaacctaataaactaccagtgtcacacaatagaggacatttctgtgatgaccagatgatttatctattcattttcacttttttttttttttttttaaagatggagtttcactctgtcacccaggctggagtgcagtgacacgatctcagctcactgcaacc

SEQ ID NO: 80482 - DNA, 566 bp, Homo sapiens
cgggcaggtggctgagggtggcccgtgttcgtctttcccagctttgtggaggtgtagctgggcctgtgggcacacggacgccctccctattgcgctgatgggcccggggacggtccctgtgtccctggagctgacagagccgccatgcgcggccgaggactctgcggattcaccctgttccaggctgcgccgactccgctcgcttcacgtgtgctgtttcctcacaagtcgggccggacgcggatacacccgcctccgtaggcctgagcgagcctgagcccctgggcgcgccgggtccccgccgaggaaacgtcccatgtggagacacgaggctgctgtggacgcgcctcctccctcttccccggcgcggctcccccgcactggcgctgtggactcggtgcggctcctccgcagcgacaaaatggagtcatcaggccacgctgctgcgatggaacccgaggcctgcggggccggcagagcccgcggcgtgttggccctgctcctcagaggggccggtgaggggcctgtctccccggggtgggccggagccaggatgaccgagcatc

SEQ ID NO: 80483 - DNA, 422 bp, Homo sapiens
taccgttatgtattttactagagatgggtctcaccacatgggccaggctgtctcaaaaaactcctgacctcaggtgatccacccaccactgatctcggcctcccaaagtgctgggattacaggtgttagccaccgcgcccggccttgctataccttttaagctcagtgaactcttgaattctctagcctttaacatcgttcgttaaaaagaattcttattttgtttatataccgctatcatttctagcaacataatacacagatttgaaatgtaaatgaaatgtttgttgcattgcaaatacaaacctataatcacatgactcttctttcatatcagttttccttaagttatttcagagaacacatagtctaatagatcattttgttgactttctgggttctccggggccaggctttgtcaa

SEQ ID NO: 80484 - DNA, 293 bp, Homo sapiens
tggggccagcccggctgcaggagcccctccttcactgcagctgtgctgttcctgtgcacccccgggggcctggcctgagacagataagatgacccattttggtaaaagaggcgtgtggaaaacatcagaccacccccttctctctccagtctaaggtagcacgttttacagtttcatattacaagtcaccttgcacaaaatccttacctaagcacgcatctgtgcacacatctgtgcttagctccctgctgggagttcgggatctcctgttaaatacggatgcacagtgtatc

SEQ ID NO: 80485 - DNA, 460 bp, Homo sapiens
tcagacaagatgcctatgtgaaaagttaatatcagaggcatttgggctccttgtactttcctgtagtagtcacgggcccatagagtcttagatgtggaagggccctcaggaatcgtctaggcctccccgtccccttacagggaaacctctgtgctattgctggccagatactctacagacctctcctggaatacagttacctgttccttgaggctctttcaatctactgtctattgtttcaccagctttaattgttggagaaaaatcctttctcatactgagctgaaatctgccacatgtaacttccatactttggtccttgttctgccctttgaagaaatattaactgaatctagtcccacatggcaccccttcaatacttgaaagtagtgtggtcctagttaagtcttctgtctcctttccaaccccccaaatcctttcttgcttcttactggaaata

SEQ ID NO: 80486 - DNA, 256 bp, Homo sapiens
taatatgtatcacaaaaattagtataaagaatcaatatcctttgcctatgttatcagctctgacttttccttttaatgccattttgaagcaatcctgatttctaattataagacccatgaagctctgtgttgcaatataaatttgtggaatcatctagcatgctctcaataatggacaacatgagtcaagttaaaaattataccctaaacagtaatggaataaaaataaagaataggaatggtaaaatatctaaat

SEQ ID NO: 80487 - DNA, 240 bp, Homo sapiens
ggtttagagcacagcctccctctccagggtcaggttcacgggagctgttgggggctccttccctcgcagcagtgaccactccaaggaccacggcctggacatgagcggcagcggtgagctgggagctgctggcctggagtctagatgaatataggcagcagcaagaggccacagtcacgacaaacctacacactctcaccactgtcatctcatattgtcctaaaatttccagccagtgca

SEQ ID NO: 80488 - DNA, 323 bp, Homo sapiens
gggagacgagaactcttgagatccggggtcacctgtgagtcgctggacccaagggggaagcgtcttgattcctggaggaaatctccgaaggtgatgtgtaaccctgtgtgtcgcctgcacttcggccgcaactgcctttggttcagtcccctgttcctgtaggaggcggggatcatgtaacagtggagcacatcgctcccggcttggacgcctttgacctttaagtgttcctgatttagttggctttgggtctaccaagaattctagtcagttaactagcttttaagccaggttctgaatttgtaggcatgacactccagtag

SEQ ID NO: 80489 - DNA, 881 bp, Homo sapiens
gtcccgtcagtattgtggaagctttgttcttttgctttttgcagtaaatgttggtgctggtcactctttgggtctgtgctgcctttatgagctgtaacactcaccacaaaggtctgcagcttcactcctgaagtcagcgagagcatgaagccaccgggaggaaagaacaactctggacgcgccaactttatgaactgtaacactcaacgcaaaggtctgcagcttcactcctgacgtctgtaagaccatgaacccaccagaaggaagcaagtctggagatgtccgaacatcagaaggaacaaactccagataaaccgtctctaagaactgtaacactcactgccagggtccgcggcttcattcttgaagtgagcaagaccaagagctcaccaattctggacacagcaccattattcacaacagccaaaaagtggaaacaattcaaatgtccatcaactgatgaatggataaactgtggtatatccatagaatagaatattattaggtaataaaaaggacttaagtactaacataagctttaatgtggatatcccttgaaaatattgtaaatgtaagaagccagaaacaaaaagccagatgattccgttcatatgaagtgtccagcatagacaaatctgtaaagatagaaactagattcatggtttcttagggccgggagagtaggtgggaaggtggggcaatgggaaatggctattaatgggtataaggtttcttttgagggtgatgcaaatgttgtaagattgattgtggtcattgttgtatagcatatgattatactaaaactattgacttgtatactttaaataggtggctgtgtggtatgttaattatatctcaataaaattaaaaataaaaccagc

SEQ ID NO: 80490 - DNA, 304 bp, Homo sapiens
attagccaggcatagtgatgtggccctgtagtcctagctagccaggaggctgaggtgggaggatcacctgagctggagaggttgaggctgcagtgagctgtgatcatgccattgcactccagcttgggtgacagagtgagaccctgcctcaaatttaaaaaaaagatcagcagagatatgtaacagatttcacaggaaggattcagcaagtcttctgtgagtaggtgacatttgagccaagttttggaggatgagtacagttggctttctgtatgcatgggttccacaccttggattcaaccat

SEQ ID NO: 80491 - DNA, 724 bp, Homo sapiens
ggcattcattcctgcaattttttttttttgagacggagttttgctctttttgtccaggctggagtgcaatggcggggatcttggctcactgcaacctccgcctcccgggttcaagccattctcctatctcagcctcccaagtagctgggattacaggcatgcgccaccatggccagctaattttttgtatttttagtagagacggagtttcaccatattggtcagctggtcttgaactccagacctcgggtgattcacccacctcggcctcccaaagtgctgggattacaggcatgagccactgtgcctggcctgcaattttttttcatgaccacaaagttacctcttcctgcttgaccaagaaacagcacatcagcagtttatattgtgggaacaaggaatattgggcaaaaagtgagtggttagcacgtgcaagcaagcatcggcctgatcagaattttttttctttttttttttctttttgacaaggtctcattctgtcacccaggctggagtgtgaaggggtgggttgcccctccacacctgtgggtttttctcgttaggtggaacgagagacttggaaaagaaagagacacagagacaaagtatagagaaagaaaaaagggggcccatgggaccggcgttcagcacacggaggatccccccagcctctgagttcccttagtatttattgatcattattgggtgtttctcggagaggggg

SEQ ID NO: 80492 - DNA, 346 bp, Homo sapiens
caggcaagtttcttccaggatgagaaatcagtggaaagtgagggccagccaacagccaccaccaaccacccaacacgcgagcgagaccatcttaaaagagccccagccaagctgaccatgggtctgaccccaaactgaagaaatgcccagcccagccaaacccaaattgctaacttgtattataagcaagtacaatggtccttaccttaagccactaagttttgggatgctttgttacacagctatagatagctgatacagggaatgtcagaatccatgatgagagaaccgagcctttcagtctgtcagaggcaccctcgctggcaaaacttcaaaagaggcacct

SEQ ID NO: 80493 - DNA, 331 bp, Homo sapiens
ggaaaaccagagacctttgttcacttgtttatctgctgaccttccctccactattgtcctatgaccctgccaaatccccctctgtgagaaacacccaagaatgatcaataaaaaaaaataaaaaaaaagaaacagggaaatttacataaaaatgtttcataccatgatacaagtaaattctaaatttaaaactttttcaacaaagtaagtaggcaaaaggtttgtaaactacacttactattcaataaagccatcaaaaagtcactaaatggcaacaactttattatttatttataataactagtagagaggcagcatggttcagtttact

SEQ ID NO: 80494 - DNA, 523 bp, Homo sapiens
tattcagcaccatgtgaatctgtctacccatctcactaatctatatgtagcctaccactgtaatatttaaccacctgaaaatgcaggcatagtggtttcagaataagaaacacacaaccccatgagaaacacccttaccacctgtttatgtataccaactgcttatgtataaatcctttagcctttagacagaatctgcacttattatgcaagttgcttaggaaggcttatttttccccttccttcagtggattatttcatagatttgtataaagtattttctctgcatttcttcctggactgttcctatctactaaataagttattttgttaatttacatacttttagcttcactctttgtgttataaagttttctgggagttgaaaaactgtaccttttatccacgttacagtagcatacataataatatacaaagagaaattttctatctttacagatttgtctttcctttttgctgagacccgggtaaccaataaactctttactgtctttatacttat

SEQ ID NO: 80495 - DNA, 696 bp, Homo sapiens
gcagccctcagatgggaaaggaggggcttggggctctgagcttccctctgaggcaggctgtccctcagggtgaccagactgccaggcagccccggttgaggaagggtgtcttctcgtccgtcctccacgaagagtcctggggctgcctctgattcgccacgtgctcgtccccaaaccagtcgctggctgggagggggaggtgaacatgctgactggccaggctaggagttggagctggctcagcccccagggtcagggctggaggaccccccaggaccaggagctggaggggcgggagaccagggagcgagggtcagggcgggaggaccccccaggaccaggagctggaggggcgggagaccagggagtgagggtcagggcgggaggaccccccaggaccaggagctggaggggcgggagaccagggagcgagggtcaggtcgggaggaccccccaggaccaggagctggaggggcgggagaccagcgagtgagggtcagggcgggaggaccccccaggaccaggagctggaggggccggagaccagggagtgagggtcagggcgggaggacccctcaggaccaggagctggaggggcgggagaccagggagtgagggtcagggcgggagagacccccaggaccaggagctggaggggcgggagaccagcgagtgagggtcaggacgggaggaccc

SEQ ID NO: 80496 - DNA, 374 bp, Homo sapiens
aaacgaggagaggcgcctgccactctagcaaagagaatttccagctctgcgtctccagggagtaagaaaagagaaatggaaaatagaaaacaaagctggctgcttcaacagtaactcagtgctctccataacagcaatcccatgcatggtctccagaggtacatctcagttcccttttcaatacccaaagcaattttcctgagagattggaaaatcaggaggaggcaagccgatgacattttgattgcaggccccactcggagaggcattgtggaactttctggttaacaaagttaaaaccaaaacaaagtaaatgacgaatccaccacctcaaaaaaaaaaaagtcgacgcggccgcgaatttagtagtagta

SEQ ID NO: 80497 - DNA, 788 bp, Homo sapiens
aaacgaggagaggcgcctgccactctagcaaagagaatttccagctctgcgtctccagggagtaagaaaagagaaatggaaaatagaaaacaaagctggctgcttcaacagtaactcagtgctctccataacagcaatcccatgcatggtctccagaggtacatctcagttcccttttcaatacccaaagcaattttcctgagagattggaaaatcaggaggaggcaagccgatgacattttgattgcaggccccactcggagaggcattgtggaactttctggttaacaaagttaaaaccaaaacaaagtaaatgacgaatccaccacctcaatctgcattgtattttttgtttttaaagaaaatggtaaaacttttgctgctgcttttagtgactgagattttcaagagtggattgaagaaattattatcagtctgtttggcagctaagaaacctgctttgagatgggtagttgcttattaataatactgctttccacttcagcctcatctgtaaggcactgaactagctgctactgggtcttcaacctaccttcagacttctactgcatgaagtctttccacatctactgtgagatggatcacttcttctccgttcccagcactttttgggtatctctcctatgtcataggagagacattacatctatgtaatagatgtaatgatgttgtacaaggctgagcaacctcagccttgctctaaaattatttacatcatagtttaccattctttgagggtggcactttgcatttcatagaataattga

SEQ ID NO: 80498 - DNA, 358 bp, Homo sapiens
aaacgaggagaggcgcctgccactctagcaaagagaatttccagctctgcgtctccagggagtaagaaaagagaaatggaaaatagaaaacaaagctggctgcttcaacagtaactcagtgctctccataacagcaatcccatgcatggtctccagaggtacatctcagttcccttttcaatacccaaagctccacattttctgtactggctacactctcagacagtctctcctctcctggaagcaggatgactgcagcatctccagcataaattgttcttggttcaagtttaactgcagaagaaaaaagcaccacttcctgaaagtcccaaataaaccctggaattcattttgttag

SEQ ID NO: 80499 - DNA, 875 bp, Homo sapiens
cttgtccctcagcagaaaattgagtaaaacctcttcattgccataaaatactaatatattaccaaggtttcctgttcacccccagagtacagaatgagacacactcaacaactaaaacctccctctaaactgcttaaagagtttattcctccatttttttttccttcggcattttctgtgaatatctgtatgagttaaatgcgtacttttctaacctttgttattttgaaagttattctgatattcctatccagttgtgcctcatttactagaaatttgctcacatggccaaatgatgtatccacagaacaatttgaaactagaccttttggaagcgaactcctacaaactgtcatcaatgttagcagaacttgagcaaagacctcaacccagccatccttgtagtaattccatcttcaggtggagggaaaaggagcatactcatagctatgtgaaaatatctcggccttttttaatgaagagattagagaatattgtgagcaaggcatcttctggtgggcagagcaatccaggttcttcaactccagcccctggtgcagcccagctcagcagcagactttgcaaggccttgtattcttttcaagccaggcaagatgatgagttgaatttggaaaagggtgacattgtgattatacacgagaaaaaagaaggaggatggtggtttggatctttgaatgggaaaaaaggccattttcctgccgcttatgtggaggagttaccttcaaatgctggcaacacagctacaaaggcataaaacaagactctgaacatactaccttcacactcggtaatcaacaatacagtgtggttcaaataagaataaagtgctcttacctttacatgtttttcttttg

SEQ ID NO: 80500 - DNA, 848 bp, Homo sapiens
  misc_feature (683)..(685): n is a, c, g, or t
  misc_feature (689)..(689): n is a, c, g, or t
cttgtccctcagcagaaaattgagtaaaacctcttcattgccataaaatactaatatattaccaaggtttcctgttcacccccagagtacagaatgagacacactcaacaactaaaacctccctctaaactgcttaaagagtttattcctccatttttttttccttcggcattttctgtgaatatctgtatgagttaaatgcgtacttttctaacctttgttattttgaaagttattctgatattcctatccagttgtgcctcatttactagaaatttgctcacatggccaaatgatgtatccacagaacaatttgaaactagaccttttggaagcgaactcctacaaactgtcatcaatgttagcagaacttgagcaaagacctcaacccagccatccttgtagtaattccatcttcaggtggagggaaaaggagcatactcatagctatgtgaaaatatctcggccttttttaatgaagagattagagaatattgtgagcaaggcatcttctggtgggcagagcaatccaggttcttcaactccagcccctggtgcagcccagctcagcagcagactttgcaaggccttgtattcttttcaagccaggcaagatgatgagttgaatttggaaaaggggtgaccatggtgataatacacgagaaaaaaagaagaaggtgtgnnnttgnatcttgaatggaaaaagccatttctccctattgagatactctagctgcacacagtacaagcataacagatctgaatactatctggttgttcaatagataagtgctctacctttacgatgatgtctacctgcatgtcacacacttgcattcatgatatag

SEQ ID NO: 80501 - DNA, 475 bp, Homo sapiens
gacggaggtgatgagggcggacatcccagcctcctttctgttcttagtgagaaactgttcagtcttccgccatcggttgtggggttttcatagatatcctgtattaggttagggaagttccctctattcctaatttactgagtgatgttttttaaacaaatcaggaaccgacgttggatttttcaaatgctttttctgtactgttaaaagaaaaaccttagacaaattaaatttaacagagtttaattaagcaaagaaccactcgctaatggggcagcccccaaaccaaaataggttcagagaggctctggtgctgccgtgtggctgaagattggtggacagaaaagggaaaggaggcacagaaaacggaagcaaagcacagaaaccgccagaggggctgcagctccatgcttgccttatctgaacacggttggaatggccggcacccttgatgagcggaaacctggtgagtggc

SEQ ID NO: 80502 - DNA, 510 bp, Homo sapiens
ctggccaggtctctacctttaggagaagcaaagcaatggtttgtggtcagtataatcatagttgttcttctgagccattgttatttcttaccttgtggacatggtcaggcctgtgccccaacctctttttactgctgcctgctaggaaagcaccaagctcacgggtctacacccctggcaaggagacagtgcacctcgatgtttactttcagtactaaatacaccgacagggcggggtgtagttggctcatgtctgtaatcccagcactttgggaggctgaggtgggtggatcacctgaggtcaggagttcgataccagcttggccaacatggtaaaaccctgtctactaaaaatacaaaattagccgggcatggtggcgcacacctgtaatcccagctactcaggaagctgagacaggagaatcacttgaacccagggggcggaggttgtagtgagccgggactgtgccactgcactccagcctgggcaacaagagcgaaactctgtca

SEQ ID NO: 80503 - DNA, 342 bp, Homo sapiens
tgatatgttttgagattaaagcaacattaaaatcatatttataaatgttaacatatatgaaggagattgcctgagagattttgccagccttcctgaaaaaacgccaatggatgagctatccatcttagaaaattttaggttaacataaaatggtatgtaagcacaaatggaggcaacactttggttctatttctacaataaaagttttagaattacttttctatttttatatgctttataaaaaataaattacacaatagagggtaaaatagaatttaaacttatatgtatgcaaagcaccataaacaaaactaagtaaaaaacccagagcaaatgtcttta

SEQ ID NO: 80504 - DNA, 604 bp, Homo sapiens
ttttacggagacagggtttcaccatgttggccatgctgttttcaccatgttggccgggctgttttcgaactcctgacctcagatgatccatctgcctcccaaaatgctgggattacagacgtgagccacctcacccggccctactattggatttttaaagacagatatttaagaacattctttgctagaactgaggacaatttaaacttattccattcaagaaaacttagtgcagaatgcagactttccctttcaagtatatgtaaaagttaacttctttttttttccacctctggaagacaatgtacaatgtagtactcttcagatacactaatgagaccctttttatactttaacagggacgtaaacatttccttttgtaacaaaaataaattatgggtttcattttaaaaagcctatccccaagaaatgttttgagtgttaatctaagtaagatttcattattctcataagtaaaactttgagttcaaataaagttttgattttttttttgataattgaaggtatatgtaggggctcaacctaaatgccagggaattaaccctccataggaagtaatcatataattctaagtcagtatata

SEQ ID NO: 80505 - DNA, 266 bp, Homo sapiens
tgggtttctctgcaacatgtgtcaaattcctgtagtgcccaggacacagtagatgctcaatatgtggtggctctgattactattattggtgttgtttgtagaaaattgggctttcgggtccatcccactggtggcttgtgcctgggagtttttggcactcagagaaactgtgggagacctttagctgttgagaccagtcatggatgtgtgtgacacatagggtctatggtgacttctcagcagatgataaagtggtgctgggtctt

SEQ ID NO: 80506 - DNA, 287 bp, Homo sapiens
tttccctaatgatttatatgatcaatcagtcaaatatttattgaattctagttctgagtccagtattgtagtaggtacttaaggcttgcatatactatagtatactgtactttatacttcattcagttcattacagaatctgcatatgtttataaaagaattgtttctttccttagctttacaagtaagaaaactttttaggaaggtaagattctcttcctcttttgttttagcctcttgattctgggaaatgttttcttatccttgccttatttctctattttcct

SEQ ID NO: 80507 - DNA, 3139 bp, Homo sapiens
agcggcttcctcctcctcctcctcctcctcctccctcctcttccccaccttcctccactccctcccttcccctccccttctacctcctcctcggccagctcaggttgcagcttctctggggaactgctcacctttccggagcaggggaagctgccccgtgcccgggagggagcgggcgcaccgcggcccccaggacacgcgctgtgagtcccgcgggcggtgcgcctgggaggaagggggaggtcggaggagggggcaccgcggcgccgggtataaggagcaaaggacccggctgcccagtccctcatgatcatgaacaagatgaagaactttaagcgccgtttctccctgtcagtgccccgcactgagaccattgaagaatccttggctgaattcacggagcaattcaaccagctccacaaccggcggaatgagaacttgcagctcggtcctcttggcagagaccccccgcaggagtgcagcaccttctccccaacagacagcggggaggagccggggcagctctcccctggcgtgcagttccagcggcggcagaaccagcgccgcttctccatggaggacgtcagcaagaggctctctctgcccatggatatccgcctgccccaggaattcctacagaagctacagatggagagcccagatctgcccaagccgctcagccgcatgtcccgccgggcctccctgtcagacattggctttgggaaactggaaacatacgtgaaactggacaaactgggagagggcacctatgccacagtcttcaaagggcgcagcaaactgacggagaaccttgtggccctgaaagagatccggctggagcacgaggagggagcgccctgcactgccatccgagaggtgtctctgctgaagaacctgaagcacgccaatattgtgaccctgcatgacctcatccacacagatcggtccctcaccctggtgtttgagtacctggacagtgacctgaagcagtatctggaccactgtgggaacctcatgagcatgcacaacgtcaagattttcatgttccagctgctccggggcctcgcctactgtcaccaccgcaagatcctgcaccgggacctgaagccccagaacctgctcatcaacgagaggggggagctgaagctggccgactttggactggccagggccaagtcagtgcccacaaagacttactccaatgaggtggtgaccctgtggtacaggccccccgatgtgctgctgggatccacagagtactccacccccattgatatgtggggcgtgggctgcatccactacgagatggccacagggaggcccctcttcccgggctccacagtcaaggaggagctgcacctcatctttcgcctcctcgggacccccacagaagagacgtggcccggcgtgaccgccttctctgagttccgcacctacagcttcccctgctacctcccgcagccgctcatcaaccacgcgcccaggttggatacggatggcatccacctcctgagcagcctgctcctgtatgaatccaagagtcgcatgtcagcagaggctgccctgagtcactcctacttccggtctctgggagagcgtgtgcaccagcttgaagacactgcctccatcttctccctgaaggagatccagctccagaaggacccaggctaccgaggcttggccttccagcagccaggacgagggaagaacaggcggcagagcatcttctgagccacgcccaccttgctgtggccaagggacaagagatcacatggagcacaaattcgggtaggatggagcctgtgtggccctcggaggactgaagaacgagggctgacagccagcctggaagaccgcttggcagcccttctggccacggctgtttcttctttgtgcttcccgtgtgcctccccagtagccctcacctgcataccaacccctcctttacccacgttggggctggcataagctgcttccctgagaggacatgaggggggggcggtcctcgtaccctctcccaccctggtgtttgggcacctgcgtgggatgcacacggatgacagaatcaaggcgccaggatgggcactctgccctggatacaggctctaccctcctcccccaggacctgcctagtgccagtttggtagtccccctttctggccccttggagcccacacacgtttcatctttttcccctctgagagcaagaagagacatggcatgttctctgggaccctggaatcctaggtacccacatgtgtgccaaagcctaccccacctggcaggtgtcccacagcaacagaaggaatagtagtccccactctttccatcagccctaccctaccctcattccccgacaccctctggcttgaaccatggctgagcagtgccggcatacgctttgccggcatgcttggatgcccagctgtgtccagaggtggcctgggaccgccagttgcacgcctgccacctcagccagcccccgcccagctcatcagtctgaatggagttgccttaaattggcaggtggtaccgtactcactgcccttggagctgtgaccggctcctgcctgtccaccccttcccgaggtggctcctgcttaccttatcatcccagggctctgattagccaggcctggtcagggtcctggggacggcacccagatatgcagagtcaccctgacactggtgccaggctgacctcagctcccgaaggctcgcacagcctccccatccttccttcccagcccttgtggctctgtccacctgatcccaataccagcttcccccagcccctgccaccccagagggcggccacgacagggagaggtgtagatgccaccatctgagggagaggaacgtggaacaggagcaggctctgatgctgagaggcttgcctccgggggctggaagcctgggtggccggggcccctgaagaaggctcccctctgtatcccccaggtctcctcaacactgggctgatcctgaatggcacaggccaaggggaggccagcctcgcctttctacccaggccccctgccctgcccacctcaggcccccaccctccactcctccccacggtactgtgaacgtcgtgtgactcagtgcagagacagataatatatttaattcatgtaca

SEQ ID NO: 80508 - DNA, 363 bp, Homo sapiens
taatcagcgttactggttcgcatgtccccagagaggcagggaggggagctgacgcctgtccctcttagacttgcagctcggtcctcttggcagagaccccccgcaggagtgcagcaccttctccccaacagacagcggggaggagccggggcagctctcccctggcgtgcagttccagcggcggcagaaccagcgccgcttctccatggaggacgtcagcaagaggctctctctgcccatggatatccgcctgccccaggaattcctacagaagctacagatggagagcccagatctgcccaagccgctcagccgcatgtcccgccgggcctccctggtgagtcccaagagggtcagaggaca

SEQ ID NO: 80509 - DNA, 3057 bp, Homo sapiens
agcggcttcctcctcctcctcctcctcctcctccctcctcttccccaccttcctccactccctcccttcccctccccttctacctcctcctcggccagctcaggttgcagcttctctggggaactgctcacctttccggagcaggggaagctgccccgtgcccgggagggagcgggcgcaccgcggcccccaggacacgcgctgacccggctgcccagtccctcatgatcatgaacaagatgaagaactttaagcgccgtttctccctgtcagtgccccgcactgagaccattgaagaatccttggctgaattcacggagcaattcaaccagctccacaaccggcggaatgagaacttgcagctcggtcctcttggcagagaccccccgcaggagtgcagcaccttctccccaacagacagcggggaggagccggggcagctctcccctggcgtgcagttccagcggcggcagaaccagcgccgcttctccatggaggacgtcagcaagaggctctctctgcccatggatatccgcctgccccaggaattcctacagaagctacagatggagagcccagatctgcccaagccgctcagccgcatgtcccgccgggcctccctgtcagacattggctttgggaaactggaaacatacgtgaaactggacaaactgggagagggcacctatgccacagtcttcaaagggcgcagcaaactgacggagaaccttgtggccctgaaagagatccggctggagcacgaggagggagcgccctgcactgccatccgagaggtgtctctgctgaagaacctgaagcacgccaatattgtgaccctgcatgacctcatccacacagatcggtccctcaccctggtgtttgagtacctggacagtgacctgaagcagtatctggaccactgtgggaacctcatgagcatgcacaacgtcaagattttcatgttccagctgctccggggcctcgcctactgtcaccaccgcaagatcctgcaccgggacctgaagccccagaacctgctcatcaacgagaggggggagctgaagctggccgactttggactggccagggccaagtcagtgcccacaaagacttactccaatgaggtggtgaccctgtggtacaggccccccgatgtgctgctgggatccacagagtactccacccccattgatatgtggggcgtgggctgcatccactacgagatggccacagggaggcccctcttcccgggctccacagtcaaggaggagctgcacctcatctttcgcctcctcgggacccccacagaagagacgtggcccggcgtgaccgccttctctgagttccgcacctacagcttcccctgctacctcccgcagccgctcatcaaccacgcgcccaggttggatacggatggcatccacctcctgagcagcctgctcctgtatgaatccaagagtcgcatgtcagcagaggctgccctgagtcactcctacttccggtctctgggagagcgtgtgcaccagcttgaagacactgcctccatcttctccctgaaggagatccagctccagaaggacccaggctaccgaggcttggccttccagcagccaggacgagggaagaacaggcggcagagcatcttctgagccacgcccaccttgctgtggccaagggacaagagatcacatggagcacaaattcgggtaggatggagcctgtgtggccctcggaggactgaagaacgagggctgacagccagcctggaagaccgcttggcagcccttctggccacggctgtttcttctttgtgcttcccgtgtgcctccccagtagccctcacctgcataccaacccctcctttacccacgttggggctggcataagctgcttccctgagaggacatgaggggggggcggtcctcgtaccctctcccaccctggtgtttgggcacctgcgtgggatgcacacggatgacagaatcaaggcgccaggatgggcactctgccctggatacaggctctaccctcctcccccaggacctgcctagtgccagtttggtagtccccctttctggccccttggagcccacacacgtttcatctttttcccctctgagagcaagaagagacatggcatgttctctgggaccctggaatcctaggtacccacatgtgtgccaaagcctaccccacctggcaggtgtcccacagcaacagaaggaatagtagtccccactctttccatcagccctaccctaccctcattccccgacaccctctggcttgaaccatggctgagcagtgccggcatacgctttgccggcatgcttggatgcccagctgtgtccagaggtggcctgggaccgccagttgcacgcctgccacctcagccagcccccgcccagctcatcagtctgaatggagttgccttaaattggcaggtggtaccgtactcactgcccttggagctgtgaccggctcctgcctgtccaccccttcccgaggtggctcctgcttaccttatcatcccagggctctgattagccaggcctggtcagggtcctggggacggcacccagatatgcagagtcaccctgacactggtgccaggctgacctcagctcccgaaggctcgcacagcctccccatccttccttcccagcccttgtggctctgtccacctgatcccaataccagcttcccccagcccctgccaccccagagggcggccacgacagggagaggtgtagatgccaccatctgagggagaggaacgtggaacaggagcaggctctgatgctgagaggcttgcctccgggggctggaagcctgggtggccggggcccctgaagaaggctcccctctgtatcccccaggtctcctcaacactgggctgatcctgaatggcacaggccaaggggaggccagcctcgcctttctacccaggccccctgccctgcccacctcaggcccccaccctccactcctccccacggtactgtgaacgtcgtgtgactcagtgcagagacagataatatatttaattcatgtaca

SEQ ID NO: 80510 - DNA, 3069 bp, Homo sapiens
ggccctcaacgtggtcgaagtggaggcctctcattcgcgcgtcgcggtgtgctattgtgtaatcaggggaagctgccccgtgcccgggagggagcgggcgcaccgcggcccccaggacacgcgctgacccggctgcccagtccctcatgatcatgaacaagatgaagaactttaagcgccgtttctccctgtcagtgccccgcactgagaccattgaagaatccttggctgaattcacggagcaattcaaccagctccacaaccggcggaatgagaacttgcagctcggtcctcttggcagagaccccccgcaggagtgcagcaccttctccccaacagacagcggggaggagccggggcagctctcccctggcgtgcagttccagcggcggcagaaccagcgccgcttctccatggaggtgagggcctctggagctctgccccggcaggtggcaggatgcacgcacaagggtgtgcacaggagggcagctgccttacagccagactttgacgtcagcaagaggctctctctgcccatggatatccgcctgccccaggaattcctacagaagctacagatggagagcccagatctgcccaagccgctcagccgcatgtcccgccgggcctccctgtcagacattggctttgggaaactggaaacatacgtgaaactggacaaactgggagagggcacctatgccacagtcttcaaagggcgcagcaaactgacggagaaccttgtggccctgaaagagatccggctggagcacgaggagggagcgccctgcactgccatccgagaggtgtctctgctgaagaacctgaagcacgccaatattgtgaccctgcatgacctcatccacacagatcggtccctcaccctggtgtttgagtacctggacagtgacctgaagcagtatctggaccactgtgggaacctcatgagcatgcacaacgtcaagattttcatgttccagctgctccggggcctcgcctactgtcaccaccgcaagatcctgcaccgggacctgaagccccagaacctgctcatcaacgagaggggggagctgaagctggccgactttggactggccagggccaagtcagtgcccacaaagacttactccaatgaggtggtgaccctgtggtacaggccccccgatgtgctgctgggatccacagagtactccacccccattgatatgtggggcgtgggctgcatccactacgagatggccacagggaggcccctcttcccgggctccacagtcaaggaggagctgcacctcatctttcgcctcctcgggacccccacagaagagacgtggcccggcgtgaccgccttctctgagttccgcacctacagcttcccctgctacctcccgcagccgctcatcaaccacgcgcccaggttggatacggatggcatccacctcctgagcagcctgctcctgtatgaatccaagagtcgcatgtcagcagaggctgccctgagtcactcctacttccggtctctgggagagcgtgtgcaccagcttgaagacactgcctccatcttctccctgaaggagatccagctccagaaggacccaggctaccgaggcttggccttccagcagccaggacgagggaagaacaggcggcagagcatcttctgagccacgcccaccttgctgtggccaagggacaagagatcacatggagcacaaattcgggtaggatggagcctgtgtggccctcggaggactgaagaacgagggctgacagccagcctggaagaccgcttggcagcccttctggccacggctgtttcttctttgtgcttcccgtgtgcctccccagtagccctcacctgcataccaacccctcctttacccacgttggggctggcataagctgcttccctgagaggacatgaggggggggcggtcctcgtaccctctcccaccctggtgtttgggcacctgcgtgggatgcacacggatgacagaatcaaggcgccaggatgggcactctgccctggatacaggctctaccctcctcccccaggacctgcctagtgccagtttggtagtccccctttctggccccttggagcccacacacgtttcatctttttcccctctgagagcaagaagagacatggcatgttctctgggaccctggaatcctaggtacccacatgtgtgccaaagcctaccccacctggcaggtgtcccacagcaacagaaggaatagtagtccccactctttccatcagccctaccctaccctcattccccgacaccctctggcttgaaccatggctgagcagtgccggcatacgctttgccggcatgcttggatgcccagctgtgtccagaggtggcctgggaccgccagttgcacgcctgccacctcagccagcccccgcccagctcatcagtctgaatggagttgccttaaattggcaggtggtaccgtactcactgcccttggagctgtgaccggctcctgcctgtccaccccttcccgaggtggctcctgcttaccttatcatcccagggctctgattagccaggcctggtcagggtcctggggacggcacccagatatgcagagtcaccctgacactggtgccaggctgacctcagctcccgaaggctcgcacagcctccccatccttccttcccagcccttgtggctctgtccacctgatcccaataccagcttcccccagcccctgccaccccagagggcggccacgacagggagaggtgtagatgccaccatctgagggagaggaacgtggaacaggagcaggctctgatgctgagaggcttgcctccgggggctggaagcctgggtggccggggcccctgaagaaggctcccctctgtatcccccaggtctcctcaacactgggctgatcctgaatggcacaggccaaggggaggccagcctcgcctttctacccaggccccctgccctgcccacctcaggcccccaccctccactcctccccacggtactgtgaacgtcgtgtgactcagtgcagagacagataatatatttaattcatgtaca

SEQ ID NO: 80511 - DNA, 2906 bp, Homo sapiens
agcggcttcctcctcctcctcctcctcctcctccctcctcttccccaccttcctccactccctcccttcccctccccttctacctcctcctcggccagctcaggttgcagcttctctggggaactgctcacctttccggagcaggggaagctgccccgtgcccgggagggagcgggcgcaccgcggcccccaggacacgcgctacttgcagctcggtcctcttggcagagaccccccgcaggagtgcagcaccttctccccaacagacagcggggaggagccggggcagctctcccctggcgtgcagttccagcggcggcagaaccagcgccgcttctccatggaggacgtcagcaagaggctctctctgcccatggatatccgcctgccccaggaattcctacagaagctacagatggagagcccagatctgcccaagccgctcagccgcatgtcccgccgggcctccctgtcagacattggctttgggaaactggaaacatacgtgaaactggacaaactgggagagggcacctatgccacagtcttcaaagggcgcagcaaactgacggagaaccttgtggccctgaaagagatccggctggagcacgaggagggagcgccctgcactgccatccgagaggtgtctctgctgaagaacctgaagcacgccaatattgtgaccctgcatgacctcatccacacagatcggtccctcaccctggtgtttgagtacctggacagtgacctgaagcagtatctggaccactgtgggaacctcatgagcatgcacaacgtcaagattttcatgttccagctgctccggggcctcgcctactgtcaccaccgcaagatcctgcaccgggacctgaagccccagaacctgctcatcaacgagaggggggagctgaagctggccgactttggactggccagggccaagtcagtgcccacaaagacttactccaatgaggtggtgaccctgtggtacaggccccccgatgtgctgctgggatccacagagtactccacccccattgatatgtggggcgtgggctgcatccactacgagatggccacagggaggcccctcttcccgggctccacagtcaaggaggagctgcacctcatctttcgcctcctcgggacccccacagaagagacgtggcccggcgtgaccgccttctctgagttccgcacctacagcttcccctgctacctcccgcagccgctcatcaaccacgcgcccaggttggatacggatggcatccacctcctgagcagcctgctcctgtatgaatccaagagtcgcatgtcagcagaggctgccctgagtcactcctacttccggtctctgggagagcgtgtgcaccagcttgaagacactgcctccatcttctccctgaaggagatccagctccagaaggacccaggctaccgaggcttggccttccagcagccaggacgagggaagaacaggcggcagagcatcttctgagccacgcccaccttgctgtggccaagggacaagagatcacatggagcacaaattcgggtaggatggagcctgtgtggccctcggaggactgaagaacgagggctgacagccagcctggaagaccgcttggcagcccttctggccacggctgtttcttctttgtgcttcccgtgtgcctccccagtagccctcacctgcataccaacccctcctttacccacgttggggctggcataagctgcttccctgagaggacatgaggggggggcggtcctcgtaccctctcccaccctggtgtttgggcacctgcgtgggatgcacacggatgacagaatcaaggcgccaggatgggcactctgccctggatacaggctctaccctcctcccccaggacctgcctagtgccagtttggtagtccccctttctggccccttggagcccacacacgtttcatctttttcccctctgagagcaagaagagacatggcatgttctctgggaccctggaatcctaggtacccacatgtgtgccaaagcctaccccacctggcaggtgtcccacagcaacagaaggaatagtagtccccactctttccatcagccctaccctaccctcattccccgacaccctctggcttgaaccatggctgagcagtgccggcatacgctttgccggcatgcttggatgcccagctgtgtccagaggtggcctgggaccgccagttgcacgcctgccacctcagccagcccccgcccagctcatcagtctgaatggagttgccttaaattggcaggtggtaccgtactcactgcccttggagctgtgaccggctcctgcctgtccaccccttcccgaggtggctcctgcttaccttatcatcccagggctctgattagccaggcctggtcagggtcctggggacggcacccagatatgcagagtcaccctgacactggtgccaggctgacctcagctcccgaaggctcgcacagcctccccatccttccttcccagcccttgtggctctgtccacctgatcccaataccagcttcccccagcccctgccaccccagagggcggccacgacagggagaggtgtagatgccaccatctgagggagaggaacgtggaacaggagcaggctctgatgctgagaggcttgcctccgggggctggaagcctgggtggccggggcccctgaagaaggctcccctctgtatcccccaggtctcctcaacactgggctgatcctgaatggcacaggccaaggggaggccagcctcgcctttctacccaggccccctgccctgcccacctcaggcccccaccctccactcctccccacggtactgtgaacgtcgtgtgactcagtgcagagacagataatatatttaattcatgtaca

SEQ ID NO: 80512 - DNA, 4708 bp, Homo sapiens
agcggcttcctcctcctcctcctcctcctcctccctcctcttccccaccttcctccactccctcccttcccctccccttctacctcctcctcggccagctcaggttgcagcttctctggggaactgctcacctttccggagcaggggaagctgccccgtgcccgggagggagcgggcgcaccgcggcccccaggacacgcgctgacccggctgcccagtccctcatgatcatgaacaagatgaagaactttaagcgccgtttctccctgtcagtgccccgcactgagaccattgaagaatccttggctgaattcacggagcaattcaaccagctccacaaccggcggaatgagaacttgcagctcggtcctcttggcagagaccccccgcaggagtgcagcaccttctccccaacagacagcggggaggagccggggcagctctcccctggcgtgcagttccagcggcggcagaaccagcgccgcttctccatggaggacgtcagcaagaggctctctctgcccatggatatccgcctgccccaggaattcctacagaagctacagatggagagcccagatctgcccaagccgctcagccgcatgtcccgccgggcctccctgtcagacattggctttgggaaactggaaacatacgtgaaactggacaaactgggagagggcacctatgccacagtcttcaaagggcgcagcaaactgacggagaaccttgtggccctgaaagagatccggctggagcacgaggagggagcgccctgcactgccatccgagaggtgtctctgctgaagaacctgaagcacgccaatattgtgaccctgcatgacctcatccacacagatcggtccctcaccctggtgtttgagtacctggacagtgacctgaagcagtatctggaccactgtgggaacctcatgagcatgcacaacgtcaaggtgaggcctcaggggcagggtccccccatcttggcagccacctgtccagaagcccagtgtggggacccactctcaccaccagggatccggctgctgaggtggctcagaccttcccacgtaggaaagagggagagggcaatgccatcaacgagtccaggaactgggttgagcgctttaccccaagaacagacacacactgtctgccactgtctagctgttggtataaaacccactctcaactctgaacatcagtttcccagtctgtcaaatgggagtgtgagctacctgccaaaatgcagggaggcttctggggaagctcggggttatgaatgacctctcctggtgtttgttaaagaatcaaggctgggcatggtggcccacgcctgtaatcccagcactgggaggccaaggcaggaagatggcttgagcccaggagtttgagaccagcctgggcaacatggcaagacctcatctctactaaaaattgaaaaattagccgggcacagtagcgtgcacccatagtcccagctgcttgagaggctgaggcaggagggccacttgagcccgggaggttgaggctgcagtgagccatgatcacaccactgcactccagcctgggtgacagagtaaaaccctgactctaaaagaaaaaaaaaaaaaaaagggatcaagcacatatgtctccacataggcgggcatcctgacccccgtgctcctgactgagacttcgctggcctcccccacactcactgcgtcctctgcacccctgctgtcctcccctctggatgggattccctggtgtgggtggggtccaggatgggggctgcagggtgtgcaggagaatgaggggcttgtgctgacctcactgccaagcccctgcccccatcctggtcccagccttggagcagaggctcagggccaccttccaccccacatttctcttccccctcccccagattttcatgttccagctgctccggggcctcgcctactgtcaccaccgcaagatcctgcaccgggacctgaagccccagaacctgctcatcaacgagaggggggagctgaagctggccgactttggactggccagggccaagtcagtgcccacaaagacttactccaatgaggtggtgaccctgtggtacaggccccccgatgtgctgctgggatccacagagtactccacccccattgatatgtggggcgtgggctgcatccactacgagatggccacagggaggcccctcttcccgggctccacagtcaaggaggagctgcacctcatctttcgcctcctcgggacccccacagaagagacgtggcccggcgtgaccgccttctctgagttccgcacctacagcttcccctgctacctcccgcagccgctcatcaaccacgcgcccaggttggatacggatggcatccacctcctgagcagcctgctcctggtgagtgtcctcccggcggggcccagggagaggcagccaaagagccaggtccctgtgccccatgccgggcctacgccccaacttctgtggctcgtgtgcttacacgtctttgaaacatctcccctgtactctccacccccaaggccaaggggtggcctccatacacatcctctggagtctgtgcactgcgagcccaaacccgttacttagctgtgtagctctgggcaagttacagagctcctccatgcctcagtttcctcagctgcaaagtgggattaatacctattttataagatggccgtgaggatacattgagatgacgggacacacttagtgtggtgcctgtcttgtaaggcacacgatgaagggttgttatcggcactacgcttcctgttacggatgttctccatctgatcatggttggtttgcatctgtatttctatcccaagagaaggtcactctcctgaagtttcatttctggtttttcctggtggctggagaccgaggagccttcccctgagtcttgagatggcctgaggttgggtttgtggtaggggctggaggctgacctggggcttctcctgttagcctcaagcctcacccaccttggtgctctaaccagcactggagtcctgctgcccagagggtttgcagccccccagccgggcccaatagccccaccctgtgcctttcagtatgaatccaagagtcgcatgtcagcagaggctgccctgagtcactcctacttccggtctctgggagagcgtgtgcaccagcttgaagacactgcctccatcttctccctgaaggagatccagctccagaaggacccaggctaccgaggcttggccttccagcagccaggacgagggaagaacaggcggcagagcatcttctgagccacgcccaccttgctgtggccaagggacaagagatcacatggagcacaaattcgggtaggatggagcctgtgtggccctcggaggactgaagaacgagggctgacagccagcctggaagaccgcttggcagcccttctggccacggctgtttcttctttgtgcttcccgtgtgcctccccagtagccctcacctgcataccaacccctcctttacccacgttggggctggcataagctgcttccctgagaggacatgaggggggggcggtcctcgtaccctctcccaccctggtgtttgggcacctgcgtgggatgcacacggatgacagaatcaaggcgccaggatgggcactctgccctggatacaggctctaccctcctcccccaggacctgcctagtgccagtttggtagtccccctttctggccccttggagcccacacacgtttcatctttttcccctctgagagcaagaagagacatggcatgttctctgggaccctggaatcctaggtacccacatgtgtgccaaagcctaccccacctggcaggtgtcccacagcaacagaaggaatagtagtccccactctttccatcagccctaccctaccctcattccccgacaccctctggcttgaaccatggctgagcagtgccggcatacgctttgccggcatgcttggatgcccagctgtgtccagaggtggcctgggaccgccagttgcacgcctgccacctcagccagcccccgcccagctcatcagtctgaatggagttgccttaaattggcaggtggtaccgtactcactgcccttggagctgtgaccggctcctgcctgtccaccccttcccgaggtggctcctgcttaccttatcatcccagggctctgattagccaggcctggtcagggtcctggggacggcacccagatatgcagagtcaccctgacactggtgccaggctgacctcagctcccgaaggctcgcacagcctccccatccttccttcccagcccttgtggctctgtccacctgatcccaataccagcttcccccagcccctgccaccccagagggcggccacgacagggagaggtgtagatgccaccatctgagggagaggaacgtggaacaggagcaggctctgatgctgagaggcttgcctccgggggctggaagcctgggtggccggggcccctgaagaaggctcccctctgtatcccccaggtctcctcaacactgggctgatcctgaatggcacaggccaaggggaggccagcctcgcctttctacccaggccccctgccctgcccacctcaggcccccaccctccactcctccccacggtactgtgaacgtcgtgtgactcagtgcagagacagataatatatttaattcatgtaca

SEQ ID NO: 80513 - DNA, 4654 bp, Homo sapiens
agcggcttcctcctcctcctcctcctcctcctccctcctcttccccaccttcctccactccctcccttcccctccccttctacctcctcctcggccagctcaggttgcagcttctctggggaactgctcacctttccggagcaggggaagctgccccgtgcccgggagggagcgggcgcaccgcggcccccaggacacgcgctgacccggctgcccagtccctcatgatcatgaacaagatgaagaactttaagcgccgtttctccctgtcagtgccccgcactgagaccattgaagaatccttggctgaattcacggagcaattcaaccagctccacaaccggcggaatgagaacttgcagctcggtcctcttggcagagaccccccgcaggagtgcagcaccttctccccaacagacagcggggaggagccggggcagctctcccctggcgtgcagttccagcggcggcagaaccagcgccgcttctccatggaggacgtcagcaagaggctctctctgcccatggatatccgcctgccccaggaattcctacagaagctacagatggagagcccagatctgcccaagccgctcagccgcatgtcccgccgggcctccctgtcagacattggctttgggaaactggaaacatacgtgaaactggacaaactgggagagggcacctatgccacagtcttcaaagggcgcagcaaactgacggagaaccttgtggccctgaaagagatccggctggagcacgaggagggagcgccctgcactgccatccgagaggtgtctctgctgaagaacctgaagcacgccaatattgtgaccctgcatgacctcatccacacagatcggtccctcaccctggtgtttgagtacctggacagtgacctgaagcagtatctggaccactgtgggaacctcatgagcatgcacaacgtcaaggtgaggcctcaggggcagggtccccccatcttggcagccacctgtccagaagcccagtgtggggacccactctcaccaccagggatccggctgctgaggtggctcagaccttcccacgtaggaaagagggagagggcaatgccatcaacgagtccaggaactgggttgagcgctttaccccaagaacagacacacactgtctgccactgtctagctgttggtataaaacccactctcaactctgaacatcagtttcccagtctgtcaaatgggagtgtgagctacctgccaaaatgcagggaggcttctggggaagctcggggttatgaatgacctctcctggtgtttgttaaagaatcaaggctgggcatggtggcccacgcctgtaatcccagcactgggaggccaaggcaggaagatggcttgagcccaggagtttgagaccagcctgggcaacatggcaagacctcatctctactaaaaattgaaaagcaggagggccacttgagcccgggaggttgaggctgcagtgagccatgatcacaccactgcactccagcctgggtgacagagtaaaaccctgactctaaaagaaaaaaaaaaaaaaaagggatcaagcacatatgtctccacataggcgggcatcctgacccccgtgctcctgactgagacttcgctggcctcccccacactcactgcgtcctctgcacccctgctgtcctcccctctggatgggattccctggtgtgggtggggtccaggatgggggctgcagggtgtgcaggagaatgaggggcttgtgctgacctcactgccaagcccctgcccccatcctggtcccagccttggagcagaggctcagggccaccttccaccccacatttctcttccccctcccccagattttcatgttccagctgctccggggcctcgcctactgtcaccaccgcaagatcctgcaccgggacctgaagccccagaacctgctcatcaacgagaggggggagctgaagctggccgactttggactggccagggccaagtcagtgcccacaaagacttactccaatgaggtggtgaccctgtggtacaggccccccgatgtgctgctgggatccacagagtactccacccccattgatatgtggggcgtgggctgcatccactacgagatggccacagggaggcccctcttcccgggctccacagtcaaggaggagctgcacctcatctttcgcctcctcgggacccccacagaagagacgtggcccggcgtgaccgccttctctgagttccgcacctacagcttcccctgctacctcccgcagccgctcatcaaccacgcgcccaggttggatacggatggcatccacctcctgagcagcctgctcctggtgagtgtcctcccggcggggcccagggagaggcagccaaagagccaggtccctgtgccccatgccgggcctacgccccaacttctgtggctcgtgtgcttacacgtctttgaaacatctcccctgtactctccacccccaaggccaaggggtggcctccatacacatcctctggagtctgtgcactgcgagcccaaacccgttacttagctgtgtagctctgggcaagttacagagctcctccatgcctcagtttcctcagctgcaaagtgggattaatacctattttataagatggccgtgaggatacattgagatgacgggacacacttagtgtggtgcctgtcttgtaaggcacacgatgaagggttgttatcggcactacgcttcctgttacggatgttctccatctgatcatggttggtttgcatctgtatttctatcccaagagaaggtcactctcctgaagtttcatttctggtttttcctggtggctggagaccgaggagccttcccctgagtcttgagatggcctgaggttgggtttgtggtaggggctggaggctgacctggggcttctcctgttagcctcaagcctcacccaccttggtgctctaaccagcactggagtcctgctgcccagagggtttgcagccccccagccgggcccaatagccccaccctgtgcctttcagtatgaatccaagagtcgcatgtcagcagaggctgccctgagtcactcctacttccggtctctgggagagcgtgtgcaccagcttgaagacactgcctccatcttctccctgaaggagatccagctccagaaggacccaggctaccgaggcttggccttccagcagccaggacgagggaagaacaggcggcagagcatcttctgagccacgcccaccttgctgtggccaagggacaagagatcacatggagcacaaattcgggtaggatggagcctgtgtggccctcggaggactgaagaacgagggctgacagccagcctggaagaccgcttggcagcccttctggccacggctgtttcttctttgtgcttcccgtgtgcctccccagtagccctcacctgcataccaacccctcctttacccacgttggggctggcataagctgcttccctgagaggacatgaggggggggcggtcctcgtaccctctcccaccctggtgtttgggcacctgcgtgggatgcacacggatgacagaatcaaggcgccaggatgggcactctgccctggatacaggctctaccctcctcccccaggacctgcctagtgccagtttggtagtccccctttctggccccttggagcccacacacgtttcatctttttcccctctgagagcaagaagagacatggcatgttctctgggaccctggaatcctaggtacccacatgtgtgccaaagcctaccccacctggcaggtgtcccacagcaacagaaggaatagtagtccccactctttccatcagccctaccctaccctcattccccgacaccctctggcttgaaccatggctgagcagtgccggcatacgctttgccggcatgcttggatgcccagctgtgtccagaggtggcctgggaccgccagttgcacgcctgccacctcagccagcccccgcccagctcatcagtctgaatggagttgccttaaattggcaggtggtaccgtactcactgcccttggagctgtgaccggctcctgcctgtccaccccttcccgaggtggctcctgcttaccttatcatcccagggctctgattagccaggcctggtcagggtcctggggacggcacccagatatgcagagtcaccctgacactggtgccaggctgacctcagctcccgaaggctcgcacagcctccccatccttccttcccagcccttgtggctctgtccacctgatcccaataccagcttcccccagcccctgccaccccagagggcggccacgacagggagaggtgtagatgccaccatctgagggagaggaacgtggaacaggagcaggctctgatgctgagaggcttgcctccgggggctggaagcctgggtggccggggcccctgaagaaggctcccctctgtatcccccaggtctcctcaacactgggctgatcctgaatggcacaggccaaggggaggccagcctcgcctttctacccaggccccctgccctgcccacctcaggcccccaccctccactcctccccacggtactgtgaacgtcgtgtgactcagtgcagagacagataatatatttaattcatgtaca

SEQ ID NO: 80514 - DNA, 3186 bp, Homo sapiens
agcggcttcctcctcctcctcctcctcctcctccctcctcttccccaccttcctccactccctcccttcccctccccttctacctcctcctcggccagctcaggttgcagcttctctggggaactgctcacctttccggagcaggggaagctgccccgtgcccgggagggagcgggcgcaccgcggcccccaggacacgcgctgacccggctgcccagtccctcatgatcatgaacaagatgaagaactttaagcgccgtttctccctgtcagtgccccgcactgagaccattgaagaatccttggctgaattcacggagcaattcaaccagctccacaaccggcggaatgagaacttgcagctcggtcctcttggcagagaccccccgcaggagtgcagcaccttctccccaacagacagcggggaggagccggggcagctctcccctggcgtgcagttccagcggcggcagaaccagcgccgcttctccatggaggacgtcagcaagaggctctctctgcccatggatatccgcctgccccaggaattcctacagaagctacagatggagagcccagatctgcccaagccgctcagccgcatgtcccgccgggcctccctgtcagacattggctttgggaaactggaaacatacgtgaaactggacaaactgggagagggcacctatgccacagtcttcaaagggcgcagcaaactgacggagaaccttgtggccctgaaagagatccggctggagcacgaggagggagcgccctgcactgccatccgagaggtgtctctgctgaagaacctgaagcacgccaatattgtgaccctgcatgacctcatccacacagatcggtccctcaccctggtgtttgagtacctggacagtgacctgaagcagtatctggaccactgtgggaacctcatgagcatgcacaacgtcaagattttcatgttccagctgctccggggcctcgcctactgtcaccaccgcaagatcctgcaccgggacctgaagccccagaacctgctcatcaacgagaggggggagctgaagctggccgactttggactggccagggccaagtcagtgcccacaaagacttactccaatgaggtggtgaccctgtggtacaggccccccgatgtgctgctgggatccacagagtactccacccccattgatatgtggggcgtgggctgcatccactacgagatggccacagggaggcccctcttcccgggctccacagtcaaggaggagctgcacctcatctttcgcctcctcgggacccccacagaagagacgtggcccggcgtgaccgccttctctgagttccgcacctacagcttcccctgctacctcccgcagccgctcatcaaccacgcgcccaggttggatacggatggcatccacctcctgagcagcctgctcctgtatgaatccaagagtcgcatgtcagcagaggctgccctgagtcactcctacttccggtctctgggagagcgtgtgcaccagcttgaagacactgcctccatcttctccctgaaggagatccagctccagaaggacccaggctaccgaggcttggccttccagcagccaggacgagggaagaacaggcggcagagcatcttctgagccacgcccaccttgctgtggccaagggacaagagatcacatggagcacaaattcgggtaggatggagcctgtgtggccctcggaggactgaagaacgagggctgacagccagcctggaagaccgcttggcagcccttctggccacggctgtttcttctttgtgcttcccgtgtgcctccccagtagccctcacctgcataccaacccctcctttacccacgttggggctggcataagctgcttccctgagaggacatgaggggggggcggtcctcgtaccctctcccaccctggtgtttgggcacctgcgtgggatgcacacggatgacagaatcaaggcgccaggatgggcactctgccctggatacaggctctaccctcctcccccaggacctgcctagtgccagtttggtagtccccctttctggccccttggagcccacacacgtttcatctttttcccctctgagagcaagaagagacatggcatgttctctgggaccctggaatcctaggtacccacatgtgtgccaaagcctaccccacctggcaggtgtcccacagcaacagaaggaatagtagtccccactctttccatcagccctaccctaccctcattccccgacaccctctggcttgaaccatggctgagcagtgccggcatacgctttgccggcatgcttggatgcccagctgtgtccagaggtggcctgggaccgccagttgcacgcctgccacctcagccagcccccgcccagctcatcagtctgaatggagttgccttaaattggcaggtggtaccgtactcactgcccttggagctgtgaccggctcctgcctgtccaccccttcccgaggtggctcctgcttaccttatcatcccagggctctgattagccaggcctggtcagggtcctggggacggcacccagatatgcagagtcaccctgacactggtgccaggctgacctcagctcccgaaggctcgcacagcctccccatccttccttcccagcccttgtggctctgtccacctgatcccaataccagcttcccccagcccctgccaccccagagggcggccacgacagggagaggtgtagatgccaccatctgagggagaggaacgtggaacaggagcaggctctgatgctgagaggcttgcctccgggggctggaagcctgggtggccggggcccctgaagaaggctcccctctgtatcccccaggtctcctcaacactgggctgatcctgaatggcacaggccaaggggaggccagcctcgcctttctacccaggccccctgccctgcccacctcaggcccccaccctccactcctccccacggtactgtgaacgtcgtgtgactcagtgcagagacagataatatatttaattcatgtacaaaaaggagcgagcagtctcgtacagaaaagctgactttgatagattgatgccaaagatggagaactgaagtcccccctccaggcctaatgagtgtgggtggggtgtgcttgtgtgtatgtgtgtggtgt

SEQ ID NO: 80515 - DNA, 3028 bp, Homo sapiens
agcggcttcctcctcctcctcctcctcctcctccctcctcttccccaccttcctccactccctcccttcccctccccttctacctcctcctcggccagctcaggttgcagcttctctggggaactgctcacctttccggagcaggggaagctgccccgtgcccgggagggagcgggcgcaccgcggcccccaggacacgcgctgacccggctgcccagtccctcatgatcatgaacaagatgaagaactttaagcgccgtttctccctgtcagtgccccgcactgagaccattgaagaatccttggctgaattcacggagcaattcaaccagctccacaaccggcggaatgagaacttgcagctcggtcctcttggcagagaccccccgcaggagtgcagcaccttctccccaacagacagcggggaggagccggggcagctctcccctggcgtgcagttccagcggcggcagaaccagcgccgcttctccatggaggacgtcagcaagaggctctctctgcccatggatatccgcctgccccaggaattcctacagaagctacagatggagagcccagatctgcccaagccgctcagccgcatgtcccgccgggcctccctgtcagacattggctttgggaaactggaaacatacgtgaaactggacaaactgggagagggcacctatgccacagtcttcaaagggcgcagcaaactgacggagaaccttgtggccctgaaagagatccggctggagcacgaggagggagcgccctgcactgccatccgagaggtgtctctgctgaagaacctgaagcacgccaatattgtgaccctgcatgacctcatccacacagatcggtccctcaccctggtgtttgagtacctggacagtgacctgaagcagtatctggaccactgtgggaacctcatgagcatgcacaacgtcaagattttcatgttccagctgctccggggcctcgcctactgtcaccaccgcaagatcctgcaccgggacctgaagccccagaacctgctcatcaacgagaggggggagctgaagctggccgactttggactggccagggccaagtcagtgcccacaaagacttactccaatgaggtggtgaccctgtggtacaggccccccgatgtgctgctgggatccacagagtactccacccccattgatatgtggggcgtgggctgcatccactacgagatggccacagggaggcccctcttcccgggctccacagtcaaggaggagctgcacctcatctttcgcctcctcgggacccccacagaagagacgtggcccggcgtgaccgccttctctgagttccgcacctacagcttcccctgctacctcccgcagccgctcatcaaccacgcgcccaggttggatacggatggcatccacctcctgagcagcctgctcctgtatgaatccaagagtcgcatgtcagcagaggctgccctgagtcactcctacttccggtctctgggagagcgtgtgcaccagcttgaagacactgcctccatcttctccctgaaggagatccagctccagaaggacccaggctaccgaggcttggccttccagcagccaggacgagggaagaacaggcggcagagcatcttctgagccacgcccaccttgctgtggccaagggacaagagatcacatggagcacaaattcgggtaggatggagcctgtgtggccctcggaggactgaagaacgagggctgacagccagccacggctgtttcttctttgtgcttcccgtgtgcctccccagtagccctcacctgcataccaacccctcctttacccacgttggggctggcataagctgcttccctgagaggacatgaggggggggcggtcctcgtaccctctcccaccctggtgtttgggcacctgcgtgggatgcacacggatgacagaatcaaggcgccaggatgggcactctgccctggatacaggctctaccctcctcccccaggacctgcctagtgccagtttggtagtccccctttctggccccttggagcccacacacgtttcatctttttcccctctgagagcaagaagagacatggcatgttctctgggaccctggaatcctaggtacccacatgtgtgccaaagcctaccccacctggcaggtgtcccacagcaacagaaggaatagtagtccccactctttccatcagccctaccctaccctcattccccgacaccctctggcttgaaccatggctgagcagtgccggcatacgctttgccggcatgcttggatgcccagctgtgtccagaggtggcctgggaccgccagttgcacgcctgccacctcagccagcccccgcccagctcatcagtctgaatggagttgccttaaattggcaggtggtaccgtactcactgcccttggagctgtgaccggctcctgcctgtccaccccttcccgaggtggctcctgcttaccttatcatcccagggctctgattagccaggcctggtcagggtcctggggacggcacccagatatgcagagtcaccctgacactggtgccaggctgacctcagctcccgaaggctcgcacagcctccccatccttccttcccagcccttgtggctctgtccacctgatcccaataccagcttcccccagcccctgccaccccagagggcggccacgacagggagaggtgtagatgccaccatctgagggagaggaacgtggaacaggagcaggctctgatgctgagaggcttgcctccgggggctggaagcctgggtggccggggcccctgaagaaggctcccctctgtatcccccaggtctcctcaacactgggctgatcctgaatggcacaggccaaggggaggccagcctcgcctttctacccaggccccctgccctgcccacctcaggcccccaccctccactcctccccacggtactgtgaacgtcgtgtgactcagtgcagagacagataatatatttaattcatgtaca

SEQ ID NO: 80516 - DNA, 4291 bp, Homo sapiens
agcggcttcctcctcctcctcctcctcctcctccctcctcttccccaccttcctccactccctcccttcccctccccttctacctcctcctcggccagctcaggttgcagcttctctggggaactgctcacctttccggagcaggggaagctgccccgtgcccgggagggagcgggcgcaccgcggcccccaggacacgcgctgacccggctgcccagtccctcatgatcatgaacaagatgaagaactttaagcgccgtttctccctgtcagtgccccgcactgagaccattgaagaatccttggctgaattcacggagcaattcaaccagctccacaaccggcggaatgagaacttgcagctcggtcctcttggcagagaccccccgcaggagtgcagcaccttctccccaacagacagcggggaggagccggggcagctctcccctggcgtgcagttccagcggcggcagaaccagcgccgcttctccatggaggacgtcagcaagaggctctctctgcccatggatatccgcctgccccaggaattcctacagaagctacagatggagagcccagatctgcccaagccgctcagccgcatgtcccgccgggcctccctgtcagacattggctttgggaaactggaaacatacgtgaaactggacaaactgggagagggcacctatgccacagtcttcaaagggcgcagcaaactgacggagaaccttgtggccctgaaagagatccggctggagcacgaggagggagcgccctgcactgccatccgagaggtgtctctgctgaagaacctgaagcacgccaatattgtgaccctgcatgacctcatccacacagatcggtccctcaccctggtgtttgagtacctggacagtgacctgaagcagtatctggaccactgtgggaacctcatgagcatgcacaacgtcaaggtgaggcctcaggggcagggtccccccatcttggcagccacctgtccagaagcccagtgtggggacccactctcaccaccagggatccggctgctgaggtggctcagaccttcccacgtaggaaagagggagagggcaatgccatcaacgagtccaggaactgggttgagcgctttaccccaagaacagacacacactgtctgccactgtctagctgttggtataaaacccactctcaactctgaacatcagtttcccagtctgtcaaatgggagtgtgagctacctgccaaaatgcagggaggcttctggggaagctcggggttatgaatgacctctcctggtgtttgttaaagaatcaaggctgggcatggtggcccacgcctgtaatcccagcactgggaggccaaggcaggaagatggcttgagcccaggagtttgagaccagcctgggcaacatggcaagacctcatctctactaaaaattgaaaaattagccgggcacagtagcgtgcacccatagtcccagctgcttgagaggctgaggcaggagggccacttgagcccgggaggttgaggctgcagtgagccatgatcacaccactgcactccagcctgggtgacagagtaaaaccctgactctaaaagaaaaaaaaaaaaaaaagggatcaagcacatatgtctccacataggcgggcatcctgacccccgtgctcctgactgagacttcgctggcctcccccacactcactgcgtcctctgcacccctgctgtcctcccctctggatgggattccctggtgtgggtggggtccaggatgggggctgcagggtgtgcaggagaatgaggggcttgtgctgacctcactgccaagcccctgcccccatcctggtcccagccttggagcagaggctcagggccaccttccaccccacatttctcttccccctcccccagattttcatgttccagctgctccggggcctcgcctactgtcaccaccgcaagatcctgcaccgggacctgaagccccagaacctgctcatcaacgagaggggggagctgaagctggccgactttggactggccagggccaagtcagtgcccacaaagacttactccaatgaggtggtgaccctgtggtacaggccccccgatgtgctgctgggatccacagagtactccacccccattgatatgtggggcgtgggctgcatccactacgagatggccacagggaggcccctcttcccgggctccacagtcaaggaggagctgcacctcatctttcgcctcctcgggacccccacagaagagacgtggcccggcgtgaccgccttctctgagttccgcacctacagcttcccctgctacctcccgcagccgctcatcaaccacgcgcccaggttggatacggatggcatccacctcctgagcagcctgctcctgtatgaatccaagagtcgcatgtcagcagaggctgccctgagtcactcctacttccggtctctgggagagcgtgtgcaccagcttgaagacagtgagtactgggggtccgggagcagggccacccagaaccaaggaaaggggttggtgagtgtgggcagaagaaccagaacaaagaggccagaggccccagccccagcagagcagccccgggcaccttgcctcccctgctggggttctcattccaaattgagggggcaaacagtgggaatgagacgctgcctcgagggctcagttggtccttctgggccagtccttactggaggccagctccacgcagccctctccagactatgcacttctctcccccagctgcctccatcttctccctgaaggagatccagctccagaaggacccaggctaccgaggcttggccttccagcagccaggacgagggaagaacaggcggcagagcatcttctgagccacgcccaccttgctgtggccaagggacaagagatcacatggagcacaaattcgggtaggatggagcctgtgtggccctcggaggactgaagaacgagggctgacagccagcctggaagaccgcttggcagcccttctggccacggctgtttcttctttgtgcttcccgtgtgcctccccagtagccctcacctgcataccaacccctcctttacccacgttggggctggcataagctgcttccctgagaggacatgaggggggggcggtcctcgtaccctctcccaccctggtgtttgggcacctgcgtgggatgcacacggatgacagaatcaaggcgccaggatgggcactctgccctggatacaggctctaccctcctcccccaggacctgcctagtgccagtttggtagtccccctttctggccccttggagcccacacacgtttcatctttttcccctctgagagcaagaagagacatggcatgttctctgggaccctggaatcctaggtacccacatgtgtgccaaagcctaccccacctggcaggtgtcccacagcaacagaaggaatagtagtccccactctttccatcagccctaccctaccctcattccccgacaccctctggcttgaaccatggctgagcagtgccggcatacgctttgccggcatgcttggatgcccagctgtgtccagaggtggcctgggaccgccagttgcacgcctgccacctcagccagcccccgcccagctcatcagtctgaatggagttgccttaaattggcaggtggtaccgtactcactgcccttggagctgtgaccggctcctgcctgtccaccccttcccgaggtggctcctgcttaccttatcatcccagggctctgattagccaggcctggtcagggtcctggggacggcacccagatatgcagagtcaccctgacactggtgccaggctgacctcagctcccgaaggctcgcacagcctccccatccttccttcccagcccttgtggctctgtccacctgatcccaataccagcttcccccagcccctgccaccccagagggcggccacgacagggagaggtgtagatgccaccatctgagggagaggaacgtggaacaggagcaggctctgatgctgagaggcttgcctccgggggctggaagcctgggtggccggggcccctgaagaaggctcccctctgtatcccccaggtctcctcaacactgggctgatcctgaatggcacaggccaaggggaggccagcctcgcctttctacccaggccccctgccctgcccacctcaggcccccaccctccactcctccccacggtactgtgaacgtcgtgtgactcagtgcagagacagataatatatttaattcatgtaca

SEQ ID NO: 80517 - DNA, 5077 bp, Homo sapiens
agcggcttcctcctcctcctcctcctcctcctccctcctcttccccaccttcctccactccctcccttcccctccccttctacctcctcctcggccagctcaggttgcagcttctctggggaactgctcacctttccggagcaggggaagctgccccgtgcccgggagggagcgggcgcaccgcggcccccaggacacgcgctgacccggctgcccagtccctcatgatcatgaacaagatgaagaactttaagcgccgtttctccctgtcagtgccccgcactgagaccattgaagaatccttggctgaattcacggagcaattcaaccagctccacaaccggcggaatgagaacttgcagctcggtcctcttggcagagaccccccgcaggagtgcagcaccttctccccaacagacagcggggaggagccggggcagctctcccctggcgtgcagttccagcggcggcagaaccagcgccgcttctccatggaggacgtcagcaagaggctctctctgcccatggatatccgcctgccccaggaattcctacagaagctacagatggagagcccagatctgcccaagccgctcagccgcatgtcccgccgggcctccctgtcagacattggctttgggaaactggaaacatacgtgaaactggacaaactgggagagggcacctatgccacagtcttcaaagggcgcagcaaactgacggagaaccttgtggccctgaaagagatccggctggagcacgaggagggagcgccctgcactgccatccgagaggtgtctctgctgaagaacctgaagcacgccaatattgtgaccctgcatgacctcatccacacagatcggtccctcaccctggtgtttgagtacctggacagtgacctgaagcagtatctggaccactgtgggaacctcatgagcatgcacaacgtcaaggtgaggcctcaggggcagggtccccccatcttggcagccacctgtccagaagcccagtgtggggacccactctcaccaccagggatccggctgctgaggtggctcagaccttcccacgtaggaaagagggagagggcaatgccatcaacgagtccaggaactgggttgagcgctttaccccaagaacagacacacactgtctgccactgtctagctgttggtataaaacccactctcaactctgaacatcagtttcccagtctgtcaaatgggagtgtgagctacctgccaaaatgcagggaggcttctggggaagctcggggttatgaatgacctctcctggtgtttgttaaagaatcaaggctgggcatggtggcccacgcctgtaatcccagcactgggaggccaaggcaggaagatggcttgagcccaggagtttgagaccagcctgggcaacatggcaagacctcatctctactaaaaattgaaaaattagccgggcacagtagcgtgcacccatagtcccagctgcttgagaggctgaggcaggagggccacttgagcccgggaggttgaggctgcagtgagccatgatcacaccactgcactccagcctgggtgacagagtaaaaccctgactctaaaagaaaaaaaaaaaaaaaagggatcaagcacatatgtctccacataggcgggcatcctgacccccgtgctcctgactgagacttcgctggcctcccccacactcactgcgtcctctgcacccctgctgtcctcccctctggatgggattccctggtgtgggtggggtccaggatgggggctgcagggtgtgcaggagaatgaggggcttgtgctgacctcactgccaagcccctgcccccatcctggtcccagccttggagcagaggctcagggccaccttccaccccacatttctcttccccctcccccagattttcatgttccagctgctccggggcctcgcctactgtcaccaccgcaagatcctgcaccgggacctgaagccccagaacctgctcatcaacgagaggggggagctgaagctggccgactttggactggccagggccaagtcagtgcccacaaagacttactccaatgaggtggtgaccctgtggtacaggccccccgatgtgctgctgggatccacagagtactccacccccattgatatgtggggcgtgggctgcatccactacgagatggccacagggaggcccctcttcccgggctccacagtcaaggaggagctgcacctcatctttcgcctcctcgggacccccacagaagagacgtggcccggcgtgaccgccttctctgagttccgcacctacagcttcccctgctacctcccgcagccgctcatcaaccacgcgcccaggtagcccctgcgcccgccgcccctcctgctgcggccctggctctcccatccccaatcaggcacagcctgtgtccgcgccttctccttgcaggttggatacggatggcatccacctcctgagcagcctgctcctggtgagtgtcctcccggcggggcccagggagaggcagccaaagagccaggtccctgtgccccatgccgggcctacgccccaacttctgtggctcgtgtgcttacacgtctttgaaacatctcccctgtactctccacccccaaggccaaggggtggcctccatacacatcctctggagtctgtgcactgcgagcccaaacccgttacttagctgtgtagctctgggcaagttacagagctcctccatgcctcagtttcctcagctgcaaagtgggattaatacctattttataagatggccgtgaggatacattgagatgacgggacacacttagtgtggtgcctgtcttgtaaggcacacgatgaagggttgttatcggcactacgcttcctgttacggatgttctccatctgatcatggttggtttgcatctgtatttctatcccaagagaaggtcactctcctgaagtttcatttctggtttttcctggtggctggagaccgaggagccttcccctgagtcttgagatggcctgaggttgggtttgtggtaggggctggaggctgacctggggcttctcctgttagcctcaagcctcacccaccttggtgctctaaccagcactggagtcctgctgcccagagggtttgcagccccccagccgggcccaatagccccaccctgtgcctttcagtatgaatccaagagtcgcatgtcagcagaggctgccctgagtcactcctacttccggtctctgggagagcgtgtgcaccagcttgaagacagtgagtactgggggtccgggagcagggccacccagaaccaaggaaaggggttggtgagtgtgggcagaagaaccagaacaaagaggccagaggccccagccccagcagagcagccccgggcaccttgcctcccctgctggggttctcattccaaattgagggggcaaacagtgggaatgagacgctgcctcgagggctcagttggtccttctgggccagtccttactggaggccagctccacgcagccctctccagactatgcacttctctcccccagctgcctccatcttctccctgaaggagatccagctccagaaggacccaggctaccgaggcttggccttccagcagccaggacgagggaagaacaggcggcagagcatcttctgagccacgcccaccttgctgtggccaagggacaagagatcacatggagcacaaattcgggtaggatggagcctgtgtggccctcggaggactgaagaacgagggctgacagccagcctggaagaccgcttggcagcccttctggccacggctgtttcttctttgtgcttcccgtgtgcctccccagtagccctcacctgcataccaacccctcctttacccacgttggggctggcataagctgcttccctgagaggacatgaggggggggcggtcctcgtaccctctcccaccctggtgtttgggcacctgcgtgggatgcacacggatgacagaatcaaggcgccaggatgggcactctgccctggatacaggctctaccctcctcccccaggacctgcctagtgccagtttggtagtccccctttctggccccttggagcccacacacgtttcatctttttcccctctgagagcaagaagagacatggcatgttctctgggaccctggaatcctaggtacccacatgtgtgccaaagcctaccccacctggcaggtgtcccacagcaacagaaggaatagtagtccccactctttccatcagccctaccctaccctcattccccgacaccctctggcttgaaccatggctgagcagtgccggcatacgctttgccggcatgcttggatgcccagctgtgtccagaggtggcctgggaccgccagttgcacgcctgccacctcagccagcccccgcccagctcatcagtctgaatggagttgccttaaattggcaggtggtaccgtactcactgcccttggagctgtgaccggctcctgcctgtccaccccttcccgaggtggctcctgcttaccttatcatcccagggctctgattagccaggcctggtcagggtcctggggacggcacccagatatgcagagtcaccctgacactggtgccaggctgacctcagctcccgaaggctcgcacagcctccccatccttccttcccagcccttgtggctctgtccacctgatcccaataccagcttcccccagcccctgccaccccagagggcggccacgacagggagaggtgtagatgccaccatctgagggagaggaacgtggaacaggagcaggctctgatgctgagaggcttgcctccgggggctggaagcctgggtggccggggcccctgaagaaggctcccctctgtatcccccaggtctcctcaacactgggctgatcctgaatggcacaggccaaggggaggccagcctcgcctttctacccaggccccctgccctgcccacctcaggcccccaccctccactcctccccacggtactgtgaacgtcgtgtgactcagtgcagagacagataatatatttaattcatgtaca

SEQ ID NO: 80518 - DNA, 2463 bp, Homo sapiens
agcggcttcctcctcctcctcctcctcctcctccctcctcttccccaccttcctccactccctcccttcccctccccttctacctcctcctcggccagctcaggttgcagcttctctggggaactgctcacctttccggagcaggggaagctgccccgtgcccgggagggagcgggcgcaccgcggcccccaggacacgcgctgacccggctgcccagtccctcatgatcatgaacaagatgaagaactttaagcgccgtttctccctgtcagtgccccgcactgagaccattgaagaatccttggctgaattcacggagcaattcaaccagctccacaaccggcggaatgagaacttgcagctcggtcctcttggcagagaccccccgcaggagtgcagcaccttctccccaacagacagcggggaggagccggggcagctctcccctggcgtgcagttccagcggcggcagaaccagcgccgcttctccatggaggacgtcagcaagaggctctctctgcccatggatatccgcctgccccaggaattcctacagaagctacagatggagagcccagatctgcccaagccgctcagccgcatgtcccgccgggcctccctgtcagacattggctttgggaaactggaaacatacgtgaaactggacaaactgggagagggcacctatgccacagtcttcaaagggcgcagcaaactgacggagaaccttgtggccctgaaagagatccggctggagcacgaggagggagcgccctgcactgccatccgagaggtgtctctgctgaagaacctgaagcacgccaatattgtgaccctgcatgacctcatccacacagatcggtccctcaccctggtgtttgagtacctggacagtgacctgaagcagtatctggaccactgtgggaacctcatgagcatgcacaacgtcaagattttcatgttccagctgctccggggcctcgcctactgtcaccaccgcaagatcctgcaccgggacctgaagccccagaacctgctcatcaacgagaggggggagctgaagctggccgactttggactggccagggccaagtcagtgcccacaaagacttactccaatgaggtggtgaccctgtggtacaggccccccgatgtgctgctgggatccacagagtactccacccccattgatatgtggggcgtgggctgcatccactacgagatggccacagggaggcccctcttcccgggctccacagtcaaggaggagctgcacctcatctttcgcctcctcgggacccccacagaagagacgtggcccggcgtgaccgccttctctgagttccgcacctacagcttcccctgctacctcccgcagccgctcatcaaccacgcgcccaggttggatacggatggcatccacctcctgagcagcctgctcctgtatgaatccaagagtcgcatgtcagcagaggctgccctgagtcactcctacttccggtctctgggagagcgtgtgcaccagcttgaagacactgcctccatcttctccctgaaggagatccagctccagaaggacccaggctaccgaggcttggccttccagcagccaggacgagggaagaacaggcggcagagcatcttctgagccacgcccaccttgctgtggccaagggacaagagatcacatggagcacaaattcgggtaggatggagcctgtgtggccctcggaggactgaagaacgagggctgacagccagcctggaagaccgcttggcagcccttctggccacggctgtttcttctttgtgcttcccgtgtgcctccccagtagccctcacctgcataccaacccctcctttacccacgttggggctggcataagctgcttccctgagaggacatgaggggggggcggtcctcgtaccctctcccaccctggtgtttgggcacctgcgtgggatgcacacggatgacagaatcaaggcgccaggatgggcactctgccctggatacaggctctaccctcctcccccaggacctgcctagtgccagtttggtagtccccctttctggccccttggagcccacacacgtttcatctttttcccctctgagagcaagaagagacatggcatgttctctgggaccctggaatcctaggtacccacatgtgtgccaaagcctaccccacctggcaggtgtcccacagcaacagaaggaatagtagtccccactctttccatcagccccaccctccactcctccccacggtactgtgaacgtcgtgtgactcagtgcagagacagataatatatttaattcatgtacaaaaaggagcgagcagtctcgtacagaaaagctgactttgatagattgatgccaaagatggagaactgaagtcccccctccaggcctaatgagtgtgggtggggtgtgcttgtgtgtatgtgtgtggtgt

SEQ ID NO: 80519 - DNA, 2334 bp, Homo sapiens
agcggcttcctcctcctcctcctcctcctcctccctcctcttccccaccttcctccactccctcccttcccctccccttctacctcctcctcggccagctcaggttgcagcttctctggggaactgctcacctttccggagcaggggaagctgccccgtgcccgggagggagcgggcgcaccgcggcccccaggacacgcgctgacccggctgcccagtccctcatgatcatgaacaagatgaagaactttaagcgccgtttctccctgtcagtgccccgcactgagaccattgaagaatccttggctgaattcacggagcaattcaaccagctccacaaccggcggaatgagaacttgcagctcggtcctcttggcagagaccccccgcaggagtgcagcaccttctccccaacagacagcggggaggagccggggcagctctcccctggcgtgcagttccagcggcggcagaaccagcgccgcttctccatggaggacgtcagcaagaggctctctctgcccatggatatccgcctgccccaggaattcctacagaagctacagatggagagcccagatctgcccaagccgctcagccgcatgtcccgccgggcctccctgtcagacattggctttgggaaactggaaacatacgtgaaactggacaaactgggagagggcacctatgccacagtcttcaaagggcgcagcaaactgacggagaaccttgtggccctgaaagagatccggctggagcacgaggagggagcgccctgcactgccatccgagaggtgtctctgctgaagaacctgaagcacgccaatattgtgaccctgcatgacctcatccacacagatcggtccctcaccctggtgtttgagtacctggacagtgacctgaagcagtatctggaccactgtgggaacctcatgagcatgcacaacgtcaagattttcatgttccagctgctccggggcctcgcctactgtcaccaccgcaagatcctgcaccgggacctgaagccccagaacctgctcatcaacgagaggggggagctgaagctggccgactttggactggccagggccaagtcagtgcccacaaagacttactccaatgaggtggtgaccctgtggtacaggccccccgatgtgctgctgggatccacagagtactccacccccattgatatgtggggcgtgggctgcatccactacgagatggccacagggaggcccctcttcccgggctccacagtcaaggaggagctgcacctcatctttcgcctcctcgggacccccacagaagagacgtggcccggcgtgaccgccttctctgagttccgcacctacagcttcccctgctacctcccgcagccgctcatcaaccacgcgcccaggttggatacggatggcatccacctcctgagcagcctgctcctgtatgaatccaagagtcgcatgtcagcagaggctgccctgagtcactcctacttccggtctctgggagagcgtgtgcaccagcttgaagacactgcctccatcttctccctgaaggagatccagctccagaaggacccaggctaccgaggcttggccttccagcagccaggacgagggaagaacaggcggcagagcatcttctgagccacgcccaccttgctgtggccaagggacaagagatcacatggagcacaaattcgggtaggatggagcctgtgtggccctcggaggactgaagaacgagggctgacagccagcctggaagaccgcttggcagcccttctggccacggctgtttcttctttgtgcttcccgtgtgcctccccagtagccctcacctgcataccaacccctcctttacccacgttggggctggcataagctgcttccctgagaggacatgaggggggggcggtcctcgtaccctctcccaccctggtgtttgggcacctgcgtgggatgcacacggatgacagaatcaaggcgccaggatgggcactctgccctggatacaggctctaccctcctcccccaggacctgcctagtgccagtttggtagtccccctttctggccccttggagcccacacacgtttcatctttttcccctctgagagcaagaagagacatggcatgttctctgggaccctggaatcctaggtacccacatgtgtgccaaagcctaccccacctggcaggtgtcccacagcaacagaaggaatagtagtccccactctttccatcagccccaccctccactcctccccacggtactgtgaacgtcgtgtgactcagtgcagagacagataatatatttaattcatgtaca

SEQ ID NO: 80520 - DNA, 1955 bp, Homo sapiens
agcggcttcctcctcctcctcctcctcctcctccctcctcttccccaccttcctccactccctcccttcccctccccttctacctcctcctcggccagctcaggttgcagcttctctggggaactgctcacctttccggagcaggggaagctgccccgtgcccgggagggagcgggcgcaccgcggcccccaggacacgcgctgacccggctgcccagtccctcatgatcatgaacaagatgaagaactttaagcgccgtttctccctgtcagtgccccgcactgagaccattgaagaatccttggctgaattcacggagcaattcaaccagctccacaaccggcggaatgagaacttgcagctcggtcctcttggcagagaccccccgcaggagtgcagcaccttctccccaacagacagcggggaggagccggggcagctctcccctggcgtgcagttccagcggcggcagaaccagcgccgcttctccatggaggacgtcagcaagaggctctctctgcccatggatatccgcctgccccaggaattcctacagaagctacagatggagagcccagatctgcccaagccgctcagccgcatgtcccgccgggcctccctgtcagacattggctttgggaaactggaaacatacgtgaaactggacaaactgggagagggcacctatgccacagtcttcaaagggcgcagcaaactgacggagaaccttgtggccctgaaagagatccggctggagcacgaggagggagcgccctgcactgccatccgagaggtgtctctgctgaagaacctgaagcacgccaatattgtgaccctgcatgacctcatccacacagatcggtccctcaccctggtgtttgagtacctggacagtgacctgaagcagtatctggaccactgtgggaacctcatgagcatgcacaacgtcaagattttcatgttccagctgctccggggcctcgcctactgtcaccaccgcaagatcctgcaccgggacctgaagccccagaacctgctcatcaacgagaggggggagctgaagctggccgactttggactggccagggccaagtcagtgcccacaaagacttactccaatgaggtggtgaccctgtggtacaggccccccgatgtgctgctgggatccacagagtactccacccccattgatatgtggggcgtgggctgcatccactacgagatggccacagggaggcccctcttcccgggctccacagtcaaggaggagctgcacctcatctttcgcctcctcgggacccccacagaagagacgtggcccggcgtgaccgccttctctgagttccgcacctacagcttcccctgctacctcccgcagccgctcatcaaccacgcgcccaggttggatacggatggcatccacctcctgagcagcctgctcctgtatgaatccaagagtcgcatgtcagcagaggctgccctgagtcactcctacttccggtctctgggagagcgtgtgcaccagcttgaagacactgcctccatcttctccctgaaggagatccagctccagaaggacccaggctaccgaggcttggccttccagcagccaggacgagggaagaacaggcggcagagcatcttctgagccacgcccaccttgctgtggccaagggacaagagatcacatggagcacaaattcgggtaggatggagcctgtgtggccctcggaggactgaagaacgagggctgacagccagcctggaagaccgcttggcagcccttctggccacggctgtttcttctttgtgcttcccgtgtgcctccccagtagccctcacctgcataccaacccctcctttacccacgttggggctggcataagctgcttccctgagaggacatgaggggggggcggtcctcgtaccgactcgccttagggatcctctagat

SEQ ID NO: 80521 - DNA, 1258 bp, Homo sapiens
ttaggtgaggctcgtgttaatcggacgaggccagtagccctcacctgcataccaacccctcctttacccacgttggggctggcataagctgcttccctgagaggacatgaggggggggcggtcctcgtaccctctcccaccctggtgtttgggcacctgcgtgggatgcacacggatgacagaatcaaggcgccaggatgggcactctgccctggatacaggctctaccctcctcccccaggacctgcctagtgccagtttggtagtccccctttctggccccttggagcccacacacgtttcatctttttcccctctgagagcaagaagagacatggcatgttctctgggaccctggaatcctaggtacccacatgtgtgccaaagcctaccccacctggcaggtgtcccacagcaacagaaggaatagtagtccccactctttccatcagccctaccctaccctcattccccgacaccctctggcttgaaccatggctgagcagtgccggcatacgctttgccggcatgcttggatgcccagctgtgtccagaggtggcctgggaccgccagttgcacgcctgccacctcagccagcccccgcccagctcatcagtctgaatggagttgccttaaattggcaggtggtaccgtactcactgcccttggagctgtgaccggctcctgcctgtccaccccttcccgaggtggctcctgcttaccttatcatcccagggctctgattagccaggcctggtcagggtcctggggacggcacccagatatgcagagtcaccctgacactggtgccaggctgacctcagctcccgaaggctcgcacagcctccccatccttccttcccagcccttgtggctctgtccacctgatcccaataccagcttcccccagcccctgccaccccagagggcggccacgacagggagaggtgtagatgccaccatctgagggagaggaacgtggaacaggagcaggctctgatgctgagaggcttgcctccgggggctggaagcctgggtggccggggcccctgaagaaggctcccctctgtatcccccaggtctcctcaacactgggctgatcctgaatggcacaggccaaggggaggccagcctcgcctttctacccaggccccctgccctgcccacctcaggcccccaccctccactcctccccacggtactgtgaacgtcgtgtgactcagtgcagagacagataatatatttaattcatgtaca

SEQ ID NO: 80522 - DNA, 1158 bp, Homo sapiens
gatctagaggatccctaaggcgagccgggtactctcccaccctggtgtttgggcacctgcgtgggatgcacacggatgacagaatcaaggcgccaggatgggcactctgccctggatacaggctctaccctcctcccccaggacctgcctagtgccagtttggtagtccccctttctggccccttggagcccacacacgtttcatctttttcccctctgagagcaagaagagacatggcatgttctctgggaccctggaatcctaggtacccacatgtgtgccaaagcctaccccacctggcaggtgtcccacagcaacagaaggaatagtagtccccactctttccatcagccctaccctaccctcattccccgacaccctctggcttgaaccatggctgagcagtgccggcatacgctttgccggcatgcttggatgcccagctgtgtccagaggtggcctgggaccgccagttgcacgcctgccacctcagccagcccccgcccagctcatcagtctgaatggagttgccttaaattggcaggtggtaccgtactcactgcccttggagctgtgaccggctcctgcctgtccaccccttcccgaggtggctcctgcttaccttatcatcccagggctctgattagccaggcctggtcagggtcctggggacggcacccagatatgcagagtcaccctgacactggtgccaggctgacctcagctcccgaaggctcgcacagcctccccatccttccttcccagcccttgtggctctgtccacctgatcccaataccagcttcccccagcccctgccaccccagagggcggccacgacagggagaggtgtagatgccaccatctgagggagaggaacgtggaacaggagcaggctctgatgctgagaggcttgcctccgggggctggaagcctgggtggccggggcccctgaagaaggctcccctctgtatcccccaggtctcctcaacactgggctgatcctgaatggcacaggccaaggggaggccagcctcgcctttctacccaggccccctgccctgcccacctcaggcccccaccctccactcctccccacggtactgtgaacgtcgtgtgactcagtgcagagacagataatatatttaattcatgtaca

SEQ ID NO: 80523 - DNA, 1636 bp, Homo sapiens
agcggcttcctcctcctcctcctcctcctcctccctcctcttccccaccttcctccactccctcccttcccctccccttctacctcctcctcggccagctcaggttgcagcttctctggggaactgctcacctttccggagcaggggaagctgccccgtgcccgggagggagcgggcgcaccgcggcccccaggacacgcgctgacccggctgcccagtccctcatgatcatgaacaagatgaagaactttaagcgccgtttctccctgtcagtgccccgcactgagaccattgaagaatccttggctgaattcacggagcaattcaaccagctccacaaccggcggaatgagaacttgcagctcggtcctcttggcagagaccccccgcaggagtgcagcaccttctccccaacagacagcggggaggagccggggcagctctcccctggcgtgcagttccagcggcggcagaaccagcgccgcttctccatggaggacgtcagcaagaggctctctctgcccatggatatccgcctgccccaggaattcctacagaagctacagatggagagcccagatctgcccaagccgctcagccgcatgtcccgccgggcctccctgtcagacattggctttgggaaactggaaacatacgtgaaactggacaaactgggagagggcacctatgccacagtcttcaaagggcgcagcaaactgacggagaaccttgtggccctgaaagagatccggctggagcacgaggagggagcgccctgcactgccatccgagaggtgtctctgctgaagaacctgaagcacgccaatattgtgaccctgcatgacctcatccacacagatcggtccctcaccctggtgtttgagtacctggacagtgacctgaagcagtatctggaccactgtgggaacctcatgagcatgcacaacgtcaaggtgaggcctcaggggcagggtccccccatcttggcagccacctgtccagaagcccagtgtggggacccactctcaccaccagggatccggctgctgaggtggctcagaccttcccacgtaggaaagagggagagggcaatgccatcaacgagtccaggaactgggttgagcgctttaccccaagaacagacacacactgtctgccactgtctagctgttggtataaaacccactctcaactctgaacatcagtttcccagtctgtcaaatgggagtgtgagctacctgccaaaatgcagggaggcttctggggaagctcggggttatgaatgacctctcctggtgtttgttaaagaatcaaggctgggcatggtggcccacgcctgtaatcccagcactgggaggccaaggcaggaagatggcttgagcccaggagtttgagaccagcctgggcaacatggcaagacctcatctctactaaaaattgaaaaattagccgggcacagtagcgtgcacccatagtcccagctgcttgagaggctgaggcaggagggccacttgagcccgggaggttgaggctgcagtgagccatgatcacaccactgcactccagcctgggtgacagagtaaaaccctgactctaaaagaaaaaaccatttaactggcccggggtttcccgtcgg

SEQ ID NO: 80524 - DNA, 544 bp, Homo sapiens
gccgtggtcggcgagacccacaggaagtgtgtaacgacacctcctacggcacgcaccgagctcgcagtcgttgctgccccgaggaggtgtagatcgagcctcctgccgcacacacgttcgcacgcggcggccggcgcgctggaccgagaggttggagcaatccatcctccgcgcgcacgagctcagtccctactgccccgacaggtgtggaacccgccgtccccgctatggtccgaggaagtgtacagcactgctccctactacacgtcctgggcccgcggtccccgatgccccccggagctctgtgcacctccactgaaacgcaaggagcagacagaacctacaccatccgtgaggttttttccttcaccactttgaatgtcatcccactggcctgcaggatttctgaaaatttctgaaaactttgctggtagttacattagcacccctttgtatgtggtatgtttcttatctcttgctgctctcaaaattttctgtctttgatttttggtagtttgattattatgtgtcttgatatactcct

SEQ ID NO: 80525 - DNA, 960 bp, Homo sapiens
cggccgccccccacacaaaggggctccccgcctgggtcgcggcgtcggcgcgctcgtccccgccccgcgcgcgggctctcacccacctgcaggtgtctgtgcgtctgtccataggaacgcggtcggcgcgggggggcctgcgagagccgggcagcccgggctggacgggacgggccgaaggggcgcgagggcgggaggagagcggccagagggccgggcaccgaaggtgtggaacccgccgtccccgctatggtccgaggaagtgtacagcactgctccctactacacgtcctgggcccgcggtccccgatgccccccggagctctgtgcacctccactgaaacgcaaggagcagacagaacctacaccatccgtgaggcatccaaccatgatgaggtaccttgttgaacaaactaactctgccactgagaacgatgaaagctgtttaaaaaaataaataagtctgtttaaaacaattggagagcaaccctgtcatccaaggcttgagagtccacgagccccccaggaagaagagaaatactctgaatgtcagtacggggtctatcacatagtggaattaatgaggaaacagactcaaaaaggattttggcttgctcaaggtcacacagcttgtatgaggcagtgctgcaatttaaagccagcaagaaccatgaaacaggtcttataaaaagaaaaaaattacaattctggaggtgacctagttggaagcctgaaattccatgttgtgaaacaactagaggccggccctctgatcctttctctggatgtgctgaattcagcagggtggaagtgctaaaaccaggaggagcaatgaagtcagtgttgagaagaacatgcagctgagaagccaagtgggagaccgggacactgctctgattgaggataatgtatgttacactgtacccactccgttaagcacaataaatctcctttttcttg

SEQ ID NO: 80526 - DNA, 1194 bp, Homo sapiens
cggccgccccccacacaaaggggctccccgcctgggtcgcggcgtcggcgcgctcgtccccgccccgcgcgcgggctctcacccacctgcaggtgtctgtgcgtctgtccataggaacgcggtcggcgcgggggggcctgcgagagccgggcagcccgggctggacgggacgggccgaaggggcgcgagggcgggaggagagcggccagagggccgggcaccgaaggtgtggaacccgccgtccccgctatggtccgaggaagtgtacagcactgctccctactacacgtcctgggcccgcggtccccgatgccccccggagctctgtgcacctccactgaaacgcaaggagcagacagaacctacaccatccgtgagcactattcacaatagccaagaggttgaagcagcccaaatgttcatcaacagatgaagagatgaatgaaaatgtgatatatacatataatggaatattattcagccttaaaaaggaaggaaatcttatcacaggctacaacatagatgaaccttgaggatgttgtgccaagtgcaataaaccagtcacaaaaggacaaatactgttatgatttgacctatatgaactatgtagaggcatccaaccatgatgaggtaccttgttgaacaaactaactctgccactgagaacgatgaaagctgtttaaaaaaataaataagtctgtttaaaacaattggagagcaaccctgtcatccaaggcttgagagtccacgagccccccaggaagaagagaaatactctgaatgtcagtacggggtctatcacatagtggaattaatgaggaaacagactcaaaaaggattttggcttgctcaaggtcacacagcttgtatgaggcagtgctgcaatttaaagccagcaagaaccatgaaacaggtcttataaaaagaaaaaaattacaattctggaggtgacctagttggaagcctgaaattccatgttgtgaaacaactagaggccggccctctgatcctttctctggatgtgctgaattcagcagggtggaagtgctaaaaccaggaggagcaatgaagtcagtgttgagaagaacatgcagctgagaagccaagtgggagaccgggacactgctctgattgaggataatgtatgttacactgtacccactccgttaagcacaataaatctcctttttcttg

SEQ ID NO: 80527 - DNA, 389 bp, Homo sapiens
acgtgaccgcgctgcgggagagggatgaaacaagagggcggctgaagccgatcctgagtggggccccagcaattcggaatgagccttttccctccacccgcttctgccgaccggggccctcccgcgcggcctcgcaggcctccccacccgcgcccgtccctcctcctccgctttcccttctcccccgtcctcggctccgacattaggggcaggcggggcaggcagcccaagcagcctgcggcttccgctgcggagcgctgcgccccggcccctgccccggccccagcgccgccccgcccaagtccggacccaatcggaagagaggctcagactctgctggaaccagaagagacagcagggagcacggagaggccaagaaaaagacaaac

SEQ ID NO: 80528 - DNA, 343 bp, Homo sapiens
tttcttttttggttaggttcagtaaatggggatctatagcaggaggctgaagagtgacaatagtgaggtcagggcatttattttgctggtttcctcttgggtgtgttcctataagttaattatgccccttttacaaaaatcatagattttctaagtttttcctctatccctgcagccacactctctctgttctgatcattgtttcttcatttgcttctacagccttacagatcataatggctcttcactgttgctgtttctcaaccctctttagtttcttctaagccagtctgtacctttgtacatatttccttttttaaatcctctttaagtactgaaatgc

SEQ ID NO: 80529 - DNA, 811 bp, Homo sapiens
taacacctctgtgcttcagttttttttctcacttgtaaaattttgacaataattgtattcatggaattgttatgaggattaaatgaactaatataaaataaagcacttagaaccaaacctggaatataagtgctttgttaagtcagagcttaaaaaaaggaaattatcataaaagaatggtctgaagtacaaaatagaatggtgagtgaataaaatggtgaacaagcttgtcagtccaaacatcagtctagaaaaataaggtccgatttgtgaagttttgaactaatgcctccaataacaatagcaagtaggcatttgggggagggtcaatgtaattaaaattattctaagatcattacttcgtttcaaaggaaagttaagatatgtttgcctttacattttgttaagttagacacttataaaatgcagggacagttgttaaaaaaaaaagggaataaatacagagctatgaattccaattcagtggaggaaaaatggaatttaaaaaatctaaccataaagtcagttttttaaaaatgcagaaacagccagcgccgtggctcacgcctgtaatcccagcactttgggaggctgagacgggcagatcacgaggtcaggagatcgagaccatcctggctaacacggtgaaaccccgtctctactaaaaatacaaaaaattagccagacatggtggcgggcgcctgtagtcccagctacttgggaggctgaggcaggagaatggcatgaacccgggaggcagagcttgcagtgagccgagatcacgccactgcactccagcctgggcgacaga

SEQ ID NO: 80530 - DNA, 402 bp, Homo sapiens
aaaagtgcctgtctttatcatgtttaagatttttggcttgaatttattttatctggtatcaggattgctaccctgacttccttatttttccatttgcctgatatataccttttttcatccgtttttagctttttggatcacttttaggtctaggtctatctgttgtatatgatgtgcatgtatgtgtgtgtgtatatatagagcatatagttttatatatatacacacatatacatacacatacatatatagttagatcattctttgtgagcaaaattggaagtcttttagtagatgggtaaaaccctgttatgtttgggcttaactgtggcaaagtattatatattttgttattttctgatacttttctccatatgtgtattttttgttccttaatttttt

SEQ ID NO: 80531 - DNA, 610 bp, Homo sapiens
tttgaggctgcagtgagctatgaccataccactgcactccagcctgggccaacagagcaaggccttttttaaaaaaaatcaaaaaacagtgcaagatcaccctgacctccattctgcttcttaaaagcaaatgaaattcccaagtgaaagacgccctccccatatcaaataaaatgattttatcatcaaggacgacaggaagtcaaggccgacagaatttggtacagaccttgtgaaaacaactctttcaagcatccccacatcatgtagttgcttttttacaagtggctagtctttgtccaagtcagtatataagtgatttaatttggccactttgagtcttcatttcattataagggagcctgtgctgtataaaacttgtgttaaattaatatgcctggctggacacggtggctcacacctgtaatcccagcactttgggaggccgaggtggttggatcacttgagttgaggacctcaagcaatcctcctacacctcagcctcccaagttgctgggattacaggcatgaaccactgcacctgaccctgttagtttagcttatgtcagtttaattctcccgcccagcctggggccctaaaaggggagaa

SEQ ID NO: 80532 - DNA, 625 bp, Homo sapiens
gacccctgataggattgacggccagtcagaaatgggtgacaggagaggggagaatggagtaggggaagggtgatccttttgactggcacttcatcctggcttttccctcctacctcaggccttgaaggctgagcaggggatggtgaaaggggttggagctggtagggaagccccacagggtgtgggtctccactcagggatcaagagcagtgctgttgggaatcatgcatggtaaagacagcccttactcaagacagaaaaagcctgatgccacatgagaagggaagactgccagtttcatttagcattgttgcctagcggggatttcagggcgtcctgtcacgtgagaggaatggggaggcactagttgtggaaggcagagctggtaataatttagattttgtttcatagataacagcaatactaataacggtgtgatgacatttgaaggtgatactgatggccctacttgagtggttttctgatagtggtaatgtctgttgtgttgccctctttcataggtgtgaattaaatctggcaggaaaatttacatagttagaatagcaagacaaagggaatagatcatttcagaaggataagctgtacaatggtattttgaattaaa

SEQ ID NO: 80533 - DNA, 337 bp, Homo sapiens
cactacaaacagcatagaaagcaagagaagttgggaatttattctaaaatagaatggaggttgtcatctacagcagcactcctcactcctctgttgccatttttagcaaggttgttgcatgtttgaaatgaggtctgtttaaagtggcaatctcagatgcagtttggagagtcagatctttctccttgaatatctttcgataaacaacaaggtggtgtgatcttaatatatttgaaaaaaacttcattctcgtgagtcatttaaatgtgtacaatgtacacactggtacttagagtttctgtttgattcttttttaataaactactctttgatttaa

SEQ ID NO: 80534 - DNA, 871 bp, Homo sapiens
cagaaccagggggcaagaccttcattgtgggagaccagatctccttcgctgactacaacctgctggacttgctgccatggctacttgtttctgtaatacatgcatgtgtgttttttaaaacctatgataggcctctgattctgcagctgcaacttttatggaatgttttccttctccacatctcatgtgatgctcttattacagacacagcattgttggttttgccatgtactattttacctatgacccgtggattggcaagttattgtatcttgaggacttcttcgtgatgagtgattatagaggctttggcataggatcagaaattctgaagaatctaagccaggttgcaatgaggtgtcgctgcagcagcatgcacttcttggtagcagaatggaatgaaccatccatcaacttctataaaagaagaggtgcttctgatctgtccagtgaagagggttggagactgttcaagatcgacaaggagtacttgctaaaaatggcaacagaggagtgaggagtgctgctgtagatgacaacctccattctattttagaataaattcccaacttctcttgctttctatgctgtttgtagtgaaataatagaatgagcacccattccaaagctttattaccagtggcgttgttgcatgtttgaaatgaggtctgtttaaagtggcaatctcagatgcagtttggagagtcagatctttctccttgaatatctttcgataaacaacaaggtggtgtgatcttaatatatttgaaaaaaacttcattctcgtgagtcatttaaatgtgtacaatgtacacactggtacttagagtttctgtttgattcttttttaataaactactctttgatttaa

SEQ ID NO: 80535 - DNA, 296 bp, Homo sapiens
catgcaacaacgccactggtaataaagctttggaatgagcacccattccaaagctttattaccagtggcgttgttgcatgtttgaaatgaggtctgtttaaagtggcaatctcagatgcagtttggagagtcagatctttctccttgaatatctttcgataaacaacaaggtggtgtgatcttaatatatttgaaaaaaacttcattctcgtgagtcatttaaatgtgtacaatgtacacactggtacttagagtttctgtttgattcttttttaataaactactctttgatttaa

SEQ ID NO: 80536 - DNA, 518 bp, Homo sapiens
  misc_feature (112)..(112): n is a, c, g, or t
taatgtcgctacaagcattgtttcctggcaaatgtgcaagtggtggggtcgctgccgctgctgctccgccgctctgctgcctcttctctcaagggtggttcttcgtccttcntgagcccctcaagcttcgcctctgctcgtgccgaattcggcacgagtcaagatcgacaaggagtacttgctaaaaaagcattctattttagaataaattcccaacttctcttgctttctatgctgtttgtagtgaaataatagaatgagcacccattccaaagctttattaccagtggcgttgttgcatgtttgaaatgaggtctgtttaaagtggcaatctcagatgcagtttggagagtcagatctttctccttgaatatctttcgataaacaacaaggtggtgtgatcttaatatatttgaaaaaaacttcattctcgtgagtcatttaaatgtgtacaatgtacacactggtacttagagtttctgtttgattcttttttaataaactactctttgatttaa

SEQ ID NO: 80537 - DNA, 130 bp, Homo sapiens
atatcgtcgacccacgcgtccgatttgaaaaaaacttcattctcgtgagtcatttaaatgtgtacaatgtacacactggtacttagagtttctgtttgattcttttttaataaactactctttgatttaa

SEQ ID NO: 80538 - DNA, 365 bp, Homo sapiens
gcagccgctactactactaaattcgccccccgatcggcattctattttagaataaattcccaacttctcttgctttctatgctgtttgtagtgaaataatagaatgagcacccattccaaagctttattaccagtggcgttgttgcatgtttgaaatgaggtctgtttaaagtggcaatctcagatgcagtttggagagtcagatctttctccttgaatatctttcgataaacaacaaggtggtgtgatcttaatatatttgaaaaaaacttcattctcgtgagtcatttaaatgtgtacaatgtacacactggtacttagagtttctgtttgattcttttttaataaactactctttgatttaa

SEQ ID NO: 80539 - DNA, 431 bp, Homo sapiens
  misc_feature (326)..(326): n is a, c, g, or t
  misc_feature (343)..(343): n is a, c, g, or t
  misc_feature (349)..(349): n is a, c, g, or t
  misc_feature (388)..(388): n is a, c, g, or t
  misc_feature (397)..(397): n is a, c, g, or t
taaattcgccaccattaactgaaaaagatctgctagaagatggttttggagagcaccccttttaccactgcctggttgcagaagtgccgaaagagcactggactccggaaggttacagtctctagcttcgccatgtacatggcccttccgtgtacatggatgggcggggaggtaactaaaagatcctttacacaataaagtagatgatcatgataaatgaggacacagcattgttggttttgccatgtactattttacctatgacccgtggattggcaagttattgtatcttgaggacttcttcgtgatgagtgattatagagttnggcataggatcaagaanttcctnaaggaatcttacgccaggtttgcaatgaagtgtcgcctncaggcaagnattcaacttccttcgggttggcagaatctggatt

SEQ ID NO: 80540 - DNA, 2987 bp, Homo sapiens
cgtgggttccttgcagagccgtttctcagataacatttgaagtacaatatagtatggcaatgatgtggtttgttttggctcagcaaccccacccaaatctcatctcgaattgtaatccccaagtgctgagaaggggcctggtggtaggtgactggatcatgggcgcagctcttagtcgcgggccgactggtgtttatccgtcactcgccgaggttccttgggtcatggtgccagcctgactgagaagaggacgctcccgggagacgaatgaggaaccacctcctcctactgttcaagtacaggggcctggtccgcaaagggaagaaaagcaaaagacgaaaatggctaaattcgtgatccgcccagccactgccgccgactgcagtgacatactgcggctgatcaaggtagcggagagccagagctcctcccggggcgtggggtggaggtggctccgtttcccagggtggggtgattcacgtcttgaggtctcggccggtgtgagagcccagcctgttcccctttctgcgcccatccccggctcggccgccaccccgcccgcccgccccattcccttcccctgagctggccgggccggagcctcattttgttttctacttttttctctcctatgtgcatccccccaggagctggctaaatatgaatacatggaagaacaagtaatcttaactgaaaaagggtaattcaacagtggcgggacgggggacaagcgttcggtgcctgtcaccttcgccaaggccattaccgcccctgctcccccttcttgcagatctgctagaagatggttttggagagcaccccttttaccactgcctggttgcagaagtgccgaaagagcactggactccggaaggtaacccctcgccctttccagaagccagagagaccaagtgttatgtaagaagtagtgtcggctgtgtagaaccactgactacacaggccgaagttactgagaacttggacagaaaaaatagccagcaagtgttcaaactactgaggaaaaaaaaaaattagatatgctgcacttaagaatactagggcaggttaaaagagctgtttaagtaagtatcagagtgctgtggagactcggaagtgtttaagctgcttaagtaagtataagtgctgtggagacccggaagagttagatataatgtcatttgttgtaattcagtttcataaaatggttcttgtttgaccctaacgtaacagtttttgtaattgtgttaaatcacatttttttctttaatttgtcccaatcttcaggttacagtctctagcttcgccatgtacatggcccttccgtgtacatggatgggcggggaggtaactaaaagatcctttacacaataaagtagatgatcatgataaatgaggtaaggtcctattatcacacacttcaaacacggtagatcagaaacccactatgatactcgcttcctgtctgtttgctaaggaatataaaatggctagaaagtttaatttgaaacctttgcctccatttggaatagtagacaccagttaagagggtgtcagatgccttttttttttttttttttttttggctggtccctgttgattggtcagaagacagctcagctaaaaggggaagttgtctgggtggttgctttttttctgacgtctgttcctcaggctggaagaaatgagcagaaaacaagggatgagtactttttagagtatgtgcatgttacgtaatacctgtttctgggcaatgctgcttcttctgactcaacaaatggggagagcaaattgaaaatgcgtaaattggaaggcaagttctgaaattaaacgttgtactttggcctgatgttctgacctttaaggaagcaagagtttgtaaacttccaaatatttactattctgaactgccgtgtaaacctgacgtattcccaagtcaacataccagtataccaataggatgtgaataatgtgtgtgttgagtttaaaaccatagcagttttgctctggcaagtaatgaaagcgttctcgcttcctgagtgtgagctccagcagactgcagagtggccagtccacagttgtagcctgacttcagtgagttctgatgtgtgctttttgcaaatacatgttctcagaacagtgagatcatccagcagtggcctggactgcactcacataaaaatcatgagacagccatggctacttgtttctgtaatacatgcatgtgtgttttttaaaacctatgataggcctctgattctgcagctgcaacttttatggaatgttttccttctccacatctcatgtgatgctcttattacagacacagcattgttggttttgccatgtactattttacctatgacccgtggattggcaagttattgtatcttgaggacttcttcgtgatgagtgattatagaggctttggcataggatcagaaattctgaagaatctaagccaggttgcaatgaggtgtcgctgcagcagcatgcacttcttggtagcagaatggaatgaaccatccatcaacttctataaaagaagaggtgcttctgatctgtccagtgaagagggttggagactgttcaagatcgacaaggagtacttgctaaaaatggcaacagaggagtgaggagtgctgctgtagatgacaacctccattctattttagaataaattcccaacttctcttgctttctatgctgtttgtagtgaaataatagaatgagcacccattccaaagctttattaccagtggcgttgttgcatgtttgaaatgaggtctgtttaaagtggcaatctcagatgcagtttggagagtcagatctttctccttgaatatctttcgataaacaacaaggtggtgtgatcttaatatatttgaaaaaaacttcattctcgtgagtcatttaaatgtgtacaatgtacacactggtacttagagtttctgtttgattcttttttaataaactactctttgatttaa

SEQ ID NO: 80541 - DNA, 2933 bp, Homo sapiens
cgtgggttccttgcagagccgtttctcagataacatttgaagtacaatatagtatggcaatgatgtggtttgttttggctcagcaaccccacccaaatctcatctcgaattgtaatccccaagtgctgagaaggggcctggtggtaggtgactggatcatgggcgcagctcttagtcgcgggccgactggtgtttatccgtcactcgccgaggttccttgggtcatggtgccagcctgactgagaagaggacgctcccgggagacgaatgaggaaccacctcctcctactgttcaagtacaggggcctggtccgcaaagggaagaaaagcaaaagacgaaaatggctaaattcgtgatccgcccagccactgccgccgactgcagtgacatactgcggctgatcaaggtagcggagagccagagctcctcccggggcgtggggtggaggtggctccgtttcccagggtggggtgattcacgtcttgaggtctcggccggtgtgagagcccagcctgttcccctttctgcgcccatccccggctcggccgccaccccgcccgcccgccccattcccttcccctgagctggccgggccggagcctcattttgttttctacttttttctctcctatgtgcatccccccaggagctggctaaatatgaatacatggaagaacaagtaatcttaactgaaaaagggtaattcaacagtggcgggacgggggacaagcgttcggtgcctgtcaccttcgccaaggccattaccgcccctgctcccccttcttgcagatctgctagaagatggttttggagagcaccccttttaccactgcctggttgcagaagtgccgaaagagcactggactccggaaggtaacccctcgccctttccagaagccagagagaccaagtgttatgtaagaagtagtgtcggctgtgtagaaccactgactacacaggccgaagttactgagaacttggacagaaaaaatagccagcaagtgttcaaactactgaggaaaaaaaaaaattagatatgctgcacttaagaatactagggcaggttaaaagagctgtttaagtaagtatcagagtgctgtggagactcggaagtgtttaagctgcttaagtaagtataagtgctgtggagacccggaagagttagatataatgtcatttgttgtaattcagtttcataaaatggttcttgtttgaccctaacgtaacagtttttgtaattgtgttaaatcacatttttttctttaatttgtcccaatcttcaggttacagtctctagcttcgccatgtacatggcccttccgtgtacatggatgggcggggaggtaactaaaagatcctttacacaataaagtagatgatcatgataaatgaggtaaggtcctattatcacacacttcaaacacggtagatcagaaacccactatgatactcgcttcctgtctgtttgctaaggaatataccagttaagagggtgtcagatgccttttttttttttttttttttttggctggtccctgttgattggtcagaagacagctcagctaaaaggggaagttgtctgggtggttgctttttttctgacgtctgttcctcaggctggaagaaatgagcagaaaacaagggatgagtactttttagagtatgtgcatgttacgtaatacctgtttctgggcaatgctgcttcttctgactcaacaaatggggagagcaaattgaaaatgcgtaaattggaaggcaagttctgaaattaaacgttgtactttggcctgatgttctgacctttaaggaagcaagagtttgtaaacttccaaatatttactattctgaactgccgtgtaaacctgacgtattcccaagtcaacataccagtataccaataggatgtgaataatgtgtgtgttgagtttaaaaccatagcagttttgctctggcaagtaatgaaagcgttctcgcttcctgagtgtgagctccagcagactgcagagtggccagtccacagttgtagcctgacttcagtgagttctgatgtgtgctttttgcaaatacatgttctcagaacagtgagatcatccagcagtggcctggactgcactcacataaaaatcatgagacagccatggctacttgtttctgtaatacatgcatgtgtgttttttaaaacctatgataggcctctgattctgcagctgcaacttttatggaatgttttccttctccacatctcatgtgatgctcttattacagacacagcattgttggttttgccatgtactattttacctatgacccgtggattggcaagttattgtatcttgaggacttcttcgtgatgagtgattatagaggctttggcataggatcagaaattctgaagaatctaagccaggttgcaatgaggtgtcgctgcagcagcatgcacttcttggtagcagaatggaatgaaccatccatcaacttctataaaagaagaggtgcttctgatctgtccagtgaagagggttggagactgttcaagatcgacaaggagtacttgctaaaaatggcaacagaggagtgaggagtgctgctgtagatgacaacctccattctattttagaataaattcccaacttctcttgctttctatgctgtttgtagtgaaataatagaatgagcacccattccaaagctttattaccagtggcgttgttgcatgtttgaaatgaggtctgtttaaagtggcaatctcagatgcagtttggagagtcagatctttctccttgaatatctttcgataaacaacaaggtggtgtgatcttaatatatttgaaaaaaacttcattctcgtgagtcatttaaatgtgtacaatgtacacactggtacttagagtttctgtttgattcttttttaataaactactctttgatttaa

SEQ ID NO: 80542 - DNA, 2933 bp, Homo sapiens
cgtgggttccttgcagagccgtttctcagataacatttgaagtacaatatagtatggcaatgatgtggtttgttttggctcagcaaccccacccaaatctcatctcgaattgtaatccccaagtgctgagaaggggcctggtggtaggtgactggatcatgggcgcagctcttagtcgcgggccgactggtgtttatccgtcactcgccgaggttccttgggtcatggtgccagcctgactgagaagaggacgctcccgggagacgaatgaggaaccacctcctcctactgttcaagtacaggggcctggtccgcaaagggaagaaaagcaaaagacgaaaatggctaaattcgtgatccgcccagccactgccgccgactgcagtgacatactgcggctgatcaaggtagcggagagccagagctcctcccggggcgtggggtggaggtggctccgtttcccagggtggggtgattcacgtcttgaggtctcggccggtgtgagagcccagcctgttcccctttctgcgcccatccccggctcggccgccaccccgcccgcccgccccattcccttcccctgagctggccgggccggagcctcattttgttttctacttttttctctcctatgtgcatccccccaggagctggctaaatatgaatacatggaagaacaagtaatcttaactgaaaaagggtaattcaacagtggcgggacgggggacaagcgttcggtgcctgtcaccttcgccaaggccattaccgcccctgctcccccttcttgcagatctgctagaagatggttttggagagcaccccttttaccactgcctggttgcagaagtgccgaaagagcactggactccggaaggtaacccctcgccctttccagaagccagagagaccaagtgttatgtaagaagtagtgtcggctgtgtagaaccactgactacacaggccgaagttactgagaacttggacagaaaaaatagccagcaagtgttcaaactactgaggaaaaaaaaaaattagatatgctgcacttaagaatactagggcaggttaaaagagctgtttaagtaagtatcagagtgctgtggagactcggaagtgtttaagctgcttaagtaagtataagtgctgtggagacccggaagagttagatataatgtcatttgttgtaattcagtttcataaaatggttcttgtttgaccctaacgtaacagtttttgtaattgtgttaaatcacatttttttctttaatttgtcccaatcttcaggttacagtctctagcttcgccatgtacatggcccttccgtgtacatggatgggcggggaggtaactaaaagatcctttacacaataaagtagatgatcatgataaatgaggtaaggtcctattatcacacacttcaaacacggtagatcagaaacccactatgatactcgcttcctgtctgtttgctaaggaatataaaatggctagaaagtttaatttgaaacctttgcctccatttggaatagtagacaccagttaagagggtgtcagatgccttttttttttttttttttttttggctggtccctgttgattggtcagaagacagctcagctaaaaggggaagttgtctgggtggttgctttttttctgacgtctgttcctcaggctggaagaaatgagcagaaaacaagggatgagtactttttagagtatgtgcatgttacgtaatacctgtttctgggcaatgctgcttcttctgactcaacaaatggggagagcaaattgatgttctgacctttaaggaagcaagagtttgtaaacttccaaatatttactattctgaactgccgtgtaaacctgacgtattcccaagtcaacataccagtataccaataggatgtgaataatgtgtgtgttgagtttaaaaccatagcagttttgctctggcaagtaatgaaagcgttctcgcttcctgagtgtgagctccagcagactgcagagtggccagtccacagttgtagcctgacttcagtgagttctgatgtgtgctttttgcaaatacatgttctcagaacagtgagatcatccagcagtggcctggactgcactcacataaaaatcatgagacagccatggctacttgtttctgtaatacatgcatgtgtgttttttaaaacctatgataggcctctgattctgcagctgcaacttttatggaatgttttccttctccacatctcatgtgatgctcttattacagacacagcattgttggttttgccatgtactattttacctatgacccgtggattggcaagttattgtatcttgaggacttcttcgtgatgagtgattatagaggctttggcataggatcagaaattctgaagaatctaagccaggttgcaatgaggtgtcgctgcagcagcatgcacttcttggtagcagaatggaatgaaccatccatcaacttctataaaagaagaggtgcttctgatctgtccagtgaagagggttggagactgttcaagatcgacaaggagtacttgctaaaaatggcaacagaggagtgaggagtgctgctgtagatgacaacctccattctattttagaataaattcccaacttctcttgctttctatgctgtttgtagtgaaataatagaatgagcacccattccaaagctttattaccagtggcgttgttgcatgtttgaaatgaggtctgtttaaagtggcaatctcagatgcagtttggagagtcagatctttctccttgaatatctttcgataaacaacaaggtggtgtgatcttaatatatttgaaaaaaacttcattctcgtgagtcatttaaatgtgtacaatgtacacactggtacttagagtttctgtttgattcttttttaataaactactctttgatttaa

SEQ ID NO: 80543 - DNA, 2062 bp, Homo sapiens
cgtgggttccttgcagagccgtttctcagataacatttgaagtacaatatagtatggcaatgatgtggtttgttttggctcagcaaccccacccaaatctcatctcgaattgtaatccccaagtgctgagaaggggcctggtggtaggtgactggatcatgggcgcagctcttagtcgcgggccgactggtgtttatccgtcactcgccgaggttccttgggtcatggtgccagcctgactgagaagaggacgctcccgggagacgaatgaggaaccacctcctcctactgttcaagtacaggggcctggtccgcaaagggaagaaaagcaaaagacgaaaatggctaaattcgtgatccgcccagccactgccgccgactgcagtgacatactgcggctgatcaaggtagcggagagccagagctcctcccggggcgtggggtggaggtggctccgtttcccagggtggggtgattcacgtcttgaggtctcggccggtgtgagagcccagcctgttcccctttctgcgcccatccccggctcggccgccaccccgcccgcccgccccattcccttcccctgagctggccgggccggagcctcattttgttttctacttttttctctcctatgtgcatccccccaggagctggctaaatatgaatacatggaagaacaagtaatcttaactgaaaaagggtaattcaacagtggcgggacgggggacaagcgttcggtgcctgtcaccttcgccaaggccattaccgcccctgctcccccttcttgcagatctgctagaagatggttttggagagcaccccttttaccactgcctggttgcagaagtgccgaaagagcactggactccggaaggtaacccctcgccctttccagaagccagagagaccaagtgttatgtaagaagtagtgtcggctgtgtagaaccactgactacacaggccgaagttactgagaacttggacagaaaaaatagccagcaagtgttcaaactactgaggaaaaaaaaaaattagatatgctgcacttaagaatactagggcaggttaaaagagctgtttaagtaagtatcagagtgctgtggagactcggaagtgtttaagctgcttaagtaagtataagtgctgtggagacccggaagagttagatataatgtcatttgttgtaattcagtttcataaaatggttcttgtttgaccctaacgtaacagtttttgtaattgtgttaaatcacatttttttctttaatttgtcccaatcttcaggttacagtctctagcttcgccatgtacatggcccttccgtgtacatggatgggcggggaggtaactaaaagatcctttacacaataaagtagatgatcatgataaatgaggacacagcattgttggttttgccatgtactattttacctatgacccgtggattggcaagttattgtatcttgaggacttcttcgtgatgagtgattatagaggctttggcataggatcagaaattctgaagaatctaagccaggttgcaatgaggtgtcgctgcagcagcatgcacttcttggtagcagaatggaatgaaccatccatcaacttctataaaagaagaggtgcttctgatctgtccagtgaagagggttggagactgttcaagatcgacaaggagtacttgctaaaaatggcaacagaggagtgaggagtgctgctgtagatgacaacctccattctattttagaataaattcccaacttctcttgctttctatgctgtttgtagtgaaataatagaatgagcacccattccaaagctttattaccagtggcgttgttgcatgtttgaaatgaggtctgtttaaagtggcaatctcagatgcagtttggagagtcagatctttctccttgaatatctttcgataaacaacaaggtggtgtgatcttaatatatttgaaaaaaacttcattctcgtgagtcatttaaatgtgtacaatgtacacactggtacttagagtttctgtttgattcttttttaataaactactctttgatttaa

SEQ ID NO: 80544 - DNA, 1542 bp, Homo sapiens
cgtgggttccttgcagagccgtttctcagataacatttgaagtacaatatagtatggcaatgatgtggtttgttttggctcagcaaccccacccaaatctcatctcgaattgtaatccccaagtgctgagaaggggcctggtggtaggtgactggatcatgggcgcagctcttagtcgcgggccgactggtgtttatccgtcactcgccgaggttccttgggtcatggtgccagcctgactgagaagaggacgctcccgggagacgaatgaggaaccacctcctcctactgttcaagtacaggggcctggtccgcaaagggaagaaaagcaaaagacgaaaatggctaaattcgtgatccgcccagccactgccgccgactgcagtgacatactgcggctgatcaaggtagcggagagccagagctcctcccggggcgtggggtggaggtggctccgtttcccagggtggggtgattcacgtcttgaggtctcggccggtgtgagagcccagcctgttcccctttctgcgcccatccccggctcggccgccaccccgcccgcccgccccattcccttcccctgagctggccgggccggagcctcattttgttttctacttttttctctcctatgtgcatccccccaggagctggctaaatatgaatacatggaagaacaagtaatcttaactgaaaaagggtaattcaacagtggcgggacgggggacaagcgttcggtgcctgtcaccttcgccaaggccattaccgcccctgctcccccttcttgcagatctgctagaagatggttttggagagcaccccttttaccactgcctggttgcagaagtgccgaaagagcactggactccggaaggacacagcattgttggttttgccatgtactattttacctatgacccgtggattggcaagttattgtatcttgaggacttcttcgtgatgagtgattatagaggctttggcataggatcagaaattctgaagaatctaagccaggttgcaatgaggtgtcgctgcagcagcatgcacttcttggtagcagaatggaatgaaccatccatcaacttctataaaagaagaggtgcttctgatctgtccagtgaagagggttggagactgttcaagatcgacaaggagtacttgctaaaaatggcaacagaggagtgaggagtgctgctgtagatgacaacctccattctattttagaataaattcccaacttctcttgctttctatgctgtttgtagtgaaataatagaatgagcacccattccaaagctttattaccagtggcgttgttgcatgtttgaaatgaggtctgtttaaagtggcaatctcagatgcagtttggagagtcagatctttctccttgaatatctttcgataaacaacaaggtggtgtgatcttaatatatttgaaaaaaacttcattctcgtgagtcatttaaatgtgtacaatgtacacactggtacttagagtttctgtttgattcttttttaataaactactctttgatttaa

SEQ ID NO: 80545 - DNA, 3077 bp, Homo sapiens
cgtgggttccttgcagagccgtttctcagataacatttgaagtacaatatagtatggcaatgatgtggtttgttttggctcagcaaccccacccaaatctcatctcgaattgtaatccccaagtgctgagaaggggcctggtggtaggtgactggatcatgggcgcagctcttagtcgcgggccgactggtgtttatccgtcactcgccgaggttccttgggtcatggtgccagcctgactgagaagaggacgctcccgggagacgaatgaggaaccacctcctcctactgttcaagtacaggggcctggtccgcaaagggaagaaaagcaaaagacgaaaatggctaaattcgtgatccgcccagccactgccgccgactgcagtgacatactgcggctgatcaaggtagcggagagccagagctcctcccggggcgtggggtggaggtggctccgtttcccagggtggggtgattcacgtcttgaggtctcggccggtgtgagagcccagcctgttcccctttctgcgcccatccccggctcggccgccaccccgcccgcccgccccattcccttcccctgagctggccgggccggagcctcattttgttttctacttttttctctcctatgtgcatccccccaggagctggctaaatatgaatacatggaagaacaagtaatcttaactgaaaaagggtaattcaacagtggcgggacgggggacaagcgttcggtgcctgtcaccttcgccaaggccattaccgcccctgctcccccttcttgcagatctgctagaagatggttttggagagcaccccttttaccactgcctggttgcagaagtgccgaaagagcactggactccggaaggtaacccctcgccctttccagaagccagagagaccaagtgttatgtaagaagtagtgtcggctgtgtagaaccactgactacacaggccgaagttactgagaacttggacagaaaaaatagccagcaagtgttcaaactactgaggaaaaaaaaaaattagatatgctgcacttaagaatactagggcaggttaaaagagctgtttaagtaagtatcagagtgctgtggagactcggaagtgtttaagctgcttaagtaagtataagtgctgtggagacccggaagagttagatataatgtcatttgttgtaattcagtttcataaaatggttcttgtttgaccctaacgtaacagtttttgtaattgtgttaaatcacatttttttctttaatttgtcccaatcttcaggttacagtctctagcttcgccatgtacatggcccttccgtgtacatggatgggcggggaggtaactaaaagatcctttacacaataaagtagatgatcatgataaatgaggtaaggtcctattatcacacacttcaaacacggtagatcagaaacccactatgatactcgcttcctgtctgtttgctaaggaatataaaatggctagaaagtttaatttgaaacctttgcctccatttggaatagtagacaccagttaagagggtgtcagatgccttttttttttttttttttttttggctggtccctgttgattggtcagaagacagctcagctaaaaggggaagttgtctgggtggttgctttttttctgacgtctgttcctcaggctggaagaaatgagcagaaaacaagggatgagtactttttagagtatgtgcatgttacgtaatacctgtttctgggcaatgctgcttcttctgactcaacaaatggggagagcaaattgaaaatgcgtaaattggaaggcaagttctgaaattaaacgttgtactttggcctgatgttctgacctttaaggaagcaagagtttgtaaacttccaaatatttactattctgaactgccgtgtaaacctgacgtattcccaagtcaacataccagtataccaataggatgtgaataatgtgtgtgttgagtttaaaaccatagcagttttgctctggcaagtaatgaaagcgttctcgcttcctgagtgtgagctccagcagactgcagagtggccagtccacagttgtagcctgacttcagtgagttctgatgtgtgctttttgcaaatacatgttctcagaacagtgagatcatccagcagtggcctggactgcactcacataaaaatcatgagacagccatggctacttgtttctgtaatacatgcatgtgtgttttttaaaacctatgataggcctctgattctgcagctgcaacttttatggaatgttttccttctccacatctcatgtgatgctcttattacagacacagcattgttggttttgccatgtactattttacctatgacccgtggattggcaagttattgtatcttgaggacttcttcgtgatgagtgattatagaggtacgattgagttcggagcagagggtctgaagagagttcagagttataaatgcttacaatgactttttaaattgtactctttctttttaggctttggcataggatcagaaattctgaagaatctaagccaggttgcaatgaggtgtcgctgcagcagcatgcacttcttggtagcagaatggaatgaaccatccatcaacttctataaaagaagaggtgcttctgatctgtccagtgaagagggttggagactgttcaagatcgacaaggagtacttgctaaaaatggcaacagaggagtgaggagtgctgctgtagatgacaacctccattctattttagaataaattcccaacttctcttgctttctatgctgtttgtagtgaaataatagaatgagcacccattccaaagctttattaccagtggcgttgttgcatgtttgaaatgaggtctgtttaaagtggcaatctcagatgcagtttggagagtcagatctttctccttgaatatctttcgataaacaacaaggtggtgtgatcttaatatatttgaaaaaaacttcattctcgtgagtcatttaaatgtgtacaatgtacacactggtacttagagtttctgtttgattcttttttaataaactactctttgatttaa

SEQ ID NO: 80546 - DNA, 3202 bp, Homo sapiens
cgtgggttccttgcagagccgtttctcagataacatttgaagtacaatatagtatggcaatgatgtggtttgttttggctcagcaaccccacccaaatctcatctcgaattgtaatccccaagtgctgagaaggggcctggtggtaggtgactggatcatgggcgcagctcttagtcgcgggccgactggtgtttatccgtcactcgccgaggttccttgggtcatggtgccagcctgactgagaagaggacgctcccgggagacgaatgaggaaccacctcctcctactgttcaagtacaggggcctggtccgcaaagggaagaaaagcaaaagacgaaaatggctaaattcgtgatccgcccagccactgccgccgactgcagtgacatactgcggctgatcaaggtagcggagagccagagctcctcccggggcgtggggtggaggtggctccgtttcccagggtggggtgattcacgtcttgaggtctcggccggtgtgagagcccagcctgttcccctttctgcgcccatccccggctcggccgccaccccgcccgcccgccccattcccttcccctgagctggccgggccggagcctcattttgttttctacttttttctctcctatgtgcatccccccaggagctggctaaatatgaatacatggaagaacaagtaatcttaactgaaaaagggtaattcaacagtggcgggacgggggacaagcgttcggtgcctgtcaccttcgccaaggccattaccgcccctgctcccccttcttgcagatctgctagaagatggttttggagagcaccccttttaccactgcctggttgcagaagtgccgaaagagcactggactccggaaggtaacccctcgccctttccagaagccagagagaccaagtgttatgtaagaagtagtgtcggctgtgtagaaccactgactacacaggccgaagttactgagaacttggacagaaaaaatagccagcaagtgttcaaactactgaggaaaaaaaaaaattagatatgctgcacttaagaatactagggcaggttaaaagagctgtttaagtaagtatcagagtgctgtggagactcggaagtgtttaagctgcttaagtaagtataagtgctgtggagacccggaagagttagatataatgtcatttgttgtaattcagtttcataaaatggttcttgtttgaccctaacgtaacagtttttgtaattgtgttaaatcacatttttttctttaatttgtcccaatcttcaggttacagtctctagcttcgccatgtacatggcccttccgtgtacatggatgggcggggaggtaactaaaagatcctttacacaataaagtagatgatcatgataaatgaggtaaggtcctattatcacacacttcaaacacggtagatcagaaacccactatgatactcgcttcctgtctgtttgctaaggaatataaaatggctagaaagtttaatttgaaacctttgcctccatttggaatagtagacaccagttaagagggtgtcagatgccttttttttttttttttttttttggctggtccctgttgattggtcagaagacagctcagctaaaaggggaagttgtctgggtggttgctttttttctgacgtctgttcctcaggctggaagaaatgagcagaaaacaagggatgagtactttttagagtatgtgcatgttacgtaatacctgtttctgggcaatgctgcttcttctgactcaacaaatggggagagcaaattgaaaatgcgtaaattggaaggcaagttctgaaattaaacgttgtactttggcctgatgttctgacctttaaggaagcaagagtttgtaaacttccaaatatttactattctgaactgccgtgtaaacctgacgtattcccaagtcaacataccagtataccaataggatgtgaataatgtgtgtgttgagtttaaaaccatagcagttttgctctggcaagtaatgaaagcgttctcgcttcctgagtgtgagctccagcagactgcagagtggccagtccacagttgtagcctgacttcagtgagttctgatgtgtgctttttgcaaatacatgttctcagaacagtgagatcatccagcagtggcctggactgcactcacataaaaatcatgagacagccatggctacttgtttctgtaatacatgcatgtgtgttttttaaaacctatgataggcctctgattctgcagctgcaacttttatggaatgttttccttctccacatctcatgtgatgctcttattacagacacagcattgttggttttgccatgtactattttacctatgacccgtggattggcaagttattgtatcttgaggacttcttcgtgatgagtgattatagaggtacgattgagttcggagcagagggtctgaagagagttcagagttataaatgcttacaatgactttttaaattgtactctttctttttaggctttggcataggatcagaaattctgaagaatctaagccaggtatgtcttagtttttggtttccaaatttgtaagtttactggattattttaatgatggaataaaaattgggtcttgagagcaggctgaaatgtcactgagtgtgtgttttactctctcataataggttgcaatgaggtgtcgctgcagcagcatgcacttcttggtagcagaatggaatgaaccatccatcaacttctataaaagaagaggtgcttctgatctgtccagtgaagagggttggagactgttcaagatcgacaaggagtacttgctaaaaatggcaacagaggagtgaggagtgctgctgtagatgacaacctccattctattttagaataaattcccaacttctcttgctttctatgctgtttgtagtgaaataatagaatgagcacccattccaaagctttattaccagtggcgttgttgcatgtttgaaatgaggtctgtttaaagtggcaatctcagatgcagtttggagagtcagatctttctccttgaatatctttcgataaacaacaaggtggtgtgatcttaatatatttgaaaaaaacttcattctcgtgagtcatttaaatgtgtacaatgtacacactggtacttagagtttctgtttgattcttttttaataaactactctttgatttaa

SEQ ID NO: 80547 - DNA, 2884 bp, Homo sapiens
cgtgggttccttgcagagccgtttctcagataacatttgaagtacaatatagtatggcaatgatgtggtttgttttggctcagcaaccccacccaaatctcatctcgaattgtaatccccaagtgctgagaaggggcctggtggtaggtgactggatcatgggcgcagctcttagtcgcgggccgactggtgtttatccgtcactcgccgaggttccttgggtcatggtgccagcctgactgagaagaggacgctcccgggagacgaatgaggaaccacctcctcctactgttcaagtacaggggcctggtccgcaaagggaagaaaagcaaaagacgaaaatggctaaattcgtgatccgcccagccactgccgccgactgcagtgacatactgcggctgatcaaggtagcggagagccagagctcctcccggggcgtggggtggaggtggctccgtttcccagggtggggtgattcacgtcttgaggtctcggccggtgtgagagcccagcctgttcccctttctgcgcccatccccggctcggccgccaccccgcccgcccgccccattcccttcccctgagctggccgggccggagcctcattttgttttctacttttttctctcctatgtgcatccccccaggagctggctaaatatgaatacatggaagaacaagtaatcttaactgaaaaagggtaattcaacagtggcgggacgggggacaagcgttcggtgcctgtcaccttcgccaaggccattaccgcccctgctcccccttcttgcagatctgctagaagatggttttggagagcaccccttttaccactgcctggttgcagaagtgccgaaagagcactggactccggaaggtaacccctcgccctttccagaagccagagagaccaagtgttatgtaagaagtagtgtcggctgtgtagaaccactgactacacaggccgaagttactgagaacttggacagaaaaaatagccagcaagtgttcaaactactgaggaaaaaaaaaaattagatatgctgcacttaagaatactagggcaggttaaaagagctgtttaagtaagtatcagagtgctgtggagactcggaagtgtttaagctgcttaagtaagtataagtgctgtggagacccggaagagttagatataatgtcatttgttgtaattcagtttcataaaatggttcttgtttgaccctaacgtaacagtttttgtaattgtgttaaatcacatttttttctttaatttgtcccaatcttcaggttacagtctctagcttcgccatgtacatggcccttccgtgtacatggatgggcggggaggtaactaaaagatcctttacacaataaagtagatgatcatgataaatgaggtaaggtcctattatcacacacttcaaacacggtagatcagaaacccactatgatactcgcttcctgtctgtttgctaaggaatataaaatggctagaaagtttaatttgaaacctttgcctccatttggaatagtagacaccagttaagagggtgtcagatgccttttttttttttttttttttttggctggtccctgttgattggtcagaagacagctcagctaaaaggggaagttgtctgggtggttgctttttttctgacgtctgttcctcaggctggaagaaatgagcagaaaacaagggatgagtactttttagagtatgtgcatgttacgtaatacctgtttctgggcaatgctgcttcttctgactcaacaaatggggagagcaaattgaaaatgcgtaaattggaaggcaagttctgaaattaaacgttgtactttggcctgatgttctgacctttaaggaagcaagagtttgtaaacttccaaatatttactattctgaactgccgtgtaaacctgacgtattcccaagtcaacataccagtataccaataggatgtgaataatgtgtgtgttgagtttaaaaccatagcagttttgctctggcaagtaatgaaagcgttctcgcttcctgagtgtgagctccagcagactgcagagtggccagtccacagttgtagcctgacttcagacacagcattgttggttttgccatgtactattttacctatgacccgtggattggcaagttattgtatcttgaggacttcttcgtgatgagtgattatagaggctttggcataggatcagaaattctgaagaatctaagccaggtatgtcttagtttttggtttccaaatttgtaagtttactggattattttaatgatggaataaaaattgggtcttgagagcaggctgaaatgtcactgagtgtgtgttttactctctcataataggttgcaatgaggtgtcgctgcagcagcatgcacttcttggtagcagaatggaatgaaccatccatcaacttctataaaagaagaggtgcttctgatctgtccagtgaagagggttggagactgttcaagatcgacaaggagtacttgctaaaaatggcaacagaggagtgaggagtgctgctgtagatgacaacctccattctattttagaataaattcccaacttctcttgctttctatgctgtttgtagtgaaataatagaatgagcacccattccaaagctttattaccagtggcgttgttgcatgtttgaaatgaggtctgtttaaagtggcaatctcagatgcagtttggagagtcagatctttctccttgaatatctttcgataaacaacaaggtggtgtgatcttaatatatttgaaaaaaacttcattctcgtgagtcatttaaatgtgtacaatgtacacactggtacttagagtttctgtttgattcttttttaataaactactctttgatttaa

SEQ ID NO: 80548 - DNA, 3019 bp, Homo sapiens
cgtgggttccttgcagagccgtttctcagataacatttgaagtacaatatagtatggcaatgatgtggtttgttttggctcagcaaccccacccaaatctcatctcgaattgtaatccccaagtgctgagaaggggcctggtggtaggtgactggatcatgggcgcagctcttagtcgcgggccgactggtgtttatccgtcactcgccgaggttccttgggtcatggtgccagcctgactgagaagaggacgctcccgggagacgaatgaggaaccacctcctcctactgttcaagtacaggggcctggtccgcaaagggaagaaaagcaaaagacgaaaatggctaaattcgtgatccgcccagccactgccgccgactgcagtgacatactgcggctgatcaaggtagcggagagccagagctcctcccggggcgtggggtggaggtggctccgtttcccagggtggggtgattcacgtcttgaggtctcggccggtgtgagagcccagcctgttcccctttctgcgcccatccccggctcggccgccaccccgcccgcccgccccattcccttcccctgagctggccgggccggagcctcattttgttttctacttttttctctcctatgtgcatccccccaggagctggctaaatatgaatacatggaagaacaagtaatcttaactgaaaaagggtaattcaacagtggcgggacgggggacaagcgttcggtgcctgtcaccttcgccaaggccattaccgcccctgctcccccttcttgcagatctgctagaagatggttttggagagcaccccttttaccactgcctggttgcagaagtgccgaaagagcactggactccggaaggtaacccctcgccctttccagaagccagagagaccaagtgttatgtaagaagtagtgtcggctgtgtagaaccactgactacacaggccgaagttactgagaacttggacagaaaaaatagccagcaagtgttcaaactactgaggaaaaaaaaaaattagatatgctgcacttaagaatactagggcaggttaaaagagctgtttaagtaagtatcagagtgctgtggagactcggaagtgtttaagctgcttaagtaagtataagtgctgtggagacccggaagagttagatataatgtcatttgttgtaattcagtttcataaaatggttcttgtttgaccctaacgtaacagtttttgtaattgtgttaaatcacatttttttctttaatttgtcccaatcttcaggttacagtctctagcttcgccatgtacatggcccttccgtgtacatggatgggcggggaggtaactaaaagatcctttacacaataaagtagatgatcatgataaatgaggtaaggtcctattatcacacacttcaaacacggtagatcagaaacccactatgatactcgcttcctgtctgtttgctaaggaatataaaatggctagaaagtttaatttgaaacctttgcctccatttggaatagtagacaccagttaagagggtgtcagatgccttttttttttttttttttttttggctggtccctgttgattggtcagaagacagctcagctaaaaggggaagttgtctgggtggttgctttttttctgacgtctgttcctcaggctggaagaaatgagcagaaaacaagggatgagtactttttagagtatgtgcatgttacgtaatacctgtttctgggcaatgctgcttcttctgactcaacaaatggggagagcaaattgaaaatgcgtaaattggaaggcaagttctgaaattaaacgttgtactttggcctgatgttctgacctttaaggaagcaagagtttgtaaacttccaaatatttactattctgaactgccgtgtaaacctgacgtattcccaagtcaacataccagtataccaataggatgtgaataatgtgtgtgttgagtttaaaaccatagcagttttgctctggcaagtaatgaaagcgttctcgcttcctgagtgtgagctccagcagactgcagagtggccagtccacagttgtagcctgacttcagtgagttctgatgtgtgctttttgcaaatacatgttctcagaacagtgagatcatccagcagtggcctggactgcactcacataaaaatcatgagacagccatggctacttgtttctgtaatacatgcatgtgtgttttttaaaacctatgataggcctctgattctgcagctgcaacttttatggaatgttttccttctccacatctcatgtgatgctcttattacagacacagcattgttggttttgccatgtactattttacctatgacccgtggattggcaagttattgtatcttgaggacttcttcgtgatgagtgattatagaggctttggcataggatcagaaattctgaagaatctaagccaggttgcaatgaggtgtcgctgcagcagcatgcacttcttggtagcagaatggaatgaaccatccatcaacttctataaaagaagaggtgcttctgatctgtccagtgaagagggttggagactgttcaagatcgacaaggagtacttgctaaaaatggcaacagaggagtgaggagtgctgctgtagatgacaacctccattctattttagaataaattcccaacttctcttgctttctatgctgtttgtagtgaaataatagaatgagcacccattccaaagctttattaccagtggcgttgttgcatgtttgaaatgaggtctgtttaaagtggcaatctcagatgcagtttggagagtcagatctttctccttgaatatctttcgataaacaacaaggtggtgtgatcttaatatatttgaaaaaaacttcattctcgtgagtcatttaaatgtgtacaatgtacacactggtacttagagtttctgtttgattcttttttaataaactactctttgatttaaagccagacgccagccacaccacaacgaacaca

SEQ ID NO: 80549 - DNA, 3016 bp, Homo sapiens
cgtgggttccttgcagagccgtttctcagataacatttgaagtacaatatagtatggcaatgatgtggtttgttttggctcagcaaccccacccaaatctcatctcgaattgtaatccccaagtgctgagaaggggcctggtggtaggtgactggatcatgggcgcagctcttagtcgcgggccgactggtgtttatccgtcactcgccgaggttccttgggtcatggtgccagcctgactgagaagaggacgctcccgggagacgaatgaggaaccacctcctcctactgttcaagtacaggggcctggtccgcaaagggaagaaaagcaaaagacgaaaatggctaaattcgtgatccgcccagccactgccgccgactgcagtgacatactgcggctgatcaaggtagcggagagccagagctcctcccggggcgtggggtggaggtggctccgtttcccagggtggggtgattcacgtcttgaggtctcggccggtgtgagagcccagcctgttcccctttctgcgcccatccccggctcggccgccaccccgcccgcccgccccattcccttcccctgagctggccgggccggagcctcattttgttttctacttttttctctcctatgtgcatccccccaggagctggctaaatatgaatacatggaagaacaagtaatcttaactgaaaaagggtaattcaacagtggcgggacgggggacaagcgttcggtgcctgtcaccttcgccaaggccattaccgcccctgctcccccttcttgcagatctgctagaagatggttttggagagcaccccttttaccactgcctggttgcagaagtgccgaaagagcactggactccggaaggtaacccctcgccctttccagaagccagagagaccaagtgttatgtaagaagtagtgtcggctgtgtagaaccactgactacacaggccgaagttactgagaacttggacagaaaaaatagccagcaagtgttcaaactactgaggaaaaaaaaaaattagatatgctgcacttaagaatactagggcaggttaaaagagctgtttaagtaagtatcagagtgctgtggagactcggaagtgtttaagctgcttaagtaagtataagtgctgtggagacccggaagagttagatataatgtcatttgttgtaattcagtttcataaaatggttcttgtttgaccctaacgtaacagtttttgtaattgtgttaaatcacatttttttctttaatttgtcccaatcttcaggttacagtctctagcttcgccatgtacatggcccttccgtgtacatggatgggcggggaggtaactaaaagatcctttacacaataaagtagatgatcatgataaatgaggtaaggtcctattatcacacacttcaaacacggtagatcagaaacccactatgatactcgcttcctgtctgtttgctaaggaatataaaatggctagaaagtttaatttgaaacctttgcctccatttggaatagtagacaccagttaagagggtgtcagatgccttttttttttttttttttttttggctggtccctgttgattggtcagaagacagctcagctaaaaggggaagttgtctgggtggttgctttttttctgacgtctgttcctcaggctggaagaaatgagcagaaaacaagggatgagtactttttagagtatgtgcatgttacgtaatacctgtttctgggcaatgctgcttcttctgactcaacaaatggggagagcaaattgaaaatgcgtaaattggaaggcaagttctgaaattaaacgttgtactttggcctgatgttctgacctttaaggaagcaagagtttgtaaacttccaaatatttactattctgaactgccgtgtaaacctgacgtattcccaagtcaacataccagtataccaataggatgtgaataatgtgtgtgttgagtttaaaaccatagcagttttgctctggcaagtaatgaaagcgttctcgcttcctgagtgtgagctccagcagactgcagagtggccagtccacagttgtagcctgacttcagtgagttctgatgtgtgctttttgcaaatacatgttctcagaacagtgagatcatccagcagtggcctggactgcactcacataaaaatcatgagacagccatggctacttgtttctgtaatacatgcatgtgtgttttttaaaacctatgataggcctctgattctgcagctgcaacttttatggaatgttttccttctccacatctcatgtgatgctcttattacagacacagcattgttggttttgccatgtactattttacctatgacccgtggattggcaagttattgtatcttgaggacttcttcgtgatgagtgattatagaggctttggcataggatcagaaattctgaagaatctaagccaggttgcaatgaggtgtcgctgcagcagcatgcacttcttggtagcagaatggaatgaaccatccatcaacttctataaaagaagaggtgcttctgatctgtccagtgaagagggttggagactgttcaagatcgacaaggagtacttgctaaaaatggcaacagaggagtgaggagtgctgctgtagatgacaacctccattctattttagaataaattcccaacttctcttgctttctatgctgtttgtagtgaaataatagaatgagcacccattccaaagctttattaccagtggcgttgttgcatgtttgaaatgaggtctgtttaaagtggcaatctcagatgcagtttggagagtcagatctttctccttgaatatctttcgataaacaacaaggtggtgtgatcttaatatatttgaaaaaaacttcattctcgtgagtcatttaaatgtgtacaatgtacacactggtacttagagtttctgtttgattcttttttaataaactactctttgatttaaaaaaaaaaaagaaaaaaaaaaaaaaaaaa

SEQ ID NO: 80550 - DNA, 3011 bp, Homo sapiens
cgtgggttccttgcagagccgtttctcagataacatttgaagtacaatatagtatggcaatgatgtggtttgttttggctcagcaaccccacccaaatctcatctcgaattgtaatccccaagtgctgagaaggggcctggtggtaggtgactggatcatgggcgcagctcttagtcgcgggccgactggtgtttatccgtcactcgccgaggttccttgggtcatggtgccagcctgactgagaagaggacgctcccgggagacgaatgaggaaccacctcctcctactgttcaagtacaggggcctggtccgcaaagggaagaaaagcaaaagacgaaaatggctaaattcgtgatccgcccagccactgccgccgactgcagtgacatactgcggctgatcaaggtagcggagagccagagctcctcccggggcgtggggtggaggtggctccgtttcccagggtggggtgattcacgtcttgaggtctcggccggtgtgagagcccagcctgttcccctttctgcgcccatccccggctcggccgccaccccgcccgcccgccccattcccttcccctgagctggccgggccggagcctcattttgttttctacttttttctctcctatgtgcatccccccaggagctggctaaatatgaatacatggaagaacaagtaatcttaactgaaaaagggtaattcaacagtggcgggacgggggacaagcgttcggtgcctgtcaccttcgccaaggccattaccgcccctgctcccccttcttgcagatctgctagaagatggttttggagagcaccccttttaccactgcctggttgcagaagtgccgaaagagcactggactccggaaggtaacccctcgccctttccagaagccagagagaccaagtgttatgtaagaagtagtgtcggctgtgtagaaccactgactacacaggccgaagttactgagaacttggacagaaaaaatagccagcaagtgttcaaactactgaggaaaaaaaaaaattagatatgctgcacttaagaatactagggcaggttaaaagagctgtttaagtaagtatcagagtgctgtggagactcggaagtgtttaagctgcttaagtaagtataagtgctgtggagacccggaagagttagatataatgtcatttgttgtaattcagtttcataaaatggttcttgtttgaccctaacgtaacagtttttgtaattgtgttaaatcacatttttttctttaatttgtcccaatcttcaggttacagtctctagcttcgccatgtacatggcccttccgtgtacatggatgggcggggaggtaactaaaagatcctttacacaataaagtagatgatcatgataaatgaggtaaggtcctattatcacacacttcaaacacggtagatcagaaacccactatgatactcgcttcctgtctgtttgctaaggaatataaaatggctagaaagtttaatttgaaacctttgcctccatttggaatagtagacaccagttaagagggtgtcagatgccttttttttttttttttttttttggctggtccctgttgattggtcagaagacagctcagctaaaaggggaagttgtctgggtggttgctttttttctgacgtctgttcctcaggctggaagaaatgagcagaaaacaagggatgagtactttttagagtatgtgcatgttacgtaatacctgtttctgggcaatgctgcttcttctgactcaacaaatggggagagcaaattgaaaatgcgtaaattggaaggcaagttctgaaattaaacgttgtactttggcctgatgttctgacctttaaggaagcaagagtttgtaaacttccaaatatttactattctgaactgccgtgtaaacctgacgtattcccaagtcaacataccagtataccaataggatgtgaataatgtgtgtgttgagtttaaaaccatagcagttttgctctggcaagtaatgaaagcgttctcgcttcctgagtgtgagctccagcagactgcagagtggccagtccacagttgtagcctgacttcagtgagttctgatgtgtgctttttgcaaatacatgttctcagaacagtgagatcatccagcagtggcctggactgcactcacataaaaatcatgagacagccatggctacttgtttctgtaatacatgcatgtgtgttttttaaaacctatgataggcctctgattctgcagctgcaacttttatggaatgttttccttctccacatctcatgtgatgctcttattacagacacagcattgttggttttgccatgtactattttacctatgacccgtggattggcaagttattgtatcttgaggacttcttcgtgatgagtgattatagaggctttggcataggatcagaaattctgaagaatctaagccaggttgcaatgaggtgtcgctgcagcagcatgcacttcttggtagcagaatggaatgaaccatccatcaacttctataaaagaagaggtgcttctgatctgtccagtgaagagggttggagactgttcaagatcgacaaggagtacttgctaaaaatggcaacagaggagtgaggagtgctgctgtagatgacaacctccattctattttagaataaattcccaacttctcttgctttctatgctgtttgtagtgaaataatagaatgagcacccattccaaagctttattaccagtggcgttgttgcatgtttgaaatgaggtctgtttaaagtggcaatctcagatgcagtttggagagtcagatctttctccttgaatatctttcgataaacaacaaggtggtgtgatcttaatatatttgaaaaaaacttcattctcgtgagtcatttaaatgtgtacaatgtacacactggtacttagagtttctgtttgattcttttttaataaactactctttgatttaaaattgtttggtgtaagcattttta

SEQ ID NO: 80551 - DNA, 3043 bp, Homo sapiens
  misc_feature (3024)..(3025): n is a, c, g, or t
  misc_feature (3027)..(3028): n is a, c, g, or t
  misc_feature (3030)..(3030): n is a, c, g, or t
cgtgggttccttgcagagccgtttctcagataacatttgaagtacaatatagtatggcaatgatgtggtttgttttggctcagcaaccccacccaaatctcatctcgaattgtaatccccaagtgctgagaaggggcctggtggtaggtgactggatcatgggcgcagctcttagtcgcgggccgactggtgtttatccgtcactcgccgaggttccttgggtcatggtgccagcctgactgagaagaggacgctcccgggagacgaatgaggaaccacctcctcctactgttcaagtacaggggcctggtccgcaaagggaagaaaagcaaaagacgaaaatggctaaattcgtgatccgcccagccactgccgccgactgcagtgacatactgcggctgatcaaggtagcggagagccagagctcctcccggggcgtggggtggaggtggctccgtttcccagggtggggtgattcacgtcttgaggtctcggccggtgtgagagcccagcctgttcccctttctgcgcccatccccggctcggccgccaccccgcccgcccgccccattcccttcccctgagctggccgggccggagcctcattttgttttctacttttttctctcctatgtgcatccccccaggagctggctaaatatgaatacatggaagaacaagtaatcttaactgaaaaagggtaattcaacagtggcgggacgggggacaagcgttcggtgcctgtcaccttcgccaaggccattaccgcccctgctcccccttcttgcagatctgctagaagatggttttggagagcaccccttttaccactgcctggttgcagaagtgccgaaagagcactggactccggaaggtaacccctcgccctttccagaagccagagagaccaagtgttatgtaagaagtagtgtcggctgtgtagaaccactgactacacaggccgaagttactgagaacttggacagaaaaaatagccagcaagtgttcaaactactgaggaaaaaaaaaaattagatatgctgcacttaagaatactagggcaggttaaaagagctgtttaagtaagtatcagagtgctgtggagactcggaagtgtttaagctgcttaagtaagtataagtgctgtggagacccggaagagttagatataatgtcatttgttgtaattcagtttcataaaatggttcttgtttgaccctaacgtaacagtttttgtaattgtgttaaatcacatttttttctttaatttgtcccaatcttcaggttacagtctctagcttcgccatgtacatggcccttccgtgtacatggatgggcggggaggtaactaaaagatcctttacacaataaagtagatgatcatgataaatgaggtaaggtcctattatcacacacttcaaacacggtagatcagaaacccactatgatactcgcttcctgtctgtttgctaaggaatataaaatggctagaaagtttaatttgaaacctttgcctccatttggaatagtagacaccagttaagagggtgtcagatgccttttttttttttttttttttttggctggtccctgttgattggtcagaagacagctcagctaaaaggggaagttgtctgggtggttgctttttttctgacgtctgttcctcaggctggaagaaatgagcagaaaacaagggatgagtactttttagagtatgtgcatgttacgtaatacctgtttctgggcaatgctgcttcttctgactcaacaaatggggagagcaaattgaaaatgcgtaaattggaaggcaagttctgaaattaaacgttgtactttggcctgatgttctgacctttaaggaagcaagagtttgtaaacttccaaatatttactattctgaactgccgtgtaaacctgacgtattcccaagtcaacataccagtataccaataggatgtgaataatgtgtgtgttgagtttaaaaccatagcagttttgctctggcaagtaatgaaagcgttctcgcttcctgagtgtgagctccagcagactgcagagtggccagtccacagttgtagcctgacttcagtgagttctgatgtgtgctttttgcaaatacatgttctcagaacagtgagatcatccagcagtggcctggactgcactcacataaaaatcatgagacagccatggctacttgtttctgtaatacatgcatgtgtgttttttaaaacctatgataggcctctgattctgcagctgcaacttttatggaatgttttccttctccacatctcatgtgatgctcttattacagacacagcattgttggttttgccatgtactattttacctatgacccgtggattggcaagttattgtatcttgaggacttcttcgtgatgagtgattatagaggctttggcataggatcagaaattctgaagaatctaagccaggttgcaatgaggtgtcgctgcagcagcatgcacttcttggtagcagaatggaatgaaccatccatcaacttctataaaagaagaggtgcttctgatctgtccagtgaagagggttggagactgttcaagatcgacaaggagtacttgctaaaaatggcaacagaggagtgaggagtgctgctgtagatgacaacctccattctattttagaataaattcccaacttctcttgctttctatgctgtttgtagtgaaataatagaatgagcacccattccaaagctttattaccagtggcgttgttgcatgtttgaaatgaggtctgtttaaagtggcaatctcagatgcagtttggagagtcagatctttctccttgaatatctttcgataaacaacaaggtggtgtgatcttaatatatttgaaaaaaacttcattctcgtgagtcatttaaatgtgtacaatgtacacactggtacttagagtttctgtttgattcttttttaataaactactctttgatttaaaaaaagtcgacgcggccgcgaatttagtagtagtagnngnngnagtaggcggccgc

SEQ ID NO: 80552 - DNA, 3014 bp, Homo sapiens
cgtgggttccttgcagagccgtttctcagataacatttgaagtacaatatagtatggcaatgatgtggtttgttttggctcagcaaccccacccaaatctcatctcgaattgtaatccccaagtgctgagaaggggcctggtggtaggtgactggatcatgggcgcagctcttagtcgcgggccgactggtgtttatccgtcactcgccgaggttccttgggtcatggtgccagcctgactgagaagaggacgctcccgggagacgaatgaggaaccacctcctcctactgttcaagtacaggggcctggtccgcaaagggaagaaaagcaaaagacgaaaatggctaaattcgtgatccgcccagccactgccgccgactgcagtgacatactgcggctgatcaaggtagcggagagccagagctcctcccggggcgtggggtggaggtggctccgtttcccagggtggggtgattcacgtcttgaggtctcggccggtgtgagagcccagcctgttcccctttctgcgcccatccccggctcggccgccaccccgcccgcccgccccattcccttcccctgagctggccgggccggagcctcattttgttttctacttttttctctcctatgtgcatccccccaggagctggctaaatatgaatacatggaagaacaagtaatcttaactgaaaaagggtaattcaacagtggcgggacgggggacaagcgttcggtgcctgtcaccttcgccaaggccattaccgcccctgctcccccttcttgcagatctgctagaagatggttttggagagcaccccttttaccactgcctggttgcagaagtgccgaaagagcactggactccggaaggtaacccctcgccctttccagaagccagagagaccaagtgttatgtaagaagtagtgtcggctgtgtagaaccactgactacacaggccgaagttactgagaacttggacagaaaaaatagccagcaagtgttcaaactactgaggaaaaaaaaaaattagatatgctgcacttaagaatactagggcaggttaaaagagctgtttaagtaagtatcagagtgctgtggagactcggaagtgtttaagctgcttaagtaagtataagtgctgtggagacccggaagagttagatataatgtcatttgttgtaattcagtttcataaaatggttcttgtttgaccctaacgtaacagtttttgtaattgtgttaaatcacatttttttctttaatttgtcccaatcttcaggttacagtctctagcttcgccatgtacatggcccttccgtgtacatggatgggcggggaggtaactaaaagatcctttacacaataaagtagatgatcatgataaatgaggtaaggtcctattatcacacacttcaaacacggtagatcagaaacccactatgatactcgcttcctgtctgtttgctaaggaatataaaatggctagaaagtttaatttgaaacctttgcctccatttggaatagtagacaccagttaagagggtgtcagatgccttttttttttttttttttttttggctggtccctgttgattggtcagaagacagctcagctaaaaggggaagttgtctgggtggttgctttttttctgacgtctgttcctcaggctggaagaaatgagcagaaaacaagggatgagtactttttagagtatgtgcatgttacgtaatacctgtttctgggcaatgctgcttcttctgactcaacaaatggggagagcaaattgaaaatgcgtaaattggaaggcaagttctgaaattaaacgttgtactttggcctgatgttctgacctttaaggaagcaagagtttgtaaacttccaaatatttactattctgaactgccgtgtaaacctgacgtattcccaagtcaacataccagtataccaataggatgtgaataatgtgtgtgttgagtttaaaaccatagcagttttgctctggcaagtaatgaaagcgttctcgcttcctgagtgtgagctccagcagactgcagagtggccagtccacagttgtagcctgacttcagtgagttctgatgtgtgctttttgcaaatacatgttctcagaacagtgagatcatccagcagtggcctggactgcactcacataaaaatcatgagacagccatggctacttgtttctgtaatacatgcatgtgtgttttttaaaacctatgataggcctctgattctgcagctgcaacttttatggaatgttttccttctccacatctcatgtgatgctcttattacagacacagcattgttggttttgccatgtactattttacctatgacccgtggattggcaagttattgtatcttgaggacttcttcgtgatgagtgattatagaggctttggcataggatcagaaattctgaagaatctaagccaggttgcaatgaggtgtcgctgcagcagcatgcacttcttggtagcagaatggaatgaaccatccatcaacttctataaaagaagaggtgcttctgatctgtccagtgaagagggttggagactgttcaagatcgacaaggagtacttgctaaaaatggcaacagaggagtgaggagtgctgctgtagatgacaacctccattctattttagaataaattcccaacttctcttgctttctatgctgtttgtagtgaaataatagaatgagcacccattccaaagctttattaccagtggcgttgttgcatgtttgaaatgaggtctgtttaaagtggcaatctcagatgcagtttggagagtcagatctttctccttgaatatctttcgataaacaacaaggtggtgtgatcttaatatatttgaaaaaaacttcattctcgtgagtcatttaaatgtgtacaatgtacacactggtacttagagtttctgtttgattcttttttaataaactactctttgatttaagacttcaacacaaataacaccacacac

SEQ ID NO: 80553 - DNA, 3072 bp, Homo sapiens
  misc_feature (3042)..(3043): n is a, c, g, or t
cgtgggttccttgcagagccgtttctcagataacatttgaagtacaatatagtatggcaatgatgtggtttgttttggctcagcaaccccacccaaatctcatctcgaattgtaatccccaagtgctgagaaggggcctggtggtaggtgactggatcatgggcgcagctcttagtcgcgggccgactggtgtttatccgtcactcgccgaggttccttgggtcatggtgccagcctgactgagaagaggacgctcccgggagacgaatgaggaaccacctcctcctactgttcaagtacaggggcctggtccgcaaagggaagaaaagcaaaagacgaaaatggctaaattcgtgatccgcccagccactgccgccgactgcagtgacatactgcggctgatcaaggtagcggagagccagagctcctcccggggcgtggggtggaggtggctccgtttcccagggtggggtgattcacgtcttgaggtctcggccggtgtgagagcccagcctgttcccctttctgcgcccatccccggctcggccgccaccccgcccgcccgccccattcccttcccctgagctggccgggccggagcctcattttgttttctacttttttctctcctatgtgcatccccccaggagctggctaaatatgaatacatggaagaacaagtaatcttaactgaaaaagggtaattcaacagtggcgggacgggggacaagcgttcggtgcctgtcaccttcgccaaggccattaccgcccctgctcccccttcttgcagatctgctagaagatggttttggagagcaccccttttaccactgcctggttgcagaagtgccgaaagagcactggactccggaaggtaacccctcgccctttccagaagccagagagaccaagtgttatgtaagaagtagtgtcggctgtgtagaaccactgactacacaggccgaagttactgagaacttggacagaaaaaatagccagcaagtgttcaaactactgaggaaaaaaaaaaattagatatgctgcacttaagaatactagggcaggttaaaagagctgtttaagtaagtatcagagtgctgtggagactcggaagtgtttaagctgcttaagtaagtataagtgctgtggagacccggaagagttagatataatgtcatttgttgtaattcagtttcataaaatggttcttgtttgaccctaacgtaacagtttttgtaattgtgttaaatcacatttttttctttaatttgtcccaatcttcaggttacagtctctagcttcgccatgtacatggcccttccgtgtacatggatgggcggggaggtaactaaaagatcctttacacaataaagtagatgatcatgataaatgaggtaaggtcctattatcacacacttcaaacacggtagatcagaaacccactatgatactcgcttcctgtctgtttgctaaggaatataaaatggctagaaagtttaatttgaaacctttgcctccatttggaatagtagacaccagttaagagggtgtcagatgccttttttttttttttttttttttggctggtccctgttgattggtcagaagacagctcagctaaaaggggaagttgtctgggtggttgctttttttctgacgtctgttcctcaggctggaagaaatgagcagaaaacaagggatgagtactttttagagtatgtgcatgttacgtaatacctgtttctgggcaatgctgcttcttctgactcaacaaatggggagagcaaattgaaaatgcgtaaattggaaggcaagttctgaaattaaacgttgtactttggcctgatgttctgacctttaaggaagcaagagtttgtaaacttccaaatatttactattctgaactgccgtgtaaacctgacgtattcccaagtcaacataccagtataccaataggatgtgaataatgtgtgtgttgagtttaaaaccatagcagttttgctctggcaagtaatgaaagcgttctcgcttcctgagtgtgagctccagcagactgcagagtggccagtccacagttgtagcctgacttcagtgagttctgatgtgtgctttttgcaaatacatgttctcagaacagtgagatcatccagcagtggcctggactgcactcacataaaaatcatgagacagccatggctacttgtttctgtaatacatgcatgtgtgttttttaaaacctatgataggcctctgattctgcagctgcaacttttatggaatgttttccttctccacatctcatgtgatgctcttattacagacacagcattgttggttttgccatgtactattttacctatgacccgtggattggcaagttattgtatcttgaggacttcttcgtgatgagtgattatagaggctttggcataggatcagaaattctgaagaatctaagccaggttgcaatgaggtgtcgctgcagcagcatgcacttcttggtagcagaatggaatgaaccatccatcaacttctataaaagaagaggtgcttctgatctgtccagtgaagagggttggagactgttcaagatcgacaaggagtacttgctaaaaatggcaacagaggagtgaggagtgctgctgtagatgacaacctccattctattttagaataaattcccaacttctcttgctttctatgctgtttgtagtgaaataatagaatgagcacccattccaaagctttattaccagtggcgttgttgcatgtttgaaatgaggtctgtttaaagtggcaatctcagatgcagtttggagagtcagatctttctccttgaatatctttcgataaacaacaaggtggtgtgatcttaatatatttgaaaaaaacttcattctcgtgagtcatttaaatgtgtacaatgtacacactggtacttagagtttctgtttgattcttttttaataaactactctttgatttaacaaaaaaaaaaaacaaaaaaacaaaaaaaaaaaaaaaaaacaaaaaacaaaaaannaaaaaaaaaagaaaaaaaaaaaaaaaaaa

SEQ ID NO: 80554 - DNA, 3162 bp, Homo sapiens
cgtgggttccttgcagagccgtttctcagataacatttgaagtacaatatagtatggcaatgatgtggtttgttttggctcagcaaccccacccaaatctcatctcgaattgtaatccccaagtgctgagaaggggcctggtggtaggtgactggatcatgggcgcagctcttagtcgcgggccgactggtgtttatccgtcactcgccgaggttccttgggtcatggtgccagcctgactgagaagaggacgctcccgggagacgaatgaggaaccacctcctcctactgttcaagtacaggggcctggtccgcaaagggaagaaaagcaaaagacgaaaatggctaaattcgtgatccgcccagccactgccgccgactgcagtgacatactgcggctgatcaaggtagcggagagccagagctcctcccggggcgtggggtggaggtggctccgtttcccagggtggggtgattcacgtcttgaggtctcggccggtgtgagagcccagcctgttcccctttctgcgcccatccccggctcggccgccaccccgcccgcccgccccattcccttcccctgagctggccgggccggagcctcattttgttttctacttttttctctcctatgtgcatccccccaggagctggctaaatatgaatacatggaagaacaagtaatcttaactgaaaaagggtaattcaacagtggcgggacgggggacaagcgttcggtgcctgtcaccttcgccaaggccattaccgcccctgctcccccttcttgcagatctgctagaagatggttttggagagcaccccttttaccactgcctggttgcagaagtgccgaaagagcactggactccggaaggtaacccctcgccctttccagaagccagagagaccaagtgttatgtaagaagtagtgtcggctgtgtagaaccactgactacacaggccgaagttactgagaacttggacagaaaaaatagccagcaagtgttcaaactactgaggaaaaaaaaaaattagatatgctgcacttaagaatactagggcaggttaaaagagctgtttaagtaagtatcagagtgctgtggagactcggaagtgtttaagctgcttaagtaagtataagtgctgtggagacccggaagagttagatataatgtcatttgttgtaattcagtttcataaaatggttcttgtttgaccctaacgtaacagtttttgtaattgtgttaaatcacatttttttctttaatttgtcccaatcttcaggttacagtctctagcttcgccatgtacatggcccttccgtgtacatggatgggcggggaggtaactaaaagatcctttacacaataaagtagatgatcatgataaatgaggtaaggtcctattatcacacacttcaaacacggtagatcagaaacccactatgatactcgcttcctgtctgtttgctaaggaatataaaatggctagaaagtttaatttgaaacctttgcctccatttggaatagtagacaccagttaagagggtgtcagatgccttttttttttttttttttttttggctggtccctgttgattggtcagaagacagctcagctaaaaggggaagttgtctgggtggttgctttttttctgacgtctgttcctcaggctggaagaaatgagcagaaaacaagggatgagtactttttagagtatgtgcatgttacgtaatacctgtttctgggcaatgctgcttcttctgactcaacaaatggggagagcaaattgaaaatgcgtaaattggaaggcaagttctgaaattaaacgttgtactttggcctgatgttctgacctttaaggaagcaagagtttgtaaacttccaaatatttactattctgaactgccgtgtaaacctgacgtattcccaagtcaacataccagtataccaataggatgtgaataatgtgtgtgttgagtttaaaaccatagcagttttgctctggcaagtaatgaaagcgttctcgcttcctgagtgtgagctccagcagactgcagagtggccagtccacagttgtagcctgacttcagtgagttctgatgtgtgctttttgcaaatacatgttctcagaacagtgagatcatccagcagtggcctggactgcactcacataaaaatcatgagacagccatggctacttgtttctgtaatacatgcatgtgtgttttttaaaacctatgataggcctctgattctgcagctgcaacttttatggaatgttttccttctccacatctcatgtgatgctcttattacagacacagcattgttggttttgccatgtactattttacctatgacccgtggattggcaagttattgtatcttgaggacttcttcgtgatgagtgattatagaggctttggcataggatcagaaattctgaagaatctaagccaggttgcaatgaggtgtcgctgcagcagcatgcacttcttggtagcagaatggaatgaaccatccatcaacttctataaaagaagaggtgcttctgatctgtccagtgaagagggttggagactgttcaagatcgacaaggagtacttgctaaaaatggcaacagaggagtgaggagtgctgctgtagatgacaacctccattctattttagaataaattcccaacttctcttgctttctatgctgtttgtagtgaaataatagaatgagcacccattccaaagctttattaccagtggcgttgttgcatgtttgaaatgaggtctgtttaaagtggcaatctcagatgcagtttggagagtcagatctttctccttgaatatctttcgataaacaacaaggtggtgtgatcttaatatatttgaaaaaaacttcattctcgtgagtcatttaaatgtgtacaatgtacacactggtacttagagtttctgtttgattcttttttaataaactactctttgatttaaaaaaaaaagaaaaaaacatagataacatacacaaatgcaaaaatactaatagaaaactcgcggatgatgaactacatgatctacgatacctgtgtaatactagttcctgaataggcgcaactgcctaaacagtattatgaactggctatatcagggatctttttatgatgcactg

SEQ ID NO: 80555 - DNA, 2094 bp, Homo sapiens
cgtgggttccttgcagagccgtttctcagataacatttgaagtacaatatagtatggcaatgatgtggtttgttttggctcagcaaccccacccaaatctcatctcgaattgtaatccccaagtgctgagaaggggcctggtggtaggtgactggatcatgggcgcagctcttagtcgcgggccgactggtgtttatccgtcactcgccgaggttccttgggtcatggtgccagcctgactgagaagaggacgctcccgggagacgaatgaggaaccacctcctcctactgttcaagtacaggggcctggtccgcaaagggaagaaaagcaaaagacgaaaatggctaaattcgtgatccgcccagccactgccgccgactgcagtgacatactgcggctgatcaaggtagcggagagccagagctcctcccggggcgtggggtggaggtggctccgtttcccagggtggggtgattcacgtcttgaggtctcggccggtgtgagagcccagcctgttcccctttctgcgcccatccccggctcggccgccaccccgcccgcccgccccattcccttcccctgagctggccgggccggagcctcattttgttttctacttttttctctcctatgtgcatccccccaggagctggctaaatatgaatacatggaagaacaagtaatcttaactgaaaaagggtaattcaacagtggcgggacgggggacaagcgttcggtgcctgtcaccttcgccaaggccattaccgcccctgctcccccttcttgcagatctgctagaagatggttttggagagcaccccttttaccactgcctggttgcagaagtgccgaaagagcactggactccggaaggtaacccctcgccctttccagaagccagagagaccaagtgttatgtaagaagtagtgtcggctgtgtagaaccactgactacacaggccgaagttactgagaacttggacagaaaaaatagccagcaagtgttcaaactactgaggaaaaaaaaaaattagatatgctgcacttaagaatactagggcaggttaaaagagctgtttaagtaagtatcagagtgctgtggagactcggaagtgtttaagctgcttaagtaagtataagtgctgtggagacccggaagagttagatataatgtcatttgttgtaattcagtttcataaaatggttcttgtttgaccctaacgtaacagtttttgtaattgtgttaaatcacatttttttctttaatttgtcccaatcttcaggttacagtctctagcttcgccatgtacatggcccttccgtgtacatggatgggcggggaggtaactaaaagatcctttacacaataaagtagatgatcatgataaatgaggacacagcattgttggttttgccatgtactattttacctatgacccgtggattggcaagttattgtatcttgaggacttcttcgtgatgagtgattatagaggctttggcataggatcagaaattctgaagaatctaagccaggttgcaatgaggtgtcgctgcagcagcatgcacttcttggtagcagaatggaatgaaccatccatcaacttctataaaagaagaggtgcttctgatctgtccagtgaagagggttggagactgttcaagatcgacaaggagtacttgctaaaaatggcaacagaggagtgaggagtgctgctgtagatgacaacctccattctattttagaataaattcccaacttctcttgctttctatgctgtttgtagtgaaataatagaatgagcacccattccaaagctttattaccagtggcgttgttgcatgtttgaaatgaggtctgtttaaagtggcaatctcagatgcagtttggagagtcagatctttctccttgaatatctttcgataaacaacaaggtggtgtgatcttaatatatttgaaaaaaacttcattctcgtgagtcatttaaatgtgtacaatgtacacactggtacttagagtttctgtttgattcttttttaataaactactctttgatttaaagccagacgccagccacaccacaacgaacaca

SEQ ID NO: 80556 - DNA, 2848 bp, Homo sapiens
cgtgggttccttgcagagccgtttctcagataacatttgaagtacaatatagtatggcaatgatgtggtttgttttggctcagcaaccccacccaaatctcatctcgaattgtaatccccaagtgctgagaaggggcctggtggtaggtgactggatcatgggcgcagctcttagtcgcgggccgactggtgtttatccgtcactcgccgaggttccttgggtcatggtgccagcctgactgagaagaggacgctcccgggagacgaatgaggaaccacctcctcctactgttcaagtacaggggcctggtccgcaaagggaagaaaagcaaaagacgaaaatggctaaattcgtgatccgcccagccactgccgccgactgcagtgacatactgcggctgatcaaggtagcggagagccagagctcctcccggggcgtggggtggaggtggctccgtttcccagggtggggtgattcacgtcttgaggtctcggccggtgtgagagcccagcctgttcccctttctgcgcccatccccggctcggccgccaccccgcccgcccgccccattcccttcccctgagctggccgggccggagcctcattttgttttctacttttttctctcctatgtgcatccccccaggagctggctaaatatgaatacatggaagaacaagtaatcttaactgaaaaagggtaattcaacagtggcgggacgggggacaagcgttcggtgcctgtcaccttcgccaaggccattaccgcccctgctcccccttcttgcagatctgctagaagatggttttggagagcaccccttttaccactgcctggttgcagaagtgccgaaagagcactggactccggaaggtaacccctcgccctttccagaagccagagagaccaagtgttatgtaagaagtagtgtcggctgtgtagaaccactgactacacaggccgaagttactgagaacttggacagaaaaaatagccagcaagtgttcaaactactgaggaaaaaaaaaaattagatatgctgcacttaagaatactagggcaggttaaaagagctgtttaagtaagtatcagagtgctgtggagactcggaagtgtttaagctgcttaagtaagtataagtgctgtggagacccggaagagttagatataatgtcatttgttgtaattcagtttcataaaatggttcttgtttgaccctaacgtaacagtttttgtaattgtgttaaatcacatttttttctttaatttgtcccaatcttcaggttacagtctctagcttcgccatgtacatggcccttccgtgtacatggatgggcggggaggtaactaaaagatcctttacacaataaagtagatgatcatgataaatgaggtaaggtcctattatcacacacttcaaacacggtagatcagaaacccactatgatactcgcttcctgtctgtttgctaaggaatataaaatggctagaaagtttaatttgaaacctttgcctccatttggaatagtagacaccagttaagagggtgtcagatgccttttttttttttttttttttttggctggtccctgttgattggtcagaagacagctcagctaaaaggggaagttgtctgggtggttgctttttttctgacgtctgttcctcaggctggaagaaatgagcagaaaacaagggatgagtactttttagagtatgtgcatgttacgtaatacctgtttctgggcaatgctgcttcttctgactcaacaaatggggagagcaaattgaaaatgcgtaaattggaaggcaagttctgaaattaaacgttgtactttggcctgatgttctgacctttaaggaagcaagagtttgtaaacttccaaatatttactattctgaactgccgtgtaaacctgacgtattcccaagtcaacataccagtataccaataggatgtgaataatgtgtgtgttgagtttaaaaccatagcagttttgctctggcaagtaatgaaagcgttctcgcttcctgagtgtgagctccagcagactgcagagtggccagtccacagttgtagcctgacttcagtgagttctgatgtgtgctttttgcaaatacatgttctcagaacagtgagatcatccagcagtggcctggactgcactcacataaaaatcatgagacagccatggctacttgtttctgtaatacatgcatgtgtgttttttaaaacctatgataggcctctgattctgcagctgcaacttttatggaatgttttccttctccacatctcatgtgatgctcttattacagacacagcattgttggttttgccatgtactattttacctatgacccgtggattggcaagttattgtatcttgaggacttcttcgtgatgagtgattatagaggctttggcataggatcagaaattctgaagaatctaagccaggttgcaatgaggtgtcgctgcagcagcatgcacttcttggtagcagaatggaatgaaccatccatcaacttctataaaagaagaggtgcttctgatctgtccagtgaagagggttggagactgttcaagatcgacaaggagtacttgctaaaaatggcaacagaggagtgaggagtgctgctgtagatgacaacctccattctattttagaataaattcccaacttctcttgctttctatgctgtttgtagtgaaataatagaatgagcacccattccaaagctttattaccagtggccctcatcccagtgacgttcctcatcccagtgacgttcctcatcccagtgacgttcctcatcccagtgacgttcctcatcctacacttc

SEQ ID NO: 80557 - DNA, 2938 bp, Homo sapiens
cgtgggttccttgcagagccgtttctcagataacatttgaagtacaatatagtatggcaatgatgtggtttgttttggctcagcaaccccacccaaatctcatctcgaattgtaatccccaagtgctgagaaggggcctggtggtaggtgactggatcatgggcgcagctcttagtcgcgggccgactggtgtttatccgtcactcgccgaggttccttgggtcatggtgccagcctgactgagaagaggacgctcccgggagacgaatgaggaaccacctcctcctactgttcaagtacaggggcctggtccgcaaagggaagaaaagcaaaagacgaaaatggctaaattcgtgatccgcccagccactgccgccgactgcagtgacatactgcggctgatcaaggtagcggagagccagagctcctcccggggcgtggggtggaggtggctccgtttcccagggtggggtgattcacgtcttgaggtctcggccggtgtgagagcccagcctgttcccctttctgcgcccatccccggctcggccgccaccccgcccgcccgccccattcccttcccctgagctggccgggccggagcctcattttgttttctacttttttctctcctatgtgcatccccccaggagctggctaaatatgaatacatggaagaacaagtaatcttaactgaaaaagggtaattcaacagtggcgggacgggggacaagcgttcggtgcctgtcaccttcgccaaggccattaccgcccctgctcccccttcttgcagatctgctagaagatggttttggagagcaccccttttaccactgcctggttgcagaagtgccgaaagagcactggactccggaaggtaacccctcgccctttccagaagccagagagaccaagtgttatgtaagaagtagtgtcggctgtgtagaaccactgactacacaggccgaagttactgagaacttggacagaaaaaatagccagcaagtgttcaaactactgaggaaaaaaaaaaattagatatgctgcacttaagaatactagggcaggttaaaagagctgtttaagtaagtatcagagtgctgtggagactcggaagtgtttaagctgcttaagtaagtataagtgctgtggagacccggaagagttagatataatgtcatttgttgtaattcagtttcataaaatggttcttgtttgaccctaacgtaacagtttttgtaattgtgttaaatcacatttttttctttaatttgtcccaatcttcaggttacagtctctagcttcgccatgtacatggcccttccgtgtacatggatgggcggggaggtaactaaaagatcctttacacaataaagtagatgatcatgataaatgaggtaaggtcctattatcacacacttcaaacacggtagatcagaaacccactatgatactcgcttcctgtctgtttgctaaggaatataaaatggctagaaagtttaatttgaaacctttgcctccatttggaatagtagacaccagttaagagggtgtcagatgccttttttttttttttttttttttggctggtccctgttgattggtcagaagacagctcagctaaaaggggaagttgtctgggtggttgctttttttctgacgtctgttcctcaggctggaagaaatgagcagaaaacaagggatgagtactttttagagtatgtgcatgttacgtaatacctgtttctgggcaatgctgcttcttctgactcaacaaatggggagagcaaattgaaaatgcgtaaattggaaggcaagttctgaaattaaacgttgtactttggcctgatgttctgacctttaaggaagcaagagtttgtaaacttccaaatatttactattctgaactgccgtgtaaacctgacgtattcccaagtcaacataccagtataccaataggatgtgaataatgtgtgtgttgagtttaaaaccatagcagttttgctctggcaagtaatgaaagcgttctcgcttcctgagtgtgagctccagcagactgcagagtggccagtccacagttgtagcctgacttcagtgagttctgatgtgtgctttttgcaaatacatgttctcagaacagtgagatcatccagcagtggcctggactgcactcacataaaaatcatgagacagccatggctacttgtttctgtaatacatgcatgtgtgttttttaaaacctatgataggcctctgattctgcagctgcaacttttatggaatgttttccttctccacatctcatgtgatgctcttattacagacacagcattgttggttttgccatgtactattttacctatgacccgtggattggcaagttattgtatcttgaggacttcttcgtgatgagtgattatagaggctttggcataggatcagaaattctgaagaatctaagccaggttgcaatgaggtgtcgctgcagcagcatgcacttcttggtagcagaatggaatgaaccatccatcaacttctataaaagaagaggtgcttctgatctgtccagtgaagagggttggagactgttcaagatcgacaaggagtacttgccattctattttagaataaattcccaacttctcttgctttctatgctgtttgtagtgaaataatagaatgagcacccattccaaagctttattaccagtggcgttgttgcatgtttgaaatgaggtctgtttaaagtggcaatctcagatgcagtttggagagtcagatctttctccttgaatatctttcgataaacaacaaggtggtgtgatcttaatatatttgaaaaaaacttcattctcgtgagtcatttaaatgtgtacaatgtacacactggtacttagagtttctgtttgattcttttttaataaactactctttgatttaa

SEQ ID NO: 80558 - DNA, 1598 bp, Homo sapiens
  misc_feature (1579)..(1580): n is a, c, g, or t
  misc_feature (1582)..(1583): n is a, c, g, or t
  misc_feature (1585)..(1585): n is a, c, g, or t
cgtgggttccttgcagagccgtttctcagataacatttgaagtacaatatagtatggcaatgatgtggtttgttttggctcagcaaccccacccaaatctcatctcgaattgtaatccccaagtgctgagaaggggcctggtggtaggtgactggatcatgggcgcagctcttagtcgcgggccgactggtgtttatccgtcactcgccgaggttccttgggtcatggtgccagcctgactgagaagaggacgctcccgggagacgaatgaggaaccacctcctcctactgttcaagtacaggggcctggtccgcaaagggaagaaaagcaaaagacgaaaatggctaaattcgtgatccgcccagccactgccgccgactgcagtgacatactgcggctgatcaaggtagcggagagccagagctcctcccggggcgtggggtggaggtggctccgtttcccagggtggggtgattcacgtcttgaggtctcggccggtgtgagagcccagcctgttcccctttctgcgcccatccccggctcggccgccaccccgcccgcccgccccattcccttcccctgagctggccgggccggagcctcattttgttttctacttttttctctcctatgtgcatccccccaggagctggctaaatatgaatacatggaagaacaagtaatcttaactgaaaaagggtaattcaacagtggcgggacgggggacaagcgttcggtgcctgtcaccttcgccaaggccattaccgcccctgctcccccttcttgcagatctgctagaagatggttttggagagcaccccttttaccactgcctggttgcagaagtgccgaaagagcactggactccggaaggacacagcattgttggttttgccatgtactattttacctatgacccgtggattggcaagttattgtatcttgaggacttcttcgtgatgagtgattatagaggctttggcataggatcagaaattctgaagaatctaagccaggttgcaatgaggtgtcgctgcagcagcatgcacttcttggtagcagaatggaatgaaccatccatcaacttctataaaagaagaggtgcttctgatctgtccagtgaagagggttggagactgttcaagatcgacaaggagtacttgctaaaaatggcaacagaggagtgaggagtgctgctgtagatgacaacctccattctattttagaataaattcccaacttctcttgctttctatgctgtttgtagtgaaataatagaatgagcacccattccaaagctttattaccagtggcgttgttgcatgtttgaaatgaggtctgtttaaagtggcaatctcagatgcagtttggagagtcagatctttctccttgaatatctttcgataaacaacaaggtggtgtgatcttaatatatttgaaaaaaacttcattctcgtgagtcatttaaatgtgtacaatgtacacactggtacttagagtttctgtttgattcttttttaataaactactctttgatttaaaaaaagtcgacgcggccgcgaatttagtagtagtagnngnngnagtaggcggccgc

SEQ ID NO: 80559 - DNA, 3229 bp, Homo sapiens
cgtgggttccttgcagagccgtttctcagataacatttgaagtacaatatagtatggcaatgatgtggtttgttttggctcagcaaccccacccaaatctcatctcgaattgtaatccccaagtgctgagaaggggcctggtggtaggtgactggatcatgggcgcagctcttagtcgcgggccgactggtgtttatccgtcactcgccgaggttccttgggtcatggtgccagcctgactgagaagaggacgctcccgggagacgaatgaggaaccacctcctcctactgttcaagtacaggggcctggtccgcaaagggaagaaaagcaaaagacgaaaatggctaaattcgtgatccgcccagccactgccgccgactgcagtgacatactgcggctgatcaaggtagcggagagccagagctcctcccggggcgtggggtggaggtggctccgtttcccagggtggggtgattcacgtcttgaggtctcggccggtgtgagagcccagcctgttcccctttctgcgcccatccccggctcggccgccaccccgcccgcccgccccattcccttcccctgagctggccgggccggagcctcattttgttttctacttttttctctcctatgtgcatccccccaggagctggctaaatatgaatacatggaagaacaagtaatcttaactgaaaaagggtaattcaacagtggcgggacgggggacaagcgttcggtgcctgtcaccttcgccaaggccattaccgcccctgctcccccttcttgcagatctgctagaagatggttttggagagcaccccttttaccactgcctggttgcagaagtgccgaaagagcactggactccggaaggtaacccctcgccctttccagaagccagagagaccaagtgttatgtaagaagtagtgtcggctgtgtagaaccactgactacacaggccgaagttactgagaacttggacagaaaaaatagccagcaagtgttcaaactactgaggaaaaaaaaaaattagatatgctgcacttaagaatactagggcaggttaaaagagctgtttaagtaagtatcagagtgctgtggagactcggaagtgtttaagctgcttaagtaagtataagtgctgtggagacccggaagagttagatataatgtcatttgttgtaattcagtttcataaaatggttcttgtttgaccctaacgtaacagtttttgtaattgtgttaaatcacatttttttctttaatttgtcccaatcttcaggttacagtctctagcttcgccatgtacatggcccttccgtgtacatggatgggcggggaggtaactaaaagatcctttacacaataaagtagatgatcatgataaatgaggtaaggtcctattatcacacacttcaaacacggtagatcagaaacccactatgatactcgcttcctgtctgtttgctaaggaatataaaatggctagaaagtttaatttgaaacctttgcctccatttggaatagtagacaccagttaagagggtgtcagatgccttttttttttttttttttttttggctggtccctgttgattggtcagaagacagctcagctaaaaggggaagttgtctgggtggttgctttttttctgacgtctgttcctcaggctggaagaaatgagcagaaaacaagggatgagtactttttagagtatgtgcatgttacgtaatacctgtttctgggcaatgctgcttcttctgactcaacaaatggggagagcaaattgaaaatgcgtaaattggaaggcaagttctgaaattaaacgttgtactttggcctgatgttctgacctttaaggaagcaagagtttgtaaacttccaaatatttactattctgaactgccgtgtaaacctgacgtattcccaagtcaacataccagtataccaataggatgtgaataatgtgtgtgttgagtttaaaaccatagcagttttgctctggcaagtaatgaaagcgttctcgcttcctgagtgtgagctccagcagactgcagagtggccagtccacagttgtagcctgacttcagtgagttctgatgtgtgctttttgcaaatacatgttctcagaacagtgagatcatccagcagtggcctggactgcactcacataaaaatcatgagacagccatggctacttgtttctgtaatacatgcatgtgtgttttttaaaacctatgataggcctctgattctgcagctgcaacttttatggaatgttttccttctccacatctcatgtgatgctcttattacagacacagcattgttggttttgccatgtactattttacctatgacccgtggattggcaagttattgtatcttgaggacttcttcgtgatgagtgattatagaggtacgattgagttcggagcagagggtctgaagagagttcagagttataaatgcttacaatgactttttaaattgtactctttctttttaggctttggcataggatcagaaattctgaagaatctaagccaggtatgtcttagtttttggtttccaaatttgtaagtttactggattattttaatgatggaataaaaattgggtcttgagagcaggctgaaatgtcactgagtgtgtgttttactctctcataataggttgcaatgaggtgtcgctgcagcagcatgcacttcttggtagcagaatggaatgaaccatccatcaacttctataaaagaagaggtgcttctgatctgtccagtgaagagggttggagactgttcaagatcgacaaggagtacttgctaaaaatggcaacagaggagtgaggagtgctgctgtagatgacaacctccattctattttagaataaattcccaacttctcttgctttctatgctgtttgtagtgaaataatagaatgagcacccattccaaagctttattaccagtggcgttgttgcatgtttgaaatgaggtctgtttaaagtggcaatctcagatgcagtttggagagtcagatctttctccttgaatatctttcgataaacaacaaggtggtgtgatcttaatatatttgaaaaaaacttcattctcgtgagtcatttaaatgtgtacaatgtacacactggtacttagagtttctgtttgattcttttttaataaactactctttgatttaagacttcaacacaaataacaccacacac

SEQ ID NO: 80560 - DNA, 2743 bp, Homo sapiens
cgtgggttccttgcagagccgtttctcagataacatttgaagtacaatatagtatggcaatgatgtggtttgttttggctcagcaaccccacccaaatctcatctcgaattgtaatccccaagtgctgagaaggggcctggtggtaggtgactggatcatgggcgcagctcttagtcgcgggccgactggtgtttatccgtcactcgccgaggttccttgggtcatggtgccagcctgactgagaagaggacgctcccgggagacgaatgaggaaccacctcctcctactgttcaagtacaggggcctggtccgcaaagggaagaaaagcaaaagacgaaaatggctaaattcgtgatccgcccagccactgccgccgactgcagtgacatactgcggctgatcaaggtagcggagagccagagctcctcccggggcgtggggtggaggtggctccgtttcccagggtggggtgattcacgtcttgaggtctcggccggtgtgagagcccagcctgttcccctttctgcgcccatccccggctcggccgccaccccgcccgcccgccccattcccttcccctgagctggccgggccggagcctcattttgttttctacttttttctctcctatgtgcatccccccaggagctggctaaatatgaatacatggaagaacaagtaatcttaactgaaaaagggtaattcaacagtggcgggacgggggacaagcgttcggtgcctgtcaccttcgccaaggccattaccgcccctgctcccccttcttgcagatctgctagaagatggttttggagagcaccccttttaccactgcctggttgcagaagtgccgaaagagcactggactccggaaggtaacccctcgccctttccagaagccagagagaccaagtgttatgtaagaagtagtgtcggctgtgtagaaccactgactacacaggccgaagttactgagaacttggacagaaaaaatagccagcaagtgttcaaactactgaggaaaaaaaaaaattagatatgctgcacttaagaatactagggcaggttaaaagagctgtttaagtaagtatcagagtgctgtggagactcggaagtgtttaagctgcttaagtaagtataagtgctgtggagacccggaagagttagatataatgtcatttgttgtaattcagtttcataaaatggttcttgtttgaccctaacgtaacagtttttgtaattgtgttaaatcacatttttttctttaatttgtcccaatcttcaggttacagtctctagcttcgccatgtacatggcccttccgtgtacatggatgggcggggaggtaactaaaagatcctttacacaataaagtagatgatcatgataaatgaggtaaggtcctattatcacacacttcaaacacggtagatcagaaacccactatgatactcgcttcctgtctgtttgctaaggaatataaaatggctagaaagtttaatttgaaacctttgcctccatttggaatagtagacaccagttaagagggtgtcagatgccttttttttttttttttttttttggctggtccctgttgattggtcagaagacagctcagctaaaaggggaagttgtctgggtggttgctttttttctgacgtctgttcctcaggctggaagaaatgagcagaaaacaagggatgagtactttttagagtatgtgcatgttacgtaatacctgtttctgggcaatgctgcttcttctgactcaacaaatggggagagcaaattgaaaatgcgtaaattggaaggcaagttctgaaattaaacgttgtactttggcctgatgttctgacctttaaggaagcaagagtttgtaaacttccaaatatttactattctgaactgccgtgtaaacctgacgtattcccaagtcaacataccagtataccaataggatgtgaataatgtgtgtgttgagtttaaaaccatagcagttttgctctggcaagtaatgaaagcgttctcgcttcctgagtgtgagctccagcagactgcagagtggccagtccacagttgtagcctgacttcagtgagttctgatgtgtgctttttgcaaatacatgttctcagaacagtgagatcatccagcagtggcctggactgcactcacataaaaatcatgagacagccatggctacttgtttctgtaatacatgcatgtgtgttttttaaaacctatgataggcctctgattctgcagctgcaacttttatggaatgttttccttctccacatctcatgtgatgctcttattacagacacagcattgttggttttgccatgtactattttacctatgacccgtggattggcaagttattgtatcttgaggacttcttcgtgatgagtgattatagaggctttggcataggatcagaaattctgaagaatctaagccaggttgcaatgaggtgtcgctgcagcagcatgcacttcttggtagcagaatggaatgaaccatccatcaacttctataaaagaagaggtgcttctgatctgtccagtgaagagggttggagactgttcaagatcgacaaggagtacttgctaaaaatggcaacagaggagtgaggagtgctgctgtagatgacaacctcgaggacatccaaggctccgaaatatactttaaagatgaaagggatttcgaaacgttagtcaggtcattaggaggaggaggagag

SEQ ID NO: 80561 - DNA, 2013 bp, Homo sapiens
cgtgggttccttgcagagccgtttctcagataacatttgaagtacaatatagtatggcaatgatgtggtttgttttggctcagcaaccccacccaaatctcatctcgaattgtaatccccaagtgctgagaaggggcctggtggtaggtgactggatcatgggcgcagctcttagtcgcgggccgactggtgtttatccgtcactcgccgaggttccttgggtcatggtgccagcctgactgagaagaggacgctcccgggagacgaatgaggaaccacctcctcctactgttcaagtacaggggcctggtccgcaaagggaagaaaagcaaaagacgaaaatggctaaattcgtgatccgcccagccactgccgccgactgcagtgacatactgcggctgatcaaggtagcggagagccagagctcctcccggggcgtggggtggaggtggctccgtttcccagggtggggtgattcacgtcttgaggtctcggccggtgtgagagcccagcctgttcccctttctgcgcccatccccggctcggccgccaccccgcccgcccgccccattcccttcccctgagctggccgggccggagcctcattttgttttctacttttttctctcctatgtgcatccccccaggagctggctaaatatgaatacatggaagaacaagtaatcttaactgaaaaagggtaattcaacagtggcgggacgggggacaagcgttcggtgcctgtcaccttcgccaaggccattaccgcccctgctcccccttcttgcagatctgctagaagatggttttggagagcaccccttttaccactgcctggttgcagaagtgccgaaagagcactggactccggaaggtaacccctcgccctttccagaagccagagagaccaagtgttatgtaagaagtagtgtcggctgtgtagaaccactgactacacaggccgaagttactgagaacttggacagaaaaaatagccagcaagtgttcaaactactgaggaaaaaaaaaaattagatatgctgcacttaagaatactagggcaggttaaaagagctgtttaagtaagtatcagagtgctgtggagactcggaagtgtttaagctgcttaagtaagtataagtgctgtggagacccggaagagttagatataatgtcatttgttgtaattcagtttcataaaatggttcttgtttgaccctaacgtaacagtttttgtaattgtgttaaatcacatttttttctttaatttgtcccaatcttcaggttacagtctctagcttcgccatgtacatggcccttccgtgtacatggatgggcggggaggtaactaaaagatcctttacacaataaagtagatgatcatgataaatgaggacacagcattgttggttttgccatgtactattttacctatgacccgtggattggcaagttattgtatcttgaggacttcttcgtgatgagtgattatagaggctttggcataggatcagaaattctgaagaatctaagccaggttgcaatgaggtgtcgctgcagcagcatgcacttcttggtagcagaatggaatgaaccatccatcaacttctataaaagaagaggtgcttctgatctgtccagtgaagagggttggagactgttcaagatcgacaaggagtacttgccattctattttagaataaattcccaacttctcttgctttctatgctgtttgtagtgaaataatagaatgagcacccattccaaagctttattaccagtggcgttgttgcatgtttgaaatgaggtctgtttaaagtggcaatctcagatgcagtttggagagtcagatctttctccttgaatatctttcgataaacaacaaggtggtgtgatcttaatatatttgaaaaaaacttcattctcgtgagtcatttaaatgtgtacaatgtacacactggtacttagagtttctgtttgattcttttttaataaactactctttgatttaa

SEQ ID NO: 80562 - DNA, 1340 bp, Homo sapiens
cgtgggttccttgcagagccgtttctcagataacatttgaagtacaatatagtatggcaatgatgtggtttgttttggctcagcaaccccacccaaatctcatctcgaattgtaatccccaagtgctgagaaggggcctggtggtaggtgactggatcatgggcgcagctcttagtcgcgggccgactggtgtttatccgtcactcgccgaggttccttgggtcatggtgccagcctgactgagaagaggacgctcccgggagacgaatgaggaaccacctcctcctactgttcaagtacaggggcctggtccgcaaagggaagaaaagcaaaagacgaaaatggctaaattcgtgatccgcccagccactgccgccgactgcagtgacatactgcggctgatcaaggtagcggagagccagagctcctcccggggcgtggggtggaggtggctccgtttcccagggtggggtgattcacgtcttgaggtctcggccggtgtgagagcccagcctgttcccctttctgcgcccatccccggctcggccgccaccccgcccgcccgccccattcccttcccctgagctggccgggccggagcctcattttgttttctacttttttctctcctatgtgcatccccccaggagctggctaaatatgaatacatggaagaacaagtaatcttaactgaaaaagggtaattcaacagtggcgggacgggggacaagcgttcggtgcctgtcaccttcgccaaggccattaccgcccctgctcccccttcttgcagatctgctagaagatggttttggagagcaccccttttaccactgcctggttgcagaagtgccgaaagagcactggactccggaaggacacagcattgttggttttgccatgtactattttacctatgacccgtggattggcaagttattgtatcttgaggacttcttcgtgatgagtgattatagaggctttggcataggatcagaaattctgaagaatctaagccaggttgcaatgaggtgtcgctgcagcagcatgcacttcttggtagcagaatggaatgaaccatccatcaacttctataaaagaagaggtgcttctgatctgtccagtgaagagggttggagactgttcaagatcgacaaggagtacttgctaaaaatggcaacagaggagtgaggagtgctgctgtagatgacaacctccattctattttagaataaattcccaacttctcttgctttctatgctgtttgtagtgaaataatagaatgagcacccattccaaagctttattaccagtggccctcatccacaggatccgctagagt

SEQ ID NO: 80563 - DNA, 2094 bp, Homo sapiens
cgtgggttccttgcagagccgtttctcagataacatttgaagtacaatatagtatggcaatgatgtggtttgttttggctcagcaaccccacccaaatctcatctcgaattgtaatccccaagtgctgagaaggggcctggtggtaggtgactggatcatgggcgcagctcttagtcgcgggccgactggtgtttatccgtcactcgccgaggttccttgggtcatggtgccagcctgactgagaagaggacgctcccgggagacgaatgaggaaccacctcctcctactgttcaagtacaggggcctggtccgcaaagggaagaaaagcaaaagacgaaaatggctaaattcgtgatccgcccagccactgccgccgactgcagtgacatactgcggctgatcaaggtagcggagagccagagctcctcccggggcgtggggtggaggtggctccgtttcccagggtggggtgattcacgtcttgaggtctcggccggtgtgagagcccagcctgttcccctttctgcgcccatccccggctcggccgccaccccgcccgcccgccccattcccttcccctgagctggccgggccggagcctcattttgttttctacttttttctctcctatgtgcatccccccaggagctggctaaatatgaatacatggaagaacaagtaatcttaactgaaaaagggtaattcaacagtggcgggacgggggacaagcgttcggtgcctgtcaccttcgccaaggccattaccgcccctgctcccccttcttgcagatctgctagaagatggttttggagagcaccccttttaccactgcctggttgcagaagtgccgaaagagcactggactccggaaggtaacccctcgccctttccagaagccagagagaccaagtgttatgtaagaagtagtgtcggctgtgtagaaccactgactacacaggccgaagttactgagaacttggacagaaaaaatagccagcaagtgttcaaactactgaggaaaaaaaaaaattagatatgctgcacttaagaatactagggcaggttaaaagagctgtttaagtaagtatcagagtgctgtggagactcggaagtgtttaagctgcttaagtaagtataagtgctgtggagacccggaagagttagatataatgtcatttgttgtaattcagtttcataaaatggttcttgtttgaccctaacgtaacagtttttgtaattgtgttaaatcacatttttttctttaatttgtcccaatcttcaggttacagtctctagcttcgccatgtacatggcccttccgtgtacatggatgggcggggaggtaactaaaagatcctttacacaataaagtagatgatcatgataaatgaggtaaggtcctattatcacacacttcaaacacggtagatcagaaacccactatgatactcgcttcctgtctgtttgctaaggaatataaaatggctagaaagtttaatttgaaacctttgcctccatttggaatagtagacaccagttaagagggtgtcagatgccttttttttttttttttttttttggctggtccctgttgattggtcagaagacagctcagctaaaaggggaagttgtctgggtggttgctttttttctgacgtctgttcctcaggctggaagaaatgagcagaaaacaagggatgagtactttttagagtatgtgcatgttacgtaatacctgtttctgggcaatgctgcttcttctgactcaacaaatggggagagcaaattgaaaatgcgtaaattggaaggcaagttctgaaattaaacgttgtactttggcctgatgttctgacctttaaggaagcaagagtttgtaaacttccaaatatttactattctgaactgccgtgtaaacctgacgtattcccaagtcaacataccagtataccaataggatgtgaataatgtgtgtgttgagtttaaaaccatagcagtctgctggagctcacactcaggaagcgagaacgctttcattacctgccagagcaaaactgctatggttttaaactcaacacacacattatggtccggc

SEQ ID NO: 80564 - DNA, 1082 bp, Homo sapiens
  misc_feature (1063)..(1064): n is a, c, g, or t
  misc_feature (1066)..(1067): n is a, c, g, or t
  misc_feature (1069)..(1069): n is a, c, g, or t
cgtgggttccttgcagagccgtttctcagataacatttgaagtacaatatagtatggcaatgatgtggtttgttttggctcagcaaccccacccaaatctcatctcgaattgtaatccccaagtgctgagaaggggcctggtggtaggtgactggatcatgggcgcagctcttagtcgcgggccgactggtgtttatccgtcactcgccgaggttccttgggtcatggtgccagcctgactgagaagaggacgctcccgggagacgaatgaggaaccacctcctcctactgttcaagtacaggggcctggtccgcaaagggaagaaaagcaaaagacgaaaatggctaaattcgtgatccgcccagccactgccgccgactgcagtgacatactgcggctgatcaaggtagcggagagccagagctcctcccggggcgtggggtggaggtggctccgtttcccagggtggggtgattcacgtcttgaggtctcggccggtgtgagagcccagcctgttcccctttctgcgcccatccccggctcggccgccaccccgcccgcccgccccattcccttcccctgagctggccgggccggagcctcattttgttttctacttttttctctcctatgtgcatccccccaggagctggctaaatatgaatacatggaagaacaagtaatcttaactgaaaaagggtaattcaacagtggcgggacgggggacaagcgttcggtgcctgtcaccttcgccaaggccattaccgcccctgctcccccttcttgcagatctgctagaagatggttttggagagcaccccttttaccactgcctggttgcagaagtgccgaaagagcactggactccggaaggtaacccctcgccctttccagaagccagagagaccaagtgttatgtaagaagtagtgtcggctgtgtagaaccactgactacacaggccgaagttactgagaacttggacagaaaaaatagccagcaagtgttcaaactactgaggaaaaaaaaaaagtcgacgcggccgcgaatttagtagtagtagnngnngnagtaggcggccgc

SEQ ID NO: 80565 - DNA, 1072 bp, Homo sapiens
  misc_feature (1)..(2): n is a, c, g, or t
  misc_feature (5)..(8): n is a, c, g, or t
  misc_feature (17)..(18): n is a, c, g, or t
  misc_feature (20)..(23): n is a, c, g, or t
nngannnnggccaatgnncnnnngcgcagctcttagtcgcgggccgactggtgtttatccgtcactcgccgaggttccttgggtcatggtgccagcctgactgagaagaggacgctcccgggagacgaatgaggaaccacctcctcctactgttcaagtacaggggcctggtccgcaaagggaagaaaagcaaaagacgaaaatggctaaattcgtgatccgcccagccactgccgccgactgcagtgacatactgcggctgatcaaggagctggctaaatatgaatacatggaagaacaagtaatcttaactgaaaaagatctgctagaagatggttttggagagcaccccttttaccactgcctggttgcagaagtgccgaaagagcactggactccggaaggacacagcattgttggttttgccatgtactattttacctatgacccgtggattggcaagttattgtatcttgaggacttcttcgtgatgagtgattatagaggctttggcataggatcagaaattctgaagaatctaagccaggttgcaatgaggtgtcgctgcagcagcatgcacttcttggtagcagaatggaatgaaccatccatcaacttctataaaagaagaggtgcttctgatctgtccagtgaagagggttggagactgttcaagatcgacaaggagtacttgctaaaaatggcaacagaggagtgaggagtgctgctgtagatgacaacctccattctattttagaataaattcccaacttctcttgctttctatgctgtttgtagtgaaataatagaatgagcacccattccaaagctttattaccagtggcgttgttgcatgtttgaaatgaggtctgtttaaagtggcaatctcagatgcagtttggagagtcagatctttctccttgaatatctttcgataaacaacaaggtggtgtgatcttaatatatttgaaaaaaacttcattctcgtgagtcatttaaatgtgtacaatgtacacactggtacttagagtttctgtttgattcttttttaataaactactctttgatttaa

SEQ ID NO: 80566 - DNA, 2018 bp, Homo sapiens
  misc_feature (1968)..(1968): n is a, c, g, or t
  misc_feature (1970)..(1970): n is a, c, g, or t
  misc_feature (1972)..(1973): n is a, c, g, or t
  misc_feature (1982)..(1982): n is a, c, g, or t
  misc_feature (1985)..(1985): n is a, c, g, or t
tgaaacagcagattacttttatttatgcatttaatggattgaagaaaagaacctttttttttctctctctctctgcaactgcagtaagggaggggagttggatatacctcgcctaatatctcctgggttgacaccatcattattgtttattcttgtgctccaaaagccgagtcctctgatggctcccttaggtgaagttgggaactatttcggtgtgcaggatgcggtaccgtttgggaatgtgcccgtgttgccggtggacagcccggttttgttaagtgaccacctgggtcagtccgaagcaggggggctccccaggggacccgcagtcacggacttggatcatttaaaggggattctcaggcggaggcagctatactgcaggactggatttcacttagaaatcttccccaatggtactatccagggaaccaggaaagaccacagccgatttggcattctggaatttatcagtatagcagtgggcctggtcagcattcgaggcgtggacagtggactctacctcgggatgaatgagaagggggagctgtatggatcagaaaaactaacccaagagtgtgtattcagagaacagttcgaagaaaactggtataatacgtactcgtcaaacctatataagcacgtggacactggaaggcgatactatgttgcattaaataaagatgggaccccgagagaagggactaggactaaacggcaccagaaattcacacattttttacctagaccagtggaccccgacaaagtacctgaactgtataaggatattctaagccaaagttgacaaagacaatttcttcacttgagcccttaaaaaagtaaccactataaaggtttcacgcggtgggttcttattgattcgctgtgtcatcacatcagctccactgttgccaaactttgtcgcatgcataatgtatgatggaggcttggatgggaatatgctgattttgttctgcacttaaaggcttctcctcctggagggctgcctagggccacttgcttgatttatcatgagagaagaggagagagagagagactgagcgctaggagtgtgtgtatgtgtgtgtgtgtgtgtgtgtgtgtgtgtgtatgtgtgtagcgggagatgtgggcggagcgagagcaaaaggactgcggcctgatgcatgctggaaaaagacacgcttttcatttctgatcagttgtacttcatcctatatcagcacagctgccatacttcgacttatcaggattctggctggtggcctgcgcgagggtgcagtcttacttaaaagactttcagttaattctcactggtatcatcgcagtgaacttaaagcaaagacctcttagtaaaaaataaaaaaaaataaaaaataaaaataaaaaaagttaaatttatttatagaaattccaaaggcaacattttatttattttatatatttatttattatatagagtttatttttaatgaaacatgtacaggccagataggcattttggaagctttaggctctgtaagcattaaatggcaaagtccgctatgaacctgtggtaaattcatgcaagtagatataatggtgcatggatataagaaattctaatgaccctaatgtactaaaggcgacaatctcttttgtgcccatattattgtaaacttatgcacatcgctcatgacactgagtattcactcttcagactgcttgtttcatagcttatcccagaggattaaagataaactgggtctcaaactttgattctgtgtctgcaatatttcctctctcataagtgactccactattgtaacttcatggttggaaaatatgagggttgatatatgtcttacttgtttaaatctgtcgcagaatataccaaagctaaataataactatgctttcattttagccgatctccagaatgacagtattaacatcaaacattgtattgatttagaattctcaaaaaanananntcgacgcgnccncgaatttagtagtagtacgcggcccctctcgag

SEQ ID NO: 80567 - DNA, 2126 bp, Homo sapiens
  misc_feature (2076)..(2076): n is a, c, g, or t
  misc_feature (2078)..(2078): n is a, c, g, or t
  misc_feature (2080)..(2081): n is a, c, g, or t
  misc_feature (2090)..(2090): n is a, c, g, or t
  misc_feature (2093)..(2093): n is a, c, g, or t
tgaaacagcagattacttttatttatgcatttaatggattgaagaaaagaacctttttttttctctctctctctgcaactgcagtaagggaggggagttggatatacctcgcctaatatctcctgggttgacaccatcattattgtttattcttgtgctccaaaagccgagtcctctgatggctcccttaggtgaagttgggaactatttcggtgtgcaggatgcggtaccgtttgggaatgtgcccgtgttgccggtggacagcccggttttgttaagtgaccacctgggtcagtccgaagcaggggggctccccaggggacccgcagtcacggacttggatcatttaaaggggattctcaggcggaggcagctatactgcaggactggatttcacttagaaatcttccccaatggtactatccagggaaccaggaaagaccacagccgatttggcattctggaatttatcagtatagcagtgggcctggtcagcattcgaggcgtggacagtggactctacctcgggatgaatgagaagggggagctgtatggatcagtaagtactggagggacttcatccagctttatctccatgtttgatttgaacagctgtcttttctctggattaaaaagggccagaaatgcaactgagtctgtttggaaggaaaaactaacccaagagtgtgtattcagagaacagttcgaagaaaactggtataatacgtactcgtcaaacctatataagcacgtggacactggaaggcgatactatgttgcattaaataaagatgggaccccgagagaagggactaggactaaacggcaccagaaattcacacattttttacctagaccagtggaccccgacaaagtacctgaactgtataaggatattctaagccaaagttgacaaagacaatttcttcacttgagcccttaaaaaagtaaccactataaaggtttcacgcggtgggttcttattgattcgctgtgtcatcacatcagctccactgttgccaaactttgtcgcatgcataatgtatgatggaggcttggatgggaatatgctgattttgttctgcacttaaaggcttctcctcctggagggctgcctagggccacttgcttgatttatcatgagagaagaggagagagagagagactgagcgctaggagtgtgtgtatgtgtgtgtgtgtgtgtgtgtgtgtgtgtgtatgtgtgtagcgggagatgtgggcggagcgagagcaaaaggactgcggcctgatgcatgctggaaaaagacacgcttttcatttctgatcagttgtacttcatcctatatcagcacagctgccatacttcgacttatcaggattctggctggtggcctgcgcgagggtgcagtcttacttaaaagactttcagttaattctcactggtatcatcgcagtgaacttaaagcaaagacctcttagtaaaaaataaaaaaaaataaaaaataaaaataaaaaaagttaaatttatttatagaaattccaaaggcaacattttatttattttatatatttatttattatatagagtttatttttaatgaaacatgtacaggccagataggcattttggaagctttaggctctgtaagcattaaatggcaaagtccgctatgaacctgtggtaaattcatgcaagtagatataatggtgcatggatataagaaattctaatgaccctaatgtactaaaggcgacaatctcttttgtgcccatattattgtaaacttatgcacatcgctcatgacactgagtattcactcttcagactgcttgtttcatagcttatcccagaggattaaagataaactgggtctcaaactttgattctgtgtctgcaatatttcctctctcataagtgactccactattgtaacttcatggttggaaaatatgagggttgatatatgtcttacttgtttaaatctgtcgcagaatataccaaagctaaataataactatgctttcattttagccgatctccagaatgacagtattaacatcaaacattgtattgatttagaattctcaaaaaanananntcgacgcgnccncgaatttagtagtagtacgcggcccctctcgag

SEQ ID NO: 80568 - DNA, 576 bp, Homo sapiens
atgggcatcagcagcagtgcccatcatagagtatactttgccacgacacaagctctgaggagagacaagcccccaccacaagaaacagcaactgtgtccaggagtatgtaaggttgggaaatagagacaagtgaagcagccaacttggacccgcaagtgggaccaagtatggagcatggcagggcttgcttccaggatccctgaatgacactgtggggcaaagctaccgaccctccatggactgccagctacctctgaacagtgatgcagaaaaaaaaaaatgcatcttagaatttccatatggattgcagccttgacatggaaaagtgaaaatcaatttggatgcacagcaggcccagagcataagaagtgacatggagaactctatcctgggggaagggtgagagaaaggagagtctgcatgtaatgagaccagaaatcaaagggggaatgaatgagctgaaacctctgtgcacaagaagcccagcagagtagctaaagatggaggaatctgtagtcacctttgactcccaggccacactgggcttccataatgccacaactccaggggaaagg

SEQ ID NO: 80569 - DNA, 647 bp, Homo sapiens
aatttttgtatttttagtagaggtggggtttcaccatgttggccaggctggtctcagactcctgacctcaaatgatttacccacctcggtgtcccaaagagctgggattacaggcatgagccagcacgctcagccttttaagtattttttaggattcaccagtgaagccacctgtacctgtacttttctctgttaggaagtttttgatgaattcagtctcttgttacagaaatttgaaatttttctatttcttcatgggtatgaatcagttttaggtaattagtgtctttctaggaatttgtccattacatcaagttaattttgtttgttcacatacagttgttcctaataatctgtctctctctctgtctcatttttcctgagatggaatgaatcattctttatggcagctctagccccaggttgttttacctgtgtttctgactgactggctataaactggtgttcccacaactccctccttggatttgattactttgtcagagtggcttaccaaactcaaggaaatacttacttatatttactggtttatgacaaagaaaggatgttataaagaatcacagtgaaagagatacatagggcaaggtataggggaagggactagagcttccaggccctccgcgggt

SEQ ID NO: 80570 - DNA, 349 bp, Homo sapiens
atttgtttgcaattgacaacacctcattaattgtaagcccagtgacactgcttgctgtttcaagtcacttttaaattacacacgtgctacttaatcttaaaagcaaaattaaacattggactggtttacatttcaagctacaatatggaaccattgtatttggaggaatgagtttaatatgcattgtaaaataaaattagggggtactttgcattcacagcggcttatgtaattaggttcagtcaactgtaatgtttcaggttaatgtcttccatgatgtatgctgtgtaaatagtgaacttacatatcccttaatacatctgaattattacataaatccttaatatta

SEQ ID NO: 80571 - DNA, 311 bp, Homo sapiens
ttttgtatttttagtagagacgggggtttcaccatgttagccaggatggtctcgatctcctgacctcgtgatccgcccgcctcggcctcccaaagcgctgggattacaggcgtgagccaccgcgcctggccgcaaatattttttaaatacagtttatcaagaagaaatagaaaatatgaagagtcttaaaatgattgaggagattgaatcagttgttgaaaagtcttcctcaaagaaaacactagtcccagttggcttcaccagcagtttcaccaaacatacagaaaaaaaagaatttcaatcttactaca

SEQ ID NO: 80572 - DNA, 596 bp, Homo sapiens
gtctgagcagcagcaaaataaataaataaataaataaataaataaaataaaactttttaaaggtcaccgaggctgctgtgtggccaggggagctatagaggagcaagggtagaggagggcaagcctgggaggaggcctttgtgaggatggaggcatagactggggttttgacagtggggatggagagatgaggacagatctgaaatatgttttgaagaacatatttaacagaacttgctcatggattggaagagattttaggggagagagagggaggtagatgttccccacttggtgcaccctgatggttgcagactgaattccaatagaatcttctccccaaggtctttttattccctctctcttttcctcaattcagccactctatgagtagttaatacaggtatttatttcacagatgaggtgagactcagggagatgaaatgactcatttagagttatcaggtgcagacagaaattttactctacccagaaaaccaaaatataggcatgaaatcagtgttcttcaaactgaattgtctctcattaattgattgtgaaatcaacataatgagttcctatcagcattaaagaaa

SEQ ID NO: 80573 - DNA, 461 bp, Homo sapiens
tgttttctagaaaggggatccttccaatccctggtttcccaggatgaggctttcggctttagctattagactggaatcatggagagcttgttaaaacagtgtgggcctcgcccccagagtttgacccagtaggtctgcggagggggcctgagaatttgccttgggtttccatgtgatcctgctgctgctggtcttcggcccacactttgcagactcctattcctaggactgtcctcaatttcgggcagctggggaggaaaataccactatcttattctcactttgagcctttctcacccctatagcaccctttatggaaactgtgcagggccagagtttttggctgggtgtggtggctcactcctgtagtcccagcactttaggaggctgaggcgggaagatcacttgaggccaggagtttaagaccagcctgggcaacatagtgagaccgtgtctctact

SEQ ID NO: 80574 - DNA, 757 bp, Homo sapiens
gcagaacaggcaggtgagagtctaagagggctcagtaatctgaagcttggtgggaagaagggattctgggctagaaagggtgcagaagcctgaagtagaaagagacgggattttggtccggggtggagagcgaatgcattgaaaagggccaaggcccaggataaggtagacatttaaaggggtacggatgcccaaggtagagcagacacttgaggagaccagctcagcaaacggaagacacttaaagtggtaggttctcaagagagaagaagtttttaagactagagctaagcaagacatttaaaaggacatgggttgggatttgggaacacgtttattccagaggcaggaacaaaggagtcgcttgtcaaggatctggttagagaagactagggtcttcctcgaaggaagcacgcgcacgcctgctctcccccattgtcttttctggcttctccaggttccctcgacccaggaccccctgttcccaggctatggcccccagtgccctgtagacctggcaggccccccgtgcttgcgacccctatttgggggtctgggtggctactggagggccttgcagaggggcagagaaggcaggaccatgacatctagggcctctgaactttctccggggcgcagcgtgacggctggcatcatcattgttggagatgagatccttaagggacacactcaggacaccaacaccttctttctgtgccggacactgcgctccctaggggtccaggtttgccgagtc

SEQ ID NO: 80575 - DNA, 799 bp, Homo sapiens
gcagggaccagcccgcagatgagcttccagtgagggcagccagtgggactgagggcaggcagccagcctaggtgtgctgggcagcacaggggcttccatccttcatcccgtgtgcccatcgtagccaccgtgtaaggctggaactggcatccccattttacatgttgaagccaagcctcagaggagcttcagtatcattgaggcctcaaagttgacaggtggtacagctgatttcctgactccagaactccagacactccccgctggtggtcatgtcagtgctttttttttcttcttcttttgagacagggtctcactctgtcacccagtctggagtacagtggtgtgatcttggctcactgcagcctctgcctctcaggctcaggtggtgatcctcctgcctcagtctcctgagcagctgggactgcaggctacaggcgcctgccaccaggcccagctaatttttgtatttttagtagagacagggttttgccatgttgcccaggctggtcttgaactcctgggctcaagtgagctgcctgcctcagcctcccaaagtgctgggattacaggcgtgagctactgcgcccagccaattctagtgctttaagcggggcagaagacagagttaaaactgctgctaatgcccggctcccactggctctgagcttttatgaatactgcccaaagttaaacttggagttccctgcattgttgggcagccagagccctagccagtgctgagacttagaattgctgactgcggtgaggtcatctccatgaccccagactcaggaca

SEQ ID NO: 80576 - DNA, 398 bp, Homo sapiens
agtcggtcatttggaaaccattcttctaaaggatggtgtagagagcactgaagtttacattgtggtatatagcctttgttgcagtaagtgatggtaacccatttgagcagctgtatgatctgaatagtctggaggggggtatgattacttacggctacattagtcaccataaataatccagttgccctgcagagtaacactcttggctgagcataatgtataactttaatctggacccagtataattccatagtacagaagctggtttgttcttctcagtctatttgatattactttgtttcattcttcttgggggttttttttgggggcctttaccccccccccccaaaagggggattgttcatttagaacactgtgcctgatgtggtggctcatgc

SEQ ID NO: 80577 - DNA, 175 bp, Homo sapiens
ggaacgtgtgtgagggcacggcctttgccagccaggtgtcctgctgagcagccgcgtctgaatggggccggcctcgcgggccgaagcactcctgtcctccacccgccttcacccctcacccgcacccagctcctcccggctcgtggccacatgaagacctcagacaaatggggca

SEQ ID NO: 80578 - DNA, 822 bp, Homo sapiens
ctggggggtggcaccaggctgtgaaggatccacagactggcatatgcaggaggaaatggggcgggcgaggagtaaggaccccaaaaagcaggggtagggaagggccctcccagcgccccactgtaataggggcctcatcaatgccccatgctcactgaataaagcactgccagcgaaaggtgaaaagaggaacaaagaacattctcctggacgccacccacagaaagccacgtgcaggcttggccctcaccttggggaccttggacacggagctggttatgtcacatctggctctcagagctggggcagcgtctaggaggcctgatgtagaaagcactcagctaagccctagttaccggcacacgggcaccagcgccccctctcagcaaactccacgtcttatgaaattagcactggatttccacttcaattggaaaatatggccaagatccatccacgtgtggctgactcagagctgtgacattaagggaacaataacaggaaatgattgagctgccttttcagacaacactggaatttttgaagaacccgagaatcagtatattgaaaggtctgcgccgtggagtccctgcttgtgaagcccgtgtgcatccgaagtgctgacaaggacaatggaaagacgcttcattcatgagctcctttaaaatgccagacgggcccctcgacagggacggggagaacttcagcagactgaatacgattggcaacataaacccaaacgtttggggaaacaaaactgattttattatttctattttactttatcctattttttgagacaggctatcgctctgtcaccca

SEQ ID NO: 80579 - DNA, 724 bp, Homo sapiens
ctggggggtggcaccaggctgtgaaggatccacagactggcatatgcaggaggaaatggggcgggcgaggagtaaggaccccaaaaagcaggggtagggaagggccctcccagcgccccactgtaataggggcctcatcaatgccccatgctcactgaataaagcactgccagcgaaaggtgaaaagaggaacaaagaacattctcctggacgccacccacagaaagccacgtgcaggcttggccctcaccttggggaccttggacacggagctggttatgtcacatctggctctcagagctggggcagcgtctaggaggcctgatgtagaaagcactcagctaagccctagttaccggcacacgggcaccagcgccccctctcagcaaactccacgtcttatgaaattagcactggatttccacttcaattggaaaatatggccaaggtggagaaccccttctttaagcaaaagatggcacggacccccgacataagacagttcaaagctgagcggctctccccatcatgcaagtaacctgcgtgccgccacgggaaacagcacgcatcccatctggactcccaccagacaactgaggcaaccgagaaggaggctggggagggacagctcgagggctcactggaggtcagcagggaggtggactgcgtctcccgagggccagcactggcttagcctgctcagtgaggtgcccgaaggaggccc

SEQ ID NO: 80580 - DNA, 427 bp, Homo sapiens
aactcctggactcaagcgatccgcccacctcggcctcccaaagtgctaggattacaggcgtgagccaccacaccggccttctatttttcttaccagcatgaattaaatcctttttgtctttttcttttttttgagacagagtcttgctctgttgcccaggctagagtgcagtggcaccatcttggctcactgcaacatcggactcccaggttcaaacgattctcctgcctcagtctcccgagtaggtgggactacaggcatgtgccacaacacctggctaatttttgtatttttagtagagacggggtttcaccatgttggtcaggctggtcttgaactcctgaccttgtgatctgcccgcctcggcctcccaaagtgctgagattacaggtgtgagccaccgcacccggccaatccttgcttcctt

SEQ ID NO: 80581 - DNA, 553 bp, Homo sapiens
aaaaaccattgaattgtacactttaaactggtgaattgtatggtatgtgaattatatctcaataaagttgttaaaataattcaatactaagaaaaccaaccaataaaaaatggactaaatatttgaacagacaattcaccaaataagatatctggatggcaaataaacacatataaagatgctttcctcattagccattaaggagataaaaattaaaaccacagtgagataccactacagatctattcgaatggctaaagttaaaaagactgactgaagtactattccaattatgtgaggtagtagagtagttacagtcatagagacagaaagtagaatggtggttgccaggggctggggaaggcgcaaatggaaagttaatgtttaatgggtacagtgtttcagtttggaaaggtgaaaaaggtgtggagatggatggtggtaatggttgcagagcaatgtgaatatacttaatgctgacaaaatataaacttaacaacagttaaaatttgttatgtgtaattacctacaattaaaaaatatgtaaatgaag

SEQ ID NO: 80582 - DNA, 656 bp, Homo sapiens
tccgaccgatctgtcttttggttttaacccatgttcccccgtgctgcctaagaagctgagtttcggcatgagttgaatttctgtctttagtttctaaaggatttacactaactagagcatcgctagataactcagggtgatgcgagaggctcacacccatgagagaaattgctgcaggatctcaggatgtttagcagggagaagactgtgtggggacagcagagctatctccaaaacatttgtagggtaatatcatgtgcaaaagaaattagatttattccgcatgactccataagtggagacatattttggttttatagatagaagacatttatgaaaaataagattgttacccaggcacggtggctcccacctgtaatcccagcactttgggagactgaggcaggagaatcactggaagccaggagttcaaaactacctgggcaacatagcaagaacccatctctgcaaaaaatttaaaaaattagccaggtatggtggcacatgcctgtagtcccagctactcataggctgaggtgggaggatccacttgagcccaggagttagagactgcagtgagctgtgatggtactactgcactccagcctgggcgagagagtggatccttgtctctccaaacaggatgaatcggcgga

SEQ ID NO: 80583 - DNA, 1136 bp, Homo sapiens
cggggagcggtgccggaagtagtcggggagggccgcgcagtcggaccggctgctgagacgaacgcttcactggggcagtctctgcatatcatggggagatagacgctgctgcctttaattggccttggtcctcacagctccaaaaagaaacaggatctcgataagctctatgagctgaagtccaaagctcggcagattatgaaccagtttggcccctcagccctaatcaacctctccaatttctcatccataaaaccggaaccagccagcacccctccacaaggctccatggccaatagtactgcagtggtaaagataccaggcactcctggggcaggaggtcgtcttagccctgaaaacaatcaggtattgaccaagaagaaattacaggacttagtaagagaagtggatcctaatgagcagttggatgaagatgtggaggagatgctgctgcagattgctgatgattttatcgagagtgtggtgacagcagcctgtcagcttgcgcggcatcgcaagtctagcaccctggaggtgaaagatgtccagctgcatttagagcgccagtggaacatgtggatcccaggatttggctctgaagaaatccgaccctacaaaaaagcttgcaccacagaagctcacaaacagagaatggcattgatccggaaaacaaccaagaaataacacacggaaaggtcagggaatggacagcaatgtatttggagatacttgagctgagaactcagccatctcatccttggatttttttttttaatgctttacagagaagcatatattttttattaacagtgcagcaatatctataatgactgagaggatctgccaaaagaataaagcctcctaccccaacttccggtcccttttccctgccatctcaaagaggagcaatgtatcttccagagaagattttatttgtggtttattatataagtgactgaatatgggacaaagcattatggtctttttgggtaagacagtattagcaggatttgtaaagggttttgtttccttctcccttccccttttccctgtactttgtaatgtcagtgtttatatgaatatgactttcatttgcttttccagaataaagaagttattaatcgaaaaaaaaaata

SEQ ID NO: 80584 - DNA, 869 bp, Homo sapiens
cggggagcggtgccggaagtagtcggggagggccgcgcagtcggaccggctgctgagacgaacgcttcactggggcagtctctgcatatcatggggagatagacgctgctgcctttaattggccttggtcctcacagctccaaaaagaaacaggatctcgataagctctatgagctgaagtccaaagctcggcagattatgaaccagtttggcccctcagccctaatcaacctctccaatttctcatccataaaaccggaaccagccagcacccctccacaaggctccatggccaatagtactgcagtggtaaagataccaggcactcctggggcaggaggtcgtcttagccctgaaaacaatcaggtattgaccaagaagaaattacaggacttagtaagagaagtggatcctaatgagcagttggatgaagatgtggaggagatgctgctgcagattgctgatgattttatcgagagtgtggtgacagcagcctgtcagcttgcgcggcatcgcaagtctagcaccctggaggtgaaagatgtccagctgcatttagagcgccagtggaacatgtggatcccaggatttggctctgaagaaatccgaccctacaaaaaagcttgcaccacagaagctcacaaacagagaatggcattgatccggaaaacaaccaagaaataacacacggaaaggtcagggaatggacagcaatgtatttggagatacttgagctgagaactcagccatctcatccttggatttttttttttaatgctttacagagaagcatatattttttattaacagtgcagcaatatctataatgactgagaggatctgccaaaagaataaagcctcctacccca

SEQ ID NO: 80585 - DNA, 865 bp, Homo sapiens
cggggagcggtgccggaagtagtcggggagggccgcgcagtcggaccggctgctgagacgaacgcttcactggggcagtctctgcatatcatggggagatagacgctgctgcctttaattggccttggtcctcacagctccaaaaagaaacaggatctcgataagctctatgagctgaagtccaaagctcggcagattatgaaccagtttggcccctcagccctaatcaacctctccaatttctcatccataaaaccggaaccagccagcacccctccacaaggctccatggccaatagtactgcagtggtaaagataccaggcactcctggggcaggaggtcgtcttagccctgaaaacaatcaggtattgaccaagaagaaattacaggacttagtaagagaagtggatcctaatgagcagttggatgaagatgtggaggagatgctgctgcagattgctgatgattttatcgagagtgtggtgacagcagcctgtcagcttgcgcggcatcgcaagtctagcaccctggaggtgaaagatgtccagctgcatttagagcgccagtggaacatgtggatcccaggatttggctctgaagaaatccgaccctacaaaaaagcttgcaccacagaagctcacaaacagagaatggcattgatccggaaaacaaccaagaaataacacacggaaaggtcagggaatggacagcaatgtatttggagatacttgagctgagaactcagccatctcatccttggatttttttttttaatgctttacagagaagcatatattttttattaaggaattccggaattccggaattccggcatatgaagtgctgtcggatgctaagaaacag

SEQ ID NO: 80586 - DNA, 1206 bp, Homo sapiens
cggggagcggtgccggaagtagtcggggagggccgcgcagtcggaccggctgctgagacgaacgcttcactggggcagtctctgcatatcatggggagatagacgctgctgcctgtgagtcttgggccctggcagttgaggaacaagagcgggaggagggagtcaggacccagacctacagtgggtcagtgttcgaaggaccaggttgtggacgagacggggctgtgaggattcaggctcttgggaagggactgactgagaggatcaggctcggagaagacgcggctgtggggacccgggctccaagacgggacttagggaacggggacggatgcgagttctccggcatctgagggaaagtggtctgagaggagcaggattatgaggacccgcactcctacgaggaaagggtcagaaaggaacggggcgtgaagacacaggctccggagagttaattggccttggtcctcacagctccaaaaagaaacaggatctcgataagctctatgagctgaagtccaaagctcggcagattatgaaccagtttggcccctcagccctaatcaacctctccaatttctcatccataaaaccggaaccagccagcacccctccacaaggctccatggccaatagtactgcagtggtaaagataccaggcactcctggggcaggaggtcgtcttagccctgaaaacaatcaggtattgaccaagaagaaattacaggacttagtaagagaagtggatcctaatgagcagttggatgaagatgtggaggagatgctgctgcagattgctgatgattttatcgagagtgtggtgacagcagcctgtcagcttgcgcggcatcgcaagtctagcaccctggaggtgaaagatgtccagctgcatttagagcgccagtggaacatgtggatcccaggatttggctctgaagaaatccgaccctacaaaaaagcttgcaccacagaagctcacaaacagagaatggcattgatccggaaaacaaccaagaaataacacacggaaaggtcagggaatggacagcaatgtatttggagatacttgagctgagaactcagccatctcatccttggatttttttttttaatgctttacagagaagcatatattttttattaacagtgcagcaatatctataatgactgagaggatctgccaaaagaataaagcctcctacccca

SEQ ID NO: 80587 - DNA, 687 bp, Homo sapiens
cggggagcggtgccggaagtagtcggggagggccgcgcagtcggaccggctgctgagacgaacgcttcactggggcagtctctgcatatcatggggagatagacgctgctgcctttaattggccttggtcctcacagctccaaaaagaaacaggatctcgataagctctatgagctgaagtccaaagctcggcagattatgaaccagtttggcccctcagccctaatcaacctctccaatttctcatccataaaaccggaaccagccagcacccctccacaaggctccatggccaatagtactgcagtggtaaagataccaggcactcctggggcaggaggtcgtcttagccctgaaaacaatcaggtattgaccaagaagaaattacaggacttagtaagagaagtggatcctaatgagcagttggatgaagatgtggaggagatgctgctgcagattgctgatgattttatcgagagtgtggtgacagcagcctgtcagcttgcgcggcatcgcaagtctagcaccctggaggtgaaagatgtccagctgcatttagagcgccagtggaacatgtggatcccaggatttggctctgaagaaatccgaccctacaaaaaagcttgcaccacagaagctcacaaacagtgaggaatggcatgatccgtggggacagccagggctgat

SEQ ID NO: 80588 - DNA, 893 bp, Homo sapiens
  misc_feature (678)..(678): n is a, c, g, or t
  misc_feature (689)..(689): n is a, c, g, or t
  misc_feature (698)..(698): n is a, c, g, or t
  misc_feature (702)..(702): n is a, c, g, or t
  misc_feature (704)..(704): n is a, c, g, or t
  misc_feature (712)..(712): n is a, c, g, or t
  misc_feature (717)..(717): n is a, c, g, or t
  misc_feature (722)..(723): n is a, c, g, or t
cggggagcggtgccggaagtagtcggggagggccgcgcagtcggaccggctgctgagacgaacgcttcactggggcagtctctgcatatcatggggagatagacgctgctgcctgtagcttttgaaaatggctgcctctcatttcaccgggctcacagctgttgctgatgtaattaaagatctagacactcagatagctttaattggccttggtcctcacagctccaaaaagaaacaggatctcgataagctctatgagctgaagtccaaagctcggcagattatgaaccagtttggcccctcagccctaatcaacctctccaatttctcatccataaaaccggaaccagccagcacccctccacaaggctccatggccaatagtactgcagtggtaaagataccaggcactcctggggcaggaggtcgtcttagccctgaaaacaatcaggtattgaccaagaagaaattacaggacttagtaagagaagtggatcctaatgagcagttggatgaagatgtggaggagatgctgctgcagattgctgatgattttatcgagagtgtggtgacagcagcctgtcagcttgcgcggcatcgcaagtctagcaccctggaggtgaaagatgtccagctgcatttagagcgccagtggacctgtggagtccaggattggtntgagaatcganctaaaaagntggncnagaagtcnacagngatgnnttgtcggaacaaccgataaccggagcggggtgggcgcgtttggaactggggaaacccactccggggtttggctcgcaggccattttaggagatatggggggggaaacacagtcgcagaggaaaaattttcagacgggagagtcccgtgtcttgacatcaggtcgcagcat

SEQ ID NO: 80589 - DNA, 636 bp, Homo sapiens
caaaaccatggttgggttatacacttcctattagggcgccagagcgccagtggaacatgtggatcccaggatttggctctgaagaaatccgaccctacaaaaaagcttgcaccacagaagctcacaaacagagaatggcattgatccggaaaacaaccaagaaataacacacggaaaggtcagggaatggacagcaatgtatttggagatacttgagctgagaactcagccatctcatccttggatttttttttttaatgctttacagagaagcatatattttttattaacagtgcagcaatatctataatgactgagaggatctgccaaaagaataaagcctcctaccccaacttccggtcccttttccctgccatctcaaagaggagcaatgtatcttccagagaagattttatttgtggtttattatataagtgactgaatatgggacaaagcattatggtctttttgggtaagacagtattagcaggatttgtaaagggttttgtttccttctcccttccccttttccctgtactttgtaatgtcagtgtttatatgaatatgactttcatttgcttttccagaataaagaggtggcctcgttggcctcagcggtggagctctgctggccga

SEQ ID NO: 80590 - DNA, 1091 bp, Homo sapiens
ttttactctcaagattcatcctttattacaggttcttctagagctaattcttgtgcttttcttctccagttaattggccttggtcctcacagctccaaaaagaaacaggatctcgataagctctatgagctgaagtccaaagctcggcagattatgaaccagtttggcccctcagccctaatcaacctctccaatttctcatccataaaaccggaaccagccagcacccctccacaaggctccatggccaatagtactgcagtggtaaagataccaggcactcctggggcaggaggtcgtcttagccctgaaaacaatcaggtattgaccaagaagaaattacaggacttagtaagagaagtggatcctaatgagcagttggatgaagatgtggaggagatgctgctgcagattgctgatgattttatcgagagtgtggtgacagcagcctgtcagcttgcgcggcatcgcaagtctagcaccctggaggtgaaagatgtccagctgcatttagagcgccagtggaacatgtggatcccaggatttggctctgaagaaatccgaccctacaaaaaagcttgcaccacagaagctcacaaacagagaatggcattgatccggaaaacaaccaagaaataacacacggaaaggtcagggaatggacagcaatgtatttggagatacttgagctgagaactcagccatctcatccttggatttttttttttaatgctttacagagaagcatatattttttattaacagtgcagcaatatctataatgactgagaggatctgccaaaagaataaagcctcctaccccaacttccggtcccttttccctgccatctcaaagaggagcaatgtatcttccagagaagattttatttgtggtttattatataagtgactgaatatgggacaaagcattatggtctttttgggtaagacagtattagcaggatttgtaaagggttttgtttccttctcccttccccttttccctgtactttgtaatgtcagtgtttatatgaatatgactttcatttgcttttccagaataaagaagttattaatcgaaaaaaaaaata

SEQ ID NO: 80591 - DNA, 1096 bp, Homo sapiens
cggggagcggtgccggaagtagtcggggagggccgcgcagtcggaccggctgctgagacgaacgcttcactggggcagtctctgcatatcatggggagatagacgctgctgcctttaattggccttggtcctcacagctccaaaaagaaacaggatctcgataagctctatgagctgaagtccaaagctcggcagattatgaaccagtttggcccctcagccctaatcaacctctccaatttctcatccataaaaccggaaccagccagcacccctccacaaggctccatggccaatagtactgcagtggtaaagataccaggcactcctggggcaggaggtcgtcttagccctgaaaacaatcagtggatcctaatgagcagttggatgaagatgtggaggagatgctgctgcagattgctgatgattttatcgagagtgtggtgacagcagcctgtcagcttgcgcggcatcgcaagtctagcaccctggaggtgaaagatgtccagctgcatttagagcgccagtggaacatgtggatcccaggatttggctctgaagaaatccgaccctacaaaaaagcttgcaccacagaagctcacaaacagagaatggcattgatccggaaaacaaccaagaaataacacacggaaaggtcagggaatggacagcaatgtatttggagatacttgagctgagaactcagccatctcatccttggatttttttttttaatgctttacagagaagcatatattttttattaacagtgcagcaatatctataatgactgagaggatctgccaaaagaataaagcctcctaccccaacttccggtcccttttccctgccatctcaaagaggagcaatgtatcttccagagaagattttatttgtggtttattatataagtgactgaatatgggacaaagcattatggtctttttgggtaagacagtattagcaggatttgtaaagggttttgtttccttctcccttccccttttccctgtactttgtaatgtcagtgtttatatgaatatgactttcatttgcttttccagaataaagaagttattaatcgaaaaaaaaaata

SEQ ID NO: 80592 - DNA, 1045 bp, Homo sapiens
cggggagcggtgccggaagtagtcggggagggccgcgcagtcggaccggctgctgagacgaacgcttcactggggcagtctctgcatatcatggggagatagacgctgctgcctttaattggccttggtcctcacagctccaaaaagaaacaggatctcgataagctctatgagctgaagtccaaagctcggcagattatgaaccagtttggcccctcagccctaatcaacctctccaatttctcatccataaaaccggaaccagccagcacccctccacaaggctccatggccaatagtactgcagtggtaaagataccaggcactcctggggcaggaggtcgtcttagccctgaaaacaatcaggtattgaccaagaagaaattacaggacttagtaagagaagtggatcctaatgagcagttggatgaagatgtggaggagatgctgctgcagattgctgatgattttatcgagagtgtggtgacagcagcctgtcagcttgcgcggcatcgcaagtctagcaccctggaggtgaaagatgtccagctgcatttagagcgccagtggaacatgtggatcccaagaaataacacacggaaaggtcagggaatggacagcaatgtatttggagatacttgagctgagaactcagccatctcatccttggatttttttttttaatgctttacagagaagcatatattttttattaacagtgcagcaatatctataatgactgagaggatctgccaaaagaataaagcctcctaccccaacttccggtcccttttccctgccatctcaaagaggagcaatgtatcttccagagaagattttatttgtggtttattatataagtgactgaatatgggacaaagcattatggtctttttgggtaagacagtattagcaggatttgtaaagggttttgtttccttctcccttccccttttccctgtactttgtaatgtcagtgtttatatgaatatgactttcatttgcttttccagaataaagaagttattaatcgaaaaaaaaaata

SEQ ID NO: 80593 - DNA, 1214 bp, Homo sapiens
cggggagcggtgccggaagtagtcggggagggccgcgcagtcggaccggctgctgagacgaacgcttcactggggcagtctctgcatatcatggggagatagacgctgctgcctttaattggccttggtcctcacagctccaaaaagaaacaggatctcgataagctctatgagctgaagtccaaagctcggcagattatgaaccagtttggcccctcagccctaatcaacctctccaatttctcatccataaaaccggaaccagccagcacccctccacaaggctccatggccaatagtactgcagtggtaaagataccaggcactcctggggcaggaggtcgtcttagccctgaaaacaatcaggtattgaccaagaagaaattacaggacttagtaagagaagtggatcctaatgagcagttggatgaagatgtggaggagatgctgctgcagattgctgatgattttatcgagagtgtggtgacagcagcctgtcagcttgcgcggcatcgcaagtctagcaccctggaggtgaaagatgtccagctgcatttagagcgccagtggaacatgtggatcccaggatttggctctgaagaaatccgaccctacaaaaaagcttgcaccacagaagctcacaaacagatgctcctgctgtgggctgggatcatgtgtctgcctctgactgcagttaaatccagatgtcagctgacttctgccatgacttctgccacagattcactgtgtaacctggggcccaacctccgagaccacccttaaacatcagtagactgggagctgtacgtggatggaagcagcttcgccaacccctgcaaagtgactctgaagaagatggcaagccctgttccagtcacacccggaagctgactggtccacgcgcggccaaagcatgaggaaactcatcgcgggactcattttccttaaaaatctggacttgtacagtaaggacttcaactgaccttcttcagactgagggctgttcccagtatatacatcaggtcactgaggtaggacaaaagagtgctacagccctattattttatagtttttatgaatgcctaggaactccaaaaggaacctgttcgtacaataacattcagtacaaagtatgtaatccaggaagtgaccagtccgatgtgtgctatgacccctctgaacctcccatgatcacagtctttgaagtaagacta

SEQ ID NO: 80594 - DNA, 475 bp, Homo sapiens
cggggagcggtgccggaagtagtcggggagggccgcgcagtcggaccggctgctgagacgaacgcttcactggggcagtctctgcatatcatggggagatagacgctgctgcctgtagcttttgaaaatggctgcctctcatttcaccgggctcacagctgttgctgatgtaattaaagatctagacactcagatagctgtaagtaagtttgaggctactgtgagcagaacttggtgaatgtgcttctgatcgtgatgacacccaagctgacgtccacagagtcagcctcatgactctaagattcaggagtctcagctgctccagactagggtctctgcatgtacttagattgctaacactcagagaaaaattgctcttgataaagaggagtttacttttaacagctgctaaaagttatgtttattgggcatagccctgacatagacttaagcatgtttgaaatgccagaatgaa

SEQ ID NO: 80595 - DNA, 410 bp, Homo sapiens
tagtcccagctacttgggaggctgaggcaggagaatcacttgaatccgggaggcagaggttgcagtgagcctagattgcaccattacacttcggatactccatcacacacacacaaaaaacagacctgggttgtagttccaacggccacttactgggaagagagagaccctgtgtagaggtgttggactcagtttattctagtaggcccaacctccgagaccacccttaaacatcagtagactgggagctgtacgtggatggaagcagcttcgccaacccctgcaaagtgactctgaagaagatggcaagccctgttccagtcacacccggaagctgactggtccacgcgcggccaaagcatgaggaaactcatcgcgggactcattttccttaaaaatctggacttgta

SEQ ID NO: 80596 - DNA, 1473 bp, Homo sapiens
cggggagcggtgccggaagtagtcggggagggccgcgcagtcggaccggctgctgagacgaacgcttcactggggcagtctctgcatatcatggggagatagacgctgctgcctgtgagtcttgggccctggcagttgaggaacaagagcgggaggagggagtcaggacccagacctacagtgggtcagtgttcgaaggaccaggttgtggacgagacggggctgtgaggattcaggctcttgggaagggactgactgagaggatcaggctcggagaagacgcggctgtggggacccgggctccaagacgggacttagggaacggggacggatgcgagttctccggcatctgagggaaagtggtctgagaggagcaggattatgaggacccgcactcctacgaggaaagggtcagaaaggaacggggcgtgaagacacaggctccggagagttaattggccttggtcctcacagctccaaaaagaaacaggatctcgataagctctatgagctgaagtccaaagctcggcagattatgaaccagtttggcccctcagccctaatcaacctctccaatttctcatccataaaaccggaaccagccagcacccctccacaaggctccatggccaatagtactgcagtggtaaagataccaggcactcctggggcaggaggtcgtcttagccctgaaaacaatcaggtattgaccaagaagaaattacaggacttagtaagagaagtggatcctaatgagcagttggatgaagatgtggaggagatgctgctgcagattgctgatgattttatcgagagtgtggtgacagcagcctgtcagcttgcgcggcatcgcaagtctagcaccctggaggtgaaagatgtccagctgcatttagagcgccagtggaacatgtggatcccaggatttggctctgaagaaatccgaccctacaaaaaagcttgcaccacagaagctcacaaacagagaatggcattgatccggaaaacaaccaagaaataacacacggaaaggtcagggaatggacagcaatgtatttggagatacttgagctgagaactcagccatctcatccttggatttttttttttaatgctttacagagaagcatatattttttattaacagtgcagcaatatctataatgactgagaggatctgccaaaagaataaagcctcctaccccaacttccggtcccttttccctgccatctcaaagaggagcaatgtatcttccagagaagattttatttgtggtttattatataagtgactgaatatgggacaaagcattatggtctttttgggtaagacagtattagcaggatttgtaaagggttttgtttccttctcccttccccttttccctgtactttgtaatgtcagtgtttatatgaatatgactttcatttgcttttccagaataaagaagttattaatcgaaaaaaaaaata

SEQ ID NO: 80597 - DNA, 1068 bp, Homo sapiens
  misc_feature (33)..(33): n is a, c, g, or t
ggtgaagggacagtccagggtcgacgccgaggnacaggaaaagctattaattggccttggtcctcacagctccaaaaagaaacaggatctcgataagctctatgagctgaagtccaaagctcggcagattatgaaccagtttggcccctcagccctaatcaacctctccaatttctcatccataaaaccggaaccagccagcacccctccacaaggctccatggccaatagtactgcagtggtaaagataccaggcactcctggggcaggaggtcgtcttagccctgaaaacaatcaggtattgaccaagaagaaattacaggacttagtaagagaagtggatcctaatgagcagttggatgaagatgtggaggagatgctgctgcagattgctgatgattttatcgagagtgtggtgacagcagcctgtcagcttgcgcggcatcgcaagtctagcaccctggaggtgaaagatgtccagctgcatttagagcgccagtggaacatgtggatcccaggatttggctctgaagaaatccgaccctacaaaaaagcttgcaccacagaagctcacaaacagagaatggcattgatccggaaaacaaccaagaaataacacacggaaaggtcagggaatggacagcaatgtatttggagatacttgagctgagaactcagccatctcatccttggatttttttttttaatgctttacagagaagcatatattttttattaacagtgcagcaatatctataatgactgagaggatctgccaaaagaataaagcctcctaccccaacttccggtcccttttccctgccatctcaaagaggagcaatgtatcttccagagaagattttatttgtggtttattatataagtgactgaatatgggacaaagcattatggtctttttgggtaagacagtattagcaggatttgtaaagggttttgtttccttctcccttccccttttccctgtactttgtaatgtcagtgtttatatgaatatgactttcatttgcttttccagaataaagaagttattaatcgaaaaaaaaaata

SEQ ID NO: 80598 - DNA, 560 bp, Homo sapiens
tgggtgacagagcaagactccatcttaaaataaataaattaattaattaattaaaaaaattaatgaacctgcatttcccagattccctgcagtcataagtggtcctctaagttttggccgaaagagacctgagaagtgattgcaacttcagaatcactatttttttttttttgaaatttatacaaacttttttttgttggagtatacatataggaaagtacacaaatggtaagcttagtgaattttcacatgtggacacactcatgcatgggaacatatgccatccagatcaacaaataaaacaattgcaccattgcatcctgtactccagcctaagcaacagagtaagaccctgtctctaaaagaaaaaaagaaaaagaaatagaacatttccagatctcagaagtcttctcttgtcactatcccttacaaaggcaacctgacttttaataccatagattaattttgtctgtttttatactttatataaatgtaatcaatcaatatgcaatcttttgtgtcagcttcttttgctctacattatacttgtgagattcatc

SEQ ID NO: 80599 - DNA, 1178 bp, Homo sapiens
  misc_feature (4)..(4): n is a, c, g, or t
  misc_feature (437)..(437): n is a, c, g, or t
aaanacatagagtatgaggccactaaaaccccaattgcaagaaaatgagacacattctcagcttacaaatttggagagaaagtggcaacaccttgagcaaaataattttgcgatgaaagaattcatagcaaccaagagtcaagagagtgattaccagccaattaagaaaaatgtgaccaagcagattgcagagtacaataaaaccatcgtggatgctttacatagcaccagcggaaactgagtttaagtccactgaaagtctctaaggaagtatcctcttgctgctaaacttggtacaagttgactaccaaaaaaaaaaaaagcttacttttggagtttacctaaaatttctgaatgttataatttttgtggcctcttttaagaatgatattttaaaatagtaaatagttcaataaatggtttgcatattaaaaaanaaaaaaaaaaaaaaaaaaaaaaaaaaaaaaaaagggggggggcgccaaaagaagtactcccagaggggaggcgcccaagtacaccgagaatccccagagatttttgggaaccaagggggcgccccaaaagagagaggcaggaatattaaaacgcgcaacggagcttggcgacgagagtataaaacacgctcagaaagcggggagaaaagcgggaacgcatgagggaaaccttggaggagaagagagacaccactcaatatcgagacggggggggcgagaacaacacatgtgggcaccaaactcccacacagaagagagaaattaaagcgcccaacagggggagaaaaacttaaaaacactttacacgagttgacaacagggcgcagcacaaacaagcgggcgcatatagaacacggcgcaggcgcgtagaaaagattggggaagcaacaggaggaggagaaatgaatcatagaggagcaaatattataaccagggaggagtgctggcgagtaaaaaaataggcggggagagaggaagacgaacacagccagacctcggcgcggccgcaacggcaggacgaagggaaccgagccggaggaggagggagaatgggaaagcgccacgacgcggcgggcggggaagtcaggaggcgacgacaaggtgcagagatgaggacgcggagggaggagacaggagcaggacgcagaaaaccatgaaagagggaacgagagacacagaaga

SEQ ID NO: 80600 - DNA, 1165 bp, Homo sapiens
  misc_feature (424)..(424): n is a, c, g, or t
atgtgtagacaagtcatgagtacgttgccaagagggggcgttacttttcttacaaatttggagagaaagtggcaacaccttgagcaaaataattttgcgatgaaagaattcatagcaaccaagagtcaagagagtgattaccagccaattaagaaaaatgtgaccaagcagattgcagagtacaataaaaccatcgtggatgctttacatagcaccagcggaaactgagtttaagtccactgaaagtctctaaggaagtatcctcttgctgctaaacttggtacaagttgactaccaaaaaaaaaaaaagcttacttttggagtttacctaaaatttctgaatgttataatttttgtggcctcttttaagaatgatattttaaaatagtaaatagttcaataaatggtttgcatattaaaaaanaaaaaaaaaaaaaaaaaaaaaaaaaaaaaaaaagggggggggcgccaaaagaagtactcccagaggggaggcgcccaagtacaccgagaatccccagagatttttgggaaccaagggggcgccccaaaagagagaggcaggaatattaaaacgcgcaacggagcttggcgacgagagtataaaacacgctcagaaagcggggagaaaagcgggaacgcatgagggaaaccttggaggagaagagagacaccactcaatatcgagacggggggggcgagaacaacacatgtgggcaccaaactcccacacagaagagagaaattaaagcgcccaacagggggagaaaaacttaaaaacactttacacgagttgacaacagggcgcagcacaaacaagcgggcgcatatagaacacggcgcaggcgcgtagaaaagattggggaagcaacaggaggaggagaaatgaatcatagaggagcaaatattataaccagggaggagtgctggcgagtaaaaaaataggcggggagagaggaagacgaacacagccagacctcggcgcggccgcaacggcaggacgaagggaaccgagccggaggaggagggagaatgggaaagcgccacgacgcggcgggcggggaagtcaggaggcgacgacaaggtgcagagatgaggacgcggagggaggagacaggagcaggacgcagaaaaccatgaaagagggaacgagagacacagaaga

SEQ ID NO: 80601 - DNA, 1809 bp, Homo sapiens
  misc_feature (1068)..(1068): n is a, c, g, or t
atgtgtagacaagtcatgagtacgttgccaagagggggcgttacttttcttacaaatttggagagaaagtggcaacaccttgagcaaaataattttgcgatgaaagaattcccttctttgacccattcaaggatgtctctgcctggagaactagatcctgactcagtggcagcataggttctcccccagggtggtgctgaacttcagctcagaagcagcctggaccccatcttacctccagataaggtgttttaggtactctgttgccagtgttagtgcaacttagtttaaaaatagaggacttgttcacagtatgctctaagtctcacactggagttttgtgcaacataaagtaggtgattttggagcagagcgaagtctagaaatttgccttaaattatttgtggtactctagagaacgtggtatgtgtatgtgtgtatgtgtgtttgaatataggaactagttcattgaacgttagattgttctaagaccagaattagattaaaaatgcataacatattaagtattaaaaagtgtttatattgtatatgaattttttgcggtaagtttagcttggcattttaggttttaattgatgcttaatctgttaaaatgatgtactgtattttaaagtattctaattgtgcttttttgtaccatcttcagtatgaaaaatgtcagtatttagttcctttctcaggcacaattagatttttattgacattgttttcccccttaactcatgtaattagtcatagcaaccaagagtcaagagagtgattaccagccaattaagaaaaatgtgaccaagcagattgcagagtacaataaaaccatcgtggatgctttacatagcaccagcggaaactgagtttaagtccactgaaagtctctaaggaagtatcctcttgctgctaaacttggtacaagttgactaccaaaaaaaaaaaaagcttacttttggagtttacctaaaatttctgaatgttataatttttgtggcctcttttaagaatgatattttaaaatagtaaatagttcaataaatggtttgcatattaaaaaanaaaaaaaaaaaaaaaaaaaaaaaaaaaaaaaaagggggggggcgccaaaagaagtactcccagaggggaggcgcccaagtacaccgagaatccccagagatttttgggaaccaagggggcgccccaaaagagagaggcaggaatattaaaacgcgcaacggagcttggcgacgagagtataaaacacgctcagaaagcggggagaaaagcgggaacgcatgagggaaaccttggaggagaagagagacaccactcaatatcgagacggggggggcgagaacaacacatgtgggcaccaaactcccacacagaagagagaaattaaagcgcccaacagggggagaaaaacttaaaaacactttacacgagttgacaacagggcgcagcacaaacaagcgggcgcatatagaacacggcgcaggcgcgtagaaaagattggggaagcaacaggaggaggagaaatgaatcatagaggagcaaatattataaccagggaggagtgctggcgagtaaaaaaataggcggggagagaggaagacgaacacagccagacctcggcgcggccgcaacggcaggacgaagggaaccgagccggaggaggagggagaatgggaaagcgccacgacgcggcgggcggggaagtcaggaggcgacgacaaggtgcagagatgaggacgcggagggaggagacaggagcaggacgcagaaaaccatgaaagagggaacgagagacacagaaga

SEQ ID NO: 80602 - DNA, 745 bp, Homo sapiens
caggaggcagcaagcagctgttgagaacatgtgttgtgaagttgtaacagatatttccttaaaagttgtttcctattcccttctttgacccattcaaggatgtctctgcctggagaactagatcctgactcagtggcagcataggttctcccccagggtggtgctgaacttcagctcagaagcagcctggaccccatcttacctccagataaggtgttttaggtactctgttgccagtgttagtgcaacttagtttaaaaatagaggacttgttcacagtatgctctaagtctcacactggagttttgtgcaacataaagtaggtgattttggagcagagcgaagtctagaaatttgccttaaattatttgtggtactctagagaacgtggtatgtgtatgtgtgtatgtgtgtttgaatataggaactagttcattgaacgttagattgttctaagaccagaattagattaaaaatgcataacatattaagtattaaaaagtgtttatattgtatatgaattttttgcggtaagtttagcttggcattttaggttttaattgatgcttaatctgttaaaatgatgtactgtattttaaagtattctaattgtgcttttttgtaccatcttcagtatgaaaaatgtcagtatttagttcctttctcaggcacaattagatttttattgacattgttttcccccttaactcatgtaattagtcatagcaaccaagagtcaagagag

SEQ ID NO: 80603 - DNA, 3057 bp, Homo sapiens
atgtcactctccagtcccagcaagggggaggtacatggaaggccacaggaagaaacaagatcttgagctgagcaagaacatcccagcatcttcattgactttaaaagtatattctggagtcttccgtggttcactattccagtactacagagattccttatattacatggcaggaggggggtaaactgagggatagtgaagacaacaataaattaatcaagagctttcctcatatctcagaacctatcctctgtaagaatgtcagaaaaggttgactggttacaaagccaaaatggagtatgcaaagttgatgtctattctcctggagacaaccaagcccaggactggaaaatggacacctccacggatcctgtcagagtgctcagctggctccgcagagacctggagaagagtacagcagagttccaagatgttcggttcaaacccggagaatcatttggtggggaaacgtccaactcaggagacccacacaaaggtttctctgtagactattacaacaccaccaccaagggcactccagaaagattgcattttgagatgactcacaaagagattccttgccagggccccagggcccaacttggcaacgagagttcagtagatgaagtttccttctatgctaaccgcctcacgaatctagtcatagccatggcccgcaaagagatcaatgagaagatcgatggctctgaaaacaaatgtgtctatcagtcattgtacatgggggaatgaacccacacccaccaaaagcctcagtaagatagcatcagagcttgtgaatgagaccgtctctgcatgttccaggaatgctgccccagacaaggctcctggctctggagacagagtctcaggatcatcacaaagtcccccaaatttgaaatacaagtccactttgaagatcaaggagagcaccaaagaaagacagggtccagatgacaagcctccttctaagaagtctttcttctataaggaagtgtttgaatctcgtaacggagattatgccagagagggtggaaggttctttcctcgggagagaaagaggtttcgagggcaggaaaggcctgatgactttacggcttctgttagtgaagggatcatgacctatgctaacagtgtggtatctgatatgatggtctccatcatgaagacactgaagatccaagtgaaagacacaaccattgccaccatcctactgaagaaggttctgctcaagcatgcaaaagaggtggtctcggatctcatcgactccttcttgaggaatctccacagcgtcacagggaccctcatgactgacacacagtttgtctcggctgtgaaaagaactgtcttctctcatggaagccaaaaggccacagatatcatggatgccatgctaaggaagctgtacaatgtaatgtttgccaagaaagtccctgagcatgtcaggaaagcccaagacaaggctgagagttattccctcatctccatgaaaggaatgggtgatcctaaaaaccgaaatgtgaactttgccatgaaatctgaaactaaattgagagaaaaaatgtattctgaacccaaatcagaggaggagacttgtgcgaaaactctgggtgagcacattatcaaagaggggcttaccctgtggcataaaagtcagcagaaagaatgtaaatctctaggtttccagcatgcagcattcgaagctcccaacacacagcgtaagcctgcatcagacatttcctttgagtaccctgaagatattggcaacctcagccttcctccatatcctccagagaaacctgagaattttatgtatgattcagactcctgggccaaggacctgatcgtgtctgccctgcttctgattcaatatcacctggcccagggaggaagaagggatgcacggagcttcgttgaagctgctggcaccaccaactttcctgccaatgaacctcctgtagctcccgatgaatcttgccttaagtctgctcccattgtaggtgaccaagaacaagcagaaaagaaggacctaaggagtgttttctttaatttcatccggaacttacttagtgagaccattttcaagcgtgaccagagccctgaacccaaggtgccggaacagccagttaaggaagataggaagttgtgtgaaagaccgttggcgtcttctccccccaggctatatgaggatgatgagacccctggtgccctttctgggctgaccaagatggctgtcagccagatagatggccacatgagtgggcagatggtagaacatctgatgaactcagtgatgaagctgtgtgtcatcattgctaagtcctgtgatgcttcgttggcagagctgggagatgacaagtctggagatgccagtaggctaacttcggccttcccagatagtttatatgagtgcttaccagccaagggcacagggtcagcagaagctgtcctgcagaatgcctatcaagctatccataatgaaatgagaggcacatcaggacagccccctgaagggtgtgcagcacccacggtgattgtcagcaatcacaacctaacggacacagttcagaacaagcaactccaagccgtccttcaatgggtagctgcctctgagctcaatgtccctattttgtattttgctggtgatgatgaagggatccaggagaagctacttcagctctcagctgctgctgtggacaaaggatgcagtgtgggcgaggttctgcagtcggtgctgcgctatgagaaggagcgccagctgaatgaggcggtggggaatgtcacaccgctgcagctgctggactggctgatggtgaacctgtaatcggcaaccccactgctttcccctcttctggcagtggggccggcccttatccccgcccttctttctcacttccacatctccccctctatatcctcacagagccctaacattatcttcacaccactctcatcaaagacatgtcatcttgtgctagccactggattttgcagattttcctgtccatgcaagcaaggacgtaaaattaaaaaattacaattaaaggcatccaaaaaaaa

SEQ ID NO: 80604 - DNA, 497 bp, Homo sapiens
aattgtaattttttaattttacgtccttgcttgcatggacaggaaaatctgcaaaatccagtggctagcacaagatgacatgtctttgatgagagtggtgtgaagctacttcagctctcagctgctgctgtggacaaaggatgcagtgtgggcgaggttctgcagtcggtgctgcgctatgagaaggagcgccagctgaatgaggcggtggggaatgtcacaccgctgcagctgctggactggctgatggtgaacctgtaatcggcaaccccactgctttcccctcttctggcagtggggccggcccttatccccgcccttctttctcacttccacatctccccctctatatcctcacagagccctaacattatcttcacaccactctcatcaaagacatgtcatcttgtgctagccactggattttgcagattttcctgtccatgcaagcaaggacgtaaaattaaaaaattacaattaaaggcatccaaaaaaaa

SEQ ID NO: 80605 - DNA, 797 bp, Homo sapiens
ccctgacagggtatcattcattcaaagcatatttgtttcatttgtttttattcctaccttaagccatcttggtgggttctgggtggtctatgcatatgtgtgtgtgttttaattgcagtaagaatattgaatatgagatctaccctctttaattttttttttttttttttttgagatggagtcttactctgtcacccaggctggagtgcagtggcttgatctcggctcactataacctccacctcccaggttcaagtgattctcctgcctcagcctcccaagtagctgagactacaggcgtgcaccaccatgcccgttagtttttgtatttttagtagagacagggtttcaccatgttggccaggctggtctcaaactcctgacctcaaatgatctgcccacctctacctccaaagtgttgggattacaggcaatgagccaccacgcccgggttaccttctttaatttttaagtacacaatacagtattgttaactatagccacagtgttgtacagcaaatctctctcacctatgcatcctgcgtaactgaaactctgtgcccattgaacagcagctcctcatttcctcccccatcagcccctggcagccatcattctactctctgcttctgtgagtctggctattttagatcccttatagaagtggaaacgcgcagtatttgtccttctgtgactggcttatttcattgagcataacgacccccaagtttagccatgttgttgcttatggcaggatttccttcttttttcaggctgaataatatttccttatatgt

SEQ ID NO: 80606 - DNA, 506 bp, Homo sapiens
aactcctgggctccatcagtcctcttgccccagcttcttaagtagctgggactgtaggcatgctctaccatgcttggcttggtgacttgtttttatagggcttgtaagacccctgacctccttaaaggacattgattacaagcgggaagcagagagttgatgaaataaatatgctggattttacatactgattgtattgctgtggcctgttgaaggaagtggggggagagaaatgtgcccacagatacagccttgcaaacccatggattcccatccagcagacagttttaatgaagctacatctccatcttgtgacttgtaaaaggcattgctgtaaacgacttacggatttcttgtgcttttgcaaatacagtcttcagtatgaatgttaccgcttgacatttgcctttcaggtcgaatgaaatttaaatgaaggctggcactaatacacctattgattgcaagttcctctcctgtattttaaaatatgctaagaaagaatgttt

SEQ ID NO: 80607 - DNA, 2764 bp, Homo sapiens
accaccccagtgaaacccacagaaccatgtacaccctctaagtcccgaagtgccagctcagaggaggcctcagagtcacctacagcccggcagatccccccagaggcacgtcggctcatagtgaacaaaaatgctggtgagaccctcctgcagagggcggcgcgtcttggctataaggatgttgttctctactgcctccagaaagacagtgaagatgtgaatcaccgtgacaatgctggctacacagccctgcatgaggcttgttcccggggctggaccgacatcctgaacatcctgctggagcacggggccaacgtgaactgcagtgcgcaggacggcacgaggccagttcatgatgcggtggtcaatgacaacctggagaccatctggctcctgctgtcctatggggccgatcccacactggctacctactcgggtcagacagccatgaagctggccagcagcgacaccatgaagcgctttctcagtgatcacctctcggatcttcagggccgggcagagggtgatcccggtgtatcctgggatttttacagcagttctgtgttggaggaaaaagacgggtttgcctgtgacctcctacataatcctcctgggagctcagatcaagaaggagacgatccgatggaggaggatgatttcatgtttgaactctcagacaagcctcttctcccttgctacaacctccaagtgtcagtgtcccgcgggccctgcaactggttcctcttttccgatgtcttgaagaggctgaagctttcctcgaggatctttcaggcccggttcccgcactttgaaatcaccaccatgcccaaggccgagttctacaggcaggtggcctccagtcagctgctgacccctgccgagaggcctggaggcttggacgacagatcccccccaggctcctctgagactgtggagctggtgcggtacgagccagacctacttcggctcctagggtccgaggtggaattccagtcttgcaacagttgaccgggaaaacagcccctcctcttctttctccttccgagttcgcccttcccccacctccttgtctttccccgaccgagcaccagactgcagaatgaggcaataatacggaccaacaagaagccgccttatcaatgccagcattagcgactggactgtttttgtttttttggttacaattagttctcatctccctgtcgtcgtcattgttatcgtggttgctgatgggggtggaaagttgaactccatgtctgaggacaagaggtcccgggggtggtgggaggtggcgccggggtcccttggactggcctccttgttcatgaccaagaccaaacctgggccctggatggccttggcctgtcccgaggagaaatgagaaaatcccagatctctgagcgccccccaactccattcccctgtgttcttctgtcttctgtagtatttattttattagtatttaatttgtattgtttcattggtttctgataagtctgtatcactgtgacgatttgagacaacttgttgtattgagggactttctgtacctccttttctttttctttgttgatgagctctgacaaagctattccctggtgtttttttcccccactggggagggggtgaggtggaatggggtgggggaacatggacttgtgactaacgaagctggttgctgctggcccagggctgggggcttgggggtaaatcctgaggctttggtgctcccccacccacccattcccgccctttgcagcagccccgctatcttgagattagtgttgacagggaggggaggattgtgaggtgaggggttaataagttactctaataaaggagcgtggagaagggatctgaggggtgagggtggcccccctcctcacgccttcttcactgcccccctcagagtgcacaatacgagtttgttcctgcctccactctcccaccccgttctggcctccctgtctcaagatactgagcctctcacctcccagccctcagccacccccatccctgccccttctgagactcacagcacccctttccttcctctcctcccacctcctccctcagcccctcattctccttgggaatctgcagagggctctgggactcactgccggatgtgaaatccaggcgtcagctgtttcctaggcaagggcaggaaagtggtctccagcccttgctccactcatgcctgggggcctggggctgagtggtatccctacctggcctccccctggcctctgggcctccagcgctgggtttgtcgagtgagagagagagaggagcttgggttgcttccctgtccccgccccctctgtggcattgtccctcccactcttatttttctaccaattgctatttttccgaacaatccttgtagagtatgtaccatccaaaggcaggagggcctcgccgtggccggctctggttggagatggtacagttttattgtacaggtgctaaaacaacaacaacaaaaaagaaaatggaaaaaaaaaagattaaaaaaaaaaggaaaaaaaaaaagccagtttgaggatgggacaatctgttctctagaggctcctgagccatgcgggagcattggtggttattttctttgtattgtgtttgttctttgttcctgggggggaagttctcggcccccttctgtaggactgctccccacccccaccatactgcccagttggttttgaacagttgttttccctttttaagaaaaaaaaatacatatatatatacatatatatatata

SEQ ID NO: 80608 - DNA, 6233 bp, Homo sapiens
  misc_feature (802)..(802): n is a, c, g, or t
  misc_feature (1492)..(1492): n is a, c, g, or t
  misc_feature (2975)..(2975): n is a, c, g, or t
  misc_feature (4053)..(4053): n is a, c, g, or t
agtactagaactttcatgtgccctctgaaggatgtgagccatggaaccggcaaaccgcatccctgactaggggcctgtggccttgtcatttacctcccaaccaccacccctccatgcccctttatctgcttagcgcatttcttttcttcggttttgtacatgtatctgagtcctaatcccctatatgctccccttacagaggaaaaagacgggtttgcctgtgacctcctacataatcctcctgggagctcagatcaagaaggagacgatccgatggaggaggatgatttcatgtttgaactctcagacaagcctcttctcccttgctacaacctccaagtgtcagtgtcccgcgggtaagtgtccgagagatccacggtgactgagtgtcaggatcctggcactcagtaggaaggtggagttctccacgaggaagtgaagacctggcaacgagtgccatcacacatgacaaaggctagcctgcccttttagcccagagtagtcatgttcaaactagaggctgcaggctccatggacattgactatctgcatttcctgaaccttaaatctagattctctctcggaaggcttttttttggcactattactgggtataaaagataatctgagagatacttgggcctatgaactgctagaatctctggaacatttttgtagtttctgggggtaaacagatagaacattagaaattgagattgctggaaaagccaggacatatggttgccatagccatggggccactagggtccttcagtaatccacagcctagtttctcagtgcngtaatgttagtagcgtggtgctgccaacattgtcagcctagatgactgtgcatattatattggggatcacccatttatttaaggagactagaatatagaatatacctgacacgtaacattagattgaacccaatttaatacttatttgatggttctggagggagttcgacagccggcagggccatggcccttgttgggtttccccacatgtcagcgtgtggaagtgctggttgagagaaggagaatgcgggctgaactgcccttttattcttagcctccatgattttttccctctgattggtgtcttcatgtatttcaaatacttttccgaacaattgtaaggataatttttctttgatatctatttttaaaatgtcaactctatgttaaaatcctgtgaaccagtggctggtcgcagcagttgtaatttcagcactttgggaggccgaggcaggtggattgcttgaggccaggagttccagaccagcctggccaacatggtgaaacctcgtctactaaacatacagaaattaggcgggcatggtggcgggtgcctgtaatcccagttacgagggaagctgaggcaggagaatcgcctgaacctgtgaggcggaggttgcagtgagctgatattgcctgctacactccagcctgggcgacagagtgagactccgtctcaaataaaataanataataaaataagtcagtgaaccagcatgatgtgcacaggatggggagctaggtagacgatggatgaggaggtctttaagtgagagcctctgtttagggctctaaccattagaccacagtttctttgcatcccctgccctcccccccaccaccccacacgcatagcctgatcagaataaaaatagcatgtatgatggcactagtagggatcaagtttcaggggcttttggtccttattcttctgggcataagctgatccctgaggacagggcggggcctctgggatatagtattgcacggttaattaattcctccgatgtattcagcacctccctctctgaaacaggatcttgggcttcaggcagtaaaaggaccagggtagtctgcattaggtgcagacagaacacgggccacggagggctgcgtgcccctcagcgagctgagtggcaggcacgtggttagcccagagcccggtaccagcaaagctggttttcctgacgtgacatcctctagcgctcgctctagagctgcctttccccacagctgcagcacactgtgaaaatgtctgttcttcaagaagttgggggtgggggtgctagcgtagagtgatgcctctgaggccctatggggtgcagaagggccttctgaatcaccaaagcaagactgaattctcatcactagtgtgaatgttctcagggcttttttccattctttggaagtgatggtccaagtgtatgatatctgtagtccccttttcttaacccagagccctccatttcctactcatgtgagataagagcttgctgtcatttgggagaaatgttccattttagggataaggatcgtgggtctggttagatgtttaaggtgctggaacagaacatttgattctataaacatgtcttaaacagctgcaccaggtcaaaccctggggaccttcaaagaatccaccatctagtgcagtagacagacaagtatataattaactctaataaaagacaaaatgtcctaagcagatttattataaaaaactccaacagtttcagaagggtgtcaaatgcaaaaagttccagtccaccctgagcccccattgctatgctgcagagtgaaccacagtttaaggttcttttgcaaccctttcagaaatgggttttgttagtagtattacaatagggatgtgaatcaaatgccacgagaccatgggagatggaagaacaatgagttacaccgggggaaggtttcacaggtgatacagtatctacctgagctgggcctggaaggagagaaggatggagcaaggcactgaaacatacaagttcagaaagtagggggagtcctttatcatgtggctggtgcttggtagggtgggggatacaatgtggggtgtgtgtgtgtgtgagagagagacagagaaagagagagactgggtggacattgggctgaagaggttagaaggtctcatataatatcatgctagtggccnggcatggtggctcacacctgtaatcccagcgctttgggaggctgaggcgggtggatcatttgacgtcaggagtttgagaccaacctggccaacatggtgaaaccccatctctactaaaatacaaaaattagccaggcgtggtcgtgggtgcctgtaatcccagctactcaggaggctgagacaggagaattgcttgaacctgggaggtggaggttgcagtgagccgagattgcgccactgcactccagcctagagactccgtcttggaaaaagaaaaaaaagaaaagaaaactgtaatggtaacagaagatccagtgagggtgggtgggggtgcagaagagtgactcttggcaaagggaaaccggttaggaggctgacaagacagagcccaggccagaagtggcaaaggctggagctggggtagtggaatagtgaggagggaaaaccctgtgaactgggaccactaatgtggggaggcagcgtttcttcccgcattagtcaatgtaagcgtttggcccgggatcggcctctccagcacccctcccagctgtccccaggctgccacccagtcgggtgtgctcagcaaagtcagactccactttctgtaatgtgagctctggccctgcagaaacgatggtgctgctgctggagaaaaaacttgtctaatgcattccagagccaaagagaaatgccttttggattacccgcagtttaggcctttctccacggctccccctctgctggggaagatcttggagagcaaggaggccagggaagcaagagtaagaacaggagaagggaaggcagccagggttggcaggggcgggagtcggaggaaagactggtcccagcagatggcaaatgccaggtcacaggggcgcaggctaagtccccaagaagcctgctaagagttttaggttctagaatgcccctttgcctcctgtttgtgttattttggaagaggtggtcactgattgcgtgctcaccatttagctgaaagccgggccaggcattgcaggggacaggagaagacatttgcctcagctatacccaaggagcctgtggtttagcaggggangggggagccagactggcagtgagttataatgggagacattgatggtcgtgcagcctttgtgggctttgcagagtgttctgggtcggtgcccccaccgcttcctccagcctccttcaataactcccatccttgcctttgcaggccctgcaactggttcctcttttccgatgtcttgaagaggctgaagctttcctcgaggatctttcaggcccggttcccgcactttgaaatcaccaccatgcccaaggccgagttctacaggcaggtggcctccagtcagctgctgacccctgccgagaggcctggaggcttggacgacagatcccccccaggctcctctgagactgtggagctggtgcggtacgagccagacctacttcggctcctagggtccgaggtggaattccagtcttgcaacagttgaccgggaaaacagcccctcctcttctttctccttccgagttcgcccttcccccacctccttgtctttccccgaccgagcaccagactgcagaatgaggcaataatacggaccaacaagaagccgccttatcaatgccagcattagcgactggactgtttttgtttttttggttacaattagttctcatctccctgtcgtcgtcattgttatcgtggttgctgatgggggtggaaagttgaactccatgtctgaggacaagaggtcccgggggtggtgggaggtggcgccggggtcccttggactggcctccttgttcatgaccaagaccaaacctgggccctggatggccttggcctgtcccgaggagaaatgagaaaatcccagatctctgagcgccccccaactccattcccctgtgttcttctgtcttctgtagtatttattttattagtatttaatttgtattgtttcattggtttctgataagtctgtatcactgtgacgatttgagacaacttgttgtattgagggactttctgtacctccttttctttttctttgttgatgagctctgacaaagctattccctggtgtttttttcccccactggggagggggtgaggtggaatggggtgggggaacatggacttgtgactaacgaagctggttgctgctggcccagggctgggggcttgggggtaaatcctgaggctttggtgctcccccacccacccattcccgccctttgcagcagccccgctatcttgagattagtgttgacagggaggggaggattgtgaggtgaggggttaataagttactctaataaaggagcgtggagaagggatctgaggggtgagggtggcccccctcctcacgccttcttcactgcccccctcagagtgcacaatacgagtttgttcctgcctccactctcccaccccgttctggcctccctgtctcaagatactgagcctctcacctcccagccctcagccacccccatccctgccccttctgagactcacagcacccctttccttcctctcctcccacctcctccctcagcccctcattctccttgggaatctgcagagggctctgggactcactgccggatgtgaaatccaggcgtcagctgtttcctaggcaagggcaggaaagtggtctccagcccttgctccactcatgcctgggggcctggggctgagtggtatccctacctggcctccccctggcctctgggcctccagcgctgggtttgtcgagtgagagagagagaggagcttgggttgcttccctgtccccgccccctctgtggcattgtccctcccactcttatttttctaccaattgctatttttccgaacaatccttgtagagtatgtaccatccaaaggcaggagggcctcgccgtggccggctctggttggagatggtacagttttattgtacaggtgctaaaacaacaacaacaaaaaagaaaatggaaaaaaaaaagattaaaaaaaaaaggaaaaaaaaaaagccagtttgaggatgggacaatctgttctctagaggctcctgagccatgcgggagcattggtggttattttctttgtattgtgtttgttctttgttcctgggggggaagttctcggcccccttctgtaggactgctccccacccccaccatactgcccagttggttttgaacagttgttttccctttttaagaaaaaaaaatacatatatatatacatatatatatata

SEQ ID NO: 80609 - DNA, 214 bp, Homo sapiens
tggcagtctctgactgagaacaggaagtgtgtgtctctctggtcactcctggactctcttgtggtccttccttcccttctcccattcccttagccccgtatgcatggacttcacttggacattccttccccagcctaacctccttgtctcactgcctgctcttctttcatcagatcacctctcggatcttcagggccgggcagagggtgatccc

SEQ ID NO: 80610 - DNA, 288 bp, Homo sapiens
cctaagactaaatctaacacaataggtagagctattatacaaaaatagtttagttttgtcctttctttcagagaaagctaaagacaactgtagcaagatattaacaacttctattttctaggaacagatatagccagtcacaacaggaacaagtactgcatgattctatttgtatgaacgatttaaaatagaagcagagagaatggtggttgccaggatttagggaaaggggaaatggggaattgctattcaatgggtatgaagtttcagttatgcaaggtgatttct

SEQ ID NO: 80611 - DNA, 724 bp, Homo sapiens
ggctgggagcctgccaggctccgggcagcaagtgggagtttgaggaagggaagacatgcaggctggcaagagctgacagagctgtgcaggtaccagaggtgaaggtgggaacataggtgtagggggctttctggtggcttctctgttctcccagctccctggccttagatcactaaggagcgccgtctgggcgggcttgaggcaaagggagtggagtcaggaggagattcagtaaggaaaaagatgctagagcctccagagcctgtggtgggggctgagtgatgcccccagctgtgagtccctctgggtccttggcctcccggcagtcctcttaggggcccttaagggagagtcccaatcttcctccccatggagtgggtactggctccacaccctgaaggcctgggggggccacatctgctgggtttggggagacgctctttctgtctatgaggggctgtagaagctaccttcctgggcagtgacagctgcttctaagcagtccttgtccttgcgctccatgtttttggagggaggtgacatgtgagaagttgggggcacccatcctgaggggcaggttccaagaactcttgggccctgtcagccctgcaccctggagggagaagggaaggggcctgcccagggtcacaggtgagcgatccagaaccgagactgcatcccctgggactcccagcttagtgctccctcggcatcaccctcccca

SEQ ID NO: 80612 - DNA, 585 bp, Homo sapiens
tacagtattattacaacaatgaaagaacagaagaataaggttttgagaatgtcattgtcagaggagagagagcctattgtaaaattcctagactgtggttgaattgattcttgctgaacatatgacgctaccccattagtacatgtacgttgaatggatttttccccctagaatttcacaatcaagagataatcatttgctctttttaaattgttgttcaaaatagtttctctcatgactaaatgaagtcatccttaatatcactgtgagaagttaggtatgtataacttgggcctgaagcaaggaaagttgtttgcttacatgaaaattatgtatacgtattttacgtgaaactgcctttgccacttttatgtaatgtcattttatatctcctatagatctcatctattcacattcttcaacaatgcatagatcttttatctcatcatacatatgccatggttgcacattcaattcatgtgctgaggaagatcaggtctcagtctccagtcttccctcctgagttccagatacatatggatgtcttctatacctccacattccacccaaacctcactattcaca

SEQ ID NO: 80613 - DNA, 479 bp, Homo sapiens
attaacaactttgtgttaaaatgctatggcatgtatttatcccttaaaaataatccattttctctggaaaagctacaaaaggaagtggcaccagttgttacctctagagagaggaactgggtatctagggtgggggtggggtgagtaggagacattcttttcaatgtataccctttcatttattttgatttttgaattatgtgctggtaactttaattgaaaaaatgttgtattaagtaaaacacatagaaaagcatacacatatattgcttaatgaattattataaaataaatacccttctaatatgtacctaggtaaagaattttcttagtcattgcagaagccctttcacagccttgtcataacctcttttctcctccccaaagtaaccactattgtgactttgaccacttccttgcatttctttatagttctgtcaaccagatgtgcatccttagacactatagtcttgcccatt

SEQ ID NO: 80614 - DNA, 434 bp, Homo sapiens
ccactgtgcttggccaaacacatcattttaaggcataaatattgcctgaaaagtagcagagagaaaaatcttgatcgagttacatttaaaaagttataccaacgagaacagacttactgtgacatccattatgataagtcataaaaatacataatagtggcttggaaaatgctttctataaaacagaaaaaaatcccctatttctatgggcctcactattctcatttgtaatactagattttagattacattctatcagtcccactttgactctaatatttggatataatcaataattaataattcactatcagatattgatcagcaccatttaatttgataaaactaatcctgaacatgggcagggattggattactgcttctttatatctttaccaagtgcatcatgccgtgcatatcttaagtagccccca

SEQ ID NO: 80615 - DNA, 257 bp, Homo sapiens
ccaccatcttgaaatatcattattcatttccattacttcttggatgttctggttcactgctactgggtttcgcaacagtgtggagaagagaccatgacattgaattaccggctaagcagcatccataagtgttatattcctcccttaattatgatgagaacttgtgtttaggaagctgtgatgtttactgatatggttaatggtcaatgtcactcatcaaaagggtgataagacaataatgggatcttggaacaggg

SEQ ID NO: 80616 - DNA, 86 bp, Homo sapiens
agtactgcccgtcccgcccctcctctcgagcctcagcgctcagcatcgcccggaccccctcttcccttcgcccgcctcgtcccgac

SEQ ID NO: 80617 - DNA, 336 bp, Homo sapiens
ttttaaatgcagggaatgaaagtgaattattatggggaccctatacaggtttttactgtaaaaatcatatatgtttatatgtatattaaacatattttatacatatatctatacatatatgtttatatacatatatgtctacatatagtttatatttttataaactataaatatatagttatatacacaatttctacattagactatagtactataatttttttaaaatatcaggaatttctagaaatgaattaataccctgttattttctgtgattttcattattctctatttcaatcattacaaaagaataaatgtaaaaacatagaattcttt

SEQ ID NO: 80618 - DNA, 93 bp, Homo sapiens
tgattcttctgtttcaggcgtcctgaacagaagtcacttaattatattcagctgtgaatgggttggtttagagtatttgagtggctgttgact

SEQ ID NO: 80619 - DNA, 361 bp, Homo sapiens
aaaactgactgggaggtgaaggaacttgttcaagggcacagagctggacatggcacaggtcggttgaattccaaagccacactccttccaccatgctgtttcccggccaaacccatttcaagcaaggtttcccagatttctgaaaacccatcctcaggcccttctcgctgagcttctgattctgtatgtctggatggatcctgaggtccgcgtggaacgggtaccaggtgttgttcataagcagggacagttgaacacactcgtctgagcacggggaagttccgccacacaaatctaaccacagcaacaccgcgatatggctacagcctccgaagggatagtgacaagatctcccccaaag

SEQ ID NO: 80620 - DNA, 369 bp, Homo sapiens
tgggaagcttcgcccctgtagtttgcatagtacagcctccacagctgctcttatgggctagagttgagtgcctgtggcttttccaggcacagggtgcaagctgccagtggatctaccattctcaggtctggagggtggtgacccctttctcacagctccaccaggcagttccccagtggagactgtgtggggccttcaaccccacatttcccctccaaactgccctagtaggggttctctgtgagggttccacccctacagcaggcttctgcctgggtaccctggctttcttgtacatcctctgaaatctaggtagaggctgccaagcctccttcactcttacagtctgcatgcctgcatgcttaacac

SEQ ID NO: 80621 - DNA, 527 bp, Homo sapiens
tgaaaggaggacaagctgtgtttagaaaatgaaaaaaatattttgtttgcataatagggtatgtaggttaaaagtagactataagggctaggcaacaccacgcctgtaatcccagcactttaggaggctgaggcagtgggatcacctgggtcgggagttcgagaccagcctgaccaacacggagaaaccccgtctctactaaaaatacaaaattagcctggcatggtggtgcatgcctgtaatcccagctagtcgggaggctggggcaggagaatcgcttgaacccaggaagcagaggttgtggtgagctgagattgcaccactgcactccagcctaggcaacaagagcgaaagtccatctcaaaaaaacaaagaggaagaaaaattagccgggtatggtggtacacgcctatgtaatcccagctgcttgggaggctgaggcagtagaatcacttaaacctggttgcagtgagccgagatcgtgccactgcacttcagcctgggcaacagagcaagactccatctca

SEQ ID NO: 80622 - DNA, 772 bp, Homo sapiens
  misc_feature (20)..(20): n is a, c, g, or t
  misc_feature (29)..(29): n is a, c, g, or t
  misc_feature (59)..(59): n is a, c, g, or t
  misc_feature (131)..(131): n is a, c, g, or t
  misc_feature (143)..(144): n is a, c, g, or t
  misc_feature (176)..(176): n is a, c, g, or t
  misc_feature (206)..(206): n is a, c, g, or t
  misc_feature (737)..(737): n is a, c, g, or t
aaagcatcactgccttggcnccttccttncggctgccccccatcacctcaactgtctcntccctgggctaagcagggaaaaccgggctggggtagctggatgtggccaaagtccactgtcctccttggcgncaaaagcccatnnagaagaccagcccagcctgcccccctcttgcngccgttcccggcggcaagaggcagaggagncggcgcggggtgtcctgtcctcgccatgaggccgcagcaggcgccggtgtccggaaaggtgttcattcagcgagactacagcagtggcacacgctgccagttccagaccaagttccctgcggagctggagaaccggattgataggcagcagtttgaagaaacagttcgaactctaaataacctttatgcagaagcagagaagctcggcggccagtcatatctcgaaggttgtttggcttgtttaacagcatataccatcttcctatgcatggaaactcattatgagaaggttctgaagaaagtctccaaatacattcaagagcagaatgagaagatctatgctccacaaggcctcctcctgacagaccctattgagcgaggactgcgagttattgaaattaccatttatgaagacagaggcatgagcagtggaagataaaccgaagaattaaagatcccacttccagccgggcccctcatgtatccactggccgaccgcagagtgtccctacctcctcttgccgccggggnatcctctagaggcgacctccaaagggcaattaaaa

SEQ ID NO: 80623 - DNA, 2468 bp, Homo sapiens
ggcggaaggcggggtcggccctggccccgcccacatcatttcccttcctcggcccagccccacagcgcgcagcttcggcagggtggctttacggccggaggagagggtgggtcccagacctgaggtaggaggccgagctgaggggcggggaagaggctttttgcggcaggacgtaagtgacggcgaaggcggtgcgacagcagctggagggcagaggaggcggcgcggggtgtcctgtcctcgccatgaggccgcagcaggcgccggtgtccggaaaggtgttcattcagcgagactacagcagtggcacacgctgccagttccagaccaagttccctgcggagctggagaaccggattgataggcagcagtttgaagaaacagttcgaactctaaataacctttatgcagaagcagagaagctcggcggccagtcatatctcgaaggttgtttggcttgtttaacagcatataccatcttcctatgcatggaaactcattatgagaaggttctgaagaaagtctccaaatacattcaagagcagaatgagaagatctatgctccacaaggcctcctcctgacagaccctattgagcgaggactgcgagttattgaaattaccatttatgaagacagaggcatgagcagtggaagataaaccgaagaattaaagatcccacttccagccgggcccctcatgtatccactggccgaccgcagagtgtccctacctcctctccagagcatcattcctttctatctgctgccagagccacggtgccatttactccaaggactcactttctaaaattccacacctggagtgacctctagtcgctcagcatccactttgtgtctccaaattgtgtaggactctgtaatcttttgattagtttctgagaaaacacaatgaagcacttcacttttttttattcaaagccatttaataaaacacagttggtcagcccagtgcaaagcttgttatctgccaccagtacataccattggttctcttcattccttgggccagcttctcaggtggctttagacctcaacaagccgtatcttcaccagtgttctatcttgttcccctaaattaataaaatgtttttctccaggattttggtgagggttggctgtggctgtcgttttgcacctcccagatttcaaagaattactggttttaccatgactcaaatcttaagatctgtttctactattcagttcctcaaactgaagcttattgaaaaaaaaatgtataatgttatttgttttattatagcaattattcctaattaaagcagtatttaatgcaatttccagttatttctttggagaattttatgtcattgttccattaccttgaatgttggaaagatatgatacgtgctgcttgttcatcacaaaaatcagtaagcacaataaagtggatgccaaaccatcagacacataaatgttcccgctgtgtccctggatatggaataagcaggtataaaaaatattttaattatagttttgttataaatataacttatgagaaaaaaatttgataggaataatactgtatattactaatttttaactatccctaaggcaaaccttatgacccacagaattttctcatatacagtattcagtgcacagaaatcttatgattggctcaagtacagtaagttacttctcagtaaaactctcaagtctgagtccatatttgtagctctgcttttggctgtacgttcctaggatcggggctgcttatgcctttcgtttatccttggggtttgagagcgctgtatttgggagagagtttaaaaatacattaggagagagaaaccattaaaagtttcactgtcagagatattgtaggtgctaatactggatttcgtctcagatttaatttcttttatgggtctgttagtcattcaacaaatcccataagtatgtgttaatattttaattgtgtaaaactcatttgttactttacagcctgtaatagtgtgtctgcattttcaacctgttgcaataactttgctgaaatattaacacattaataaaacttttcttaaacaaacagagcaacacacgcgacaaacgcagacacaacgcaacaaacaacagggaggcacgacaacaaagaaaccaccaagaggaccccgaaaagagacaacacatacgacacacaggggcccaaagggcgacaacaaacagacgagcggaccaccagcaacacacgcacccccaccaaccaaacgagcagcagcgaacccacgcgacagacacacaacaccgagcggggacacaaacgagcgaaacacacacataacaatagagcagcggacaacaccacaccagcgccatcagcggacaccacacgcacacacgacggcacagacacagcactgtatgaacacacccgacccgactgacaccagcagacgacccgagaacacacggcagcacacagaca

SEQ ID NO: 80624 - DNA, 2020 bp, Homo sapiens
ggcggaaggcggggtcggccctggccccgcccacatcatttcccttcctcggcccagccccacagcgcgcagcttcggcagggtggctttacggccggaggagagggtgggtcccagacctgaggtaggaggccgagctgaggggcggggaagaggctttttgcggcaggaccgcggggtgtcctgtcctcgccatgaggccgcagcaggcgccggtgtccggaaaggtgttcattcagcgagactacagcagtggcacacgctgccagttccagaccaagttccctgcggagctggagaaccggattgataggcagcagtttgaagaaacagttcgaactctaaataacctttatgcagaagcagagaagctcggcggccagtcatatctcgaaggttgtttggcttgtttaacagcatataccatcttcctatgcatggaaactcattatgagaaggttctgaagaaagtctccaaatacattcaagagcagaatgagaagatctatgctccacaaggcctcctcctgacagaccctattgagcgaggactgcgagttattgaaattaccatttatgaagacagaggcatgagcagtggaagataaaccgaagaattaaagatcccacttccagccgggcccctcatgtatccactggccgaccgcagagtgtccctacctcctctccagagcatcattcctttctatctgctgccagagccacggtgccatttactccaaggactcactttctaaaattccacacctggagtgacctctagtcgctcagcatccactttgtgtctccaaattgtgtaggactctgtaatcttttgattagtttctgagaaaacacaatgaagcacttcacttttttttattcaaagccatttaataaaacacagttggtcagcccagtgcaaagcttgttatctgccaccagtacataccattggttctcttcattccttgggccagcttctcaggtggctttagacctcaacaagccgtatcttcaccagtgttctatcttgttcccctaaattaataaaatgtttttctccaggattttggtgagggttggctgtggctgtcgttttgcacctcccagatttcaaagaattactggttttaccatgactcaaatcttaagatctgtttctactattcagttcctcaaactgaagcttattgaaaaaaaaatgtataatgttatttgttttattatagcaattattcctaattaaagcagtatttaatgcaatttccagttatttctttggagaattttatgtcattgttccattaccttgaatgttggaaagatatgatacgtgctgcttgttcatcacaaaaatcagtaagcacaataaagtggatgccaaaccatcagacacataaatgttcccgctgtgtccctggatatggaataagcaggtataaaaaatattttaattatagttttgttataaatataacttatgagaaaaaaatttgataggaataatactgtatattactaatttttaactatccctaaggcaaaccttatgacccacagaattttctcatatacagtattcagtgcacagaaatcttatgattggctcaagtacagtaagttacttctcagtaaaactctcaagtctgagtccatatttgtagctctgcttttggctgtacgttcctaggatcggggctgcttatgcctttcgtttatccttggggtttgagagcgctgtatttgggagagagtttaaaaatacattaggagagagaaaccattaaaagtttcactgtcagagatattgtaggtgctaatactggatttcgtctcagatttaatttcttttatgggtctgttagtcattcaacaaatcccataagtatgtgttaatattttaattgtgtaaaactcatttgttactttacagcctgtaatagtgtgtctgcattttcaacctgttgcaataactttgctgaaatattaacacattaataaaacttttcttaaacaa

SEQ ID NO: 80625 - DNA, 2017 bp, Homo sapiens
ggcggaaggcggggtcggccctggccccgcccacatcatttcccttcctcggcccagccccacagcgcgcagcttcggcagggtggctttacggccggaggagagggtgggtcccagacctgaggtaggaggccgagctgaggggcggggaagaggctttttgcggcaggacgtaagtgacggcgaaggcggtgcgacagcagctggagggcagaggaggcggcgcggggtgtcctgtcctcgccatgaggccgcagcaggcgccggtgtccggaaaggtgttcattcagcgagactacagcagtggcacacgctgccagttccagaccaagttccctgcggagctggagaaccggattgataggcagcagtttgaagaaacagttcgaactctaaataacctttatgcagaagcagagaagctcggcggccagtcatatctcgaaggttgtttggcttgtttaacagcatataccatcttcctatgcatggaaactcattatgagaaggttctgaagaaagtctccaaatacattcaagagcagaatgagaagatctatgctccacaaggcctcctcctgacagaccctattgagcgaggactgcgagttattgaaattaccatttatgaagacagaggcatgagcagtggaagataaaccgaagaattaaagatcccacttccagccgggcccctcatgtatccactggccgaccgcagagtgtccctacctcctctccagagcatcattcctttctatctgctgccagagccacggtgccatttactccaaggactcactttctaaaattccacacctggagtgacctctagtcgctcagcatccactttgtgtctccaaattgtgtaggactctgtaatcttttgattagtttctgagaaaacacaatgaagcacttcacttttttttattcaaagccatttaataaaacacagttggtcagcccagtgcaaagcttgttatctgccaccagtacataccattggttctcttcattccttgggccagcttctcaggtggctttagacctcaacaagccgtatcttcaccagtgttctatcttgttcccctaaattaataaaatgtttttctccaggattttggtgagggttggctgtggctgtcgttttgcacctcccagatttcaaagaattactggttttaccatgactcaaatcttaagatctgtttctactattcagttcctcaaactgaagcttattgaaaaaaaaatgtataatgttatttgttttattatagcaattattcctaattaaagcagtatttaatgcaatttccagttatttctttggagaattttatgtcattgttccattaccttgaatgttggaaagatatgatacgtgctgcttgttcatcacaaaaatcagtaagcacaataaagtggatgccaaaccatcagacacataaatgttcccgctgtgtccctggatatggaataagcaggtataaaaaatattttaattatagttttgttataaatataacttatgagaaaaaaccttatgacccacagaattttctcatatacagtattcagtgcacagaaatcttatgattggctcaagtacagtaagttacttctcagtaaaactctcaagtctgagtccatatttgtagctctgcttttggctgtacgttcctaggatcggggctgcttatgcctttcgtttatccttggggtttgagagcgctgtatttgggagagagtttaaaaatacattaggagagagaaaccattaaaagtttcactgtcagagatattgtaggtgctaatactggatttcgtctcagatttaatttcttttatgggtctgttagtcattcaacaaatcccataagtatgtgttaatattttaattgtgtaaaactcatttgttactttacagcctgtaatagtgtgtctgcattttcaacctgttgcaataactttgctgaaatattaacacattaataaaacttttcttaaacaa

SEQ ID NO: 80626 - DNA, 1658 bp, Homo sapiens
gaaaacgaattcccactgcctattttgagatctcactaacacttaaagggaaatctgatgaagtttgtaagaagctgtggtgtttctttctgtcaggttctgaagaaagtctccaaatacattcaagagcagaatgagaagatctatgctccacaaggcctcctcctgacagaccctattgagcgaggactgcgagttattgaaattaccatttatgaagacagaggcatgagcagtggaagataaaccgaagaattaaagatcccacttccagccgggcccctcatgtatccactggccgaccgcagagtgtccctacctcctctccagagcatcattcctttctatctgctgccagagccacggtgccatttactccaaggactcactttctaaaattccacacctggagtgacctctagtcgctcagcatccactttgtgtctccaaattgtgtaggactctgtaatcttttgattagtttctgagaaaacacaatgaagcacttcacttttttttattcaaagccatttaataaaacacagttggtcagcccagtgcaaagcttgttatctgccaccagtacataccattggttctcttcattccttgggccagcttctcaggtggctttagacctcaacaagccgtatcttcaccagtgttctatcttgttcccctaaattaataaaatgtttttctccaggattttggtgagggttggctgtggctgtcgttttgcacctcccagatttcaaagaattactggttttaccatgactcaaatcttaagatctgtttctactattcagttcctcaaactgaagcttattgaaaaaaaaatgtataatgttatttgttttattatagcaattattcctaattaaagcagtatttaatgcaatttccagttatttctttggagaattttatgtcattgttccattaccttgaatgttggaaagatatgatacgtgctgcttgttcatcacaaaaatcagtaagcacaataaagtggatgccaaaccatcagacacataaatgttcccgctgtgtccctggatatggaataagcaggtataaaaaatattttaattatagttttgttataaatataacttatgagaaaaaaatttgataggaataatactgtatattactaatttttaactatccctaaggcaaaccttatgacccacagaattttctcatatacagtattcagtgcacagaaatcttatgattggctcaagtacagtaagttacttctcagtaaaactctcaagtctgagtccatatttgtagctctgcttttggctgtacgttcctaggatcggggctgcttatgcctttcgtttatccttggggtttgagagcgctgtatttgggagagagtttaaaaatacattaggagagagaaaccattaaaagtttcactgtcagagatattgtaggtgctaatactggatttcgtctcagatttaatttcttttatgggtctgttagtcattcaacaaatcccataagtatgtgttaatattttaattgtgtaaaactcatttgttactttacagcctgtaatagtgtgtctgcattttcaacctgttgcaataactttgctgaaatattaacacattaataaaacttttcttaaacaa

SEQ ID NO: 80627 - DNA, 1653 bp, Homo sapiens
ttcagtatctctctgccttgttcatgaactagaaaacatcccttctgcctatgtgctgtaatctctagaaggaacacaggagagaacttgggttctgaagaaagtctccaaatacattcaagagcagaatgagaagatctatgctccacaaggcctcctcctgacagaccctattgagcgaggactgcgagttattgaaattaccatttatgaagacagaggcatgagcagtggaagataaaccgaagaattaaagatcccacttccagccgggcccctcatgtatccactggccgaccgcagagtgtccctacctcctctccagagcatcattcctttctatctgctgccagagccacggtgccatttactccaaggactcactttctaaaattccacacctggagtgacctctagtcgctcagcatccactttgtgtctccaaattgtgtaggactctgtaatcttttgattagtttctgagaaaacacaatgaagcacttcacttttttttattcaaagccatttaataaaacacagttggtcagcccagtgcaaagcttgttatctgccaccagtacataccattggttctcttcattccttgggccagcttctcaggtggctttagacctcaacaagccgtatcttcaccagtgttctatcttgttcccctaaattaataaaatgtttttctccaggattttggtgagggttggctgtggctgtcgttttgcacctcccagatttcaaagaattactggttttaccatgactcaaatcttaagatctgtttctactattcagttcctcaaactgaagcttattgaaaaaaaaatgtataatgttatttgttttattatagcaattattcctaattaaagcagtatttaatgcaatttccagttatttctttggagaattttatgtcattgttccattaccttgaatgttggaaagatatgatacgtgctgcttgttcatcacaaaaatcagtaagcacaataaagtggatgccaaaccatcagacacataaatgttcccgctgtgtccctggatatggaataagcaggtataaaaaatattttaattatagttttgttataaatataacttatgagaaaaaaatttgataggaataatactgtatattactaatttttaactatccctaaggcaaaccttatgacccacagaattttctcatatacagtattcagtgcacagaaatcttatgattggctcaagtacagtaagttacttctcagtaaaactctcaagtctgagtccatatttgtagctctgcttttggctgtacgttcctaggatcggggctgcttatgcctttcgtttatccttggggtttgagagcgctgtatttgggagagagtttaaaaatacattaggagagagaaaccattaaaagtttcactgtcagagatattgtaggtgctaatactggatttcgtctcagatttaatttcttttatgggtctgttagtcattcaacaaatcccataagtatgtgttaatattttaattgtgtaaaactcatttgttactttacagcctgtaatagtgtgtctgcattttcaacctgttgcaataactttgctgaaatattaacacattaataaaacttttcttaaacaa

SEQ ID NO: 80628 - DNA, 1235 bp, Homo sapiens
cccgggctgcaggattcggcacgagaaattgtgtaggactctgtaatcttttgattagtttctgagaaaacacaatgaagcacttcacttttttttattcaaagccatttaataaaacacagttggtcagcccagtgcaaagcttgttatctgccaccagtacataccattggttctcttcattccttgggccagcttctcaggtggctttagacctcaacaagccgtatcttcaccagtgttctatcttgttcccctaaattaataaaatgtttttctccaggattttggtgagggttggctgtggctgtcgttttgcacctcccagatttcaaagaattactggttttaccatgactcaaatcttaagatctgtttctactattcagttcctcaaactgaagcttattgaaaaaaaaatgtataatgttatttgttttattatagcaattattcctaattaaagcagtatttaatgcaatttccagttatttctttggagaattttatgtcattgttccattaccttgaatgttggaaagatatgatacgtgctgcttgttcatcacaaaaatcagtaagcacaataaagtggatgccaaaccatcagacacataaatgttcccgctgtgtccctggatatggaataagcaggtataaaaaatattttaattatagttttgttataaatataacttatgagaaaaaaatttgataggaataatactgtatattactaatttttaactatccctaaggcaaaccttatgacccacagaattttctcatatacagtattcagtgcacagaaatcttatgattggctcaagtacagtaagttacttctcagtaaaactctcaagtctgagtccatatttgtagctctgcttttggctgtacgttcctaggatcggggctgcttatgcctttcgtttatccttggggtttgagagcgctgtatttgggagagagtttaaaaatacattaggagagagaaaccattaaaagtttcactgtcagagatattgtaggtgctaatactggatttcgtctcagatttaatttcttttatgggtctgttagtcattcaacaaatcccataagtatgtgttaatattttaattgtgtaaaactcatttgttactttacagcctgtaatagtgtgtctgcattttcaacctgttgcaataactttgctgaaatattaacacattaataaaacttttcttaaacaa

SEQ ID NO: 80629 - DNA, 939 bp, Homo sapiens
ggtgacatatagaacagttggtttcaaaaagcaggctggtaccgggctccgggaaattccccggggaatattcggtcgaaacccagctcgcagttcctcaaactgaagcttattgaaaaaaaaatgtataatgttatttgttttattatagcaattattcctaattaaagcagtatttaatgcaatttccagttatttctttggagaattttatgtcattgttccattaccttgaatgttggaaagatatgatacgtgctgcttgttcatcacaaaaatcagtaagcacaataaagtggatgccaaaccatcagacacataaatgttcccgctgtgtccctggatatggaataagcaggtataaaaaatattttaattatagttttgttataaatataacttatgagaaaaaaatttgataggaataatactgtatattactaatttttaactatccctaaggcaaaccttatgacccacagaattttctcatatacagtattcagtgcacagaaatcttatgattggctcaagtacagtaagttacttctcagtaaaactctcaagtctgagtccatatttgtagctctgcttttggctgtacgttcctaggatcggggctgcttatgcctttcgtttatccttggggtttgagagcgctgtatttgggagagagtttaaaaatacattaggagagagaaaccattaaaagtttcactgtcagagatattgtaggtgctaatactggatttcgtctcagatttaatttcttttatgggtctgttagtcattcaacaaatcccataagtatgtgttaatattttaattgtgtaaaactcatttgttactttacagcctgtaatagtgtgtctgcattttcaacctgttgcaataactttgctgaaatattaacacattaataaaacttttcttaaacaa

SEQ ID NO: 80630 - DNA, 1121 bp, Homo sapiens
ggcggaaggcggggtcggccctggccccgcccacatcatttcccttcctcggcccagccccacagcgcgcagcttcggcagggtggctttacggccggaggagagggtgggtcccagacctgaggtaggaggccgagctgaggggcggggaagaggctttttgcggcaggacgtaagtgacggcgaaggcggtgcgacagcagctggagggcagaggaggcggcgcggggtgtcctgtcctcgccatgaggccgcagcaggcgccggtgtccggaaaggtgttcattcagcgagactacagcagtggcacacgctgccagttccagaccaagttccctgcggagctggagaaccggattgataggcagcagtttgaagaaacagttcgaactctaaataacctttatgcagaagcagagaagctcggcggccagtcatatctcgaaggttgtttggcttgtttaacagcatataccatcttcctatgcatggaaactcattatgagaaggttctgaagaaagtctccaaatacattcaagagcagaatgagaagatctatgctccacaaggcctcctcctgacagaccctattgagcgaggactgcgagttattgaaattaccatttatgaagacagaggcatgagcagtggaagataaaccgaagaattaaagatcccacttccagccgggcccctcatgtatccactggccgaccgcagagtgtccctacctcctctccagagcatcattcctttctatctgctgccagagccacggtgccatttactccaaggactcactttctaaaattccacacctggagtgacctctagtcgctcagcatccactttgtgtctccaaattgtgtaggactctgtaatcttttgattagtttctgagaaaacacaatgaagcacttcacttttttttattcaaagccatttaataaaacacagttggtcagcccagtgcaaagcttgttatctgccaccagtacataccattggttctcttcattccttgggccagcttctcaggtggctttagacctcaacaagccgtatcttcaccagtgttctatcttgttcccctaaattaataaaatgtttttctccagga

SEQ ID NO: 80631 - DNA, 1336 bp, Homo sapiens
ggcggaaggcggggtcggccctggccccgcccacatcatttcccttcctcggcccagccccacagcgcgcagcttcggcagggtggctttacggccggaggagagggtgggtcccagacctgaggtaggaggccgagctgaggggcggggaagaggctttttgcggcaggacgtaagtgacggcgaaggcggtgcgacagcagctggagggcagaggaggcgggtttgtgtttcccgggccgaaccgggttgtggggggcgcggggcctgggccaggcggcagctaaggcccgcggtgacagcatgggtgaaggggagcggggcagaggaggccttgggctgttttcggcggcgggtgggggcgaggggctggcgggtcagagtcccgggtccaggccggggctctgactcgcggttggtgttcccccgaccccgcagcgcggggtgtcctgtcctcgccatgaggccgcagcaggcgccggtgtccggaaaggtgttcattcagcgagactacagcagtggcacacgctgccagttccagaccaagttccctgcggagctggagaaccggattgataggcagcagtttgaagaaacagttcgaactctaaataacctttatgcagaagcagagaagctcggcggccagtcatatctcgaaggttgtttggcttgtttaacagcatataccatcttcctatgcatggaaactcattatgagaaggttctgaagaaagtctccaaatacattcaagagcagaatgagaagatctatgctccacaaggcctcctcctgacagaccctattgagcgaggactgcgagttattgaaattaccatttatgaagacagaggcatgagcagtggaagataaaccgaagaattaaagatcccacttccagccgggcccctcatgtatccactggccgaccgcagagtgtccctacctcctctccagagcatcattcctttctatctgctgccagagccacggtgccatttactccaaggactcactttctaaaattccacacctggagtgacctctagtcgctcagcatccactttgtgtctccaaattgtgtaggactctgtaatcttttgattagtttctgagaaaacacaatgaagcacttcacttttttttattcaaagccatttaataaaacacagttggtcagcccagtgcaaagcttgttatctgccaccagtacataccattggttctcttcattccttgggccagcttctcaggtggctttagacctcaacaagccgtatcttcaccagtgttctatcttgttcccctaaattaataaaatgtttttctccagga

SEQ ID NO: 80632 - DNA, 402 bp, Homo sapiens
gaacttaagttgctggcccaaggacaaacagctagtagacagcagtcaaggcagcgtggctccatggtgatgtgcttggtcagagatctgaatatataggacttagatttgtagactattgagctgtagactcatttagacaaatggtaccaagatattttagtagataaaattctaggttagtagaacatagaccacatgttataagctgatatcagttgatggaagaaaaatggttttacaagttattttcaggatctctatcaaacctttacttctccctctaattacagatcccacttccagccgggcccctcatgtatccactggccgaccgcagagtgtccctacctcctctccagagcatcattcctttctatctgctgccagagccacggtgcc

SEQ ID NO: 80633 - DNA, 2071 bp, Homo sapiens
ggcggaaggcggggtcggccctggccccgcccacatcatttcccttcctcggcccagccccacagcgcgcagcttcggcagggtggctttacggccggaggagagggtgggtcccagacctgaggtaggaggccgagctgaggggcggggaagaggctttttgcggcaggacgtaagtgacggcgaaggcggtgcgacagcagctggagggcagaggaggcggcgcggggtgtcctgtcctcgccatgaggccgcagcaggcgccggtgtccggaaaggtgttcattcagcgagactacagcagtggcacacgctgccagttccagaccaagttccctgcggagctggagaaccggattgataggcagcagtttgaagaaacagttcgaactctaaataacctttatgcagaagcagagaagctcggcggccagtcatatctcgaaggttgtttggcttgtttaacagcatataccatcttcctatgcatggaaactcattatgagaaggttctgaagaaagtctccaaatacattcaagagcagaatgagaagatctatgctccacaaggcctcctcctgacagaccctattgagcgaggactgcgagttattgaaattaccatttatgaagacagaggcatgagcagtggaagataaaccgaagaattaaagatcccacttccagccgggcccctcatgtatccactggccgaccgcagagtgtccctacctcctctccagagcatcattcctttctatctgctgccagagccacggtgccatttactccaaggactcactttctaaaattccacacctggagtgacctctagtcgctcagcatccactttgtgtctccaaattgtgtaggactctgtaatcttttgattagtttctgagaaaacacaatgaagcacttcacttttttttattcaaagccatttaataaaacacagttggtcagcccagtgcaaagcttgttatctgccaccagtacataccattggttctcttcattccttgggccagcttctcaggtggctttagacctcaacaagccgtatcttcaccagtgttctatcttgttcccctaaattaataaaatgtttttctccaggattttggtgagggttggctgtggctgtcgttttgcacctcccagatttcaaagaattactggttttaccatgactcaaatcttaagatctgtttctactattcagttcctcaaactgaagcttattgaaaaaaaaatgtataatgttatttgttttattatagcaattattcctaattaaagcagtatttaatgcaatttccagttatttctttggagaattttatgtcattgttccattaccttgaatgttggaaagatatgatacgtgctgcttgttcatcacaaaaatcagtaagcacaataaagtggatgccaaaccatcagacacataaatgttcccgctgtgtccctggatatggaataagcaggtataaaaaatattttaattatagttttgttataaatataacttatgagaaaaaaatttgataggaataatactgtatattactaatttttaactatccctaaggcaaaccttatgacccacagaattttctcatatacagtattcagtgcacagaaatcttatgattggctcaagtacagtaagttacttctcagtaaaactctcaagtctgagtccatatttgtagctctgcttttggctgtacgttcctaggatcggggctgcttatgcctttcgtttatccttggggtttgagagcgctgtatttgggagagagtttaaaaatacattaggagagagaaaccattaaaagtttcactgtcagagatattgtaggtgctaatactggatttcgtctcagatttaatttcttttatgggtctgttagtcattcaacaaatcccataagtatgtgttaatattttaattgtgtaaaactcatttgttactttacagcctgtaatagtgtgtctgcattttcaacctgttgcaataactttgctgaaatattaacacattaataaaacttttcttaaacaa

SEQ ID NO: 80634 - DNA, 2286 bp, Homo sapiens
ggcggaaggcggggtcggccctggccccgcccacatcatttcccttcctcggcccagccccacagcgcgcagcttcggcagggtggctttacggccggaggagagggtgggtcccagacctgaggtaggaggccgagctgaggggcggggaagaggctttttgcggcaggacgtaagtgacggcgaaggcggtgcgacagcagctggagggcagaggaggcgggtttgtgtttcccgggccgaaccgggttgtggggggcgcggggcctgggccaggcggcagctaaggcccgcggtgacagcatgggtgaaggggagcggggcagaggaggccttgggctgttttcggcggcgggtgggggcgaggggctggcgggtcagagtcccgggtccaggccggggctctgactcgcggttggtgttcccccgaccccgcagcgcggggtgtcctgtcctcgccatgaggccgcagcaggcgccggtgtccggaaaggtgttcattcagcgagactacagcagtggcacacgctgccagttccagaccaagttccctgcggagctggagaaccggattgataggcagcagtttgaagaaacagttcgaactctaaataacctttatgcagaagcagagaagctcggcggccagtcatatctcgaaggttgtttggcttgtttaacagcatataccatcttcctatgcatggaaactcattatgagaaggttctgaagaaagtctccaaatacattcaagagcagaatgagaagatctatgctccacaaggcctcctcctgacagaccctattgagcgaggactgcgagttattgaaattaccatttatgaagacagaggcatgagcagtggaagataaaccgaagaattaaagatcccacttccagccgggcccctcatgtatccactggccgaccgcagagtgtccctacctcctctccagagcatcattcctttctatctgctgccagagccacggtgccatttactccaaggactcactttctaaaattccacacctggagtgacctctagtcgctcagcatccactttgtgtctccaaattgtgtaggactctgtaatcttttgattagtttctgagaaaacacaatgaagcacttcacttttttttattcaaagccatttaataaaacacagttggtcagcccagtgcaaagcttgttatctgccaccagtacataccattggttctcttcattccttgggccagcttctcaggtggctttagacctcaacaagccgtatcttcaccagtgttctatcttgttcccctaaattaataaaatgtttttctccaggattttggtgagggttggctgtggctgtcgttttgcacctcccagatttcaaagaattactggttttaccatgactcaaatcttaagatctgtttctactattcagttcctcaaactgaagcttattgaaaaaaaaatgtataatgttatttgttttattatagcaattattcctaattaaagcagtatttaatgcaatttccagttatttctttggagaattttatgtcattgttccattaccttgaatgttggaaagatatgatacgtgctgcttgttcatcacaaaaatcagtaagcacaataaagtggatgccaaaccatcagacacataaatgttcccgctgtgtccctggatatggaataagcaggtataaaaaatattttaattatagttttgttataaatataacttatgagaaaaaaatttgataggaataatactgtatattactaatttttaactatccctaaggcaaaccttatgacccacagaattttctcatatacagtattcagtgcacagaaatcttatgattggctcaagtacagtaagttacttctcagtaaaactctcaagtctgagtccatatttgtagctctgcttttggctgtacgttcctaggatcggggctgcttatgcctttcgtttatccttggggtttgagagcgctgtatttgggagagagtttaaaaatacattaggagagagaaaccattaaaagtttcactgtcagagatattgtaggtgctaatactggatttcgtctcagatttaatttcttttatgggtctgttagtcattcaacaaatcccataagtatgtgttaatattttaattgtgtaaaactcatttgttactttacagcctgtaatagtgtgtctgcattttcaacctgttgcaataactttgctgaaatattaacacattaataaaacttttcttaaacaa

SEQ ID NO: 80635 - DNA, 2057 bp, Homo sapiens
  misc_feature (20)..(20): n is a, c, g, or t
  misc_feature (29)..(29): n is a, c, g, or t
  misc_feature (59)..(59): n is a, c, g, or t
  misc_feature (131)..(131): n is a, c, g, or t
  misc_feature (143)..(144): n is a, c, g, or t
  misc_feature (176)..(176): n is a, c, g, or t
  misc_feature (206)..(206): n is a, c, g, or t
aaagcatcactgccttggcnccttccttncggctgccccccatcacctcaactgtctcntccctgggctaagcagggaaaaccgggctggggtagctggatgtggccaaagtccactgtcctccttggcgncaaaagcccatnnagaagaccagcccagcctgcccccctcttgcngccgttcccggcggcaagaggcagaggagncggcgcggggtgtcctgtcctcgccatgaggccgcagcaggcgccggtgtccggaaaggtgttcattcagcgagactacagcagtggcacacgctgccagttccagaccaagttccctgcggagctggagaaccggattgataggcagcagtttgaagaaacagttcgaactctaaataacctttatgcagaagcagagaagctcggcggccagtcatatctcgaaggttgtttggcttgtttaacagcatataccatcttcctatgcatggaaactcattatgagaaggttctgaagaaagtctccaaatacattcaagagcagaatgagaagatctatgctccacaaggcctcctcctgacagaccctattgagcgaggactgcgagttattgaaattaccatttatgaagacagaggcatgagcagtggaagataaaccgaagaattaaagatcccacttccagccgggcccctcatgtatccactggccgaccgcagagtgtccctacctcctctccagagcatcattcctttctatctgctgccagagccacggtgccatttactccaaggactcactttctaaaattccacacctggagtgacctctagtcgctcagcatccactttgtgtctccaaattgtgtaggactctgtaatcttttgattagtttctgagaaaacacaatgaagcacttcacttttttttattcaaagccatttaataaaacacagttggtcagcccagtgcaaagcttgttatctgccaccagtacataccattggttctcttcattccttgggccagcttctcaggtggctttagacctcaacaagccgtatcttcaccagtgttctatcttgttcccctaaattaataaaatgtttttctccaggattttggtgagggttggctgtggctgtcgttttgcacctcccagatttcaaagaattactggttttaccatgactcaaatcttaagatctgtttctactattcagttcctcaaactgaagcttattgaaaaaaaaatgtataatgttatttgttttattatagcaattattcctaattaaagcagtatttaatgcaatttccagttatttctttggagaattttatgtcattgttccattaccttgaatgttggaaagatatgatacgtgctgcttgttcatcacaaaaatcagtaagcacaataaagtggatgccaaaccatcagacacataaatgttcccgctgtgtccctggatatggaataagcaggtataaaaaatattttaattatagttttgttataaatataacttatgagaaaaaaatttgataggaataatactgtatattactaatttttaactatccctaaggcaaaccttatgacccacagaattttctcatatacagtattcagtgcacagaaatcttatgattggctcaagtacagtaagttacttctcagtaaaactctcaagtctgagtccatatttgtagctctgcttttggctgtacgttcctaggatcggggctgcttatgcctttcgtttatccttggggtttgagagcgctgtatttgggagagagtttaaaaatacattaggagagagaaaccattaaaagtttcactgtcagagatattgtaggtgctaatactggatttcgtctcagatttaatttcttttatgggtctgttagtcattcaacaaatcccataagtatgtgttaatattttaattgtgtaaaactcatttgttactttacagcctgtaatagtgtgtctgcattttcaacctgttgcaataactttgctgaaatattaacacattaataaaacttttcttaaacaa

SEQ ID NO: 80636 - DNA, 1552 bp, Homo sapiens
ggcggaaggcggggtcggccctggccccgcccacatcatttcccttcctcggcccagccccacagcgcgcagcttcggcagggtggctttacggccggaggagagggtgggtcccagacctgaggtaggaggccgagctgaggggcggggaagaggctttttgcggcaggacgtaagtgacggcgaaggcggtgcgacagcaagtgtccctacctcctctccagagcatcattcctttctatctgctgccagagccacggtgccatttactccaaggactcactttctaaaattccacacctggagtgacctctagtcgctcagcatccactttgtgtctccaaattgtgtaggactctgtaatcttttgattagtttctgagaaaacacaatgaagcacttcacttttttttattcaaagccatttaataaaacacagttggtcagcccagtgcaaagcttgttatctgccaccagtacataccattggttctcttcattccttgggccagcttctcaggtggctttagacctcaacaagccgtatcttcaccagtgttctatcttgttcccctaaattaataaaatgtttttctccaggattttggtgagggttggctgtggctgtcgttttgcacctcccagatttcaaagaattactggttttaccatgactcaaatcttaagatctgtttctactattcagttcctcaaactgaagcttattgaaaaaaaaatgtataatgttatttgttttattatagcaattattcctaattaaagcagtatttaatgcaatttccagttatttctttggagaattttatgtcattgttccattaccttgaatgttggaaagatatgatacgtgctgcttgttcatcacaaaaatcagtaagcacaataaagtggatgccaaaccatcagacacataaatgttcccgctgtgtccctggatatggaataagcaggtataaaaaatattttaattatagttttgttataaatataacttatgagaaaaaaatttgataggaataatactgtatattactaatttttaactatccctaaggcaaaccttatgacccacagaattttctcatatacagtattcagtgcacagaaatcttatgattggctcaagtacagtaagttacttctcagtaaaactctcaagtctgagtccatatttgtagctctgcttttggctgtacgttcctaggatcggggctgcttatgcctttcgtttatccttggggtttgagagcgctgtatttgggagagagtttaaaaatacattaggagagagaaaccattaaaagtttcactgtcagagatattgtaggtgctaatactggatttcgtctcagatttaatttcttttatgggtctgttagtcattcaacaaatcccataagtatgtgttaatattttaattgtgtaaaactcatttgttactttacagcctgtaatagtgtgtctgcattttcaacctgttgcaataactttgctgaaatattaacacattaataaaacttttcttaaacaa

SEQ ID NO: 80637 - DNA, 970 bp, Homo sapiens
ggcggaaggcggggtcggccctggccccgcccacatcatttcccttcctcggcccagccccacagcgcgcagcttcggcagggtggctttacggccggaggagagggtgggtcccagacctgaggtaggaggccgagctgaggggcggggaagaggctttttgcggcaggacgtaagtgacggcgaaggcggtgcgacagcagctggagggcagaggaggcggcgcggggtgtcctgtcctcgccatgaggccgcagcaggcgccggtgtccggaaaggtgttcattcagcgagactacagcagtggcacacgctgccagttccagaccaagttccctgcggagctggagaaccggattgataggcagcagtttgaagaaacagttcgaactctaaataacctttatgcagaagcagagaagctcggcggccagtcatatctcgaaggttgtttggcttgtttaacagcatataccatcttcctatgcatggaaactcattatgagaaggttctgaagaaagtctccaaatacattcaagagcagaatgagaagatctatgctccacaaggcctcctcctgacagaccctattgagcgaggactgcgagttattgaaattaccatttatgaagacagaggcatgagcagtggaagataaaccgaagaattaaagatcccacttccagccgggcccctcatgtatccactggccgaccgcagagtgtccctacctcctctccagagcatcattcctttctatctgctgccagagccacggtgccatttactccaaggactcactttctaaaattccacacctggagtgacctctagtcgctcagcatccactttgtgtctccaaattgtgtaggactctgtaatcttttgattagtttctgagaaaacacaatgaagcacttcacttttttttattcaaagccatttaataaaacacagttggtcagccca

SEQ ID NO: 80638 - DNA, 839 bp, Homo sapiens
cttggaatgttctacaaggtttatatcaactgagggttgaaaaatcctacttatccactctccttactttagagatgaggaatttgaatcttagagagtttatgacttatccaattggtggtattaccgaaaaccaaaagccagtttgcttcctagttgaatgttctttccatcatgccatgtggagttattttgagtcaaccagaaaatctgcaaggacatcaaaataatgttctttctccctctgacctcagtaataaccggttaaagatttagaatgctttagagtaaatcctcaaagcagctgcaggtcctcaatgttccagaatagatattttaagttctccaaataaaaaatcccaataaagaccttctttttgcagtaactaaaaaagtttccagctctcctgtcacaaagtggctattgagacttcaaatgtcagatgatctcctttgaagcagcaaaatagagtggatagaactccaggatggatgtcaaaaaactctgtgatcctagttctaactcaaatttacctttcatatggtatgaggttggcaacaaatgattcatggaccaccactcatctatagaccagacattagtaagatgtgcttgcttctccttcgcctttcaccatgactgtaagtttccagaggcctcccagtcatggttcctgttaagcttgcagaacgtgcacacaacctggagcaaagagatgtcaacgtagacttgaaagcctcaacaaacatctatacattcaaaattcagaggataattgcagacttacatgttaaatgatgccacaggcttgtggtgaatgtacaaatctaattcccta

SEQ ID NO: 80639 - DNA, 449 bp, Homo sapiens
tgatttatcctttgaaacagaaagtgcattacatttaactggtcttgcaaagggggttttcttctctttacaaaccgaattccttatataaattaataaaggttaaagatgctaatatatcaccattattagctgtaaaaagaaaacaatttacatattctatagtattcttatgatacaaaacacttcaaattcaattacagtaactaaatgaatttttatgtttcagacccagagcggttgtaacaattcccaccacctactttaacacgcatttttatcagaaaggagttaaatacaagctattgtagcccctccctccccaatattttctttaaatcactaataaatagcaacaaacgactgtgcaatttcagagaggaacagggaggcaggtgagaggccctccctggttcccacgtcttccacttcaagtccggggggcggga

SEQ ID NO: 80640 - DNA, 1103 bp, Homo sapiens
ttaacctcattgctactcttccccttgcctcctaattctctggttaaacttccgcccccgaggtttctagaaatccctgagctggaatgcgctgccttcattaagagggtgttctgcttccgtctgctcacattcatctagtaagccctctcgttaaagaggaggcagcacaccgaggcctgtctagaacttctttcatttaaccaacagtgaatatctaatctacaagaaactggagccgtggcagtttaggagcctgccaaggttgcatccctgggagcttattttctattgtgggagacaggaaaagaacaagtgaatcaactgtgaaattaaataattcaaacttaaagctgttggaactttaaattattctgagccttgcgaagaatgtggcgatggggcctgagtcccatggcatacagctgcaatgtctgccttgttttttcctataatcaggaagaccaaacagagacagaggcgcacacaccaagaaaggccatgtgggcacacagcaagatggtgcctgtctgcaaactaggaaaagagccctcaccaggaactgaaacagctggcaccttgatgttggactttccagcctccacaactgtgagaggtaagtttctgttgtttaaaccacctagtctatgatattttgttatggcagcccaagcaaacaccaacatttgccaattttgatttattttttacatatatgatgtaaaaagtaatctttacaaagtatcatatgtctcattatttcatgcagaaattggtgaccaaatcaaggggaaaaataaagagatcccaaataatacatgcaaattaaatggtttctttatagtttgaagtttaatcaatgaactctaattaatcatttccaaaaatatggcaatcgagacatccaaacaagaattggttagaagtcccctctatgtgcctgggaggcctttctccattctctttttcttatttctacaaacacaaatctgagaagttctataagtttattaaaacagtgggagaaagcatcgttggtcttaataaattgtgtgcactgtgcaacctcttcccccagtgtttgttttactctataaagttct

SEQ ID NO: 80641 - DNA, 596 bp, Homo sapiens
taaatcacacaagtccctggcatgagaccaagaagtcacagagcccaggtcttagccctcagagtgtgagagaagacatgaaggcatcagggacactgtgcgagtgggcactgctgctttccactgctctccctagactgcagccaggaggctgcctctgccctgccaggtcagattcccccaagaggccctcccatagcaccctgggcatatggccgttttgtacttagcactccgaactgtgttgactggtttctctctctctccctcactaatctgtgagcatttttgtaacctccatgctccgtacaatgcctggagcatagatttctcaagaaatctttgttgaaccttttcttcctccatattaaaccagaccttgcatcacaggcactattttctcagtattcagtccttcactcccttctatacacaaataatctccatcctagacaggaaattataggagagaaggcaatctgtgtgagaaagcaatttctatttgaagcacttgtgtgtttaggtgctgctgagaattgcaataaaagccaacactgggcttaaattgttaagcagtatctgttagctagcatttc

SEQ ID NO: 80642 - DNA, 1305 bp, Homo sapiens
cgctccgccgcgctgtgcgaggcccagactgagggcgaaacagcaggcaggactgggtggagacgttcggggacgtggcaactggagtttcttctccgtatatttcggcattcagttcctttttttttttgttttaactcaggaaaaaatctcaattgcgtttagtatttggaaagccactttattgcttcccgagcctcagtcatgtgtggtgggaggctgctgtgggtggcacctggggcgtccacggccgccaaggcgggaggacgtcaggccctgcttgctcccaccccttccaggtgagagctcccgggcacgcccgtccttggctcttcgtcctcttggtgttcttccctgttgcttcaaatcaggttcctgtctcaaaaatccgaaaaagaaatcctcccaaatgactctgtgcccgacgctccgttaaggcatcgtgctaggcgttctcaaactcgtgaaatgactacactgcacaggaagaccaaacagagacagagttctggttaaatcacacaagtccctggcatgagaccaagaagtcacagagcccaggtcttagccctcagagtgtgagagaagacatgaaggcatcagggacactgtgcgagtgggcactgctgctttccactgctctccctagactgcagccaggaggctgcctctgccctgccaggcgcacacaccaagaaaggccatgtgggcacacagcaagatggtgcctgtctgcaaactaggaaaagagccctcaccaggaactgaaacagctggcaccttgatgttggactttccagcctccacaactgtgagaggtaagtttctgttgtttaaaccacctagtctatgatattttgttatggcagcccaagcaaacaccaacatttgccaattttgatttattttttacatatatgatgtaaaaagtaatctttacaaagtatcatatgtctcattatttcatgcagaaattggtgaccaaatcaaggggaaaaataaagagatcccaaataatacatgcaaattaaatggtttctttatagtttgaagtttaatcaatgaactctaattaatcatttccaaaaatatggcaatcgagacatccaaacaagaattggttagaagtcccctctatgtgcctgggaggcctttctccattctctttttcttatttctacaaacacaaatctgagaagttctataagtttattaaaacagtgggagaaagcatcgttggtcttaataaattgtgtgcactgtgcaacctcttcccccagtgtttgttttactctataaagttct

SEQ ID NO: 80643 - DNA, 393 bp, Homo sapiens
tcacttgagcccaggagttcaagactggcctacactgcatagtgagatcctgtctaagaaacgcagagagaaataaattaacagtttaaaaatttaaaatttggggcctggcacggtgggtcacgcctataatcccagcactttgggaggccaaggcaggcggatcacgaggtcgggagatcgagaccatcctggctaacacagtgaaaccccgtctctactaaagaaaatacaaaaaaaatagccgggcgtggtggtgggcgcctgtagtcccagctacttgggaggctgaggcaggagaatggtgtgaacccgggaggcggacgcttgcagtgagccgagatggcgccactgcacaccagcctgggcaacagagcgagactctgtctcaaa

SEQ ID NO: 80644 - DNA, 655 bp, Homo sapiens
ccatgttgcccaggctgctctcgaactcctgagctcaagtgatctacctgcctcggcctcccaaagtgctgggattacaggcttgagccaccacatccagccagaagagagggttttgcacggtctaaagggaggggagatgttgaatagtcggaagagcaaagtccctagagagggcttgaaacaccaaccttggcagcaccaaggttggaggagctcccgccctgcccatgcctgcacatgggttataacattgcagacaccacctcctgtgccatcttgccagtgagtggtcagaaagtgagaagagtgggctcagaggttgggagtgtggtcagtgtcactcactcagggagcacccacggggtcacgtcttgagcccaggtcagccaagctccctacatggggtctcctccccagttctggtcccaaagatgggtggggacagtgcactcctgcccctgccacagccaggcccccttccctgtgtcttgcagcctcccctctacagagaaccatgtccgggcctccctctctccatctgtagccaggtgggggcctccctgctggcactgctgtttggagacttatacctctagctgctcaacctgcttcctctgcatccggggctggacctactgagggcttctgtgcc

SEQ ID NO: 80645 - DNA, 270 bp, Homo sapiens
ggaaaactcaggcttggaacaggtaaccccccggtttccgcaggccacaaatcaccacccgcaaccgaaggacgcgcaggctgggagcggcggcggggccaccagtgcggacctccactgagggcggcgggatccgaccgcaagggctggtccctgaggccactaaggggtgcgctgggctaaggccgcctgggggcaggagccagcgcgatcgtggcgggccagcaggcggggctggctgaggactagcagcgacccgagaccccaacc

SEQ ID NO: 80646 - DNA, 340 bp, Homo sapiens
ttttttagacacagagtctggctctggggcccaggcttgagtgcagtggtgagacgggagaataagtcctagaggaagggaacctgaggacttcccagaactaaatcagatggagaggagagaggaggcatttcagctacgacaggaaatatcctcttcatttgcatagggcgttcaccaaggtgcacaccaaataaccaatggaaacctctagagagtatttaaactccagaaaattctgtgacgggctcttgagccaacgtgctccggccgctcccactctgtgcagtcgactgtacttttgttttcaataaaactctgcttttgtttcttcattctt

SEQ ID NO: 80647 - DNA, 968 bp, Homo sapiens
cggaccaagtgccccctgcactttcaacgccgtaggtctcccggcagccctggaaggacagtcttacccggacgccacggtggtctcccggcagccctgggaaggacagtcttacccggacgccacggtggtctcccggcagccctgggaaggacagtcttacccggacgccacggccgagctgcccttccctccctgctgcccccagggaaggctgctggtgtcctcagatgcgggcaggaggaacccgccagcgcctgagagcctggcccgaaccaggcctggaggtgctggggcgaagacacagaggatgtggcctccatccctggtaacagacggttaccagggcggctttgggtgaggacattgaaaaaggtcagactccctgggagcagcgccctggactccattctcatcacagaccagtggttcccaattgaagtcagttttgctcctcagggcacacttaacaacatctggagacatttttaattgtcctgaccgagaggacaatgctactggcatctagtggacagaggccagggatactgctgaacatcccgcagtgcacaggacgcctgcaacacagattatccagccccaaacgtcaatagtgccggagttatggaaccctaatgaagacaattcttgaaggcatagactgaatcttatttatctttgtttccctcatgtctcacaagcagagtatgagttcagcaaataggagttgaacagaaatcaggaggaggtgctgattgacaggaaaaaagaaagatttagtttagagctgagaattcagctggacagccataggggctctggcatggagactggaagtcagaagagaatttgcagcaagacatttagagccatttatccagccatcataattttattgagtaactattttgtgtgaggcactgtactggatgctttggcaacagagataagcaaggcaacccctgtga

SEQ ID NO: 80648 - DNA, 346 bp, Homo sapiens
agtaacttaattgataaagtcagtgaggaaggaatagaatacaacaaatggcttaaaaacagaaggccaagcgtgatggctcattcctgtaatcccagcactttgtgaggccgaggcaggtggattgcttgagctcaggagttcaagaccaacctgggcaacatggcaaaaccccatctctaccaaaaatacaaaaaattagccgggcgtggtggctcacacctgtagtcccaatttctcagaaggctgaggtgggaggatcacttgaacccaggaggaggaggtttcagtcagtagagattgaactactatactctagcctggatgacagagtaagaccttgtca

SEQ ID NO: 80649 - DNA, 811 bp, Homo sapiens
cggaccaagtgccccctgcactttcaacgccgtaggtctcccggcagccctggaaggacagtcttacccggacgccacggtggtctcccggcagccctgggaaggacagtcttacccggacgccacggtggtctcccggcagccctgggaaggacagtcttacccggacgccacggccgagctgcccttccctccctgctgcccccagggaaggctgctggtgtcctcagatgcgggcaggaggaacccgccagcgcctgagagcctggcccgaaccaggcctggaggtgctggggcgaagacacagaggatgtggcctccatccctggtaacagacggttaccagggcggctttgggtgaggacattgaaaaaggtcagactccctgggagcagcgccctggactccattctcatcacagaccagtggttcccaattgaagtcagttttgctcctcagggcacacttaacaacatctggagacatttttaattgtcctgaccgagaggacaatgctactggcatctagtggacagaggccagggatactgctgaacatcccgcagtgcacaggacgcctgcaacacagattatccagccccaaacgtcaatagtgccggagttatggaaccctaatgaagacaattcttgaaggcatagactgaatcttatttatctttgtttccctcatgtctcacaagcagagtatgagttcagcaaataggagttgaacagaaatcaggaggaggtttcagtcagtagagattgaactactatactctagcctggatgacagagtaagaccttgtca

SEQ ID NO: 80650 - DNA, 991 bp, Homo sapiens
cggaccaagtgccccctgcactttcaacgccgtaggtctcccggcagccctggaaggacagtcttacccggacgccacggtggtctcccggcagccctgggaaggacagtcttacccggacgccacggtggtctcccggcagccctgggaaggacagtcttacccggacgccacggccgagctgcccttccctccctgctgcccccagggaaggctgctggtgtcctcagatgcgggcaggaggaacccgccagcgcctgagagcctggcccgaaccaggcctggaggtgctggggcgaagacacagaggatgtggcctccatccctggtaacagacggttaccagggcggctttgggtgaggacattgaaaaaggtcagactccctgggagcagcgccctggactccattctcatcacaggtatatttgtgtggctactaagagtaagagcctgggggtgcaggagtgattccagccccctcctacaaagtcatgtgagagggatctgaagaaaatccaggggaaaatgtaccacagcgaggaaatcgccatctaaagggctgaacgctcaagaacggcgttgggtgggctccgcgttggagttgagtcccgaaggatgttctaacagcaaaggggagaaaggaagagagaagccaaggcgtgcgggcaacgtgaaccgcatgagccgaggcaaaggggcagcgtggggctggaccctggagtctgctcctgtctgaattctagtgctgtcactgactagcaaggaacttccctgtgcctcgtggctgtcacatggaaagacagcaccgccatccagcccttataccgtaagggttatatgaactagcactgtgggcattagcagagcatgctgtacactttggtatattgtgagaatgaaataaatcaacaaatgcaaagcaggttttgcataacaaagactaaacaagtgttagttagctcctttcctccttcccgcctgtgaaaatg

SEQ ID NO: 80651 - DNA, 765 bp, Homo sapiens
  misc_feature (435)..(436): n is a, c, g, or t
  misc_feature (459)..(459): n is a, c, g, or t
  misc_feature (463)..(463): n is a, c, g, or t
  misc_feature (481)..(481): n is a, c, g, or t
  misc_feature (501)..(502): n is a, c, g, or t
  misc_feature (518)..(518): n is a, c, g, or t
  misc_feature (538)..(538): n is a, c, g, or t
  misc_feature (546)..(546): n is a, c, g, or t
  misc_feature (592)..(592): n is a, c, g, or t
  misc_feature (602)..(602): n is a, c, g, or t
  misc_feature (623)..(624): n is a, c, g, or t
  misc_feature (631)..(631): n is a, c, g, or t
  misc_feature (644)..(644): n is a, c, g, or t
  misc_feature (647)..(647): n is a, c, g, or t
  misc_feature (649)..(649): n is a, c, g, or t
  misc_feature (654)..(654): n is a, c, g, or t
  misc_feature (686)..(686): n is a, c, g, or t
  misc_feature (734)..(734): n is a, c, g, or t
ctccctcagcaaggacagcagaggaccagctaagagggagagaagcaactacagaccccccctgaaaacaaccctcagacgccacatcccctgacaagctgccaggcaggttctcttcctctcacatactgacccacggctccaccctctctcccctggaaaggacaccatgagcactgaaagcatgatccgggacgtggagctggccgaggaggcgctccccaagaagacaggggggccccagggctccaggcggtgcttgttcctcagcctcttctccttcctgatcgtggcaggcgccaccacgctcttctgcctgctgcactttggagtgatcggcccccagagggaagagttccccagggacctctctctaatcagccctctggcccaggcagtcagcatcatcttctcgcaaaaccgcagctgcacaanncagtgctagcaacagtgctgtgntagncaaaaaaacgtcacagcngtgcagcgcgcgcgagccgnnacagctgcgcccgcanacacgcacgcgcgccacaantgccaacntcacgtgcgcacacagtgcgccgcctgcgcagacgtgcagcagcantaaacacagncgcgcgcgtgcgctgcacacnnagcagcngcactgctacacncantnatacntaacagcgctcactcttcaagcgcgcacaagngcgtgccacactacacaacactgctgcctactcaacacaacacacacncagcacgacacatcgcacgctcatacctaaa

SEQ ID NO: 80652 - DNA, 366 bp, Homo sapiens
gaggatggatggaggtgaaagtaggggggtattttctaggaagtttaagggtctcagctttttcttttctctctcctcttcaggatcatcttctcgaaccccgagtgacaagcctgtagcccatgttgtaggtaagagctctgaggatgtgtcttggaacttggagggctaggatttggggattgaagcccggctgatggcaccaccagctggttatctctcagctccacgccattggccaggagggcattggcccggcggttcagccactggagctgcccctcagcttgagggtttgctggagggagggagagagggagaggagagtcagtgtggccatgtcggttcactctccacatcctggcc

SEQ ID NO: 80653 - DNA, 2282 bp, Homo sapiens
ctccctcagcaaggacagcagaggaccagctaagagggagagaagcaactacagaccccccctgaaaacaaccctcagacgccacatcccctgacaagctgccaggcaggttctcttcctctcacatactgacccacggctccaccctctctcccctggaaaggacaccatgagcactgaaagcatgatccgggacgtggagctggccgaggaggcgctccccaagaagacaggggggccccagggctccaggcggtgcttgttcctcagcctcttctccttcctgatcgtggcaggcgccaccacgctcttctgcctgctgcactttggagtgatcggcccccagagggaagaggtgagtgcctggccagccttcatccactctcccacccaaggggaaatggagacgcaagagagggagagagatgggatgggtgaaagatgtgcgctgatagggagggatggagagaaaaaaacgtggagaaagacggggatgcagaaagagatgtggcaagagatggggaagagagagagagaaagatggagagacaggatgtctggcacatggaaggtgctcactaagtgtgtatggagtgaatgaatgaatgaatgaatgaacaagcagatatataaataagatatggagacagatgtggggtgtgagaagagagatgggggaagaaacaagtgatatgaataaagatggtgagacagaaagagcgggaaatatgacagctaaggagagagatgggggagataaggagagaagaagatagggtgtctggcacacagaagacactcagggaaagagctgttgaatgcctggaaggtgaatacacagatgaatggagagagaaaaccagacacctcagggctaagagcgcaggccagacaggcagccagctgttcctcctttaagggtgactccctcgatgttaaccattctccttctccccaacagttccccagggacctctctctaatcagccctctggcccaggcagtcagatcatcttctcgaaccccgagtgacaagcctgtagcccatgttgtagcaaaccctcaagctgaggggcagctccagtggctgaaccgccgggccaatgccctcctggccaatggcgtggagctgagagataaccagctggtggtgccatcagagggcctgtacctcatctactcccaggtcctcttcaagggccaaggctgcccctccacccatgtgctcctcacccacaccatcagccgcatcgccgtctcctaccagaccaaggtcaacctcctctctgccatcaagagcccctgccagagggagaccccagagggggctgaggccaagccctggtatgagcccatctatctgggaggggtcttccagctggagaagggtgaccgactcagcgctgagatcaatcggcccgactatctcgactttgccgagtctgggcaggtctactttgggatcattgccctgtgaggaggacgaacatccaaccttcccaaacgcctcccctgccccaatccctttattaccccctccttcagacaccctcaacctcttctggctcaaaaagagaattgggggcttagggtcggaacccaagcttagaactttaagcaacaagaccaccacttcgaaacctgggattcaggaatgtgtggcctgcacagtgaagtgctggcaaccactaagaattcaaactggggcctccagaactcactggggcctacagctttgatccctgacatctggaatctggagaccagggagcctttggttctggccagaatgctgcaggacttgagaagacctcacctagaaattgacacaagtggaccttaggccttcctctctccagatgtttccagacttccttgagacacggagcccagccctccccatggagccagctccctctatttatgtttgcacttgtgattatttattatttatttattatttatttatttacagatgaatgtatttatttgggagaccggggtatcctgggggacccaatgtaggagctgccttggctcagacatgttttccgtgaaaacggagctgaacaataggctgttcccatgtagccccctggcctctgtgccttcttttgattatgttttttaaaatatttatctgattaagttgtctaaacaatgctgatttggtgaccaactgtcactcattgctgagcctctgctccccaggggagttgtgtctgtaatcgccctactattcagtggcgagaaataaagtttgcttagaaaagaaaaaaagt

SEQ ID NO: 80654 - DNA, 970 bp, Homo sapiens
ctccctcagcaaggacagcagaggaccagctaagagggagagaagcaactacagaccccccctgaaaacaaccctcagacgccacatcccctgacaagctgccaggcaggttctcttcctctcacatactgacccacggctccaccctctctcccctggaaaggacaccatgagcactgaaagcatgatccgggacgtggagctggccgaggaggcgttaccccctccttcagacaccctcaacctcttctggctcaaaaagagaattgggggcttagggtcggaacccaagcttagaactttaagcaacaagaccaccacttcgaaacctgggattcaggaatgtgtggcctgcacagtgaagtgctggcaaccactaagaattcaaactggggcctccagaactcactggggcctacagctttgatccctgacatctggaatctggagaccagggagcctttggttctggccagaatgctgcaggacttgagaagacctcacctagaaattgacacaagtggaccttaggccttcctctctccagatgtttccagacttccttgagacacggagcccagccctccccatggagccagctccctctatttatgtttgcacttgtgattatttattatttatttattatttatttatttacagatgaatgtatttatttgggagaccggggtatcctgggggacccaatgtaggagctgccttggctcagacatgttttccgtgaaaacggagctgaacaataggctgttcccatgtagccccctggcctctgtgccttcttttgattatgttttttaaaatatttatctgattaagttgtctaaacaatgctgatttggtgaccaactgtcactcattgctgagcctctgctccccaggggagttgtgtctgtaatcgccctactattcagtggcgagaaataaagtttgcttagaaaagaaaaaaagt

SEQ ID NO: 80655 - DNA, 1676 bp, Homo sapiens
ctccctcagcaaggacagcagaggaccagctaagagggagagaagcaactacagaccccccctgaaaacaaccctcagacgccacatcccctgacaagctgccaggcaggttctcttcctctcacatactgacccacggctccaccctctctcccctggaaaggacaccatgagcactgaaagcatgatccgggacgtggagctggccgaggaggcgctccccaagaagacaggggggccccagggctccaggcggtgcttgttcctcagcctcttctccttcctgatcgtggcaggcgccaccacgctcttctgcctgctgcactttggagtgatcggcccccagagggaagagttccccagggacctctctctaatcagccctctggcccaggcagtcagatcatcttctcgaaccccgagtgacaagcctgtagcccatgttgtagcaaaccctcaagctgaggggcagctccagtggctgaaccgccgggccaatgccctcctggccaatggcgtggagctgagagataaccagctggtggtgccatcagagggcctgtacctcatctactcccaggtcctcttcaagggccaaggctgcccctccacccatgtgctcctcacccacaccatcagccgcatcgccgtctcctaccagaccaaggtcaacctcctctctgccatcaagagcccctgccagagggagaccccagagggggctgaggccaagccctggtatgagcccatctatctgggaggggtcttccagctggagaagggtgaccgactcagcgctgagatcaatcggcccgactatctcgactttgccgagtctgggcaggtctactttgggatcattgccctgtgaggaggacgaacatccaaccttcccaaacgcctcccctgccccaatccctttattaccccctccttcagacaccctcaacctcttctggctcaaaaagagaattgggggcttagggtcggaacccaagcttagaactttaagcaacaagaccaccacttcgaaacctgggattcaggaatgtgtggcctgcacagtgaagtgctggcaaccactaagaattcaaactggggcctccagaactcactggggcctacagctttgatccctgacatctggaatctggagaccagggagcctttggttctggccagaatgctgcaggacttgagaagacctcacctagaaattgacacaagtggaccttaggccttcctctctccagatgtttccagacttccttgagacacggagcccagccctccccatggagccagctccctctatttatgtttgcacttgtgattatttattatttatttattatttatttatttacagatgaatgtatttatttgggagaccggggtatcctgggggacccaatgtaggagctgccttggctcagacatgttttccgtgaaaacggagctgaacaataggctgttcccatgtagccccctggcctctgtgccttcttttgattatgttttttaaaatatttatctgattaagttgtctaaacaatgctgatttggtgaccaactgtcactcattgctgagcctctgctccccaggggagttgtgtctgtaatcgccctactattcagtggcgagaaataaagtttgcttagaaaagaaaaaaagt

SEQ ID NO: 80656 - DNA, 1659 bp, Homo sapiens
gaggatggatggaggtgaaagtaggggggtattttctaggaagtttaagggtctcagctttttcttttctctctcctcttcaggatcatcttctcgaaccccgagtgacaagcctgtagcccatgttgtaggtaagagctctgaggatgtgtcttggaacttggagggctaggatttggggattgaagcccggctgatggtaggcagaacttggagacaatgtgagaaggactcgctgagctcaagggaagggtggaggaacagcacaggccttagtgggatactcagaacgtcatggccaggtgggatgtgggatgacagacagagaggacaggaaccggatgtggggtgggcagagctcgagggccaggatgtggagagtgaaccgacatggccacactgactctcctctccctctctccctccctccagcaaaccctcaagctgaggggcagctccagtggctgaaccgccgggccaatgccctcctggccaatggcgtggagctgagagataaccagctggtggtgccatcagagggcctgtacctcatctactcccaggtcctcttcaagggccaaggctgcccctccacccatgtgctcctcacccacaccatcagccgcatcgccgtctcctaccagaccaaggtcaacctcctctctgccatcaagagcccctgccagagggagaccccagagggggctgaggccaagccctggtatgagcccatctatctgggaggggtcttccagctggagaagggtgaccgactcagcgctgagatcaatcggcccgactatctcgactttgccgagtctgggcaggtctactttgggatcattgccctgtgaggaggacgaacatccaaccttcccaaacgcctcccctgccccaatccctttattaccccctccttcagacaccctcaacctcttctggctcaaaaagagaattgggggcttagggtcggaacccaagcttagaactttaagcaacaagaccaccacttcgaaacctgggattcaggaatgtgtggcctgcacagtgaagtgctggcaaccactaagaattcaaactggggcctccagaactcactggggcctacagctttgatccctgacatctggaatctggagaccagggagcctttggttctggccagaatgctgcaggacttgagaagacctcacctagaaattgacacaagtggaccttaggccttcctctctccagatgtttccagacttccttgagacacggagcccagccctccccatggagccagctccctctatttatgtttgcacttgtgattatttattatttatttattatttatttatttacagatgaatgtatttatttgggagaccggggtatcctgggggacccaatgtaggagctgccttggctcagacatgttttccgtgaaaacggagctgaacaataggctgttcccatgtagccccctggcctctgtgccttcttttgattatgttttttaaaatatttatctgattaagttgtctaaacaatgctgatttggtgaccaactgtcactcattgctgagcctctgctccccaggggagttgtgtctgtaatcgccctactattcagtggcgagaaataaagtttgcttagaaaagaaaaaaagt

SEQ ID NO: 80657 - DNA, 356 bp, Homo sapiens
tttatacagtttaacaaatataatctcccttttctttccagagattacttcatttagacatcaaactatgttgttgttgtttttttcccctggggagaggggatataaataaattgacatctattcacataggtctcaatggtctaccagatccacccaggccctaatcctctttgttgtcatggaatccacctggcttaattatatttacagttttcaacgacaccacatggcatgcaggttttccctgaactctgcacatcttcccgaatcctagctataagtcacactccagctgctgtatccgtctcggattctagacggtgacaaggcactcttgcctgaaactcagcatc

SEQ ID NO: 80658 - DNA, 537 bp, Homo sapiens
acgcctcaccctgttttgcaacttcttgtttatgagcctggaagccacgaagtggtgggaaatacgagattcaaatatctggtggccgtgtgacgtgagtaaattactcgatttttctcagtttccatttcctatcaaatgggttgttctgggaattcggggaagtaacagtgccgggaaccgcgggaggaaccgccagctgcgtcctcggacgtccccaaagcccagggcggcgactggcacgactgtcaggggcgcgtctgttaagaggacagggggtcccgccccggcacagccgtctcctccaggacccctcccgccgacgccccacggaccccacgcccgagcggagaccggcgcgagtccggggtctccggtccggcagcccctccctggcccggcgccccaaagggaagcggcctgggggaggagacgtgtggaaagagcggcagaagataaagaggaagtagcggtagagaataaaaaggaactgtccgcagtgtgcccggacgcggggaggcgctggggtcaagcgag

SEQ ID NO: 80659 - DNA, 346 bp, Homo sapiens
cctgtccttgtcgtccctcattcacttaattatgatacttgcctggcatcttgcaggtttctgatgctgttaccccagtatagaccaagtgcagacagaatttcatttctgctttattaaggcacagtcttgagaaacccattggcttcacacacaattaattaatttgtggcaacaagctactatattggcttgcatgtcactttcacctctctgggcattagttttctctaatatttataaaagaaggacatgactttctaaggttccttgcagtaattatgcagttctattctaatagatgcttaagcataaaacccattttaatactgtccaaggatccagg

SEQ ID NO: 80660 - DNA, 341 bp, Homo sapiens
aacaaggatacaagttaggcttttaaaaatatatctgatttcatagatttgacttgggaacaagtatatattttacatagttataaggcaaaatatgatttaaaccatctctaaaaatccaaaggaaatggaaaaaaaatgaacttaagtgcatgtagaattggtgtcataaacacacaaagaagtgctccaagagactttaaaacacagtcattggactgtatatctctcttagtatatatcctaatgacaaaagaaactacaaaaacatcttaaaacttttttcataatcatattactggtgacagtgtggtagtaataaactgagactgttgtatgtg

SEQ ID NO: 80661 - DNA, 348 bp, Homo sapiens
ttctgcaatgtaaaagcaataccccatgaccaatcctattcctgattttcataattttaccccaaagaaaagagaggaaatcatggtaacctccaaccccaactatatatgctcataactaatagcattagagaaaatacattcagttcccagaacacagtgctaagacctgaacttgctgctgggttccatggaaaagcctagaggcctaaactttgacaaccactgccatgtgaaatgctaccccggctatagacaaaaaaactatgtctgttatatcctggaatatgtgatgctcattttacttctatattaaatttttttctccttcctcatttcaatttacca

SEQ ID NO: 80662 - DNA, 893 bp, Homo sapiens
gcattatgaatgaaaaggatttctctttttctgactcacagtgttttaaagctgaagcttcacaaaaccaaggtatttttacatgtgactttgtacccacacaaatattcctacaagggttaaatggagtactgattaagattagaaatacacgattccagttatggaaactttcctttctttttccctatatccaagcttaaaggttatagttttaaaataaacagtgagaggaacggccttcccttagtagacacagggaatgtatcacctttaaagtctgtgctgctaagattagaaataggcatggacaaatctaaacaaagtgctgctgtctgcatattgcttcagatcagctgtcgaagatttttgtttgttgcattttgtttgtgcttcaaggtccacagtccctttgagtaaccggctcctaaggccctggctgacacgctcaggttgcgaaagttggtggaaaactgaagcagtgttagaatgactgatgaggaggctgttgtgtttaagggtgaaatgatggcccacaggcatccatggacacctcctaaaggaagaaagtggctttgctctgtgaaggaggatagcagcagggcctggaaatgggagtttgcctccgcttcctcctgggaggttcctcaatcactccgtaaatacagggctgtggcgtgcaaacactaatgcaggtgtggttccatttctaccagcttagagaaggccacatgaaacaaatcagaacataaaaaaagaacaaaatgagaaaaccaaggacaaccaatcagaggtctgggactcaaaagatgtggcgtggttggatatttaaatgatgtcgcacagtgtggacagaaaaagatcacccccggggtggagaaagggggtggtca

SEQ ID NO: 80663 - DNA, 383 bp, Homo sapiens
gttatttcttgctcacataacaatttcaaggtaggcgtccctggtcagcaaacggcttgctttcacttggtagaaggacccagactctgccattcgtcagcacttcactcttgtctaaatccagtcagcagaaaggcaaggagaaagtatggagaaagcatacttgcttagcttcttagaagcttcttgcagtgttacacattacattggctcacattccagtcacagggaggcagccacttcctagaacaaacgctattctctggaggaggagccaggattttagtggacaaacaaccttctctcccacagttgatttctacttgtgaaaacctttgggacttagcttgaacatcacttgctcaaaaagcaaaaacaaacaa

SEQ ID NO: 80664 - DNA, 415 bp, Homo sapiens
tgctgtcattcatgaataactggcttggcccatgtgaaaaggacccctttattgtcagtatcactgatggcttcctataagtacatctgttaggaaaaagaactttcagtagttaatggaaattagaatgcaactgtcggccaggcacagtggctgacacctgtaatcccagcactttgggaggcccaggcaggtgaatcacgaggtcaagagattgagaccatcctggccaacatggtgaaaccttgtctctactaaaaaatacaaaattagttggcatggtgggacctgtagtcccagctactcaggaggctgagacaggggaatcacttgaacccaggaggcagaggttgcagtgagtcgagatcgtgccactgcattccagccttgcaacagggcgagataccatctcaaa

SEQ ID NO: 80665 - DNA, 421 bp, Homo sapiens
tcttctttaaaaacaaaatcttaaatttggtatttaggaaggtttatgtttctgttgtccttttgcttatactttttttaatgcccttagcgccccccccattttttatttagaatctgtattgtccatctttaatgacattctttaactttcacatgttgcttaaataccagttattgagttttcctactttccttttttcatctaccttctcttcctatttttagttgcatcattttttattcatcagaacatacagcacaaaacaaatagcattatcatataacctattattattataccctgttctcaccttaattttgatcttagatttgcaattaagtatatttaatgctaaattgctgaagtttctctagtcatttttttgtttgaataaagtttattttctagcagatttctt

SEQ ID NO: 80666 - DNA, 2216 bp, Homo sapiens
ctcctggagagccggctcggcgccgcccgcgcgcccgcgccagagcagccatgtaccggcgcagctacgtcttccagacccgcaaggagcagtacgagcacgccgacgaggcttcgcgcgccgccgagcccgagcgcccggccgacgagggctgggctggggcaacgagcctggcggcgctgcaggggctcggcgagcgcgtggccgcccacgtccagcgggcccgcgccctcgagcagcgccatgccgggctccggaggcagctggatgccttccagcgcctgggcgagctggccgggcccgaggacgccctcgcccgccaagtcgagagcaaccgccagcgcgtccgggacctggaggccgagcgcgcccggctggagcgccagggcaccgaggcgcagcgcgcgctcgacgagttccgaagcaagtatgaaaatgagtgcgaatgtcaactcctgctaaaagaaatgcttgaacggcttaacaaggaagctgatgaagccttgctgcataacctacgccttcagctggaagcccaatttctgcaagatgatatcagtgcggcaaaggacaggcacaagaagaatcttctggaagttcagacctatatcagcatcctgcagcagatcatccacaccactcctccagcatccattgtgacgagtgggatgagggaggagaagctcctgacggagcgggaggtggccgccctgcggagtcagctggaggagggccgggaggtgctctcccacctgcaggcgcagagagtggagctgcaggcacagacaacaactctggaacaagctattaaaagtgcccatgagtgttatgacgatgagattcagctttataacgagcagattgagacactgcgcaaggagattgaggagacagagcgggtcctggagaagtcttcttacgactgccggcagctggcggtcgcccagcaaaccctgaagaatgagctggaccggtatcatcgtatcatcgagattgaaggcaacaggctgacctctgccttcattgaaactcccattcccctgttcacccagagccatggagtctctctcagcactggatccggtgggaaagatcttaccagagctctgcaggatataacagcagcaaaaccaagacaaaaagccctccccaagaatgttccaaggagaaaagagattataacaaaagacaaaaccaacggagctctggaagatgcaccattaaaaggtttggaagacacaaagctggtacaggtggtacttaaagaggaaagtgaatctaagtttgaatcagaaagtaaagaagtaagtcccctgacacaagaaggggctccagaggatgtgccagatggagggcagataagcaaaggctttgggaaactatacaggaaggtcaaggagaaagtgagaagccccaaagagcctgagacccccactgagctctacaccaaagagcggcacgtgctggtcacaggggatgccaattacgtggaccctagattctatgtctcctccatcacagctaaaggtggggtggctgtttctgttgcggaagactctgtgctttatgacggccaggtggagccctctcctgagtcacccaagccccctttagagaatgggcaggtgggtctgcaggagaaagaagatggacaaccaattgaccagcagcctatagacaaggagattgagccagatggtgcagagctggaaggccctgaagagaaacgtgagggtgaggagcgggacgaagagtccaggagaccctgtgccatggtcacacccggtgcagaggaaccatctatacctgagcctccaaagcctgcggctgatcaggatggagctgaggtgcttgggactaggagcagaagcctgccagaaaaaggccctcccaaggctttggcctataagacagtggaagtggtggaatctatcgagaagatttccacggagagcattcagacatatgaagaaaccgctgtgatcgtggagaccatgattggaaagacaaagtcagacaagaagaaatcaggagagaagagctcttaaaatgcccaggcttgatgggataaaatgtatttggggccactgtaggggtaatgctttgatattttagagcaaatgataaaagggtgagggttcctgtttggattagaccatagttgacccatctggcattgccaacgaagccttcattaaaatgttttctttgcttgc

SEQ ID NO: 80667 - DNA, 2438 bp, Homo sapiens
aattttccatgctggaagtggaaggaattgcttgctcatttatattctctatcctgtggaaagccttccctcccaccccttgagccagtgagtcacttcctctctgcaaacctctaaagcctcctttctttctcagcccagacctggccctctggagagggttttggagtcctgggtaggcagggtacctcaggcagcaggcagcacaccttggatgtgagctgaatggattttcaaatttcacagaaggagcctccatgctggagaaagtatgtatgaaaatgagtgcgaatgtcaactcctgctaaaagaaatgcttgaacggcttaacaaggaagctgatgaagccttgctgcataacctacgccttcagctggaagcccaatttctgcaagatgatatcagtgcggcaaaggacaggcacaagaagaatcttctggaagttcagacctatatcagcatcctgcagcagatcatccacaccactcctccagcatccattgtgacgagtgggatgagggaggagaagctcctgacggagcgggaggtggccgccctgcggagtcagctggaggagggccgggaggtgctctcccacctgcaggcgcagagagtggagctgcaggcacagacaacaactctggaacaagctattaaaagtgcccatgagtgttatgacgatgagattcagctttataacgagcagattgagacactgcgcaaggagattgaggagacagagcgggtcctggagaagtcttcttacgactgccggcagctggcggtcgcccagcaaaccctgaagaatgagctggaccggtatcatcgtatcatcgagattgaaggcaacaggctgacctctgccttcattgaaactcccattcccctgttcacccagagccatggagtctctctcagcactggatccggtgggaaagatcttaccagagctctgcaggatataacagcagcaaaaccaagacaaaaagccctccccaagaatgttccaaggagaaaagagattataacaaaagacaaaaccaacggagctctggaagatgcaccattaaaaggtttggaagacacaaagctggtacaggtggtacttaaagaggaaagtgaatctaagtttgaatcagaaagtaaagaagtaagtcccctgacacaagaaggggctccagaggatgtgccagatggagggcagataagcaaaggctttgggaaactatacaggaaggtcaaggagaaagtgagaagccccaaagagcctgagacccccactgagctctacaccaaagagcggcacgtgctggtcacaggggatgccaattacgtggaccctagattctatgtctcctccatcacagctaaaggtggggtggctgtttctgttgcggaagactctgtgctttatgacggccaggtggagccctctcctgagtcacccaagccccctttagagaatgggcaggtgggtctgcaggagaaagaagatggacaaccaattgaccagcagcctatagacaaggagattgagccagatggtgcagagctggaaggccctgaagagaaacgtgagggtgaggagcgggacgaagagtccaggagaccctgtgccatggtcacacccggtgcagaggaaccatctatacctgagcctccaaagcctgcggctgatcaggatggagctgaggtgcttgggactaggagcagaagcctgccagaaaaaggccctcccaaggctttggcctataagacagtggaagtggtggaatctatcgagaagatttccacggagagcattcagacatatgaagaaaccgctgtgatcgtggagaccatgattggaaagacaaagtcagacaagaagaaatcaggagagaagagctcttaaaatgcccaggcttgatgggataaaatgtatttggggccactgtaggggtaatgctttgatattttagagcaaatgataaaagggtgagggttcctgtttggattagaccatagttgacccatctggcattgccaacgaagccttcattaaaatgttttctttgcttgcacatcctttgtctaattaatagggaccttgggaatgtaggtgggtcagcttcatgaggacagggatgctctgttaaatggccaccataccgtcctcatttaggaaagagacatgctcttcatcctggttcataagtctcgttagagactcagatagcatctggatttcacacagaaacatgctggttgatgacatcggctcatcttcattccatttcaagcacaagtgtgtgcttatgtggatgagtgttttgctagagatgaaattattaaaggcatctctcttaatgtggattcccccagaagctgatcccaaagcagagaatgcgaagtttcattggaagatgaatttaggatgcacaagtaggagagtggag

SEQ ID NO: 80668 - DNA, 2592 bp, Homo sapiens
ctcctggagagccggctcggcgccgcccgcgcgcccgcgccagagcagccatgtaccggcgcagctacgtcttccagacccgcaaggagcagtacgagcacgccgacgaggcttcgcgcgccgccgagcccgagcgcccggccgacgagggctgggctggggcaacgagcctggcggcgctgcaggggctcggcgagcgcgtggccgcccacgtccagcgggcccgcgccctcgagcagcgccatgccgggctccggaggcagctggatgccttccagcgcctgggcgagctggccgggcccgaggacgccctcgcccgccaagtcgagagcaaccgccagcgcgtccgggacctggaggccgagcgcgcccggctggagcgccagggcaccgaggcgcagcgcgcgctcgacgagttccgaagcaagtatgaaaatgagtgcgaatgtcaactcctgctaaaagaaatgcttgaacggcttaacaaggaagctgatgaagccttgctgcataacctacgccttcagctggaagcccaatttctgcaagatgatatcagtgcggcaaaggacaggcacaagaagaatcttctggaagttcagacctatatcagcatcctgcagcagatcatccacaccactcctccagcatccattgtgacgagtgggatgagggaggagaagctcctgacggagcgggaggtggccgccctgcggagtcagctggaggagggccgggaggtgctctcccacctgcaggcgcagagagtggagctgcaggcacagacaacaactctggaacaagctattaaaagtgcccatgagtgttatgacgatgagattcagctttataacgagcagattgagacactgcgcaaggagattgaggagacagagcgggtcctggagaagtcttcttacgactgccggcagctggcggtcgcccagcaaaccctgaagaatgagctggaccggtatcatcgtatcatcgagattgaaggcaacaggctgacctctgccttcattgaaactcccattcccctgttcacccagagccatggagtctctctcagcactggatccggtgggaaagatcttaccagagctctgcaggatataacagcagcaaaaccaagacaaaaagccctccccaagaatgttccaaggagaaaagagattataacaaaagacaaaaccaacggagctctggaagatgcaccattaaaaggtttggaagacacaaagctggtacaggtggtacttaaagaggaaagtgaatctaagtttgaatcagaaagtaaagaagtaagtcccctgacacaagaaggggctccagaggatgtgccagatggagggcagataagcaaaggctttgggaaactatacaggaaggtcaaggagaaagtgagaagccccaaagagcctgagacccccactgagctctacaccaaagagcggcacgtgctggtcacaggggatgccaattacgtggaccctagattctatgtctcctccatcacagctaaaggtggggtggctgtttctgttgcggaagactctgtgctttatgacggccaggtggagccctctcctgagtcacccaagccccctttagagaatgggcaggtgggtctgcaggagaaagaagatggacaaccaattgaccagcagcctatagacaaggagattgagccagatggtgcagagctggaaggccctgaagagaaacgtgagggtgaggagcgggacgaagagtccaggagaccctgtgccatggtcacacccggtgcagaggaaccatctatacctgagcctccaaagcctgcggctgatcaggatggagctgaggtgcttgggactaggagcagaagcctgccagaaaaaggccctcccaaggctttggcctataagacagtggaagtggtggaatctatcgagaagatttccacggagagcattcagacatatgaagaaaccgctgtgatcgtggagaccatgattggaaagacaaagtcagacaagaagaaatcaggagagaagagctcttaaaatgcccaggcttgatgggataaaatgtatttggggccactgtaggggtaatgctttgatattttagagcaaatgataaaagggtgagggttcctgtttggattagaccatagttgacccatctggcattgccaacgaagccttcattaaaatgttttctttgcttgcacatcctttgtctaattaatagggaccttgggaatgtaggtgggtcagcttcatgaggacagggatgctctgttaaatggccaccataccgtcctcatttaggaaagagacatgctcttcatcctggttcataagtctcgttagagactcagatagcatctggatttcacacagaaacatgctggttgatgacatcggctcatcttcattccatttcaagcacaagtgtgtgcttatgtggatgagtgttttgctagagatgaaattattaaaggcatctctcttaatgtggattcccccagaagctgatcccaaagcagagaatgcgaagtttcattggaagatgaatttaggatgcacaagtaggagagtggag

SEQ ID NO: 80669 - DNA, 1781 bp, Homo sapiens
ctcctggagagccggctcggcgccgcccgcgcgcccgcgccagagcagccatgtaccggcgcagctacgtcttccagacccgcaaggagcagtacgagcacgccgacgaggcttcgcgcgccgccgagcccgagcgcccggccgacgagggctgggctggggcaacgagcctggcggcgctgcaggggctcggcgagcgcgtggccgcccacgtccagcgggcccgcgccctcgagcagcgccatgccgggctccggaggcagctggatgccttccagcgcctgggcgagctggccgggcccgaggacgccctcgcccgccaagtcgagagcaaccgccagcgcgtccgggacctggaggccgagcgcgcccggctggagcgccagggcaccgaggcgcagcgcgcgctcgacgagttccgaagcaagtatgaaaatgagtgcgaatgtcaactcctgctaaaagaaatgcttgaacggcttaacaaggaagctgatgaagccttgctgcataacctacgccttcagctggaagcccaatttctgcaagatgatatcagtgcggcaaaggacaggcacaagaagaatcttctggaagttcagacctatatcagcatcctgcagcagatcatccacaccactcctccagcatccattgtgacgagtgggatgagggaggagaagctcctgacggagcgggaggtggccgccctgcggagtcagctggaggagggccgggaggtgctctcccacctgcaggcgcagagagtggagctgcaggcacagacaacaactctggaacaagctattaaaagtgcccatgagtgttatgacgatgagattcagctttataacgagcagattgagacactgcgcaaggagattgaggagacagagcgggtcctggagaagtcttcttacgactgccggcagctggcggtcgcccagcaaaccctgaagaatgagctggaccggtatcatcgtatcatcgagattgaaggcaacaggctgacctctgccttcattgaaactcccattcccctgttcacccagagccatggagtctctctcagcactggatccggtgggaaagatcttaccagagctctgcaggatataacagcagcaaaaccaagacaaaaagccctccccaagaatgttccaaggagaaaagagattataacaaaagacaaaaccaacggagctctggaagatgcacaaccaattgaccagcagcctatagacaaggagattgagccagatggtgcagagctggaaggccctgaagagaaacgtgagggtgaggagcgggacgaagagtccaggagaccctgtgccatggtcacacccggtgcagaggaaccatctatacctgagcctccaaagcctgcggctgatcaggatggagctgaggtgcttgggactaggagcagaagcctgccagaaaaaggccctcccaaggctttggcctataagacagtggaagtggtggaatctatcgagaagatttccacggagagcattcagacatatgaagaaaccgctgtgatcgtggagaccatgattggaaagacaaagtcagacaagaagaaatcaggagagaagagctcttaaaatgcccaggcttgatgggataaaatgtatttggggccactgtaggggtaatgctttgatattttagagcaaatgataaaagggtgagggttcctgtttggattagaccatagttgacccatctggcattgccaacgaagccttcattaaaatgttttctttgcttgc

SEQ ID NO: 80670 - DNA, 2425 bp, Homo sapiens
  misc_feature (416)..(416): n is a, c, g, or t
gctgtgggtactaaaaccacttttaagaaccactgacctgggtatagaagaaactatttgtaaccaggctttttcttcttttggtccttaggtaaataaaactcaagttgatgaggtatgattttaccttaaatcaaaaccatttttggtaaagtactaccttagctctattgtaaggtaagtgtaaattagatttgctttgacttagttgctacagaccacaattataggacaactaactgaggaatttattcacttgtcccttcttttgaacctcactgtgctctggcttgccaggaggtgcaagtgtcgtccccgctttgtacttggcgctccaggcctgggtcacttcacttgagttatcagaggcaaccgtctagtttgacaaactaccggaggctcctgatagagaaggncgtgggcgccaatctaggagacaaagcctgagccgctgcggtgagccaacccaaacccatccgcgggtcttctttccagagacattttcggagccgagggcgcctctgcgagagcgctgcgaacaggttccgacgcgccggagatcgcgcgacgaatctgcgcctcgaaccctcgctttccagcagtcgccggattgctgctccacagggagccaacgcgcttgaggaccagcccagccggggctctctggatcagtaggctgtgcaggctgcgagctcgttgacgcatctcagcccactcccttgtcctcccgcctggcgaagatgtccgccaagcctgaagtcagcttagtgcgcgaggcttctcggcagatcgtggccggtggttctgcaggtcttgtagaaatttgcctgatgcaccccctagatgtggtgaaaaccaggtttcagattcagagatgtgcaaccgatccaaacagttataaaagcttggtagacagctttcgaatgattttccaaatggaagggttatttggtttttacaagggaattctgccacctatcttggctgaaaccccaaaaagagcagtgaagtttttcacctttgagcagtacaagaaattgctgggatatgtgtcactgtcaccagcattgacattcgccattgctggattgggatctggactaacagaagccattgtagttaacccttttgaggtagtaaaagttggcttgcaagcaaatcggaacacatttgcagagcaaccatccactgtgggttatgcaagacaaatcattaagaaggaaggctggggactccagggcctcaacaaaggattaactgcaactttgggacgacatggagttttcaacatggtttattttggcttctactacaatgtcaaaaacatgattcctgtcaataaggatccaatcttggagttttggagaaaatttgggattggtcttctctcggggacaatagcctcagtcattaacatcccttttgatgttgccaaaagtaggattcaagggcctcaaccagttcctggagagatcaagtacagaacctgttttaaaacaatggcaacagtctatcaggaagaagggattttagctttgtacaaaggcctgcttcccaagattatgagacttggaccaggtggtgcagtgatgctgctggtttatgaatacacctattcatggcttcaagagaactggtgattgcctatgaagtgtttttcccccttgagataatggatatttgctatgcagcaccatgaagaagagagactatcgatcggccaggtgtataattatgaaggagaaaactgttcaagaacaaaatctattttaatactttaaaaaatgtctataggcaacttgagattatagttttggctgtataaataaaactgtgagaagaaaaaaataatatgaaacaatgaggtatttaaagtgaatatagaaaaatagcatagaaatcatatatttatttcataaaataaatagaaactttgtctcctgtgttcctcttcaatgcttcacaatgaaaattcattgtattgatcagcatttttcctaagaggtctagaaatgcttaaactattgaaaataaatcaaattattcaaagactggattaaaaaaaagttaagccaaaatttaagcagtttttataatgaattaaattattccataaataatatttaaagagcacaagaaaaattttttaaagtgcactaaaatgaccttttaagaatgtttaattttatgaatactatgttaaaatgtaaatctgttggttttttttagtaactatgcacatatcagctctattttcctacatctactttatatctcatattgctgtaagataataaataggtattttaaaacattgtttaaaacagaatgttaaaacactgttgtttaagcatgtttaaatcaaggtattccaaatctcttctaacacaagtaggaaacatgaaataaaatttactttcctcca

SEQ ID NO: 80671 - DNA, 1065 bp, Homo sapiens
  misc_feature (416)..(416): n is a, c, g, or t
gctgtgggtactaaaaccacttttaagaaccactgacctgggtatagaagaaactatttgtaaccaggctttttcttcttttggtccttaggtaaataaaactcaagttgatgaggtatgattttaccttaaatcaaaaccatttttggtaaagtactaccttagctctattgtaaggtaagtgtaaattagatttgctttgacttagttgctacagaccacaattataggacaactaactgaggaatttattcacttgtcccttcttttgaacctcactgtgctctggcttgccaggaggtgcaagtgtcgtccccgctttgtacttggcgctccaggcctgggtcacttcacttgagttatcagaggcaaccgtctagtttgacaaactaccggaggctcctgatagagaaggncgtgggcgccaatctaggagacaaagcctgagccgctgcggtgagccaacccaaacccatccgcgggtcttctttccagagacattttcggagccgagggcgcctctgcgagagcgctgcgaacaggttccgacgcgccggagatcgcgcgacgaatctgcgcctcgaaccctcgctttccagcagtcgccggattgctgctccacagggagccaacgcgcttgaggaccagcccagccggggctctctggatcagtaggctgtgcaggctgcgagctcgttgacgcatctcagcccactcccttgtcctcccgcctggcgaagatgtccgccaagcctgaagtcagcttagtgcgcgaggcttctcggcagatcgtggccggtggttctgcaggtaaggacagcccgccctgccccgccggaggctagtcgctttccccaccgcgtgtcctgaaaccgttgcccagacaggtctccttactgaagttctgccctcttcctcaaaattcagcgctcccggagcagtgcttgagcccctagaggcgcgagagcagaggaggccgggagttgattgcgagtagtgggtgccccaagtaaagttgcctcggcgtccgcgccggccgctctcgggttcccggcattgtccgtt

SEQ ID NO: 80672 - DNA, 3123 bp, Homo sapiens
tatatatgcatatgggcgttcgtacttggccagcgccatcttgtctgtgccctacgtgtgcacatgaactggatcctgatcgagaatatggctccaccctagtcagaacttgccatgtgcccaggggtcttgtagaaatttgtgtgatgaatcccagatagatgtgtggagaatacactagagtgattcgtgattaaacgagaggtgaatgcttggcacgtatttatggttgagacccgaaaggagcagtgaagacattcgccattgctggattgggatctggactaacagaagccattgtagttaacccttttgaggtagtaaaagttggcttgcaagcaaatcggaacacatttgcagagcaaccatccactgtgggttatgcaagacaaatcattaagaaggaaggctggggactccagggcctcaacaaaggattaactgcaactttgggacgacatggagttttcaacatggtttattttggcttctactacaatgtcaaaaacatgattcctgtcaataaggatccaatcttggagttttggagaaaatttgggattggtcttctctcggggacaatagcctcagtcattaacatcccttttgatgttgccaaaagtaggattcaagggcctcaaccagttcctggagagatcaagtacagaacctgttttaaaacaatggcaacagtctatcaggaagaagggattttagctttgtacaaaggcctgcttcccaagattatgagacttggaccaggtggtgcagtgatgctgctggtttatgaatacacctattcatggcttcaagagaactggtgattgcctatgaagtgtttttcccccttgagataatggatatttgctatgcagcaccatgaagaagagagactatcgatcggccaggtgtataattatgaaggagaaaactgttcaagaacaaaatctattttaatactttaaaaaatgtctataggcaacttgagattatagttttggctgtataaataaaactgtgagaagaaaaaaataatatgaaacaatgaggtatttaaagtgaatatagaaaaatagcatagaaatcatatatttatttcataaaataaatagaaactttgtctcctgtgttcctcttcaatgcttcacaatgaaaattcattgtattgatcagcatttttcctaagaggtctagaaatgcttaaactattgaaaataaatcaaattattcaaagactggattaaaaaaaagttaagccaaaatttaagcagtttttataatgaattaaattattccataaataatatttaaagagcacaagaaaaattttttaaagtgcactaaaatgaccttttaagaatgtttaattttatgaatactatgttaaaatgtaaatctgttggttttttttagtaactatgcacatatcagctctattttcctacatctactttatatctcatattgctgtaagataataaataggtattttaaaacattgtttaaaacagaatgttaaaacactgttgtttaagcatgtttaaatcaaggtattccaaatctcttctaacacaagtaggaaacatgaaataaaatttactttcctccacatagttctctttgaagataagttttgttgatgagatattgtcatgttaaatcacaaattggaaacacctttggacccatttgtcagccatcagtatttgcatccaaatacctttattcagcatgcctacctgtgccatttttaggaagaatgtatagaacagaactgcattttcaggttattagttttaaacgacaacttcaggtgggaagtcagctgtctgcagtattaaaatatgtatgatgaaggggaaatgttctgaaaaagaaatacacttagcatttctaaggattactatactaacatgtatcaacaaaaatatctccttggtcttgatgtaaccaaacttgattttatatctgcatccagagatgatgctgattcagtaaagtcaacaagaataactgaaagtccatatgacacctgtcctaagttactaccgtgggctatttctactacggggctatttcactaaagcattttgaaaataaaaagtaaaagataacatggtaattattactttttattaatttagagcatttgaagtataaaaataaaaggcttttgacatactgtatatacatacatagccttctgttgtacatcctttccaacgtgttttttaaaatttatatttcagtccaatattcaataaaagggtcattaaaaacaaaacaaaattgtgaaaaaaaagaaataagaatgtgtctctgttgcacaactgcattctatccttgcaggtaatattcttacatccaatgagagcgctgcctgcatagaggtcatgaaattgaacctttaacctctccatgtggatcagatagaaaaggatttctgaagagtgcatttgccagtttaaaagcaacacttttaccatctatgagatagaggaaatatgtcaacattaaccaataataatctttaaaagttaaccctttaatccatcctattttccttctcgtattttaaaaagtggctttaaatcataattttctttgaatagcaaattgtatctgatatcttttaaaaattactccatgtgaattcactgttaagacctagagggagaaaaggaaacttcaataccattaatattagattttttaaaatacaagaaccagaaaaaaattataaatagcacaataacaagagatttcttaatttagataaagaaaataacattatttgcatttccacacaagcaagtaatattttttaaagccccctaacagccacctaaaaacatttgataaagaatagttctgtaccttacatcagtttttcagatgacaggagagtccctgtatggtatggttttaaagaagtctccaccaaaatattggattggatctttgttccattcagtttatagtctattttctcaccagactgggaactccagatgtcaatggaagttttacaagatcaaaggaagactatggccctgagagttcatctgctccttctgcttattcttctcctgaagttataatcctctatttgtagcactgaat

SEQ ID NO: 80673 - DNA, 3939 bp, Homo sapiens
  misc_feature (416)..(416): n is a, c, g, or t
gctgtgggtactaaaaccacttttaagaaccactgacctgggtatagaagaaactatttgtaaccaggctttttcttcttttggtccttaggtaaataaaactcaagttgatgaggtatgattttaccttaaatcaaaaccatttttggtaaagtactaccttagctctattgtaaggtaagtgtaaattagatttgctttgacttagttgctacagaccacaattataggacaactaactgaggaatttattcacttgtcccttcttttgaacctcactgtgctctggcttgccaggaggtgcaagtgtcgtccccgctttgtacttggcgctccaggcctgggtcacttcacttgagttatcagaggcaaccgtctagtttgacaaactaccggaggctcctgatagagaaggncgtgggcgccaatctaggagacaaagcctgagccgctgcggtgagccaacccaaacccatccgcgggtcttctttccagagacattttcggagccgagggcgcctctgcgagagcgctgcgaacaggttccgacgcgccggagatcgcgcgacgaatctgcgcctcgaaccctcgctttccagcagtcgccggattgctgctccacagggagccaacgcgcttgaggaccagcccagccggggctctctggatcagtaggctgtgcaggctgcgagctcgttgacgcatctcagcccactcccttgtcctcccgcctggcgaagatgtccgccaagcctgaagtcagcttagtgcgcgaggcttctcggcagatcgtggccggtggttctgcaggtcttgtagaaatttgcctgatgcaccccctagatgtggtgaaaaccaggtttcagattcagagatgtgcaaccgatccaaacagttataaaagcttggtagacagctttcgaatgattttccaaatggaagggttatttggtttttacaagggaattctgccacctatcttggctgaaaccccaaaaagagcagtgaagtttttcacctttgagcagtacaagaaattgctgggatatgtgtcactgtcaccagcattgacattcgccattgctggattgggatctggactaacagaagccattgtagttaacccttttgaggtagtaaaagttggcttgcaagcaaatcggaacacatttgcagagcaaccatccactgtgggttatgcaagacaaatcattaagaaggaaggctggggactccagggcctcaacaaaggattaactgcaactttgggacgacatggagttttcaacatggtttattttggcttctactacaatgtcaaaaacatgattcctgtcaataaggatccaatcttggagttttggagaaaatttgggattggtcttctctcggggacaatagcctcagtcattaacatcccttttgatgttgccaaaagtaggattcaagggcctcaaccagttcctggagagatcaagtacagaacctgttttaaaacaatggcaacagtctatcaggaagaagggattttagctttgtacaaaggcctgcttcccaagattatgagacttggaccaggtggtgcagtgatgctgctggtttatgaatacacctattcatggcttcaagagaactggtgattgcctatgaagtgtttttcccccttgagataatggatatttgctatgcagcaccatgaagaagagagactatcgatcggccaggtgtataattatgaaggagaaaactgttcaagaacaaaatctattttaatactttaaaaaatgtctataggcaacttgagattatagttttggctgtataaataaaactgtgagaagaaaaaaataatatgaaacaatgaggtatttaaagtgaatatagaaaaatagcatagaaatcatatatttatttcataaaataaatagaaactttgtctcctgtgttcctcttcaatgcttcacaatgaaaattcattgtattgatcagcatttttcctaagaggtctagaaatgcttaaactattgaaaataaatcaaattattcaaagactggattaaaaaaaagttaagccaaaatttaagcagtttttataatgaattaaattattccataaataatatttaaagagcacaagaaaaattttttaaagtgcactaaaatgaccttttaagaatgtttaattttatgaatactatgttaaaatgtaaatctgttggttttttttagtaactatgcacatatcagctctattttcctacatctactttatatctcatattgctgtaagataataaataggtattttaaaacattgtttaaaacagaatgttaaaacactgttgtttaagcatgtttaaatcaaggtattccaaatctcttctaacacaagtaggaaacatgaaataaaatttactttcctccacatagttctctttgaagataagttttgttgatgagatattgtcatgttaaatcacaaattggaaacacctttggacccatttgtcagccatcagtatttgcatccaaatacctttattcagcatgcctacctgtgccatttttaggaagaatgtatagaacagaactgcattttcaggttattagttttaaacgacaacttcaggtgggaagtcagctgtctgcagtattaaaatatgtatgatgaaggggaaatgttctgaaaaagaaatacacttagcatttctaaggattactatactaacatgtatcaacaaaaatatctccttggtcttgatgtaaccaaacttgattttatatctgcatccagagatgatgctgattcagtaaagtcaacaagaataactgaaagtccatatgacacctgtcctaagttactaccgtgggctatttctactacggggctatttcactaaagcattttgaaaataaaaagtaaaagataacatggtaattattactttttattaatttagagcatttgaagtataaaaataaaaggcttttgacatactgtatatacatacatagccttctgttgtacatcctttccaacgtgttttttaaaatttatatttcagtccaatattcaataaaagggtcattaaaaacaaaacaaaattgtgaaaaaaaagaaataagaatgtgtctctgttgcacaactgcattctatccttgcaggtaatattcttacatccaatgagagcgctgcctgcatagaggtcatgaaattgaacctttaacctctccatgtggatcagatagaaaaggatttctgaagagtgcatttgccagtttaaaagcaacacttttaccatctatgagatagaggaaatatgtcaacattaaccaataataatctttaaaagttaaccctttaatccatcctattttccttctcgtattttaaaaagtggctttaaatcataattttctttgaatagcaaattgtatctgatatcttttaaaaattactccatgtgaattcactgttaagacctagagggagaaaaggaaacttcaataccattaatattagattttttaaaatacaagaaccagaaaaaaattataaatagcacaataacaagagatttcttaatttagataaagaaaataacattatttgcatttccacacaagcaagtaatattttttaaagccccctaacagccacctaaaaacatttgataaagaatagttctgtaccttacatcagtttttcagatgacaggagagtccctgtatggtatggttttaaagaagtctccaccaaaatattggattggatctttgttccattcagtttatagtctattttctcaccagactgggaactccagatgtcaatggaagttttacaagatcaaaggaagactatggccctgagagttcatctgctccttctgcttattcttctcctgaagttataatcctctatttgtagcactgaat

SEQ ID NO: 80674 - DNA, 1443 bp, Homo sapiens
ctgttcaggctgggatgagccacagcacgcggcaacgttgccaggatacaaacaccaccagggaaagaggcctctgcaactgtacgtgcgttaattcaggcaccatttatcaccaatacaagactgagaaacacaactgcggggaatatcctggtgatgctaagggcagcgacagttctcagtggattctgctggagtgtttcttattttttttttcagaggcaggtcttgctctgttgcctaggctgcacttgaacttccgggctcagctgaacctcccaagtagcagggactacaggtgcgtgccactgcacccggctctgtgtattgtgtattgttaattccattgacttgtatgacaccgtttagaccagcccacttttccttttaaaagagaaactggttccctctcttttgaagctctatcaagatctgcttattttggtatgtgaagaaaagttaccttcccttgtccagaagccctgctctggggaagggaggataaagtcatggatgagggtagcactgcagaggctgagaaatttggggaaaattcccactcacgtaagctgacactccgcaggtgtacacttgatgctatgggtatactgtcctatctaaaaataagtattatttagcataggtaagcacagaatttactagaaccaacaaggagtactcaattaactaaaaggcagagggtacgcaggtgtctagcatggccgggtggctgtggcagtgggaaccaggtcccttctctagtttctgtgcctctgttaaggttggagcacctctcattccaccctaacagcaaggtccaaactgcccatgaggaaccctttccatgaattaaaggccaaccttcctcgagtgcccacaaatcactgaacctcgctcagaccttcccctctactggggattcgactcggtttcactgggatttcacctctaagaaactgaagtcatcaaccaactgggcctctggagaaaaacaaaaagcctataaaccaccatcccccagacacatcacatcctcatacccacacctaccatgcaaccacagggacacacatacctccaaactcctctacattcaggaggccacaaatccaggcagtaacaagcctccaaactcactcagatcagaggaaaagaacattttaaaaagtaagaacacagccaggcacagtggttcacacctgtaattccagcactttggaaggccaaggcgggcggatcatctgaggtcaggagttccagaccagcctggccaacatagcaaaaccccatctctcctaaaaatacaaaaattagccagatgtgttggcaagcacctgtattcccagctactcaggaggctgaggtgggagaatggcttgaacctgggaggcgaaggttgcaatgagcagagattgtgctgctgcactccagcctgggcaacag

SEQ ID NO: 80675 - DNA, 591 bp, Homo sapiens
gttcgacctaacaacgagggtccaatcgggcctcggggttcctgggacagtactagagtgccagcctgctggagtgctctcaatatgttgaccagtgccaggacggtcccctctagtgggaaagtatcagcgacaaacgggaattcagccagttcatatgcagtgttataaagctgtgggcctctggagaaaaacaaaaagcctataaaccaccatcccccagacacatcacatcctcatacccacacctaccatgcaaccacagggacacacatacctccaaactcctctacattcaggaggccacaaaaaaaagtaagaacacagccaggcacagtggttcacacctgtaattccagcactttggaaggccaaggcgggcggatcatctgaggtcaggagttccagaccagcctggccaacatagcaaaaccccatctctcctaaaaatacaaaaattagccagatgtgttggcaagcacctgtattcccagctactcaggaggctgaggtgggagaatggcttgaacctgggaggcgaaggttgcaatgagcagagattgtgctgctgcactccagcctgggcaacag

SEQ ID NO: 80676 - DNA, 1389 bp, Homo sapiens
ctgttcaggctgggatgagccacagcacgcggcaacgttgccaggatacaaacaccaccagggaaagaggcctctgcaactgtacgtgcgttaattcaggcaccatttatcaccaatacaagactgagaaacacaactgcggggaatatcctggtgatgctaagggcagcgacagttctcagtggattctgctggagtgtttcttattttttttttcagaggcaggtcttgctctgttgcctaggctgcacttgaacttccgggctcagctgaacctcccaagtagcagggactacaggtgcgtgccactgcacccggctctgtgtattgtgtattgttaattccattgacttgtatgacaccgtttagaccagcccacttttccttttaaaagagaaactggttccctctcttttgaagctctatcaagatctgcttattttggtatgtgaagaaaagttaccttcccttgtccagaagccctgctctggggaagggaggataaagtcatggatgagggtagcactgcagaggctgagaaatttggggaaaattcccactcacgtaagctgacactccgcaggtgtacacttgatgctatgggtatactgtcctatctaaaaataagtattatttagcataggtaagcacagaatttactagaaccaacaaggagtactcaattaactaaaaggcagagggtacgcaggtgtctagcatggccgggtggctgtggcagtgggaaccaggtcccttctctagtttctgtgcctctgttaaggttggagcacctctcattccaccctaacagcaaggtccaaactgcccatgaggaaccctttccatgaattaaaggccaaccttcctcgagtgcccacaaatcactgaacctcgctcagaccttcccctctactggggattcgactcggtttcactgggatttcacctctaagaaactgaagtcatcaaccaactgggcctctggagaaaaacaaaaagcctataaaccaccatcccccagacacatcacatcctcatacccacacctaccatgcaaccacagggacacacatacctccaaactcctctacattcaggaggccacaaaaaaaagtaagaacacagccaggcacagtggttcacacctgtaattccagcactttggaaggccaaggcgggcggatcatctgaggtcaggagttccagaccagcctggccaacatagcaaaaccccatctctcctaaaaatacaaaaattagccagatgtgttggcaagcacctgtattcccagctactcaggaggctgaggtgggagaatggcttgaacctgggaggcgaaggttgcaatgagcagagattgtgctgctgcactccagcctgggcaacag

SEQ ID NO: 80677 - DNA, 669 bp, Homo sapiens
ctcatagaatcctcacaactgctagggaagtatcatcacctctactttattgaatgagaaaaatgagctctgggaggttaaataactaacccaggctgatgggtggtgaggctgaactggctcttaaccagtagctttcctgtagtgtcccacaaggaaggagcacactgcatattaaaattattagataacaacattagttttatgatttactaaactcttctcttcttgactctttgacgaaggtaaagtagatagctttcctgaatttttttttttaataaaataagacaaatttgtgagatcttaatacttgtctcttgggagagaatgagactaaagatcttaaatattccttggccacatcattcattatctgatgctatttataaaagcatagaacaatcagacaagaatacctataaaattaaaaaaaaaaaagaaagaaaaacatagaacaagaagtttctaatctgcagaactgatgtggctatcacagggccagctgaagatcttaggagtgttagcaaacctagatgatggtttgtttaaccctgggtttggggtataccaattgcttactaagattaatatttcattctttacctttcaaccaaattaggctttctttgttttcatttgttgctacttgtgcctaggctcacattc

SEQ ID NO: 80678 - DNA, 454 bp, Homo sapiens
gaattcttctttttcatggagggggtcagtatataacattctatatacttaacttttgcatcaggtaaaacacacccatctccccgccattcccactccccatcttccttcccgtctctctccacccatattctaccattatctgttctctctttacccatcatccccttccaaaagacatttaatttctcaagatgtttccataggccaagaaagctttctctagcctcatgacattctgatttcactcttcgtagaacattcattgtgctcacctccgagcactgggctgggagtcgggagtgcactgccttccccatctttgcgtgtagggactatctagagcaggggtgtccagtcgtttggcttccctgggccacactggaagaagaattgtcttgggccacacataaaatacactaacattaacgatagctgatgagcaaaaaaaaaa

SEQ ID NO: 80679 - DNA, 672 bp, Homo sapiens
cagagattaaagagctgaggtggtgagtggttgtgatgtaaatgccatcattttctcaatactggtggccagcgttagagggaaagaggctgaaggcctgaccttgctgatgtccagccttctctgtcatggctctgctggtctgtgtcctccaccctgtggccacaccccaccttttcaagagcccttctttgaaagtcaggagacctaaggttgaggactggtcctacctttgtctttgaatagtttttagcctgaagcgtcttatcccctggtgggtgcttggatatttgtgggggacaattttggttgtcacaattatggttattatattatttttgagttttgttttatttgaagataataatgatggcattataaatattaattataaaacgagggtgctgggtgggcgtggcgactgacgcctataatcccagtgtggatcacttgaagttaggagtttaagactagcctggccaacacggtgaaaccctgtctctactaaaaatacaaaaattagctgggtgtggtggtgggtgcctgtaatcccagctactcaggaggctgagacaggagaattgcttgcccaggaggtggagtttgcagtgagctgagatcatgcccctgcactccagcctgggcgacacagcaagacagtatctcaaaaaa

SEQ ID NO: 80680 - DNA, 663 bp, Homo sapiens
cagggagccggtggcgccctcgctcgagaaggagtcgggaagaggagagtggctttcgggaagaggagagtggctttcgggaagcatctcctctgaggaagaggcggcggcggcggcggcatttacggagagaaaaaattctctgaaaattccatttgaaacactgaaaaaacaccatctattttcttttggaaaatggcacatggatggaactggaagccattatcctcagcaaactaatacaggaacaaaaaaaccaaacaccactttttctcacttacaaatgggagctgaacaatgagaacgcatggacacagagtgcatagctacacatggaacttcaaacaagagaaccaaactgagctaaattagagttcaaccctttctgctggctctcctggtcaatatcagaggttcccagaccacgttaccacccataatctattggcatgttacacagggctataagtagcacggcaaacctcatttctgcttacacattactcagttacctttgtcattatcagctattttactaaatgttcaagtacgaatatttgcttaattttataaaatgtttgtaaaatatctaccccgataatcacgtgttttaacatgtgtatggaagtaataaaatttatggatttcctaatgttgaaccaa

SEQ ID NO: 80681 - DNA, 425 bp, Homo sapiens
aacttgcggctctggaacagatgcactgagggccagagggtcagggccatcccctgtggctggggctgccgggagggtgagccccacctcggaggtgtgcaggctggagcagcatgctggagctgagattctgtgggtgagagagtgggagagtgtctgtgggctgagcactggtcctttctgactcacagctctggggcccattccgggacaggcttgaagaagtctcggccattgcctgccctgctgagcacgaggggaggccagaaccgtgtgcagtggccctgcccttctgcttgagctcttcctgcagctctggggaccctcttagtcccgactgcctgtctccccagcctatctgtcccggggcctgagtccctctgctgtgcccgctgcaggtccccaataaagcctgtgccctggca

SEQ ID NO: 80682 - DNA, 442 bp, Homo sapiens
agaaactctcaactgtgacagtaaacatctgagtgatttttagaaccattttaatatctctgctctagaatcgagaatgccctgttagttctgatttttaatatacaaatttgaagccactagttaggcagtaaaatatgtattagaacataactatagatttttacccaatagatcaattagtatgaaatttaggatgatatataagtacaacagaatttattcctttgaggtatgtattttcaaagtgtaatttgtgtaattaagtatgtttattcttcgagaccatcctggctaacacggtgaaaccccgtctctactaaaaatacaaaaaattagccgggcgtggtagcgggcgcctgtagtcccagctactcgggaggctgaggcaggagaatggcgtgaacccgggaggcgaagcttgcagtgagccgagatcgcg

SEQ ID NO: 80683 - DNA, 279 bp, Homo sapiens
ttctgtttttttccttgcttgtatgtaaatctcctgatttttattacattccagacattacatgtaagaagacagcagatgcagaagcaaaaaatatttttgcctggaaataataatgattcttttagtatcaggccattggtgttgggaaatggggttgagtagggaagttgagtcaatctagatagaaattgatttgaatttgtgtttcattgttgcaaactgaccacaaagttgaagtctctcccttagtgggctacctttaacatgcgcttgcaa

SEQ ID NO: 80684 - DNA, 375 bp, Homo sapiens
aacgtttgaacctgggaggtagaggttgcagtagccaagatcacgccactgcattccagcctgggcaacggagtgagactctgtctctaaataaataaataaataaatataaataaataaaacaaaaaattaaaagttgccctaaatattaaagtttaagccccaaagtgctagttttaggagacatcaacattatggatgctgtttactctgagggtaagcccatcatacatcttttacattttaaaattaaatatgatgctgaaatgttgaggttgaaatatactgatgtctccaacttactttgaaatgcatgaaaaaataaaatgaattcatggataggtagatggtaggtatgtgagaaagcagataccg

SEQ ID NO: 80685 - DNA, 896 bp, Homo sapiens
ggaaacattcttaaaggggcaaggcttgtgtctttcactttaaatttttgaaaaaaaaaaatttttttttgagatggagtcttgctctgtcgcccaggctggagtgcagtggcacgatctcagctcactgcaagctccacctcccgggttcacgcaattcctacctcagcctcccgagtggctgggactacaggcgcccgctaccacgcctggctaatttttttgtatttttagtagagacggggttccaccgcgttagccaggatggtctcgatctcgtgacctcgtgatccgcctgcctcggcctcccacagtgctgggattacaggcgtcagccaccgcgcccggccttgaaaaatgttttaatccacctttttacttggcagaattggtgttttaggccacaaatttcctttcaacaagcatattttcttgctaattattaactttctttattgcttattaaccttaaagtccctctagtgaaaacactcttgggtaaaattgcctggttgaaaatctttgaactccatctatttttttgtcgttgctggaataatgaaaggttaagaatttctaaactggccaggcacagtggctcactcctgtgattccagcgctttgggaggctgaagcagaaggatagcttgagcccaggagttccaggctgcagtgagctatgatcacaccactgccctttagccagggtgacagactgaaaccctttatctaaacaaacaaacaaacaaacaaacaaacaaacaaaaaaccacacagaatttctaaaccaacagatgttttcggccacacataaaaaccaatgaaataattgactttatcacagggttgctgcattaattcttggctgtgtcagtgccatttttcatttttgtcac

SEQ ID NO: 80686 - DNA, 498 bp, Homo sapiens
ttgggctagtccttggtttccacatttccctgggtcattgtttttgtttctcactagatgccagcttgtttgctttgaggaaaacatatggggggtggtggctttaacgctggcttgaggacagggcggcaggaggagtaggcagcctcggctcacgggccctgcccaggagggctgctctcagtgttccccaaagaaccaaacagccgggtcctgcttccttaggggtggtgtcatgtcagcctgtgcatcacggtggcacagcagaggtcccggttgccagcgtggtccctcccagcctcacttctgtgaccttctgcccacctgagcctgagttgaaagtcagtcctccaggttcctggtttggtgttcaaggctcatcaccagagggagatctaggagtttatggggttctagatgggcccagggaggaggacccaggctgagccgtgagctgagaacaccagcagtgagtgggccaagcccctgaaaggacac

SEQ ID NO: 80687 - DNA, 369 bp, Homo sapiens
tgtatgtagctattttatccatatttttaaatatatataattatttccatacgcctcctaatgaacgtttctgaatgaacatttgtgataactcagaaaccactgcttatctttttagcatgagtgttttatctgtcagtaatgtttttagcctcaagtaacagaaacagaactaagaatggtttaaaccagcagtaccaacctttttggcaccagggaccagttttgtggaagacaatttttccatggatgaagcggtgtggggagatagtttcaggatgaaactgttccactcagatcatcagtcattagttagattctcataaggagcgtacaacttagatccctcacatgcgcaattcaccatag

SEQ ID NO: 80688 - DNA, 255 bp, Homo sapiens
gacctgcccaccttggcctcccaaagtgttgggattacaggcatgagccaccatgcccagtcatttcctttattctttatgacacataaaacattcttagaacattagtaacagctttactacctaaatgattactgaaaacagttttttagtatgcccagtctcctcccaatttttagtttcactgtaatcatattatgaaatatatagtcattgcatcatatgctttctcccttatgactgatatttactctg

SEQ ID NO: 80689 - DNA, 243 bp, Homo sapiens
cagccacatcccaggacacattgtaggactgaagtcttttctgtagtgtccgcagatttgttttatggcaaccccaacttccagacaaaaagcatttccagtaaccctctaacagttccacagatgggacataatactttgcctaatactttaagagtaggtaattttggtctttttacctggaactaggctggaaataatagatttggcttggtaaatgaggggttaaattaaggatcactg

SEQ ID NO: 80690 - DNA, 1785 bp, Homo sapiens
agcgggctggaggagctcgaggctgaggctgccggggggctgtgggctaccgggccgccggcgcctcagcgatgttttactcagggctcctcactgagggcggccgcaaggagaccgacatgcgggaggcggcgtcactgcgacagcagcgccggatgaagcaggcggtgcagttcatccacaaggactccgccgacctgctgcccctggacggcctcaagaagctgggctcgtccaaggacatgcaacctcataatattctgcagaggcgcctcatggaaaccaacctgtctaagctccgaagcggtccccgtgtcccttgggcctctaagacgaacaaactcaatcaggctaagtctgaggggctaaagaagtctgaggaggatgacatgattttggtttcttgccagtgtgctggaaaggatgtgaaagccttggttgacacaggctgcctatataatctcatctctttggcctgtgtggacagattgggactcaaggagcatgtcaaatcccacaagcatgaaggagaaaagctttctctaccccggcatctcaaagtagtgggccagattgagcacctagtgatcacactgggctccctccgcctggactgcccagcagctgtggttgatgacaatgagaaaaacttgtcccttggtctacagactctccgatctctgaagtgcatcataaacttggataagcaccggctgatcatggggaagacagacaaggaagaaatcccttttgtggagacagtctctttgaatgaagacaacacttcagaagcataactacagcctgcagcatgtctgcacgtgtgcatgcatacacaccgggttgacagattgagaaaactgggtttgaaccaaatgccgtagtgacttgctgtggaccaagtccttccatctaatagaagctccaggggctccttcccattcagacctctctagactatagtctatgcttagagatcttgtctggttatggccattgttttttactactttgatcacttaacttatagaccttttttgacactgccagtctcacttgtggcctatttctctgcttcttccaggaatttgcttttattagtcaagtataggggctgccaggttctgtgtctccatagatatatgtgcttcttttcctatagctaaatgtataataaacaggaacctgacctttacctcctttcagctgtttcaaacaggtgccaggatacctatgtcttagaattagagtttcttcaaattgattcattgatttctcaagtatggattatgtgaaagagcccagggacattatccattacagtttaactctttcatttaaaggtccagagaggcaagtgaattgtctaagttcatatattaggtcagtgactgaagggaccaagaacgcagacctgatttccaagccaagactcccatgctgcctcatttgtattcaagcctttaacaggagggcaaagaggtgagaatgtgttaaaaaaaaaaaaaaaaaggcagagcatgggaggaatattctctggagatggatgctaggatgatttgggtagctctccctcctgtgtgccaagcccagtaaaagttccttgccccaaactgtcacatttaggccctcatcttggtgcctaaaaacgagcgtacaaagatgaatgaaatggtttctcactgtgaacctcttggaggaaaggaggaaccacagacagaggaatattaatccctctctgatatggaattgaaggcttaagtaaatcagagtgtcactgtcaga

SEQ ID NO: 80691 - DNA, 1100 bp, Homo sapiens
agcgggctggaggagctcgaggctgaggctgccggggggctgtgggctaccgggccgccggcgcctcagcgatgttttactcagggctcctcactgagggcggccgcaaggagaccgacatgcgggaggcggcgtcactgcgacagcagcgccggatgaagcaggcggtgcagttcatccacaaggactccgccgacctgctgcccctggacggcctcaagaagctgggctcgtccaaggacatgcaacctcataatattctgcagaggcgcctcatggaaaccaacctgtctaagctccgaagcggtccccgtgtcccttgggcctctaagacgaacaaactcaatcaggctaagtctgaggggctaaagaagtctgaggaggatgacatgattttggtttcttgccagtgtgctggaaaggatgtgaaagccttggttgacacaggctgcctatataatctcatctctttggcctgtgtggacagattgggactcaaggagcatgtcaaatcccacaagcatgaaggagaaaagctttctctaccccggcatctcaaagtagtgggccagattgagcacctagtgatcacactgggctccctccgcctggactgcccagcagctgtggttgatgacaatgagaaaaacttgtcccttggtctacagactctccgatctctgaaggtaagattgactccacttaccccttgatacttcctctctgaggcaggtatcctcttacacaggaactcatagtggtatcactgacaagttacctgttttcagtgcatcataaacttggataagcaccggctgatcatggggaagacagacaaggaagaaatcccttttgtggagacagtctctttgaatgaagacaagtgagtgcccaaatgggtcagatcaagtcacatccatttgtcatcagctgcgagcagggtggtggtggttctcagacaggacatggggttgtatcctgtctttggctttcaattatactacaaatccacccttccccacacccagagttcatcaccccacaaaaggaaatgactagctttgaaagcaaaattttacttgccttcagcttaacttttt

SEQ ID NO: 80692 - DNA, 1223 bp, Homo sapiens
agcgggctggaggagctcgaggctgaggctgccggggggctgtgggctaccgggccgccggcgcctcagcgatgttttactcagggctcctcactgagggcggccgcaaggagaccgacatgcgggaggcggcgtcactgcgacagcagcgccggatgaagcaggcggtgcagttcatccacaaggactccgccgacctgctgcccctggacggcctcaagaagctgggctcgtccaaggacatgcaacctcataatattctgcagaggcgcctcatggaaaccaacctgtctaagctccgaagcggtccccgtgtcccttgggcctctaagacgaacaaactcaatcaggctaagtctgaggggctaaagaagtctgaggaggatgacatgattttggtttcttgccagtgtgctggaaaggatgtgaaagccttggttgacacaggctgcctatataatctcatctctttggcctgtgtggacagattgggactcaaggagcatgtcaaatcccacaagcatgaaggagaaaagctttctctaccccggcatctcaaagtagtgggccagattgagcacctagtgatcacactgggctccctccgcctggactgcccagcagctgtggttgatgacaatgagaaaaacttgtcccttggtctacagactctccgatctctgaagtgcatcataaacttggataagcaccggctgatcatggggaagacagacaaggaagaaatcccttttgtggagacagtctctttgaatgaagacaagtccagagaggcaagtgaattgtctaagttcatatattaggtcagtgactgaagggaccaagaacgcagacctgatttccaagccaagactcccatgctgcctcatttgtattcaagcctttaacaggagggcaaagaggtgagaatgtgttaaaaaaaaaaaaaaaaaggcagagcatgggaggaatattctctggagatggatgctaggatgatttgggtagctctccctcctgtgtgccaagcccagtaaaagttccttgccccaaactgtcacatttaggccctcatcttggtgcctaaaaacgagcgtacaaagatgaatgaaatggtttctcactgtgaacctcttggaggaaaggaggaaccacagacagaggaatattaatccctctctgatatggaattgaaggcttaagtaaatcagagtgtcactgtcaga

SEQ ID NO: 80693 - DNA, 1645 bp, Homo sapiens
agcgggctggaggagctcgaggctgaggctgccggggggctgtgggctaccgggccgccggcgcctcagcgatgttttactcagggctcctcactgagggcggccgcaaggagaccgacatgcgggaggcggcgtcactgcgacagcagcgccggatgaagcaggcggtgcagttcatccacaaggactccgccgacctgctgcccctggacggcctcaagaagctgggctcgtccaaggacatgcaacctcataatattctgcagaggcgcctcatggaaaccaacctgtctaagctccgaagcggtccccgtgtcccttgggcctctaagacgaacaaactcaatcaggctaagtctgaggggctaaagaagtctgaggaggatgacatgattttggtttcttgccagtgtgctggaaaggatgtgaaagccttggttgacacaggctgcctatataatctcatctctttggcctgtgtggacagattgggatgacaatgagaaaaacttgtcccttggtctacagactctccgatctctgaagtgcatcataaacttggataagcaccggctgatcatggggaagacagacaaggaagaaatcccttttgtggagacagtctctttgaatgaagacaacacttcagaagcataactacagcctgcagcatgtctgcacgtgtgcatgcatacacaccgggttgacagattgagaaaactgggtttgaaccaaatgccgtagtgacttgctgtggaccaagtccttccatctaatagaagctccaggggctccttcccattcagacctctctagactatagtctatgcttagagatcttgtctggttatggccattgttttttactactttgatcacttaacttatagaccttttttgacactgccagtctcacttgtggcctatttctctgcttcttccaggaatttgcttttattagtcaagtataggggctgccaggttctgtgtctccatagatatatgtgcttcttttcctatagctaaatgtataataaacaggaacctgacctttacctcctttcagctgtttcaaacaggtgccaggatacctatgtcttagaattagagtttcttcaaattgattcattgatttctcaagtatggattatgtgaaagagcccagggacattatccattacagtttaactctttcatttaaaggtccagagaggcaagtgaattgtctaagttcatatattaggtcagtgactgaagggaccaagaacgcagacctgatttccaagccaagactcccatgctgcctcatttgtattcaagcctttaacaggagggcaaagaggtgagaatgtgttaaaaaaaaaaaaaaaaaggcagagcatgggaggaatattctctggagatggatgctaggatgatttgggtagctctccctcctgtgtgccaagcccagtaaaagttccttgccccaaactgtcacatttaggccctcatcttggtgcctaaaaacgagcgtacaaagatgaatgaaatggtttctcactgtgaacctcttggaggaaaggaggaaccacagacagaggaatattaatccctctctgatatggaattgaaggcttaagtaaatcagagtgtcactgtcaga

SEQ ID NO: 80694 - DNA, 869 bp, Homo sapiens
aaatataatgtcaaagaatttgagtaagatagtcacatttttagataggttataatacaatgataatgttggtatgctctccataattatttttagagaggcctttttaaataaaccattcatcttatatttgataactgtttttaacccgttgcatgtttgggcagtatcagattatctttctcatgtcatttgtgtgtttctttactgttttccagcgacgagtagaacagcccctctatggtttagatggcagtgctgcaaaggaggcaacagaggagcagtctgctctgccaatcctcacgtcagtgatgctagcaaaacctcggcttgacacagagcagctggcgtaaaggagagctggcctctgcttcacttttgtttcagtgagtacaaagcctaagttaattcagatcctttccattgccctagcgctccttgatgaggttggattaattattttgatagagagataagggacatttctaatactttttttttaaatgtgatctccccttatcatcattcccaaacgtgtctaattctacatcacttctaaatatattgtgtttttcccagtctcccttggttcaagctcctgagggagactgctttgtcaaagcctgaacccacaatgggaaggaaggaaagcataatcttagattgacaaagaagaaaatacagatcaaattccattagtaaccaagatataattaaaaatagagtctccgagttccagccatcatctatgtaagttaatactcaagtcagtacagttttagtatgtaggcaggcattctcacagcaagttactggtcatttaccccgtgtagtatttgggctatgtacacacttgctttcgtcaccct

SEQ ID NO: 80695 - DNA, 1610 bp, Homo sapiens
  misc_feature (1100)..(1100): n is a, c, g, or t
tagtagagatgagatttcaccatgttggccaggctggtcttcaacttctgatcttagctgatccacctgcctcagcctcccaaagtgctgggattatacgcctgagccaccgcacccagcctcaaatcataaacttttttttgttttttgagacgaagtctcactctgttgcccaggctggagtgaagtgacacaatcttggctcactgcaagctccgcctcccaggttcaagcgattctcctgcctcagcctccccagtagctgggattacaggtgtgcgccactgcgcctggctaattttttgtatttccagtagagatggggtttcaccatgttggccaggctggtcttgaattcctgacctcaggtcatccacccacctcggcctcccaaagtgctgggattacagacatgagccactgtgctcagcctcaaatcataaactttttaaaggtttatccctgaccctctaaattaggttatgtgccttgttatatgctcttttagcacttatcctaattgtgattgtgtatttattatatgattgtttattcaacagtttctttcaacaaatatttaccaagtgtttagtaaatcttgttttggattgtaagcttcattaaggcagagtaaggactgggtctgtggtttctcttaccatgtgtacctagcacctagcacagtgcttagacatagggagtacttaataaatagtcattgaatgtatacattaaaatggcgttaataatgctgcctatctgatgaggctgttgtgagccttcaatgaaatcgtgtgtaggaagtgctagtttgctcacaggctggtggtaacagtctactgtggtcattgagagcagttattgtggacacaacccccagttctggtcaccccacccactagctctgtgaactcacataggtacttaatatctctgatttttattttatttatttgtaaaatggaactaataattacaaccaccttataggacagagtcttgctctgtcacccaggctggagtgcagtggtgtgatctcatctcactgcaacctccgcctcccaggctgaggcaggagaatggcatgaacccgggaggcngagcttgcagtgagcccagatcgtgctactgtactccagcctgggtgacagagcaagactacatctcaaaagaaaaaaaaaaaaaagtattattgagaatataatatagttaacctgaataggttaattatattgtggaacctaaaccgtataaatttaaaatgccttagaatgcccagtcagcaagtgacagtattagaaatcaacctggattttagaccgctgtgtgttcatggataatgtttgtgtgtttaggagactattctgaatagtggttcacagtcctttacatgcatcccctgtgcattggatgcttcactagccttttctgactaaagcatatgaaaatacaagtgaaaaaggcaagttattacaggaataacttttcattttctctaattttcatattttaaaaattcatttgtaagcatttgatactttaaacctgtttacaggaacttggtataaaccaccatgtccagcctgggtgacagagcaagactacatctc

SEQ ID NO: 80696 - DNA, 928 bp, Homo sapiens
agacaggatcgttggcaatctaggagaatttcttaaatctcaagaggtatacaactccctggagcacatttgaattttatctaaatcaccagctcttgtacagttcagttagatagttgagcactcaggtagcttcttctcttcccttctgattgctctctgtttccaccagatggcgcatttgttccttagagagttgtgtgtcaagtctcctgtgagatccttttctattcaaagttagtttcatttctggagtaacgtgtttctacattgttcagtgcacagtagtgagaattcatacatttgattccagaattaacatgtgtttgaagtgtaggtgtagtgggacataaggaacccagcagaggacttgaagaatgagatgagacaagcagatttcatttcttaagccatgtgattctaggccatttgtgtgagcaagtgctttttcccacccccccgagaaaggtaatgagaagagtgtgatgacatataacatgttgagactaatcctaaatttgttttacctttgtctctgtagtccgacctcacaatagaaaaaatatctgcactagaaaacagtaagaattctgacttagagaagaaggagggaagaatagatgatttattaagagccaactgtgatttgagacggcagattgatgaacagcaaaagatgctagagaaatacaaggaacgattaaatagatgtgtgacaatgagcaagaaactccttatagaaaaggttagtgaataatgttggtctaaactctgtatcccaagatactcaatgtgtgtcattgtgtggcttcttattccttacttgagatgaaaatatttaaaagtagagctttttaggaacatgatttgacaattagaattttttccttacatggacaccagaccaaccatccagagtgttaatttg

SEQ ID NO: 80697 - DNA, 440 bp, Homo sapiens
gcggccgcccgggcccgggcccgcgtcgggcgcctggctctgtacgcgagcccggggatctgcggccttcgtgccccccctcccccgcccgccctctcgtggagcccggcgccggcggcggctgcccgggcggggggttgcggcgctcaggagaggccccggctccgccccgggcctgcccagggggagagcggagcggtccgcagccgggtcgggtcggggcccctcccgggaggagcgtggagcggcggcggcggcggcggcaggtgagaggctgagccccgggcgggggaggactccaggcctggggcattaaccgtcctggggacccctttggcctgaggagcctgcgacctgggcccagctcggggccggctccggaccgcagctcctgggcgctgaggcgggaggggctccctgagggctgcgggtcgctgagg

SEQ ID NO: 80698 - DNA, 1189 bp, Homo sapiens
gcggccgcccgggcccgggcccgcgtcgggcgcctggctctgtacgcgagcccggggatctgcggccttcgtgccccccctcccccgcccgccctctcgtggagcccggcgccggcggcggctgcccgggcggggggttgcggcgctcaggagaggccccggctccgccccgggcctgcccagggggagagcggagcggtccgcagccgggtcgggtcggggcccctcccgggaggagcgtggagcggcggcggcggcggcggcagcagaaatgatggaagaattgcatagcctggacccacgacggcaggaattattggaggccaggtttactggagtaggtgttagtaagggaccacttaatagtgagtcttccaaccagagcttgtgcagcgtcggatccttgagtgataaagaagtagagactcccgagaaaaagcagaatgaccagcgaaatcggaaaagaaaagctgaaccatatgaaactagccaagggaaaggcactcctaggggacataaaattagtgattactttgagcgacgagtagaacagcccctctatggtttagatggcagtgctgcaaaggaggcaacagaggagcagtctgctctgccaatcctcacgtcagtgatgctagcaaaacctcggcttgacacagagcagctggcgtaaaggagagctggcctctgcttcacttttgtttcagtgagtacaaagcctaagttaattcagatcctttccattgccctagcgctccttgatgaggttggattaattattttgatagagagataagggacatttctaatactttttttttaaatgtgatctccccttatcatcattcccaaacgtgtctaattctacatcacttctaaatatattgtgtttttcccagtctcccttggttcaagctcctgagggagactgctttgtcaaagcctgaacccacaatgggaaggaaggaaagcataatcttagattgacaaagaagaaaatacagatcaaattccattagtaaccaagatataattaaaaatagagtctccgagttccagccatcatctatgtaagttaatactcaagtcagtacagttttagtatgtaggcaggcattctcacagcaagttactggtcatttaccccgtgtagtatttgggctatgtacacacttgctttcgtcaccct

SEQ ID NO: 80699 - DNA, 1133 bp, Homo sapiens
agaagaggacttctgagctgctttaaaacttttcaatatattactgtttgatgcagcacatagtagtctaccacttgtatgctatatttacttgagatttacctgcatttgatctttcagtgaaataattactgtgagttttgttctacagaaaattgcctcctcacattttagtgtttatggtttcacagcctactttttctttttcagcagaaatgatggaagaattgcatagcctggacccacgacggcaggaattattggaggccaggtttactggagtaggtgttagtaagggaccacttaatagtgagtcttccaaccagagcttgtgcagcgtcggatccttgagtgataaagaagtagagactcccgagaaaaagcagaatgaccagcgaaatcggaaaagaaaagctgaaccatatgaaactagccaagggaaaggcactcctaggggacataaaattagtgattactttgagcgacgagtagaacagcccctctatggtttagatggcagtgctgcaaaggaggcaacagaggagcagtctgctctgccaatcctcacgtcagtgatgctagcaaaacctcggcttgacacagagcagctggcgtaaaggagagctggcctctgcttcacttttgtttcagctcagcaaaacagtccctcatctacgggatctggcaacacagagcattcctgcagctcccaaaaacagatctccatccagcacagacagacccagtccgacctcacaatagaaaaaatatctgcactagaaaacagtaagaattctgacttagagaagaaggagggaagaatagatgatttattaagagccaactgtgatttgagacggcagattgatgaacagcaaaagatgctagagaaatacaaggaacgattaaatagatgtgtgacaatgagcaagaaactccttatagaaaaggttagtgaataatgttggtctaaactctgtatcccaagatactcaatgtgtgtcattgtgtggcttcttattccttacttgagatgaaaatatttaaaagtagagctttttaggaacatgatttgacaattagaattttttccttacatggacaccagaccaaccatccagagtgttaatttg

SEQ ID NO: 80700 - DNA, 1728 bp, Homo sapiens
  misc_feature (874)..(874): n is a, c, g, or t
ttttttacataatgaaaagggttttttatttcagagaaattttgttttactgtttctttgattatttcatttcctctgttcttttctctagaaagccattagatagtttcagggtctctgtgctattcatgtttcttttcttttgtgctccatttaaccttttgttttatctttgggattacagacatgagccactgtgctcagcctcaaatcataaactttttaaaggtttatccctgaccctctaaattaggttatgtgccttgttatatgctcttttagcacttatcctaattgtgattgtgtatttattatatgattgtttattcaacagtttctttcaacaaatatttaccaagtgtttagtaaatcttgttttggattgtaagcttcattaaggcagagtaaggactgggtctgtggtttctcttaccatgtgtacctagcacctagcacagtgcttagacatagggagtacttaataaatagtcattgaatgtatacattaaaatggcgttaataatgctgcctatctgatgaggctgttgtgagccttcaatgaaatcgtgtgtaggaagtgctagtttgctcacaggctggtggtaacagtctactgtggtcattgagagcagttattgtggacacaacccccagttctggtcaccccacccactagctctgtgaactcacataggtacttaatatctctgatttttattttatttatttgtaaaatggaactaataattacaaccaccttataggacagagtcttgctctgtcacccaggctggagtgcagtggtgtgatctcatctcactgcaacctccgcctcccaggctgaggcaggagaatggcatgaacccgggaggcngagcttgcagtgagcccagatcgtgctactgtactccagcctgggtgacagagcaagactacatctcaaaagaaaaaaaaaaaaaagtattattgagaatataatatagttaacctgaataggttaattatattgtggaacctaaaccgtataaatttaaaatgccttagaatgcccagtcagcaagtgacagtattagaaatcaacctggattttagaccgctgtgtgttcatggataatgtttgtgtgtttaggagactattctgaatagtggttcacagtcctttacatgcatcccctgtgcattggatgcttcactagccttttctgactaaagcatatgaaaatacaagtgaaaaaggcaagttattacaggaataacttttcattttctctaattttcatattttaaaaattcatttgtaagcatttgatactttaaacctgtttacaggaacttggtataaaccaccatgtccagccctttgtctcatatttgaattgttttactttcttcttggccacgtggccctgacttctcactttcataagaaggggtttgtattgtggagatacaaattatggagttgtttgcattaatacaagtgtttgtggaaaaagatgccaaactttcctgtgattggtaatgcacctttattgtaggctcagcaaaacagtccctcatctacgggatctggcaacacagagcattcctgcagctcccaaaaacagatctccatccagcacagacagacccaggtaggttggtgatcgataatcaattgaggggcatacctgctgtgtaggaataagggctaacctgtgtagtctgtcattcttctctgacttctct

SEQ ID NO: 80701 - DNA, 1189 bp, Homo sapiens
gcggccgcccgggcccgggcccgcgtcgggcgcctggctctgtacgcgagcccggggatctgcggccttcgtgccccccctcccccgcccgccctctcgtggagcccggcgccggcggcggctgcccgggcggggggttgcggcgctcaggagaggccccggctccgccccgggcctgcccagggggagagcggagcggtccgcagccgggtcgggtcggggcccctcccgggaggagcgtggagcggcggcggcggcggcggcagcagaaatgatggaagaattgcatagcctggacccacgacggcaggaattattggaggccaggtttactggagtaggtgttagtaagggaccacttaatagtgagtcttccaaccagagcttgtgcagcgtcggatccttgagtgataaagaagtagagactcccgagaaaaagcagaatgaccagcgaaatcggaaaagaaaagctgaaccatatgaaactagccaagggaaaggcactcctaggggacataaaattagtgattactttgagcgacgagtagaacagcccctctatggtttagatggcagtgctgcaaaggaggcaacagaggagcagtctgctctgccaatcctcacgtcagtgatgctagcaaaacctcggcttgacacagagcagctggcgtaaaggagagctggcctctgcttcacttttgtttcagctcagcaaaacagtccctcatctacgggatctggcaacacagagcattcctgcagctcccaaaaacagatctccatccagcacagacagacccagtccgacctcacaatagaaaaaatatctgcactagaaaacagtaagaattctgacttagagaagaaggagggaagaatagatgatttattaagagccaactgtgatttgagacggcagattgatgaacagcaaaagatgctagagaaatacaaggaacgattaaatagatgtgtgacaatgagcaagaaactccttatagaaaaggttagtgaataatgttggtctaaactctgtatcccaagatactcaatgtgtgtcattgtgtggcttcttattccttacttgagatgaaaatatttaaaagtagagctttttaggaacatgatttgacaattagaattttttccttacatggacaccagaccaaccatccagagtgttaatttg

SEQ ID NO: 80702 - DNA, 1044 bp, Homo sapiens
gcggccgcccgggcccgggcccgcgtcgggcgcctggctctgtacgcgagcccggggatctgcggccttcgtgccccccctcccccgcccgccctctcgtggagcccggcgccggcggcggcagaaatgatggaagaattgcatagcctggacccacgacggcaggaattattggaggccaggtttactggagtaggtgttagtaagggaccacttaatagtgagtcttccaaccagagcttgtgcagcgtcggatccttgagtgataaagaagtagagactcccgagaaaaagcagaatgaccagcgaaatcggaaaagaaaagctgaaccatatgaaactagccaagggaaaggcactcctaggggacataaaattagtgattactttgagcgacgagtagaacagcccctctatggtttagatggcagtgctgcaaaggaggcaacagaggagcagtctgctctgccaatcctcacgtcagtgatgctagcaaaacctcggcttgacacagagcagctggcgtaaaggagagctggcctctgcttcacttttgtttcagctcagcaaaacagtccctcatctacgggatctggcaacacagagcattcctgcagctcccaaaaacagatctccatccagcacagacagacccagtccgacctcacaatagaaaaaatatctgcactagaaaacagtaagaattctgacttagagaagaaggagggaagaatagatgatttattaagagccaactgtgatttgagacggcagattgatgaacagcaaaagatgctagagaaatacaaggaacgattaaatagatgtgtgacaatgagcaagaaactccttatagaaaaggttagtgaataatgttggtctaaactctgtatcccaagatactcaatgtgtgtcattgtgtggcttcttattccttacttgagatgaaaatatttaaaagtagagctttttaggaacatgatttgacaattagaattttttccttacatggacaccagaccaaccatccagagtgttaatttg

SEQ ID NO: 80703 - DNA, 516 bp, Homo sapiens
tcgttggccccctcccccaagtctaagaatttttggcttaaagagaaagagtaagtgaagaatcctctatatccattcttcactagttctaagaaggatgaaaggcaagtgcacaacactaaatctcactgcagcttacagagattttccagatgataatttatttacctttagtttaactttttctctcagaactccagataatgcagtagtaacttataagcagcacagtatcttctaacagcattcatcatgagatagacaagtcctcaactacccgagacagtgttttaccccttactcatcctgctcccctttcactgctgttgcataggtggataatttgatttccaccctgtgtaatctctagaggaaacatagctcagagatatggaatagtcaaaatgaatgggttgtttgagttatttctctctctctctcgctctctgtgtgtgtgtgtgtgtgtgtgtgtgtgtgtgtttgctgtccagtatctccatccctttttatgtttga

SEQ ID NO: 80704 - DNA, 320 bp, Homo sapiens
atgacctcaggcaatctacatgccttggcctatgaaagtgctgtgattggccagatgcagtggctcatgcctgtaatcacagcactttgggaggccgaggtgggcagatcacaaggtcaggagatcaagaccatcctggctaacacgatgacacccccgtctctactaaaaatacaaaaaattagccaggcgtggtggtgggcacctgtagtcccagctacttgggaggctgaggcaggagaatggcgtgaacccaggaggcggagcttgcagtgagcagagattgagccactgcactccaccctgggcaacagcgtgag

SEQ ID NO: 80705 - DNA, 415 bp, Homo sapiens
ataacaacctactcttcagcccacctgagaggacaggatgcttcaagaaagacagtgagcagcaggtcctttaaaaatcaaaggaaaacaggctcctggataggtgtgagatagaagtgaattatggcacatacgagagcaacaataaattatcctttactaacagtaacctaagggaaatgcccggcattgtgtctggcacagactagatactcagtagttcccttctcacacttgctcagccctgtttgaacccagacagagagcagctcaaaatatgcaagtattacatactcacagaacctggagacaagagaagcggcttctaggcacatgggctcccatccttgcagcagctggtatagaggttgcatgacaacttgtgaggattctgcagtagcgtgggctcagctac

SEQ ID NO: 80706 - DNA, 489 bp, Homo sapiens
aggaggagctgatagagccgggtataagacagtctggcaatatggtgaaacccatctctactaaaaatacaaaaattagctgggcagggtggggaagaggagagcttgctcagctatgctctgacaggaggcgatggcacagagccctggaaggaacggcaaaagggcaggggcacttctgttctgagagcaggggacaggctctgaggctagtgtcagcagaggcacccaagggcacatgaccaaagagtggtgggggttcagaagccgtcagaggtgctttggagagtcttaagtggggcagtgatgccacttgactggtctggggaacttgggccagaaaagtagctatgaaggggatgagaagtggccagagtctggacacatttaattgggatcctatgtatgacacctggttcctgaatcagctagtgtgtcatgctgccacatggtgtggactcagcacttacagtgccttcttctgaccag

SEQ ID NO: 80707 - DNA, 453 bp, Homo sapiens
ggatggtggggctcagttctacaatgatttaatgtcttaagaaatgaggacaccttttgtgttatttcagaaagtctaacactttagaggctccataatatccactctaaatggaagaaatcttttgatatatcttgagagaatcttggttgccattcatccgctacttttcagagaggagcagtgaaaccatcaggccgcttgttgcctggaataggcctgagtatcctatgtgttctctccatccctcttagacttggatatcaggattcccataatccccattgcccagtgttttatttgccacagcaaaacttagtattgataaaactatcaggtcggtcatttaggattgactttctgtcacatgactagagaagcaagttcaatgaatattagatttggccaaaccctgtttcttgtaccgttacgtttgtgtaactttatgagaat

SEQ ID NO: 80708 - DNA, 482 bp, Homo sapiens
aaaatcaaccttaagactggtaaggcggcatctcagaaatctggaagttttacaatcaataaaagttactgtttgaaaaacaaaacaaaaccaactctaccaggctacacaagaaaatatattctatatttcagaggtaaaccatatgaggattgagacacagaaaagagtattctaagagccaaaatctcagatcaggtggccttcagttaatgagaagcttacaatgaagaatgttttgttctaaagaagattactgagatgagaattatgatctttatcagagatcatacctccagactgatatagccctagagctctcctcacaaaatgccctaaccttcaagagatgctttttccggctgggcactatatacaagactaacaggtctctccatatcagagcagtcaactcaattcctaataaaaaaaaaaaaaagaagaagaagaagaccaggcacgtgactcacgcctgtaatccc

SEQ ID NO: 80709 - DNA, 347 bp, Homo sapiens
gacactgctttggaaaaaaagcaaagcccactcctgattctttgcttacttgggacaagtaataaaacccctattgatcaaaacctgcgttcttttggagagttgtttgttactaggcaaatgaaccccctttttcttgggtaacattttcatttttcttggggtatctagaagtaaaatggctggatctgacagtagatatatgtttgactttttaagaaactgcaagccgggcacagtgacccatgcttataatcccagcacttagggaggctgaggcgggaggatcgcttgagcctaggagttcgaggccggcctgggcaacatggagaaaccctgtctctaga

SEQ ID NO: 80710 - DNA, 1018 bp, Homo sapiens
  misc_feature (51)..(52): n is a, c, g, or t
  misc_feature (101)..(101): n is a, c, g, or t
  misc_feature (374)..(374): n is a, c, g, or t
tttgaatgagacagagtctcgcgctgtcactcaggctggagtgcagtggcnnaatcacagttcactgcaacctctgcctcctgcattcaagcgattctcgngcctcagcctcccaagtactgcagttacttttgcaccaacctaatagctcggattacaagtatgcaccaccatgcccagctaattttgtatttttagtagagaccaggttcactatgttggccaggctggtctcaaactcctggcctctagtgatctgcctgcctcggtctcccaaagtgggattacaggcatgaaccaccacgtccagccagtcattttcttaagtaggttcttcccagcctgcaaacccagtgaaagggcttattctttcnccattactgtggggaaaaagtcctgtagaggctttccataggccctgtgtgactcacgtgtctatacctgaatcaactgttacaaccaagcagatgcagagactgcgtgccctctcctggagctaggagctaggtgagtcaatcctgcactttctctacaaggcttgcaaaggtgagcaagaagattccccaaagtgaaatcagggtgctgttaccaaaagaagctatgctggcaggcaaaaaacaacagctgtttcccatagggcaaaacctgaaacacccaattactatcccattgtttgcttcaaaattaaattttgtttgaccccaactagttctagtcaagtttttgctcgatggaccacgtgaaaaaaggataaacaatgtctctatataatgcatgatcaggtggtttatgaagatgtcaagagcactgaacaaaatccaaatgctcacataaaatgggattaggtttcataagccacccaagaaaatcagtctcattattttatgtaataatgtattactgtgcccagagctaacctgtagctctaggggagtacaatgtgtttgtattattcttcattgtacacagtgcctcagacatagtaggtattcaataaatatttgttaaatcaaaaaaa

SEQ ID NO: 80711 - DNA, 935 bp, Homo sapiens
  misc_feature (51)..(52): n is a, c, g, or t
  misc_feature (101)..(101): n is a, c, g, or t
  misc_feature (374)..(374): n is a, c, g, or t
tttgaatgagacagagtctcgcgctgtcactcaggctggagtgcagtggcnnaatcacagttcactgcaacctctgcctcctgcattcaagcgattctcgngcctcagcctcccaagtactgcagttacttttgcaccaacctaatagctcggattacaagtatgcaccaccatgcccagctaattttgtatttttagtagagaccaggttcactatgttggccaggctggtctcaaactcctggcctctagtgatctgcctgcctcggtctcccaaagtgggattacaggcatgaaccaccacgtccagccagtcattttcttaagtaggttcttcccagcctgcaaacccagtgaaagggcttattctttcnccattactgtggggaaaaagtcctgtagaggctttccataggccctgtgtgactcacgtgtctatacctgaatcaactgttacaaccaagcagatgcagagactgcgtgccctctcctggagctaggagctaggtgagtcaatcctgcactttctctacaaggcttgcaaaggtgagcaagaagattccccaaagtgaaatcagggtgctgttaccaaaagaagctatgctggcaggcaaaaaacaacagctgtttcccatagggcaaaacctgaaacacccaattactatcccattgtttgcttcaaaattaaattttgtttgaccccaactagttctagtcaagtttttgctcgatggaccacgtgaaaaaaggataaacaatgtctctatataatccacccaagaaaatcagtctcattattttatgtaataatgtattactgtgcccagagctaacctgtagctctaggggagtacaatgtgtttgtattattcttcattgtacacagtgcctcagacatagtaggtattcaataaatatttgttaaatcaaaaaaa

SEQ ID NO: 80712 - DNA, 619 bp, Homo sapiens
tagctggatatacacaatttctaaaaattctgtggcaatggcaaattaggttttgacttacagtaataccagcaagaaactactgtcctcatttcaaagaattctcaccaatagttttgttttgctgggagaaacaatactctaaacgataataagggggatatccacgactctcaaaaaagtgaatgtaaaaagacttcaggcaaaaatcactactgtcaaggaatgctggttctcactgatttgtttcatgatctggatgtggtttacaaaggtgagactggtttgtgaaacttacctaagcacttaagatctgactgcttttctgtaaacacgattattcaataaaaagttttttaaaaaaatcaaattttctattctaatgagaaattaccagttgtcattgatccataacacggcaatattaacaagccatcgaggatggtatcttgaacatcataatcataatcaacagactctgccatctgaaaaagtaactcacaacttttttctatttcaaactggcctaaaatgggaagaaaaaaataacttcagcaactgaacagaaaaattaatttaaaaataaagaaaatgtcaagattaaaattaattttgccta

SEQ ID NO: 80713 - DNA, 266 bp, Homo sapiens
tacccatatgatgaatactggcatgggattcttcccccatcccacaaaaggaaattatttttctctacaatcccaaagtcaaatacaactagaggtaataaacaataccagtgcctctttagacataccagtgcctctttagatttgtgcaaacagagcatgaagtgagggatttaagtgctaaaaaacaatcccacttgctaatctgaaccctaaaaaccacaatgcaaatcagaattttagttagtatttactttttttttttt

SEQ ID NO: 80714 - DNA, 753 bp, Homo sapiens
acctcggcctcccaaagtgctgggattacaggtgggagccaccgcacccagcctgcaggtcttcttcttttttgatgtaggtgcttatatctataaacttccctcttagtactgcttttgctgtattccataggttttggtatgttgcattttcattatcatttgtttcaagcaactttacaatttccttcttaatttctccactgaccaattggtcattcagaagcagattatttaatttccatatgtttgtatggtttccagaattcctcttgtcattgatttctagtttattccatgtattctatgacacaatttaaattatttcaatttttttggagagttttaagacatgctttttgaactaacatatggtctatccttgagaatgatgcatgtgctcgggaaaaatatgtgtattctgtagctgttggataaaatgttctgtaaatatctattagatccatttgatctatagtgtagattaaatcccatttaatctttcttttgtctgatttttcagtatatattgagataatctttgtcgatttactgtctggaagatctgtcctgtgctgaaaacggggtgttaaaatctccagctattattgtattggtctctctctcttttatttttatttttatttttttttgagacagagtttcactcttgttgcccacgctggagcgcaatgttgcaatcttggcttactgtagcctcctccacctcccaggttcaagcagttctcctgc

SEQ ID NO: 80715 - DNA, 515 bp, Homo sapiens
agtttccctatgaggaaatctactgtaacttaagagttccccaaagcgtaggtttgattaggccaacaaacttgttcagtaaggtagacagctaatgctattatcaaaatcctcttctccatattggactcaaccatctagtaaaaagctaagaaactaaccactctgggtgtctgagttaatgtacagtttaaacaggcagtaaatgttcccaagagcctctacctcccctcctggcacagtaaatgaatataaaaatatctctgaagttacaatggaattaaattatcatattttgatgattctgatatcccagaaagaatctgagggctccctgcagagatgcaacagaaagtttaagatgacaaatcagggctaatagaagatagacaaaaggccataaattgatctctgaaggtcaggctcacgcatgtaatgccaacactttgggagcctgaggcgggaggattacttaagcccaggaattcaagaccagcctgggcaacatggcgaga

SEQ ID NO: 80716 - DNA, 231 bp, Homo sapiens
gtgtgtgtgtattcatctacatgtttatatacggctcccatccttttggacaaaaatgaaatcagattgtacctgttcatttaatactatacctaccctgtatcattaactaacagttcctctttacctcattccatacattttgctgtatgtcagacatttaacttttaggattactaaatgagacctggaactatttttttttaaataaataattgctacatgactgag

SEQ ID NO: 80717 - DNA, 824 bp, Homo sapiens
ggaaaagaaaataatcatgttccaaataccctaaaatagctactgttaatgcttagttgaatttacttatagtcactctgtatacatatataatttcatgtttcagcttccatttttgtaaattatttaaaaattataaatgatattctttcaaacaaatatgcaaactcattaaagtttttttctatcataaataatacttttagagtccattttcataaattaatctttcttctggttaaatttaagacaaagtgttttaggttgctaaatttcttcaaaaacacttactaatttctattcctattatcattgagtataagtgcttttctcactgtaccactctaatattattgtctttttagtcattgctaatttgacaggggaaaatagaattttcttatttttgaaacattttctatattcagaactttgtcaacatcttcaatagttttacacttagtgggcagtttcacaaaaggaaatcagagggaaatatggccattatttcaaggaaggtaaagcacaaataactaaataaattgctcttgaaccctgggccttctttctcttgtgtagaagccagccacagcgagcttttgctctctgtactcacccttggttcatcattcctcaccgaaaggagaacctagcttctgggatttagactagaggttttcagcaagagatgatgtagcagtgatggtaacatcagtttacctatcactaatggcactggtaaatgttaaacagtagaatcactagggataggggaaagccctgtttataatgtttgcctgtttctgtggtgtaaatattctcat

SEQ ID NO: 80718 - DNA, 134 bp, Homo sapiens
atcacaaacagttgtaaatatattttggtcgtataaaaaatatttgggggtttaccaaaagcaagataaaattaaatacccaataatagtgcatacattagacaggggggaatggaattaagatattgaatcgg

SEQ ID NO: 80719 - DNA, 345 bp, Homo sapiens
ggacatccaaactatatcacctactacattgcatggctgttccgtgtcacacctttggaagttagaggggtgggggacaagagaaattgaggcaaatatgaagtttatgctcgctgagctgtgagtaataagtcctttgtctcttacacagatgtctttttttttttgccagcatccattaaagcatggccaactaaattgttagcttgcaaggaaggttagacctcttcactatttttgacttgtatatcttatagtccaacaccctataggatctgacagaatcaggtagtcaccatccagaatagaaaatcccggtagcactaagctcttttgttaggccat

SEQ ID NO: 80720 - DNA, 432 bp, Homo sapiens
aggaaaagccctttgtttggggctcagactttctggacatatgtccagctgggccagtgatgaccttaatagactctcctgaaccttttttggtctctccagtctttgattgtcctgtaacatttctgggggcttatccgggattggagatggcagattttctgtcttctttgcctgtgggctagagccccaggatgtgggagatctggggtccttggcaccgctgggagagtttcagcctggaaggagaatggccctcccgcattccagagccttcccctgacagcaccaaaggaaccagtggaaagggttgcaggacagtcacaggagcagtgcacagacatctgaaccatgttctttgaagaaatgcctcaggatgttgatcccacttgtttaaaatttccattggaagctctgctgttgtctgcagct

SEQ ID NO: 80721 - DNA, 397 bp, Homo sapiens
aaaaatacaaaaattagctgggcgtggtgacacacgcctgtaatcccagctactcgggaggctgaggcaggagaattacttgaacctgggaggcagaggttgcagtgagctgaagatcgtgccactgcactccagtctgggtgacagagcaagactgtctcaaaaaaaataaataaataaattattttgttaactgcagtttctgcatgaaatgaaatgtgatgggacactatcgtattttgtgattatgacaatacatctcaatactaagaatctaaaatatagaaataattacataaaatattatcaaaacataccatatagaaaatataaatccttaaatacccctgctggttccctaccactgctctctgatattttcttcacattaattgat

SEQ ID NO: 80722 - DNA, 879 bp, Homo sapiens
gctgtattttattccttagcacttatcaccacttgacagttgtttattttctatccccttcagttagactgcatgctccatgagggcagtgaccttgagtattttgtttgctgtttatccccagtgcctagaacagtgcctggtgcagggtgtatgccacctaagcctcagcagaatcactgtccagtgacattcatcacctggtcttagtggtggctcttccctagaagtgaggtgaggtctgtgtcccattgttgttgggctggaggcagctggttttctcctattcgttgatgctcagctggaccggtgttgtgatatttaaggaaagtttcatcctatccctttttgccaacagaattttaatttgatgactttatggtcatttttctttataaatacccatcttcatggatttaaatatataatcattgtatgcttatggtttacataaatatgagtattcatatgtttgtttttttgaagagggtggcacatggagcaaacactttttacttaggcatggatgctcaggtagtggtgttgatgccttctttgtgtactcttgaaattcctgcaagctcccaaaccttattatactcagatctacgtaccaaattgcttaggtcccagtgggccagacttctgctgagcgttagctaactcagggatagagttgctgtccttcaagtataatttgtctctcagatggctttcccatagctgattctcaggctttgaatatgggttctgttagtccacagggcattgactccatttgcaggtgtgtgtttgtaacatatagtcaaacctctaacatttggaataatgagatgagatgagaatgagtaggaggaggggcagtctggtttagtgaaa

SEQ ID NO: 80723 - DNA, 793 bp, Homo sapiens
gtcgaccttctggtcaaatgcaacgaagttcagaatcaaaagaaatacacttaattgaaattttaaaaataacataaaagaaatttgaagtatgcataggtatccccagttggtaaatcactattgttagaacccatagaatctgcatttgtggaaatgtttgataaggatatcagccttttaccatcttaaactgtgaaaatcgctttatccaaggcaagtaactggactgggctgctacttagtctttttcagctttaagaaactgtcacttcaaaatcttagattaagcactttgggaggccaaggtgggcagatgacttgaggtcaggagttcgagaccagcctggccaacatggtaaaaccccgcctctactaaaaatacaaaaattagccagaagtggtggcactgaggcatgagaattgcttgaatgctagagggggaggtttcagtgagctgagatcgcaccactgcagtccagcttgggcaacagagtaagactctatctccaaaaaaaaaattagattaatttgtttgcatacatgctaataaaaaaaaatcagtgagagactgaattcattagcacaaactccagctgccctgggtgtgcctcagatgcagatgaagagtaccactgtttggtaagggcttgtttttccagataaagcaaagacttgaaacagctgtccacagtgacagtacaaatccccaaaatggtgtcaagagagaaaaagtgctcaagttagaatatgatttctgttctactttataatgtgtgtgctgtggtttttg

SEQ ID NO: 80724 - DNA, 380 bp, Homo sapiens
catcgtgtatgaaggtagccattttgtacatgttaccttgttaaaaacaaaagagcagcaacatgtttagagtggtgtctatagatagaacactgctgttatgtttaaggaaaattggggcagggggcagaaaagatcaatatgactagttagaagactattaaggagaactttgtacatgaattatggatgtaagaattagaaaaaaaaagatgatcatgttcagaattttagcttttttacaattgtagtggaaaagaaaactcctagagtaatgaatcaatggtatcctacaaaaagagaggtgccaaaaataccatgaaatattatattaaaaaattcacacgaataggtagttataatatgtaaagacagacttc

SEQ ID NO: 80725 - DNA, 552 bp, Homo sapiens
tctctctgcaaattaagttcttattaaaaactgccaatcattgacgatatataatgatgagatcctgaacaaaagaggcaaagaaatgctcctacttgaaaaatacacattccctatagactgcctcctgtttagtccaacttagatcactcagatccttcctgggatcaaatatatttttaaacctaagacaaagcgaagcaggtgtcacttgggtgatagggaaaaaagcttgtatttcctggttaatgtttagcttttgtaatgctatttaaacacacctaaggtgcctttccctcatctcaggtgctttctctgtaaagtttcactcccacctttcttttctctgcatggccgtccagtcttgcccatctacatccagagctgttaactagtagtgtcattacctgtgaaaaacatgtagaagcttccttgaaccacccagaaatccactcaaatttggggattgtcattccttttgtgaataattaatacaattcagttgttttttaaatattctaataaaaaaggaaattttctcaaaaaaaaaag

SEQ ID NO: 80726 - DNA, 492 bp, Homo sapiens
tgaaacaacataaatttatgacctcacagtacctgtacatcagaagtccagattggcttgtctggtttctctgctctgggtctaacaaggccagtatcaaggtgtcagccttccagggctctgattgggagactagggtagaatcagcttaaagcaaattcagcttgatggcagagtccaggtccttgtatgtgcaggactgaggtccctgttcccttgctggccatcagctggggctgccctgaaccttggagtcctctcttccttgtacccggctcccttcatctccctaccagcaatggacatccagtccatctcgctggcttggaaactctctgacttctccttctccttcctcctcatctcttctcctcaaccagataaagttcttacctaccccaacccctagaggttaccattctcccggtgtttattctcattctctgctttttaaaatactttaatcacatactgtgaatcaatatattgatt

SEQ ID NO: 80727 - DNA, 155 bp, Homo sapiens
tggggtgcagttttccaggcaggagcagcaagcatcttgagtcccagaggcgggaactagttggatgcatttgagggacccacaggggctagtctgtctgaaagagctttgggatggaagagggcagggtgctccactattgaagtctagcagat

SEQ ID NO: 80728 - DNA, 281 bp, Homo sapiens
atcttttcaaccctatcaataagatgttatgaaagattggatctcttgtttacaagtagtatagaatcttttttgatctttgactctgtgctgcctatctcatcaatgttgttgctattaatatctgtcctttaacactggatgttgggatcttagtaatgttgctgataataggattttcagcaaaacttccatatcccttgaagatatggtagtttatattactatatcgataacagttttgcctgtggagatttgactagttttaggtgtttggaagc

SEQ ID NO: 80729 - DNA, 326 bp, Homo sapiens
tgtcacttaatgcacagctggggctcaggacacagctttgcacaccctaagtgctcaataaatgctagctcagggcagagctttgcataccctaagtactcaataaatgctagctcagggcagagctttgcataccctaagtactcaataaatgctagctcagggcagagctttgcataccctaagtgctcaataaatgctagctcagggcagagctttgcataccctaagtgctcaataaatgctagctcagggcagagctttgcataccctaagtactcaataaatgctagctcaggacagagctttgcataccctaagtgctc

SEQ ID NO: 80730 - DNA, 368 bp, Homo sapiens
tcacaccttgctcttatctcctaagactttaaatttttcctccatattctttaccatcatctgacattgcatgcagacaccacacacatttcttcattgcttaccatccatactaggagaatcaacccagaagtagctgctccgtgatggatatatgactggcatgtaacagacactcaaatacttgttgactgtatgaatgagttttctttttcaaattctgacttggccatctgaagctatctgttttcctcacaactttctgtcttctgcaactttggtgcagaataattattacccaactactgacgattattttatatagggcagagtcccgtgacgaaactgtagagcgaccatcaacttgg

SEQ ID NO: 80731 - DNA, 345 bp, Homo sapiens
taattatagctaggaaaatcttttccttagaaactaactctaaaagtacttaaatatgtacaattaaagaaaaaatgatacgggctgtgtgactcaaaactaatgcacacacaattactttttaagtaatatggataatttattgaacaataaaaatattttgggatatatgttatttataactaacaacagaagatgtataatagcaactgataacagaataacaaccattcttattgaaagaaattgccatgcaggttacataaactacgtatttggaatgatgactaaaaattttcaggctaagaagattgtttattattcattaagaaagtaaaaaattaa

SEQ ID NO: 80732 - DNA, 421 bp, Homo sapiens
  misc_feature (338)..(338): n is a, c, g, or t
  misc_feature (344)..(344): n is a, c, g, or t
  misc_feature (353)..(353): n is a, c, g, or t
  misc_feature (356)..(356): n is a, c, g, or t
  misc_feature (379)..(379): n is a, c, g, or t
  misc_feature (385)..(385): n is a, c, g, or t
  misc_feature (400)..(400): n is a, c, g, or t
  misc_feature (410)..(410): n is a, c, g, or t
gaaacgcctcccttcccaccaccagaacctgcatacatcacctggaaaactagagatcagcctgccacacacactacccaggagcccagtggtgcacctgcccacctggcccagtgctgccactgccagcaaccaaagaagccacctggaggcccagggattggcccacgcagacaggctatcatcagtgcccacaaacactgcccatggtcccttgtattgacacaccaggtctaccaccacttaccactgatggtgaaggacaagacttcctgggcatccccattcagcaaagtcttcaccacagcctccaattaacaattacagtctgggccaantgtggntgggttcanggntgttatttccaggcattttgagnaggttnaggcggttaggtttnaaggagggtnagggattttga

SEQ ID NO: 80733 - DNA, 375 bp, Homo sapiens
acctcttactccagccactgatgccccaaacagttcatgcaaatttaaccacatccacataggtgcctcttatagtacactctggaaggagaggggttaacacccacaggaccagcctggagcccaacctgggagaggtgtcagtggatatacacatccttctttcagcccggaggagacagttctgcactgcattccatgagctcctcagaaggtctcatgggattgaactgcggttgccacgatggtggtggactcagcccacgtgcttgtctgtctgatgtgttttgcaccctctgccacttggccctgctctctgtggtcactttcccagtaaattgcctgcacacaagcctttgtcccagtctctgcttt

SEQ ID NO: 80734 - DNA, 1609 bp, Homo sapiens
atgtcacttgcacacacagctgcagagtacatgctctcagatgccctgctgcctgaccgcaggggaccccgcctcaaaggactgcgtctggaactgcccctggaccggatagtcaagttcgtagctgtgggctcccccttgttgctgatgtccctggcattcgcccaggagttctcctctgggtctccgatcagctgcttctctcccagtaacttcagcatccggcaggcagcctacgtggacagctcctgctgggactcactgcttcaccataagcaggacgggcctggccaggacaaaatgaaatctctctggccccacaaggccctcccctactccctgctggccctggccttgctcatgtacctgccggtgctgctgtggcagtatgcagctgtgccagccctcagctccgatctgctgttcatcatcagcgaactggacaaatcttataatcgctccatccgcctcgtgcagcacatgctgaagatccggcagaagagttccgacccctatgtgttctggaatgagctggagaaggctcggaaagaacgatactttgaattccctttgctagagcggtacctggcatgtaagcagcgttcacattcgctagtggctacctacctcctgaggaactccctcttgctcatcttcacctccgccacttacctataccttggtcatttccatctggatgtcttcttccaggaagaattcagctgctccatcaagacagggctgctaagtgatgagacccatgtccccaatctgatcacatgcaggctgacatcactgtccattttccagattgttagcctctccagtgtagcaatatacaccatattggttccagtgataatatacaacctcacacggctatgtcggtgggacaaacgacttttatctgtctatgagatgctcccagcttttgatctcctcagcagaaagatgctaggatgtcccatcaatgacctcaatgtgatccttcttttcctccgagctaacatctctgagctcatctcttttagctggctgagtgtcttatgtgtgttgaaggatacaaccacccagaagcacaatattgacacagtagttgattttatgactttattggctggcttagaaccctcaaaacccaaacacctcaccaactcggcatgtgatgaacacccatagttaagaaaccatggagcaagaaagcttgtggaaagtctctctccttcctcataagacatgcacactaatacacatacacaccaaaaaattacacattttaaaactgctaagcttggatttaactgaatcatatatcttttatcatgttatcctaaaagtgagaagacataaccaagacatggaaataaatgtgaaagctggagccgaagagtcaaagagctaaaaaattaagtctagaacattctatgaggatagtataaataaaaagaaatacagtctagacatgctgcaaggaaagaagattctaaagtccgtttatggaggcaattccatatcctttcttgaacgcacattcagcttaccccagagagcaagtgaggcaatctggcaaaagattaataaagatgtaaacccctggaaaacctttggt

SEQ ID NO: 80735 - DNA, 367 bp, Homo sapiens
tgcacccagtcatcttgggtttttatggacgcttcaagacatcagcattccttctcccagggtatagggtgggaccctctcactggaaggtatttagacccacaatcagaaaggagggggaacattagagtcctgccttggaacaggtaaaaagagggcaggaggtcagaggcctgcccctgaggcccaacgcacccaacattataacaaaagactgtaacaggggcttttggggttatgagccaggaaccgtggatgatatccaatatacatcataacaccgcagcaagtttaaaatgttacagctactttggaaaactctttaggattgcttataaagctaaatatacacttactctatgaccaa

SEQ ID NO: 80736 - DNA, 682 bp, Homo sapiens
gaaagaaaagcagagagtgacgcacatcctcacactcccttgattggtgtaagctcagccccttcatgtcagcccactgtgacctcctgggttccagacctgggaagtacttgccacgttctgcaaggactgagtccagcttcagcagtctcatccggaaggacttggtataggcagaggatgagcctgtctctggtcattctaaaagaaggagctgagcccagtgtcccagaattcggaagctcctcctttacagagggactgtaggggttggtgatctcccaggaagcatcggcccagaagaaccccgcgtgcgtgtgtgtgctcttggtgtgtggtggggggaaggagtggcagcaggggtggcgctgggacactgtcagccacgggctctgctttggggacctcgtgtgggaaaggcattgcctgtggtggcccctcaggaggctctaggaggagcgtgccttcattaccttatttcactcggggggcgtctttgccccctaggtgggggcagaaggtgcagaatgggaagcctgccacttagctaaagctcttgcacatgatgcccttggcctggagaggagtgaagtccccaggcagttccctgtggacactggcacgatgccgggtggggcctcaggggtgttgagatgtgcaggtcgggaggaccccgataacg

SEQ ID NO: 80737 - DNA, 491 bp, Homo sapiens
gaaagaaaagcagagagtgacgcacatcctcacactcccttgattggtgtaagctcagccccttcatgtcagcccactgtgacctcctgggttccagacctgggaagtacttgccacgttctgcaaggactgagtccagcttcagcagtctcatccggaaggacttggtataggcagaggatgagcctgtctctggtcattctaaaagaaggagctgagcccagtgtcccagaattcggaagctcctcctttacagagggactgtaggggttggtgatctcccaggaagcatcggcccagaagaaccccgcgtgcgtcagccggtgcgttggcagaagtcatcgccgtaaactgcagtggaagcaagacggggttcaagatgcggcccaaagataagacgcagcacttggtcgagtgttcacagcgtcaagacaaaggacgggccggcgcggtgactcaggcctgtaatcccagcactttgggaggccgag

SEQ ID NO: 80738 - DNA, 454 bp, Homo sapiens
gaaaaagctgaaaatatggtcacctggctggcagaaatgtatccagctattagccacatgtgttggcacgtgcctgtagtcctagctactctagaggctggggcaggaggatcactggagcccaggagttctaggctgcagtgagccatgatcatgccaccgtatcccatccctgggtgacatattgagaccctgtgtctaaaacacacacatgcactcatactcttagctaaaaatcaaagttattttgctaaagaagggaagactggattgggaggttgcagtgagcctagattgcaccactgcactctagcctgggtgacagagcaagactccgtctcaaaaaaaaaaaatcatttctgagtgtgcaatattggccatatattgctaaatgttgaagctaggtgatgatagcaggtttatttattacactagtctctagtctctcctttta

SEQ ID NO: 80739 - DNA, 771 bp, Homo sapiens
  misc_feature (760)..(760): n is a, c, g, or t
  misc_feature (762)..(764): n is a, c, g, or t
  misc_feature (766)..(766): n is a, c, g, or t
  misc_feature (768)..(769): n is a, c, g, or t
ctccatctcaaaaaataaataaataaaataaaataaaaggcaatattggtttttaaaaaggtgtgtgttttaagaatacttgcagttgtgaaatcatttttttctccattgatagttacctctacaatcattcagacattttattaaggccattttacattgtgtcatcctccagcatcactctcttacttgaaataaaataggccttgtaatcactgtgctctattgtctcactttctgggcctacttactggggctttgagtatttcaggcactcttgccccatcccctctgtcaccacccgcaagcctcatcaagcctctaatctggaggtgggtggtggtaaatgagcaagagggaacttgcttagtctcgggatccatctgtaggaacataacgttcttctaatatctgcagatacccagtttctgcaggataaatttcctcatggtctccccatagaagggcctttcctgctgttctcgatgagcagattaatgtagggcacaggtcttaccttctccatgttttccagttctgcctcttgcattgcacaggataaagctttccaggactaggcacagataatttcggaagctaagaaatagctgtgatggtgacaccaacattattctgtggattaatttggttatttagacctatttaaaagaatccattataggtattttatgtaatatttttcttaaatttgtagtcctgtgtgtggctttcatttgggctatgctattattaattaacngnnncnanntt

SEQ ID NO: 80740 - DNA, 415 bp, Homo sapiens
atctgttagaaatgctgcagtagctaaagggacgttccctggctttggtgaagaaataagtaaacaagccagtgtaaagagaaaaccctggttagtgatcagaggccacattctccaacccctacaagttctagcttcgtgtaatgccagaaagagagaggtcaaaagtctgagagaacttttgttatgaaaagtgtttgtttgtatttttaaaattttggataacataatccagtgctttgggtacaaaggtttgagcaatcggcaccattttaataatgcatttagtagtcgcgatgcattaacacttaaagagatagagtctaaaatgcagttcatgtacacatttcacagtctgcctggatatttattaagacacaccttcttttccctagataccttttctcactatttc

SEQ ID NO: 80741 - DNA, 547 bp, Homo sapiens
ctgtggaaatgaaaatgggaagaaaaggtgtaaaaactcctgcttttttttccttagcaaaccttataaaaatatttgacttgtaaaaatgatatgaatgaataattttgataaaaactaaaaataacacagtattgaatgcttactatgtgctaattactgctgttatgttcttggcactttacaagtgtttaattctcacaatcttgaggtggatacagctctgatcactattttacagatgagaaaactgagtcacaaagaatttaagtaacttgcttaaggtcccatagctaattaataccaatatgaatgatgtcattcagtagtatagaatttaagtgcctcatcaatgtcatggacagtaaagtctattccactgttctctgatcccgtgctcatcacattaatatatcatcaaaagttcaggccgggcgcggtggctcacgcctataatcccagcactttgggaggccgagacaggtggatcacaaggtcaggagatcaagaccatcctggctaacatggtaaaactccacctctacta

SEQ ID NO: 80742 - DNA, 597 bp, Homo sapiens
ggatgggccaggctagcctgggaactccggggctcaagggtcacatagctagtcacggcagagctgggggttcaaacccaagggcagggtgggctttatctggtgcttctcaccagcacggcagagattgctgtcttgccatgaggtgctagggtgaaccccatcattcctccttcaggcagtacctgctctgtgcctagctatgtatggggggcacagctgtccttggacgctcctaagctaaacttcccaaggacaagaaatcccgtgcttctgccccctaactactgtactgcaacacagggagcttcgtggtcagctagggaacttctgacgggaaccaaactgtcgggtggggctgctccttctcctcctgcccatctttatgttcagacaggaaatggtcaccaaaaaagccagggagctgagcaagcacctgtcccactactgcccttcctggtgccactggtttctcctttttaaagggtggaagtttctgctgggtgtggtggatcacgcctgtaatcccagcactttgggagcccgaggccaacggatcacctgaggtcaagagttccaaaccagcctggccaatgt

SEQ ID NO: 80743 - DNA, 161 bp, Homo sapiens
cgcctcagcctcctgaagtgctgggattacaggcataagccatcgcgcccagcccatatgtcttcctttttcctaggtctgctcctcacagcagcagcttaaatctttccttctatttctctctaacctcacaggcccttgctaattttgctcctcacttg

SEQ ID NO: 80744 - DNA, 1077 bp, Homo sapiens
ggagtgcctgcagccggtgctgtccacagggagctccagcccttctcacactcgacccgcagaaaccacccaccttcaccatgtctgacgaggaagttgaacaggtggaggagcagtacgaagaagaagaggaagcccaggaggaagctgcagaagtccatgaggaagttcatgaaccaggaggacgttcaagaagaggagaaaccgagacccaaactcactgctcctaagatcccagaaggggagaaagtggacttcgatgacatccagaagaagcgtcagaacaaagacctaatggagctccaggccctcatcgacagccactttgaagcccggaagaaggaggaggaggagctggtcgctctcaaagagagaatcgagaagcgccgtgcagagagagcggagcagcagaggattcgtgcagagaaggagagggagcgccagaacagactggcggaggaaaaggccagaagggaggaggaggatgccaagaggagggcagaggacgacctgaagaagaagaaagctctgtcttccatgggagccaactacagcagctacctggccaaggctgaccagaagagaggcaagaagcagacagcccgggaaatgaagaagaagattctggctgagagacgcaagccgctcaacatcgatcaccttggtgaagacaaactgagggacaaggccaaggagctctgggagaccctgcaccagctggagattgacaagttcgagtttggggagaagctgaaacgccagaaatatgacatcaccacgctcaggagccgcattgaccaggcccagaagcacagcaagaaggctgggaccccagccaagggcaaagtcggcgggcgctggaagtagagaggccagaaaggcccctcgaggcagagaccctccgccctcttgcacaccagggccgctcgtgggactccacatcctccagcccccacaatcctgtcaggggctccctgacagtcctgggggtggagaggccatcccggggcgtcccccgcgtctgtgtccttgctgccttcatcccctggggcctgtgaataaagctgcagaaccccc

SEQ ID NO: 80745 - DNA, 393 bp, Homo sapiens
aagcttgggccgggcctgtgccctgagagcagcctggggtcgggctgagagtccgcccagggtgggggaccaggaggggcatggccagaggccctgaccctgaaggatcacttgcttcccatttgcagcagcaagaaggctgggaccccagccaagggcaaagtcggcgggcgctggaagtagagaggccagaaaggcccctcgaggcagagaccctccgccctcttgcacaccagggccgctcgtgggactccacatcctccagcccccacaatcctgtcaggggctccctgacagtcctgggggtggagaggccatcccggggcgtcccccgcgtctgtgtccttgctgccttcatcccctggggcctgtgaataaagctgcagaaccccc

SEQ ID NO: 80746 - DNA, 421 bp, Homo sapiens
  misc_feature (20)..(20): n is a, c, g, or t
gtgacggcgtttgttaagcncgttggacaaggccaaggagctctgggagaccctgcaccagctggagattgacaagttcgagtttggggagaagctgaaacgccagaaatatgacatcatgaatgtccgggccagagtgcagatgctggccaagttcagcaagaaggctgggaccccagccaagggcaaagtcggcgggcgctggaagtagagaggccagaaaggcccctcgaggcagagaccctccgccctcttgcacaccagggccgctcgtgggactccacatcctccagcccccacaatcctgtcaggggctccctgacagtcctgggggtggagaggccatcccggggcgtcccccgcgtctgtgtccttgctgccttcatcccctggggcctgtgaataaagctgcagaaccccc

SEQ ID NO: 80747 - DNA, 334 bp, Homo sapiens
agggagggtgccccgggctcacgtgccagccccctaaccacactaacgacctaggcccgccaggcacagcagcaagaaggctgggaccccagccaagggcaaagtcggcgggcgctggaagtagagaggccagaaaggcccctcgaggcagagaccctccgccctcttgcacaccagggccgctcgtgggactccacatcctccagcccccacaatcctgtcaggggctccctgacagtcctgggggtggagaggccatcccggggcgtcccccgcgtctgtgtccttgctgccttcatcccctggggcctgtgaataaagctgcagaaccccc

SEQ ID NO: 80748 - DNA, 542 bp, Homo sapiens
ggagtgcctgcagccggtgctgtccacagggagctccagcccttctcacactcgacccgcagaaaccacccaccttcaccatgtctgacgaggaagttgaacaggtggaggagcagtacgaagaagaagaggaagcccaggaggaagctgcagaagtccatgaggaagttcatgaaccagaggacgacctgaagaagaagaaagctctgtcttccatgggagccaactacagcagctacctggccaaggctgaccagaagagaggcaagaagcagacagcccgggaaatgaagaagaagattctggctgagagacgcaagccgctcaacatcgatcaccttggtgaagacaaactgagggacaaggccaaggagctctgggagaccccacaatcctgtcaggggctccctgacagtcctgggggtggagaggccatcccggggcgtcccccgcgtctgtgtccttgctgccttcatcccctggggcctgtgaataaagctgcagaacccccaaccaaaaaacaaacaacaacccacacaaaa

SEQ ID NO: 80749 - DNA, 1221 bp, Homo sapiens
cgggctggcagagatgcggatgagcccatctttcaccctgcaaggagcccaggcctctttcccggcagcaggctcctgtcttgcggctgagtacatctgatcactgtctctgttccctgttccctcaaacccgcttctcctgctcctggttctccggctctccagtacgaagaagaagaggaagcccaggaggaagctgcagaagtccatgaggaagttcatgaaccaggaggacgttcaagaagaggagaaaccgagacccaaccgcactggcttttctcttgcatgtgtgcttgtgccttttgccacctggaagacaccgcagaggaggacgcggaagaggagaaaccgagacccaaactcactgctcctaagatcccagaaggggagaaagtggacttcgatgacatccagaagaagcgtcagaacaaagacctaatggagctccaggccctcatcgacagccactttgaagcccggaagaaggaggaggaggagctggtcgctctcaaagagagaatcgagaagcgccgtgcagagagagcggagcagcagaggattcgtgcagagaaggagagggagcgccagaacagactggcggaggaaaaggccagaagggaggaggaggatgccaagaggagggcagaggacgacctgaagaagaagaaagctctgtcttccatgggagccaactacagcagctacctggccaaggctgaccagaagagaggcaagaagcagacagcccgggaaatgaagaagaagattctggctgagagacgcaagccgctcaacatcgatcaccttggtgaagacaaactgagggacaaggccaaggagctctgggagaccctgcaccagctggagattgacaagttcgagtttggggagaagctgaaacgccagaaatatgacatcaccacgctcaggagccgcattgaccaggcccagaagcacagcaagaaggctgggaccccagccaagggcaaagtcggcgggcgctggaagtagagaggccagaaaggcccctcgaggcagagaccctccgccctcttgcacaccagggccgctcgtgggactccacatcctccagcccccacaatcctgtcaggggctccctgacagtcctgggggtggagaggccatcccggggcgtcccccgcgtctgtgtccttgctgccttcatcccctggggcctgtgaataaagctgcagaaccccc

SEQ ID NO: 80750 - DNA, 1096 bp, Homo sapiens
ggagtgcctgcagccggtgctgtccacagggagctccagcccttctcacactcgacccgcagaaaccacccaccttcaccatgtctgacgaggaagttgaacaggtggaggagcagtacgaagaagaagaggaagcccaggaggaagctgcagaagtccatgaggaagttcatgaaccaggaggacgttcaagaagaggagaaaccgagacccaaactcactgctcctaagatcccagaaggggagaaagtggacttcgatgacatccagaagaagcgtcagaacaaagacctaatggagctccaggccctcatcgacagccactttgaagcccggaagaaggaggaggaggagctggtcgctctcaaagagagaatcgagaagcgccgtgcagagagagcggagcagcagaggattcgtgcagagaaggagagggagcgccagaacagactggcggaggaaaaggccagaagggaggaggaggatgccaagaggagggcagaggacgacctgaagaagaagaaagctctgtcttccatgggagccaactacagcagctacctggccaaggctgaccagaagagaggcaagaagcagacagcccgggaaatgaagaagaagattctggctgagagacgcaagccgctcaacatcgatcaccttggtgaagacaaactgagggacaaggccaaggagctctgggagaccctgcaccagctggagattgacaagttcgagtttggggagaagctgaaacgccagaaatatgacatcaccacgctcaggagccgcattgaccaggcccagaagcacagcaagaaggctgggaccccagccaagggcaaagtcggcgggcgctggaagtagagaggccagaaaggcccctcgaggcagagaccctccgccctcttgcacaccagggccgctcgtgggactccacatcctccagcccccacaatcctgtcaggggctccctgacagtcctgggggtggagaggccatcccggggcgtcccccgcgtctgtgtccttgctgccttcatcccctggggcctgtgaataaagctgcagaaccccccccccttcacagtctgtac

SEQ ID NO: 80751 - DNA, 1077 bp, Homo sapiens
ggagtgcctgcagccggtgctgtccacagggagctccagcccttctcacactcgacccgcagaaaccacccaccttcaccatgtctgacgaggaagttgaacaggtggaggagcagtacgaagaagaagaggaagcccaggaggaagctgcagaagtccatgaggaagttcatgaaccaggaggacgttcaagaagaggagaaaccgagacccaaactcactgctcctaagatcccagaaggggagaaagtggacttcgatgacatccagaagaagcgtcagaacaaagacctaatggagctccaggccctcatcgacagccactttgaagcccggaagaaggaggaggaggagctggtcgctctcaaagagagaatcgagaagcgccgtgcagagagagcggagcagcagaggattcgtgcagagaaggagagggagcgccagaacagactggcggaggaaaaggccagaagggaggaggaggatgccaagaggagggcagaggacgacctgaagaagaagaaagctctgtcttccatgggagccaactacagcagctacctggccaaggctgaccagaagagaggcaagaagcagacagcccgggaaatgaagaagaagattctggctgagagacgcaagccgctcaacatcgatcaccttggtgaagacaaactgagggacaaggccaaggagctctgggagaccctgcaccagctggagattgacaagttcgagtttggggagaagctgaaacgccagaaatatgacatcatgaatgtccgggccagagtgcagatgctggccaagttcagcaagaaggctgggaccccagccaagggcaaagtcggcgggcgctggaagtagagaggccagaaaggcccctcgaggcagagaccctccgccctcttgcacaccagggccgctcgtgggactccacatcctccagcccccacaatcctgtcaggggctccctgacagtcctgggggtggagaggccatcccggggcgtcccccgcgtctgtgtccttgctgccttcatcccctggggcctgtgaataaagctgcagaaccccc

SEQ ID NO: 80752 - DNA, 843 bp, Homo sapiens
ggagtgcctgcagccggtgctgtccacagggagctccagcccttctcacactcgacccgcagaaaccacccaccttcaccatgtctgacgaggaagttgaacaggtggaggagcagtacgaagaagaagaggaagcccaggaggaagctgcagaagtccatgaggaagttcatgaaccaggaggacgttcaagaagaggagaaaccgagacccaaactcactgctcctaagatcccagaaggggagaaagtggacttcgatgacatccagaagaagcgtcagaacaaagacctaatggagctccaggccctcatcgacagccactttgaagcccggaagaaggaggaggaggagctggtcgctctcaaagagagaatcgagaagcgccgtgcagagagagcggagcagcagaggattcgtgcagagaaggagagggagcgccagaacagactggcggaggaaaaggccagaagggaggaggaggatgccaagaggagggcagaggacgacctgaagaagaagaaagctctgtcttccatgggagccaactacagcagctacctggccaaggctgaccagaagagaggcaagaagcagacagcccgggaaatgaagaagaagattctggctgagagacgcaagccgctcaacatcgatcaccttggtgaagacaaactgagggacaaggccaaggagctctgggagaccctgcaccagctggagattgacaagttcgagtttggggagaagctgaaacgccagaaatatgacgcctctccacccccaggactgtcagggagcccctgacaggattgtgggggctggaggatgtggagtcccacg

SEQ ID NO: 80753 - DNA, 752 bp, Homo sapiens
  misc_feature (114)..(114): n is a, c, g, or t
ggagtgcctgcagccggtgctgtccacagggagctccagcccttctcacactcgacccgcagaaaccacccaccttcaccatgtctgacgaggaagttgaacaggtggaggagnaagcccaggaggaagaggaagttcaagaagaggagaaaccgagacccaaactcactgctcctaagatcccagaaggggagaaagtggacttcgatgacatccagaagaagcgtcagaacaaagacctaatggagctccaggccctcatcgacagccactttgaagcccggaagaaggaggaggaggagctggtcgctctcaaagagagaatcgagaagcgccgtgcagagagagcggagcagcagaggattcgtgcagagaaggagagggagcgccagaacagactggcggaggaaaaggccagaagggaggaggaggatgccaagaggagggcagaggacgacctgaagaagaagaaagctctgtcttccatgggagccaactacagcagctacctggccaaggctgaccagaagagaggcaagaagcagacagcccgggaaatgaagaagaagattctggctgagagacgcaagccgagggccgctcgtgggactccacatcctccagcccccacaatcctgtcaggggctccctgacagtcctgggggtggagaggccatcccggggcgtcccccgcgtctgtgtccttgctgccttcatcccctggggcctgtgaataaagctgcagaaccccc

SEQ ID NO: 80754 - DNA, 1025 bp, Homo sapiens
  misc_feature (114)..(114): n is a, c, g, or t
ggagtgcctgcagccggtgctgtccacagggagctccagcccttctcacactcgacccgcagaaaccacccaccttcaccatgtctgacgaggaagttgaacaggtggaggagnaagcccaggaggaagaggaagttcaagaagaggagaaaccgagacccaaactcactgctcctaagatcccagaaggggagaaagtggacttcgatgacatccagaagaagcgtcagaacaaagacctaatggagctccaggccctcatcgacagccactttgaagcccggaagaaggaggaggaggagctggtcgctctcaaagagagaatcgagaagcgccgtgcagagagagcggagcagcagaggattcgtgcagagaaggagagggagcgccagaacagactggcggaggaaaaggccagaagggaggaggaggatgccaagaggagggcagaggacgacctgaagaagaagaaagctctgtcttccatgggagccaactacagcagctacctggccaaggctgaccagaagagaggcaagaagcagacagcccgggaaatgaagaagaagattctggctgagagacgcaagccgctcaacatcgatcaccttggtgaagacaaactgagggacaaggccaaggagctctgggagaccctgcaccagctggagattgacaagttcgagtttggggagaagctgaaacgccagaaatatgacatcaccacgctcaggagccgcattgaccaggcccagaagcacagcaagaaggctgggaccccagccaagggcaaagtcggcgggcgctggaagtagagaggccagaaaggcccctcgaggcagagaccctccgccctcttgcacaccagggccgctcgtgggactccacatcctccagcccccacaatcctgtcaggggctccctgacagtcctgggggtggagaggccatcccggggcgtcccccgcgtctgtgtccttgctgccttcatcccctggggcctgtgaataaagctgcagaaccccc

SEQ ID NO: 80755 - DNA, 753 bp, Homo sapiens
ctccctcggaggagccggggacagggctgagcagacccccttctctggctgcaggagaagcgccgtgcagagagagcggagcagcagaggattcgtgcagagaaggagagggagcgccagaacagactggcggaggaaaaggccagaagggaggaggaggatgccaagaggagggcagaggacgacctgaagaagaagaaagctctgtcttccatgggagccaactacagcagctacctggccaaggctgaccagaagagaggcaagaagcagacagcccgggaaatgaagaagaagattctggctgagagacgcaagccgctcaacatcgatcaccttggtgaagacaaactgagggacaaggccaaggagctctgggagaccctgcaccagctggagattgacaagttcgagtttggggagaagctgaaacgccagaaatatgacatcaccacgctcaggagccgcattgaccaggcccagaagcacagcaagaaggctgggaccccagccaagggcaaagtcggcgggcgctggaagtagagaggccagaaaggcccctcgaggcagagaccctccgccctcttgcacaccagggccgctcgtgggactccacatcctccagcccccacaatcctgtcaggggctccctgacagtcctgggggtggagaggccatcccggggcgtcccccgcgtctgtgtccttgctgccttcatcccctggggcctgtgaataaagctgcagaaccccc

SEQ ID NO: 80756 - DNA, 930 bp, Homo sapiens
ggagtgcctgcagccggtgctgtccacagggagctccagcccttctcacactcgacccgcagaaaccacccaccttcaccatgtctgacgaggaagttgaacaggtggaggagcagtacgaagaagaagaggaagcccaggaggaagctgcagaagtccatgaggaagttcatgaaccaggaggacgttcaagaagaggagaaaccgagacccaaactcactgctcctaagatcccagaaggggagaaagtggacttcgatgacatccagaagaagcgtcagaacaaagacctaatggagctccaggccctcatcgacagccactttgaagcccggaagaaggaggaggaggagctggtcgctctcaaagagagaatcgagaagcgccgtgcagagagagcggagcagcagaggattcgtgcagagaaggagagggagcgccagaacagactggcggaggaaaaggccagaagggaggaggaggatgccaagaggagggcagaggacgacctgaagaagaagaaagctctgtcttccatgggagccaactacagcagctacctggccaaggctgaccagaagagaggcaagaagcagacagcccgggaaatgaagaagaagattctggctgagagacgcaagccgctcaacatcgatcaccttggtgaagacaaactgagggacaaggccaaggagctctgggagaccctgcaccagctggagattgacaagttcgagtttggggagaagctgaaacgccagaaatatgacagggccgctcgtgggactccacatcctccagcccccacaatcctgtcaggggctccctgacagtcctgggggtggagaggccatcccggggcgtcccccgcgtctgtgtccttgctgccttcatcccctggggcctgtgaataaagctgcagaaccccc

SEQ ID NO: 80757 - DNA, 516 bp, Homo sapiens
  misc_feature (114)..(114): n is a, c, g, or t
ggagtgcctgcagccggtgctgtccacagggagctccagcccttctcacactcgacccgcagaaaccacccaccttcaccatgtctgacgaggaagttgaacaggtggaggagnaagcccaggaggaagaggaagttcaagaagaggagaaaccgagacccaaactcactgctcctaagatcccagaaggggagaaagtggacttcgatgacatccagaagaagcgtcagaacaaagacctaatggagctccaggccctcatcgacagccactttgaagcccggaagaaggaggaggaggagctggtcgctctcaaagagagaatcgagaagcgccgtgcagagagagcggagcagcagaggattcgtgcagagaaggagagggagcgccagaacagactggcgcggactaggctacatattttctgttcatattaaataattcaataactattctctaggctgggaccggaaccctaattcttctatagtgagttcgttttacaattaactgtcc

SEQ ID NO: 80758 - DNA, 2527 bp, Homo sapiens
gtaagacatgcctttcgccttccaccgtgattatgaggcctccccagccacgtggaactcatacacttaataattcattacctattaagcttcttctcagctgaggtcatgcaaaaatgactcacttgcatatgatactttccttgaggaattaaaccataaactccctccttgcattgtgtattgagggagaagattcctagaagcaacattcatcgtctctcttttcaatgatggacaactctctgctgtgccaaatatactaactttaaccacccactgccaaactcacacctccttgttcaacaagccagttacgggcagtgaatgaatctacgatgctgaacagccccgtgggcatcttctcactgggcactggctagaatgcagttggattagactttcacaattgctttgttttcaagccaggaaggagaaattgaaggcaattcaccacctttctatatccaagatgaaaacacagcactctcctaaacttcagaagtataactcagtgggttagtacttcagatctagcctgaggcaaaattatgatttttccaaaagattttctttttttagcattcttttccttacacgcaggcctttgatcaagctacagttttgaactgattacagcttttgaagcctcagaagatttaaagacccacattgttaacaatggtgttttaggtgtgtggcgtattagaggagtcggctaattctaagtcctcaagtgctcggaaaacaacattaaaaagtctgacatttgaaaagtatggaattaaacatcatggaactggctttaagaaggtatccattcgtggcatgaaaatgtgaagaactttctttctttgcaatgtgagttcaaggaaacgcccaagagtggatgttccatcgtaaatgctctgcccccagcttttcaaaggacacagaaattgcacccagcaaagatgtcctgtcaaaatgatttaaaagaagaaaaagaaagttgctagaggggaactggtactccagatcaaaaaacaattttaagtggtctattttggtggtctgtgttgagacatataacagcccaggctgctgtttttccaagaggttaaatttcaaaaagaggaaacaacagcaaacaggctgccaatttactcaacaatgtcacaactggctggagctctgttcaaagcaaaaccgctgatttacaaattcctggatttactcttaaatattaacacttcttaggaaactttagaccttacatgtcacatttatgactcctaggcagacacaaccctctccaaacacatggtcctcatgacaactctttgccatgtatttcagccccactaagggaagccactgtcaactcaacctgtgatgccaagaagcagcccaggtaccaagggacatagactggagtcaacattagatgcgtttctgtatggtgtagcttggaggaggatgtttacagcacaattccgcaataatatgctgtagcagacagaagtttcccttctatcagacaaagaactagtcagggaaggcaagctggctagaccacggttcagtttttctcatctcctttctgcaagtggaaaatctgctggctggcagtggaaataatagggaaaccacctcagaatgttggagaagaggatgggggaggagttgcagctcaggaatccttcaaagaagacatgtggggagaggaagacagcacacagaagcagggagaagttaagagtatgaaccttaccaacaggtaaaaatgtgtcatattaattttttcaacatcaacaaacacgtcaaaagatggagcactgaaagctgcattttaaacaaatgccccaggtaatgtatactgaaaatgcaatcctgatgtcctaggtggcaggattattgttgttggagaatgctcctgtaaatttcttttccagtcttctctcctcactttccatgcctaaggagtctaagtcccactgcccctgctaattgtccctggttaattagaatggagaatgacccctgaaccaacatgggcccatgagccgcactggtgaattgtcattcagacccaaaggctagtcagtctccctgggcattgagaagcaacagaaagcaagtatgttctttgattacagactaattttctagccccagagttggaactaaaatatgcagataggatagtggcaagagacagacaaatgcctaggcagataaggggtgtccctggagaacctctgacctgcccaggtcattgtgcaccagggttttgcctaaacatgcccatggtgaaaaatttcatcccttaacacatgcagtgtacagtggctcagactaagggcctgcaggcacattggaaagacagggtagagccaccaaaaattcgctccttatgcaggggaagagcctggcctccagcttgtgtgtggtggcctggtattcaatttgtgagatggaaacctgtgtccaggacccctctctttgctgacagctttcctttcgcttaataaattccatcctcctc

SEQ ID NO: 80759 - DNA, 493 bp, Homo sapiens
aaaaaaaatggaacatctttttcagtctttggacctcaaaatacataattcagttactaagtgcgtgcacttttgggcctcacatctggattaaaatcttgcctttgccacatactgaccatgagaacttgggcgagttactgaacctttctgggactcagtttcttcatctgttaaaatgaggttaagagtatgaaccttaccaacaggtaaaaatgtgtcatattaattttttcaacatcaacaaacacgtcaaaagatggagcactgaaagctgcattttaaacaaatgccccaggtccatactgactttatgagccgtaacacttacagcgaaggtctgcagcttcactcctgaagccagcgagaccacggaacccaccgggagaaacgaacaactccagacgcatcactttaagaactgtgacgctcaccgcgaaggtttgcaacttcactcctgagccaccgagaccacgaacccaccggaaggaag

SEQ ID NO: 80760 - DNA, 305 bp, Homo sapiens
caccacattctccacctgggactcccccaggcatccctggggaattcagctcttgggaggctggggtcacagggattctctctaatggggagatggaggcagtggtgtcctgaagggaccctcccccccaacccctcccttttacccagatggaggtggtcctcctgtaggtgcctccgcccctctggagccggccagcaagtgtgtgtgagcctgaggttgtcctccgcatatctgaactaagttaccacttctgtgtgctagatgtagggttaatatcagtagtgataaaaacaaaaaccttg

SEQ ID NO: 80761 - DNA, 176 bp, Homo sapiens
catttttccacaaggggtgaagcaggttgcattgtaaatgttctttcaaaatagtgcaaatgagattcatttattttacaacttcctctcctttagcctctcaattatattcctattttaaatgtctatgttttaaataaactgcactggggcaggaaaagagaagtgtaagaacc

SEQ ID NO: 80762 - DNA, 373 bp, Homo sapiens
gaacaaagtcttatattccttacccttgaccttaaaggaggttgagttgaatgtctcaaattttcctccttgaggggcaaaatgtttttaaactactaggttaaagtcattttgtgaatgtttctcattagctttttactgagggtcagttgccactagtgaagttattccatcctgtctagttttcagttgccatattcctgagaaaaacaattgcctcacaaggaatccagaccctacgtctgctacacacattactttaatccacaaactagaatcaagacccactaatggttttgcatgatggatttgctctttgctttctgtcacgggaggaaaaataacaagaaggcagcccagccagtcatagggg

SEQ ID NO: 80763 - DNA, 583 bp, Homo sapiens
agcgggggtccccggatgtagccctggcgcaagcatctcttcttttttccacctcgccttccgcggattcccagcttgagaaacacctctttgccccgtcatgccaaagaggaaagtgaccttccaaggcgtgggagatgaggaggatgaggatgaaatcattgtccccaagaagaagctggtggaccctgtggctgggtcagggggtcctgggagccgctttaaaggcaaacactctttggatagcgatgaggaggaggatgatgatgatggggggtccatgcagacctgggtgagtgaaggctacttcccggacggtgtttattgccggaagctggacccccctggtggtcagttctacaactccaaacgcattgactttgacctctacacctgagcctgctgggggcccagtttggtgggcccttctttcctggactttgtggaggaggcaccaagtgtctcaggcagcgaggaaattggaggccatttttcagtcaatttccctttcccaataaaagcctttagttgtgtactgggccttggctgtgctgatggccagaagcgagggaacctctccaca

SEQ ID NO: 80764 - DNA, 1264 bp, Homo sapiens
agcgggggtccccggatgtagccctggcgcaagcatctcttcttttttccacctcgccttccgcggattcccagcttgagaaacacctctttgccccgtcatgccaaagaggaaagtgaccttccaaggcgtgggagatgaggaggatgaggatgaaatcattgtccccaagaagaagctggtggaccctgtggctgggtcagggggtcctgggagccgctttaaaggcaaacactctttggatagcgatgaggaggaggatgatgatgatggggggtccagcaaatatgacatcttggcctcagaggatgtagaaggtcaggaggcagccacactccccagcgaggggggtgttcggatcacaccctttaacctgcaggaggagatggaggaaggccactttgatgccgatggcaactacttcctgaaccgggatgctcagatccgagacagctggctggacaacattgactgggtgaagatccgggagcggccacctggccagcgccaggcctcagactcggaggaggaggacagcttgggccagacctcaatgagtgcccaagccctcttggagggacttttggagctcctattgcctagagagacagtggctggggcactgaggcgtctgggggcccgaggaggaggcaaagggagaaaggggcctgggcaacccagttcccctcagcgcccggaccggctctccgggttggccgaccagatggtggcccggggcaaccttggtgtgtaccaggaaacaagggaacggttggctatgcgtctgaagggtttggggtgtcagaccctaggaccccacaatcccacacccccaccctccctggacatgttcgctgaggagttggcggaggaggaactggagaccccaacccctacccagagaggagaagcagagtcgcggggagatggtctggtggatgtgatgtgggaatataagtgggagaacacgggggatgccgagctgtatgggcccttcaccagcgcccagatgcagacctgggtgagtgaaggctacttcccggacggtgtttattgccggaagctggacccccctggtggtcagttctacaactccaaacgcattgactttgacctctacacctgagcctgctgggggcccagtttggtgggcccttctttcctggactttgtggaggaggcaccaagtgtctcaggcagcgaggaaattggaggccatttttcagtcaatttccctttcccaataaaagcctttagttgtgta

SEQ ID NO: 80765 - DNA, 1312 bp, Homo sapiens
agcgggggtccccggatgtagccctggcgcaagcatctcttcttttttccacctcgccttccgcggattcccagcttgagaaacacctctttgccccgtcatgccaaagaggaaagtgaccttccaaggcgtgggagatgaggaggatgaggatgaaatcattgtccccaagaagaagctggtggaccctgtggctgggtcagggggtcctgggagccgctttaaaggcaaacactctttggatagcgatgaggaggaggatgatgatgatggggggtccagcaaatatgacatcttggcctcagaggatgtagaaggtcaggaggcagccacactccccagcgaggggggtgttcggatcacaccctttaacctgcaggaggagatggaggaaggccactttgatgccgatggcaactacttcctgaaccgggatgctcagatccgagacagctggctggacaacattgactgggtgaagatccgggagcggccacctggccagcgccaggcctcagactcggaggaggaggacagcttgggccagacctcaatgagtgcccaagccctcttggagggacttttggagctcctattgcctagagagacagtggctggggcactgaggcgtctgggggcccgaggaggaggcaaagggagaaaggggcctgggcaacccagttcccctcagcgcccggaccggctctccgggttggccgaccagatggtggcccggggcaaccttggtgtgtaccaggaaacaagggaacggttggctatgcgtctgaagggtttggggtgtcagaccctaggaccccacaatcccacacccccaccctccctggacatgttcgctgaggagttggcggaggaggaactggagaccccaacccctacccagagaggagaagcagagtcgcggggagatggtctggtggatgtgatgtgggaatataagtgggagaacacgggggatgccgagctgtatgggcccttcaccagcgcccagatgcagacctgggtgagtgaaggctacttcccggacggtgtttattgccggaagctggacccccctggtggtcagttctacaactccaaacgcattgactttgacctctacacctgagcctgctgggggcccagtttggtgggcccttctttcctggactttgtggaggaggcaccaagtgtctcaggcagcgaggaaattggaggccatttttcagtcaatttccctttcccaataaaagcctttagttgtgtactgggccttggctgtgctgatggccagaagcgagggaacctctccaca

SEQ ID NO: 80766 - DNA, 445 bp, Homo sapiens
atcctcagcttacaatgatgatgggattaagagataaagtaaagacaggcataagaaattataagaggattgattgaggaagtgataaatgtccatgaaatcttcacaatttatgttcagagactgcagtaaagacaggcataagaaattataaaagtattaattttgggaactgataagtgttcatgaaatcttcacaatttatgttcttctgccacagcttcagccggtccctccacttggggtccctgacttcccacaacattcaaatataaaggataaatgaagactttcctgggtaaacaaaagatgagggaattcactaccaccagatgtgtcttacaaaaaatgctacagttcttcaatctggaaagaaaagaattctagcctggcaacaaaaaatgtaaattacacagacaaatttcaaaatactctaatactttat

SEQ ID NO: 80767 - DNA, 326 bp, Homo sapiens
tgacgaggaggaagatgagacagggcctgcgtgaggaggagctggccgtaaagcccaggatggaacccagaggtccgtctcagggcatgttgacatgagagaaagcactggaatctggtctagaggtggatgtgagagggccagacctgtttccattgccaggacaaaaacctgagggagccgtccccatggggcaaagaggactggtgtgggacacggaggccttgcctgtgtccttatggcttcagccagctccttccctttcctcctatggaacgtaagaagtttgggataaatgctttccaagatccaagtcagttttctga

SEQ ID NO: 80768 - DNA, 300 bp, Homo sapiens
cttgaatttgggaggtggaggttgcagtgaaccaagatcacaccactgcactctagcctgggcaacagagtgaaactccatcttgagaaaacaaaaaaccagcttcagctgaactccaagccaacacgcagcagcaactactgctatgtgagtgagtcatcttggacttaccagttcagtgaagcctccaaatgactgcagtcccagccaacatcatgtgaaacagaaaaaccacccagcagagcccaggcaaccctcagaactgtgagagataataatgagtttctgtaccaggccaat

SEQ ID NO: 80769 - DNA, 381 bp, Homo sapiens
tacatgttatatcaagggagggggtataaaagaaatacaaaaattgcagaggtatctggaatgtacctatttgttaattctatttgtcatttcttttgtttcatcttttgagtaataagctgcttggaaaagtttctgttctttagctgattttttagctataaaaatgtatttgaaaagctcataaatttcaggattgaaaagataattgaaagtctaaaaaaaacctaattcattgaagtaataaccaaataattttcaatcttgattcaactgtgattcaaatcttacaccatttgcccacttctatgaattttatgtataaaattttttaagagtcagagtttttttttcttgattaattggatgtatttcacagaa

SEQ ID NO: 80770 - DNA, 361 bp, Homo sapiens
ggccggtgtcgggtagagagactgccagggcacggtggcagggccggtgtggagtagacagcctggggtcaggagagggaggaaggcacatttcccacctatacttgctcagaagtgggtgaagaaagtggggccacagagggaggggctgggagctgcccagagaaagcagatgagcctggcagccaggcttgggttctgggctggaaactggacaatgcgtttagctgaacccacggggggactggggtgggaggctgtccttgctgtggttcatgtgtgaccaggctgggaacagctccccctgctcatttccagggcagacgtgggtctctaaggagcgcaggtccttccccaggtc

SEQ ID NO: 80771 - DNA, 718 bp, Homo sapiens
cgccggaggaggccgtgggaggtgacgtagctgcagggggagctggggaagagccgcgcaggcgccggagagtcttgcggagcatccccctgtgctgagtcccggattcattccttggttttacagacgaggaagctgaggatctgagagctgtacagtagtggctgaggtggggtttgcagtgaaggatgtgacacaccccagatggagctgaatgggcgtgggacctcaggtcttggccacagtggcctgctgtgcattgatcctgctacagagtgtccattatcagccaggcgcggtggctcacgcctgtaatccctgcactttgggaggccgaggtagggcggatacctgaggtcgggagttcaagaccagcatgaccaacgcagagaaaccccgtctctactaaaaatacaaaattagccgggcgtggtggcgcatgcttgtagtcccagctactcgggaggctgaggcaggagaatcgcttgaacccgggaggcagaggttgaggtgagctaagatcgcgccattgcactccagcctggcaacaagagtgaaactctgtctcaaaaaaaaaaaaaaaagtgtgcattatcagggacatggcaagaggacggtggtggaatgctggtggagctggcccagccgtttctggggacggggtcctcagcacagcctgagactgctctggtcccactggccaggctggggctctggg

SEQ ID NO: 80772 - DNA, 467 bp, Homo sapiens
gcgcgtgtgcatgcacccaggagtatatctagattttatgggcctgaggcttacggtttgggcaatatgaatctttctagaactcttcccagggacctgcgcaagtgaagggccccgaagctcactagcttcatggtacatcagcctctgcacatgcgtgtgtttacatgaactgtgtatgtatgcgtgaagatagatggaggaaccaacgaaaaccatggttctttgaccagtagggctcagttccattgaatagtacaatagaaatactagttagtaccagtcactgtgtttcttttctgggaagagagagaagatttattaaaaatcaaatgggttaagaattttctgaaaaatgccctttgaatttcagccattagctaagttagatatacagtgctgtggcgcatgctctttattttcagtaggcaaataaatataacatttttaaatatattctttatccc

SEQ ID NO: 80773 - DNA, 130 bp, Homo sapiens
ttaaaaggactgtgtaaactgtaaagtgctatataagcataagttactaacaattcatcattagattttccattcagacctcctaaggtactcttttccactggcttttgatccgtgcagccgcctccta

SEQ ID NO: 80774 - DNA, 1051 bp, Homo sapiens
  misc_feature (724)..(724): n is a, c, g, or t
caagattccttaccagcagtatgactgttttttccccagtatttgtaggaggccaccagagagacaggattgcaaggttttaaatatgctagtgtcatgaggtcatggatttcctacctgaaacagatagtgtgactgccctgctatagccatgtttggccagtgtaggaattttgagaacagtgaacacttaatactgagatggcatttgccaccccgacaaggaccatacctgccattccattgtagttcgccttgcccagaagttttaaaatttttctttcagcctgggatttcaagtgtactacagcatcctcttcacctatacaagcgtctgttgttttaaaaggaaactgagatggagtctccctatgctacctaggctggtctccaactcctgcactcaagtgttcctcttgcctcagcctcccgtgtcctgagggagaagctggtgccctttatcacacagctaacaacgctcctggccatggatcagagaagttgaaggaaaatacagaggaagttctaacagtggcagacctaattactgcaccatgccaagcaggtaatccagcaggcgctgggaacagcctttggctgacagccagcaaggaaatggggacttcagtgctacaacttcaaggaactaaattttgccaacaaatgtgaataagcttccaagtggattcttccccagagcctccaaataagagcccagcctggntttcatctttgatttcatctctttgagactccaagcagagaagctggtcaggcccccaccaattctccaccatcagacctctgacctaagaactatcaggcacaagaatatgactcctgtaacaatggcgagtgatgattccacatgcttagaggttgggagactctcggaagtcacggtcccagcactttatttcaatttccacttcagtctcggatatccttcaatcaggcaaagctatcttactgagggaaaaactgggtcctcccttcgcacggcaatttagggcgcgggcgcattttccaaaaaaatggggcaaaaagggga

SEQ ID NO: 80775 - DNA, 537 bp, Homo sapiens
gcactagcacaggagaatgagaaatagccagggagataggagaaaatcttcagcatcctttctggaaaatctgaccaaaatttgcacctcctcttcaactgttggtttatatttccttaaaggaggcagattagagagaggtatctttagagggagaatcatgccccttctctatgctgtatagtgcttagtgtccaagagctcttcagttacattcaattaatgtgttaatttacagctgaatcacaaaataatagagtataagggacccaataaatcatctgtatttgtgatttccgaactgaattctttggagcaagtcaaaggacttattttctatctgcattgggaaacctataaagctgtgaccttcctttcctagaagagctaataaaagcaacagcatccaggcagtcaaagatacaggcctcaccccttccttctaagaaacggttgtgattttcatcagacctcaaacctttcagaaagttccaggggcttggatctagtcaagaatatctacagggcagaggggcc

SEQ ID NO: 80776 - DNA, 1691 bp, Homo sapiens
ctaagatagtatgagaaagttctgatcttgacagttcacgtaacattcaatcaattataccattgctctatctctaaagttttctttttctccttttctcagtgtcttaccaagaatgaaaggcaacctatgtaaaaactatgggctttctagtataaataaaaactactcatctccagaaaataaacaatgactgctaagatgattgaaaaaagaaaggagaagaaagtagcttgtaaaagcgtgtgaaatgcattcacgttggaatctcctacaggcacttcaggtcaaagactaccgatgtccagatcataatgcgaggacagtttgagcccagtgctctctgactgaggtagaacccccgggaaggtgaagagggcagccgtctgcgaaacagcccagcatttaagaatgggcagcacctggccaggtgcatttgagaactaggaatgtggcaacaataacatttatttatttggatgaagagaagaagatgtattggattccctgaaacaatcattgacctgcctgaatcccaactgttgcactgactccactaattcaccaatccacttgagctgggaggagagcccatgcacagaagtttatggataaacagacctgaacgtctagcatgatgtcaaatttatatggccacagaactacaaaaggaaataactataacctcactgaccacagtgctgctgacacttggacaacatgggtttgagcttcatgggtccacttagacaataattttttcactaactatattggaaatgtttttggaaatttataacagtttgaaaaatattgtagaccaacatgtagcctagaaatattaaaacattaagaagcaagtatggcatgaatacatagaatatatgtagatactattctattttatcatttactactataaatatatgcaaatctattaaatgaggttaacatttatcaaagcatgtggtcacaaactcttatagtttgtacatggcaccatttacagacaaggaaatagaagccaatgtaaaaatgcagtattaagtcataaccgcataaaagtaactgtggcacatactgcactaccatgataatttcacaggcacctcccactgctattgtggtgagcccacgtgttgtgagcttccgcataaagccctgcaattctgatcattgccacgtgggcagtttgtgtctctagttagttgtgtactgtagtaaaaagtgatctcgcagttcttgcataatttccgtgtttagtgcgatatggtaaacattgaatagcaccatgaaacccacacgaagggccactggtgatgttggaaggctcccaagaagcagagaaaattcatgacattacaaaatcagtcaaatttcttcatatgcactgtagattgaggtctgcagctggggtttcccattgttttaagataaatgaatcagcctaaagatcattgtaaaaaaagaaaaagatattggagaggctataactgcagctatgccagcaacagcagtagttacatttctgaagagacaaaatttgtcagtgggttttcaagagctcaagggtaacaccctaacccccacgttgttcaagggtcaactgtattgcagtcaaaaacagaaatttaaaaaaaaaattccttcaaaaaaataaaattgtattacacacttgctaatccaatttt

SEQ ID NO: 80777 - DNA, 446 bp, Homo sapiens
ctaagatagtatgagaaagttctgatcttgacagttcacgtaacattcaatcaattataccattgctctatctctaaagttttctttttctccttttctcagtgtcttaccaagaatgaaaggcaacctatgtaaaaactatgggctttctagtataaataaaaactactcatctccagaaaataaacaatgactgctaagatgattgaaaaaagaaaggagaagaaagtagcttgtaaaagcgtgtgaaatgcattcacgttggaatctcctacaggcacttcaggtcttcagactgtaaacattttaagtgtgattgctgtgaatgaaggaaacccagagccatcatgacaagcctaaactcaaaggggactgatttcttctacactgaatgtttcattagtgacagggcccagataataaagaattgtgctcacttcctgtga

SEQ ID NO: 80778 - DNA, 142 bp, Homo sapiens
gaatccatttgctgaatttggaaggttctcattatgagcccattctaagtatgtgtcatatgaggtcaccctgtatttggatcagaaggtatagtcagagctcacatcccaggcccaaacagcccaggacagcagagcaaga

SEQ ID NO: 80779 - DNA, 525 bp, Homo sapiens
taattggtccaatttgtcttctggttcccaaagaagatcaggtagaatgaccacttgaaattagccaaaaaacctcatctctaattacaggagcaattgggcatttagtgatctatccccagcattagttcacaaaaggacccttctatgtgtgctgcacaataagatatgatgtaacaagcttggattccatagtacatagtattcaagaaggactacataaagcaagttgctgagaaggggttaacagcggtgcaggtattactttgaagcatatcattccaataattgatatgagcattagaggattctctctctttctctccctctagcctaactaattttcaaaaggcatcaacccttaagataccatcaattttcttgccctggtatttgaaatggggtacctccacagcttatcagtacaggttttctaaagtttccatggtattcaaccaccaagtaaaaatttaggagaatacagttgtcaaaaccattgtcaccctaataaaaatatatgctaaa

SEQ ID NO: 80780 - DNA, 299 bp, Homo sapiens
cctggctgttgagatgcccgggccctgtggccgggctgcaggtgggtcacctgactgttgaggtgcccgggccctgtggctgggctgcgggcgggtcacctggatgttgaggtgcctgggccctgtggctgggctgcaggcgggtcactcggatgttgatgtgcccgggccctgtggctgggctgtgggcgggtcacccggctgttgaggttttgctacacatcagttacagcaaaggtccctgcggggaggcacacgtcagcagggctggggaaggaagggaggcttgctagagaccc

SEQ ID NO: 80781 - DNA, 389 bp, Homo sapiens
acctgttcccccctctaaatctaggcctatatattcagttctgagacttctcttctctctctctctctcatacacacacacacatacacacacacacacaccattttttctacacaagaatttatgactcagggaaataatctgatgttgattttttccctgcttgcctctaaaaatgcagtgctacctaatttcattgaattctatgaaattttaaaaataaacagatattgtgagcatgttgaaatatttgtctttgaaaaatgacatttcaccttaaagggggttttgcttgtgatacaaagttgatttaatggtcttagtatcaaaatacatgtttgtttatagatgctaagaattgtcagtttaggattttataaggagatatt

SEQ ID NO: 80782 - DNA, 759 bp, Homo sapiens
ctcgtgccgcaggagaggggtttagagcacagcctccctctccagggtcagctgaagcgggagctgttgggggctccttccctcgcagcagtgaccactccaaggaccacggcctggacatgagcggcagcggtgagctgggagctgctggcctggagtctagatgaatataggcagcagccaaaggccacagtcacgacaaacctacacactctcaccactgtcatctcatattgtcctaaaatttccagccagtgcaaaaaaacatgaaaaagaaaaaatacagccattggaaaagaggaaaagtaattgttattagctgatgatgtgaatgtcttcctgaaaaccttaagagaaccaactggaaaacaaccagaaatgagagcatggagttaggcaaccgccgatctgctttctgtcactttgggcgagtttttcccgtcctgggatttcatatctctggaatcctgcagtacgtagccctctgtctggcttcctcgctccgtgtaatgttcttgagattcatccatgcagctgtgtatacctgcagtgattgtttctcttgttgattgctgagaagggttccatcgtatgccttttccagtttatttgttcatctgttgttagacatttgagttatttccagcttgggactcttatgaacaaaactgctataaacatgcatattcaagtctttgtggatatgtgctttcttttgtcctggataaatgtctccacgtgggcttcctgggtctcacg

SEQ ID NO: 80783 - DNA, 736 bp, Homo sapiens
ctcgtgccgcaggagaggggtttagagcacagcctccctctccagggtcagctgaagcgggagctgttgggggctccttccctcgcagcagtgaccactccaaggaccacggcctggacatgagcggcagcggagtctagatgaatataggcagcagccaaaggccacagtcacgacaaacctacacactctcaccactgtcatctcatattgtcctaaaatttccagccagtgcaaaaaaacatgaaaaagaaaaaatacagccattggaaaagaggaaaagtaattgttattagctgatgatgtgaatgtcttcctgaaaaccttaagagaaccaactggaaaacaaccagaaatgagagcatggagttaggcaaccgccgatctgctttctgtcactttgggcgagtttttcccgtcctgggatttcatatctctggaatcctgcagtacgtagccctctgtctggcttcctcgctccgtgtaatgttcttgagattcatccatgcagctgtgtatacctgcagtgattgtttctcttgttgattgctgagaagggttccatcgtatgccttttccagtttatttgttcatctgttgttagacatttgagttatttccagcttgggactcttatgaacaaaactgctataaacatgcatattcaagtctttgtggatatgtgctttcttttgtcctggataaatgtctccacgtgggcttcctgggtctcacg

SEQ ID NO: 80784 - DNA, 323 bp, Homo sapiens
ttttttttttcattgaaattagatgatattagataactctgagaactggacattcaggctccaaggttcctcacccaaaaatgactcccaaaacacagagtggaactattccaagggagaagcctctgccactgcttctgggcacacacacagaggcatgcactactgacactgaatggcactggtccctgaacttgcacatcaaaactatcacctcttttttgctactccttgccaatacaaccaacagcaaccaatatacggagctcacactatgctttctaacttctgtccctggtcccataatcattaagcacataaac

SEQ ID NO: 80785 - DNA, 116 bp, Homo sapiens
tagtttgtagaaaattctttcagctatggtaaatgtaaaaggcagggttcgcttttcactgatgtctagtcaacattttcttcttccaggatattcccccttgctgtgactatttt

SEQ ID NO: 80786 - DNA, 337 bp, Homo sapiens
taaaaagagaggtttaccttggaaattatgagagtagaagatagaagaaatgagaaggggtgaatggaggaaagaagaaaagttatggacagtgataagcttagatactttatgtgtgtgttagttttctcaccttagggccaggtaagtaagctgagacacatgtgccacatacttatggtgcctaggaagaatattatttttctaaatgagctgaatttttaaaaatagaaaatggactccagtaggccttaatctagacataaacaggtgtgttgtacatggtactttgctaccttcaaagataaaaaaataatttaaatgcattgtaaaatgg

SEQ ID NO: 80787 - DNA, 3605 bp, Homo sapiens
aacgattattatggaagataaaatatatttttaattacttcaacagaaggaattatttaaacgcaatatttatttgcttctggaggacatttatgtaaataaaatttaggtagtgttcatcaaactgtgaaaatctgtggagacgcgtggtggcgctgcaggataatatcaagaaaaaaattaccctggaggatgttgtagaccctgttatccagtacacgcggagaactgggaagacagaaagaacaatcctttaagggagaacctagaagccattcaacaaggttaaaatcttcaggcttccgaggatttggtagacagatcagaggcacgtttcccacaactgcgaagaggcgctgaggcaattctgcaagaagattttggggttttggaaaagaagctatggaaaacggaggggcaggcactctgcagataaggcaagtcctgcttttctttgttttgctgggaatgtctcaggcgggctctgaaactgggaactttttggtgatggaggaattgcagagcgggagctttgtaggaaatttggcaaagaccctgggactcgaggtgagtgagctgtcttcgcggggggctcgggtggtttctaatgataacaaagagtgtttgcagctggacacaaacactggggatttgctcctgagagaaatgctagacagggaggagctctgtggctccaatgagccttgtgtgctgtatttccaagtgttaatgaaaaaccccacgcagtttttacaaattgagctccaggtcagggatataaatgatcactctcccgtcttcttggaaaaagaaatgctcttagaaatcccagagaacagtcctgttggtgctgtgttcttgcttgaaagtgcaaaggatttagatgtaggaatcaatgctgtaaaaagctacacaataaatccgaactctcatttccacgttaaaataagagtcaatccagacaataggaaataccctgagttagttctggacaaggcgctggattatgaagagcgcccggagctcagtttcatcctcactgctctggatggcgggtcccctcccaggtctggaactgccttggtcagggtggtggttgtagatattaatgacaactcccctgagtttgagcaggctttttatgaggtgaagattctggagaatagcatccttggctccctggttgtgaccgtctcagcctgggatttagactctggaacaaacagtgaactatcctataccttttcccatgcctcagaagatattcgcaagacatttgaaattaatcaaaagtctggtgacattactttaacagcacctttggattttgaagcaattgagtcatactcaataatcattcaagccacagatgggggaggactttttggaaaatctacagtcagaattcaggtgatggatgtaaacgacaacgctcctgaaatcactgtgtcatcaattaccagtccaatcccagaaaacactccagagactgtggttatggttttcaggatacgagacagagactctggggacaacggaaagatggtttgttctatcccggaggacatcccattcgtgctaaaatcttcggtaaataattactacactttggaaacagagagaccgctggacagagagagcagagccgagtacaacatcaccatcaccgtcaccgacttggggacccccaggctaaaaaccgagcacaacataaccgtgctggtctccgacgtcaatgacaacgcccccgccttcacccaaacttcctacgccctgttcgtccgcgagaacaacagccccgccctgcacatcggcagcatcagcgccacagacagagactcgggcaccaacgcccaggtcaactactcgctgctgccgtcccaggacccgcacctgcccctcgcctccctggtctccatcaacgcggacaacggccacctgtttgccctcaggtcgctggactacgaggccctgcaggggttccagttccgcgtgggcgccacagaccacggctccccggctttgagcagcgaggcgctggtgcgcgtgctggtgctggacgccaacgacaactcgcccttcgtgctgtacccgctgcagaacggctccgcgccctgcaccgagctggtgccctgggcggccgagccgggctacctggtgaccaaggtggtggcggtggacggtgactcgggccagaacgcctggctgtcgtaccagctgctcaaggccacggagcccgggctattcggcgtgtgggcgcacaatggcgaggtgcgcaccgccaggctgctgagcgagcgcgacgcggccaagcacaggctggtggtgctggtcaaggacaatggcgagcctccgcgctcggccaccgccacgctgcacgtgctcctggtggacggcttctcccagccctacctgcctctcccggaggcggccccggcccaggcccaggccgactcgctcactgtctacctggtggtggcgttggcctcagtgtcgtcgctcttcctcttctcggtgctcctgttcgtggcggtgcggctgtgcaggaggagcagggcggccccggtcggtcgctgctcggtgcctgagggcccctttccaggacatctggtggacgtgagtggcaccgggaccctgtcccagagctaccactatgaggtgtgtgtgactggaggctccaggtcaaataagttcaaatttctgaaaccaattatccccaacttcctaccccagagcacaggtagtgaagtcgaagaaaatcccccatttcagaataatttgggtttctgataaagaatgaaaaataaaacctgtgtttatgaatacatttataattaggaacttatcgtgaggtgcctgtaaagtagtatttttgatcacttcaaatacatactcttcaagtcaagaaataaatttctttacatagaaaaggatacagatttagtaccaagaacacttcacaaagcaggaaatgtgcatgtgtaatggtttatgtcaaacaattatgcttaatataaagtctattaagtggtaagtcttgtttgagatattttaaattgctttccattgttttcaatatttactgtgacttttgttttctgagttgattagaatgctgttcgagtatacctaccctagtttcagaagcatagattgtagtgtacctttttaaactttatttttttaaaaaaagttgttttatgaatcatacactattttcacacttttaatctcagaagaaacatatgtgacatggtattttagtaatgaccaaatagacggtcttagagattcagtaagttcactaaggtccactaactaataagtgacaaaactgagcatccatcctagatctgcctgactctaagtcagtgactttgctcccattccatactgtttttgtcattggatatcacctggcaagtttctgcctaactaaagagaagaaaagtttttatcgtattcatactactgttcaatctttatttagaaataaactttatctatgatttcattttcttataaaccagtaatcttgcttttctgggtaaattttcagctattattactaatgctctgatctgcccaaatcttaagtaaaaaac

SEQ ID NO: 80788 - DNA, 374 bp, Homo sapiens
tattgcttttctcttcatgtcccatagttaattagtcctactcctgctgattcttctttaaaagagcttttccaaaatttaagagccttaaaaaggttcaatgtctttgacctaatatttccatttgcaggattccacctagtctaagaaaatctgaaatgcatacaaagatattcactgaagtaataccatgccagaaaactggaaacatctgtctagcaatagggaaatatttaagcaaataaaacaaattagaatgttagtcattaataattagttatgaagtttttaaagacatgaaaaatatacatatatttttttgagtcagagtctcattcggtcgcccaggttggagtgcaatggcgccatctctg

SEQ ID NO: 80789 - DNA, 931 bp, Homo sapiens
cggaaaccgagacggcctggatggaaaactctttcaaggaagaccccagggccctgaacggaattccggatattttctctacaacgtactacacctgccttttcccagactttgatccacacaactattctctttcttggtctgaattttggcaaacgacaagcaaggcatagagatcgcttcaactagctacccgcggctggcccagacgttagggttttaggccgccgttagactttggccctgcaggtcaaaatcagctactctaggcctgtcttctcggaggccagtagcagcacctggtcctctccgcgcggcttctcccgccgggtacgcaaccctgcacccctttcctgtgacctgcagcgaagctcggcggcagaccgggtattcaactggccaggagttctcgaggcgcaggtgcgggtgtgcagggacgcgcgcggtgagtttgcagttcctgccggctccggcaacatcccgggtcagtccgaactccgaaggcgccaaggcagggagggaccagtaggtgaagggcagccgccctcttgcgccctgtttcagtcctccagtcgctgttgaatggagtttccgtctccagtctcagccaaagcaggcaaggcggacaacctcggcctggcaaccagtgagtatgcagtcccttctccaccccgttgggcacttgaacttgtgccgtcggattgtttctccccaagctttctgtgaattccaagaatgcaactgataactatttaaaaactgcccttaacttgaagaaagaatactttaaagtcttagcaaaggaaatgggtgcatatgtctacaaaaagaattgtactagaatatagcagctttgttcacgagagccagaattggaaataacccagtcatccacacagaaataacagtcatcaataacaccaaaataata

SEQ ID NO: 80790 - DNA, 468 bp, Homo sapiens
tatatgttaatgtacaatatatagggttctgtttgtaataaatttgcctcataaaatgcatctcagtttttttttgagcaaatactagaaaatcaaagctcagttttttttttatctcaaattccaaattatacacacacctagaaactcctgttagatgctaacatttctctatagtcaagataccttaaactttaagcattaaaaggctataatctagcaactcaacttcttcccctttcctgtgtggattaaaataatttcttttggggtttatgtcttttaaacatcaaattgtccagttctacacagccatttaagtcagttcttttaactaaaatactctgattatattgtgtttttctgggagtgagaatttttgttcagttttttttttttttctgtttttaagagatggggtcactatgttacagcccaggttagtctcaaactcctgggctcaagtga

SEQ ID NO: 80791 - DNA, 194 bp, Homo sapiens
acggcatttctccattgccttttggctgtaatggtgttgttgagcagctacaggctactctagtcctcattctgttgtcagtgtcccccaccctccaacaccccagaagtttttaggctcatctctttatcctggtgttcatgatatgctctggtcaggcaaatcctctaagaggatttgtatttgcttgtacc

SEQ ID NO: 80792 - DNA, 365 bp, Homo sapiens
aaaaaaaaagaatgcttggctgggcacagtggctcatgcctgtaatccctgcactttgggaggccgaggcaggtggatcacctgaggtcaggagttcgagaccagcctggccaatatggtgaaaccccatctctactaaaaatacaaaaattagctgtgtgtgatggcacgtgcctgtaattccagctacttgggaggctcaggcaggagaatcacttgaacccagaaggcagaggttgcagtgagcagagattgcgccactgcactgcagcctgggcaacagagcaagactcgggctaaaaaaaaaagctgaagtgagtccttcaggctaaaatgaaaagatacaagataataactcagagcta

SEQ ID NO: 80793 - DNA, 256 bp, Homo sapiens
gaagatgaagttagagggagagagaaagtggggagccagatcatagagggctttgcaggtcacttgtaaggactttagctttctaacttttgtaaggacttcaacttctactcacagtgaaattgtgaaattccagaaccaaaaagaagatcctggtaaaagagaaactttcagcaaaatatatttaacattttatttgagtgaagaacaattcatccatcaggcagcactgagaaccagaagacattcagagagc

SEQ ID NO: 80794 - DNA, 458 bp, Homo sapiens
aaccaatctaaaacaagcctttgattgatagcatcccagagtacctcgaagaagcaaacacaaatgctgtcaggagggactcacccttaaactaggagttacaagattttaacagtgtaagactaccaaatgtaagctcatgatttcaaatcccagaaacatacagggaaacaagagccatgaatgggaaacaggagaaaccacaatagcagaactagacttccaaaaaccttaagacagtgatttctcagataaagtaaactatgtaaatccccaaaacatttttttttatttcttactataatttttttaattttattattattatactttaagttttggggtacatgtgcacaacgtgcaggtttgttgcatatgtatacatgtgccatgttggtgtgctgcacccagtaactcgtcatttaacattaggtatatctcctaatgctatccctccc

SEQ ID NO: 80795 - DNA, 321 bp, Homo sapiens
catgttggccaggctggtctggaactcccgacctcaggtgatcctcccgcctaggcctcccaaagtgctgggattacaagcatgagccaccgcacgggtggcccacatggcaatttaaagtcccttccaggcctgatatccaagacaaagttaatccaggcagggttcttggagaaggcagaagagaggaagaggaagggcttctatgaggggctgggatggggcagacctgaggctctggagccggctgaatccttgggcaagctgctgctagacaccagcccccaccccagggggtgtagaggcttaggtcctgggggt

SEQ ID NO: 80796 - DNA, 1954 bp, Homo sapiens
acagagtaagactccgtctcacaaataataataataataatttttccatgctatcatcaaatagctaagttttgtttctctgagtttagacttgaatcttaggcttaaagggcacgtcagttgttgtttagatcaactcccagcacctgaataaatgccttccatgcaatcctgaacacaatctatttttctctatttttctgtacaaaaagagacaaaatggtccattttttagtacgaagtgttgctcttgactaagagtatgttaatgaagctctttgtcctttttcaaagcttacattctcaaaccataaccctcatatttgcttaatgttagtggaacaactcaaaggtatactgtgcctgtcacaatacaagaaagatgctttcagaaacaaaaatggttcttatctaaataagaagaaagctgtctccatttccataaaaaggattgcatccttgccagagaagataatagagtttacatacacagtcaagaagagtgtgggataaagtcatttttattttcacaaataaaaagtgttttggtaactggaaggcagcccatataaaacaagctttcatagtcaccatttcctcaagctcttcccagtgagagatgggaaacacttgaaactgctcactggagaaaaaaggatgatgagggtgactttactgtttatttgaggggtgagtatgaggaggaagtgattctaaacttcaaacgtgatgaaatataatttcttcatcatgccttgatcaaatataagatcacttcatagagttgtttctcttatatgcccaccattttttcatatatatatgatttgattttatatacacatatgtatacatattatatataaatatatatgtgtatacatatatgtgtgtatatctatgaatcaaacatactgtttctgttggagatggttcagaattataaagattatctgaatctttatctgtgagcagtctccaagtaagaagttgaaaggtgaagcctttgactgctgtcatgtctgaggtcattccaaggacatgggagactgctgtccatggttggatcctcttaacatcagcagagttctgtcaagttacttagctttcactggggcagctctagcattccattaattcaaaatgttgttccttaatataagcctctaacatttaaaataaaaattttaaatgtatccattaagggaataattacatattgaattcctaagaaataagaattatttgggtggttttttctagatagaataaacacaagagctggactatattaactgttgtatacacttttttaactggcattttcagttacttgtgatttttccaggaaaaataaaaatgaattaaagtggacagcggacttctaattggtttggtctttgattacatttgaccatcaacaatgatgtaagccttggatagaatgtgcccctcagtgccccacttaaatttcttggtaaaccttgtggtgtatacacttcattgtgctttttggaatgactctaaaagcccataaactaatgctttgcaaagcctaaataaaaatgtttgcagcctgtattagaaacacttccttttatgatctgaatgtaaaatagaggttgttggtttttttttttaacaaattacacatttgtgatctttgcaatatatgtgtaaccaaaaccgaaaattgcaaagaaattgcttggagctgattaacttacatgctgctatttagaaattctactagagattattaatgcacaaatattttcagagaagttgccttatttacaggacaacactacctatatttaattatcatcttaaggctaagaagaaataagggcagaggtattttccataaagccattatattatgttagtttttattaattcaattctatttacaaagactttaaggcaggccttactttctttaaaaaaaaaa

SEQ ID NO: 80797 - DNA, 846 bp, Homo sapiens
agacctctgtctctttggaccagttcctccatttatttctgtggccactttctaacaccaagtgctttatgttgaatcctcattttggcatatttttcagaacttccttacacagaaaaacctgaagtttcacaaattaattattctaaattatttgtgagataaaaataatgcaaaggagtagtctacaattgtttgacaattagaaatgcttatatgataaacatttgttaaggacagactataactaaagcacctgaaattctaattttatttaatattccaaaaattatttacaggtcagcaaacttttctgtgaaagcccagatagtaaatattttagtcaactctgacattttaccctgaaagcagccacagacaatacagaaacaaaagagaatggcagtgttctaataaatctttatttatggacatcaccatttgaattgcttataattttcgtatgtcatgaaataattctatttattcttttcaatcatttgaaaatgtaaaaactgtttttagcttgtgggctatacagaaacaggcagcaggtttgatttggcctaagatgactccatacttgaagcttattttaaatatgtaaaataacattatcaatatgtaacaggtcctataagcttcagttatacaaaggacttaaaaagtactatgtaatggatactcagcacacaaaaataaagctccattaaaacataagtctgacaaaaatttaataaataatatactgttcttagttactgagagtttttgttttctacttgggaacaggaatggacttgagaggggtggtgggttaggtctattagcatggcttagtaaaac

SEQ ID NO: 80798 - DNA, 552 bp, Homo sapiens
aaaaaaaaaaaaaaaaagaatgtgcattaagcacatatataagtgaagaacatattttttgtttaaaacccattcacctttgctcatgtttactaatgtcttggcccctgatggcctttcattctgtagcctgtatagagcagggatcagcaaaatggggctcacaggccaaatgtggcccaacccctttttttgtaaatgaagctgtattgggacgcagccatgttcacttattcgcattttgtttatggctactttcatattacaataggacacttcaggagctgcaatagagactctgtatctctcaaagccaaaaatatttatcatttggcccttcgtaagaaaaagtttgctgactttgattttcagcgagggcacccagagagcttggaagtgattactcctgggctcataacatgaaaaaaagctgaacagaatgaaaatctatgacttttctggattcatcagaggattgaggtcacagggcaaaccactggtctgcaatctggagagacaggtcaacacagagaatgagagccaaggtcagct

SEQ ID NO: 80799 - DNA, 212 bp, Homo sapiens
ggccttggcccttcaatggcttacagtgtgacctcaggtaaatcatttaaccgatctgagcctcagcgtccccattgtcacatgagagcaatgggctgaatggtttcaaacaggctcactatttcatgttctcatctctgggcgccatgtccagaacttcttcctaccatgaaaaggtgccatgcttgtcatgaagcatgccgggaacccct

SEQ ID NO: 80800 - DNA, 474 bp, Homo sapiens
ccacagaggagatgctcttcacgaagtgagactcaggatgaatctttctcattcagacagccactctggcttaaagatatgtacaaacctctcagtgccacaagagtaaataaccaggcatggaagctgcacaagaagtcatctaatgaggatgagatccccatctgatgaggacagcgaaaccccaacagagaagggggaggagagtgaagccctgccacgggaggagaacacagagtgaccccagcccacctcaggcgtcctgcaaaaatacttagcgtaaacaacaagggccatcagaaagaaaagcaggactgaagccagcggcccacgcatccacagaggcagccggcggaggaagcacagggccgtcgttccctcctttgtttcccagtctaattaatcacccagacctgaaaacatatcctcagggggtggagattttacaattaaataccattgttcttggtgaaa

SEQ ID NO: 80801 - DNA, 4263 bp, Homo sapiens
gtgcccagcctgcctggagaaaagcgtctgctcctagccaagatctcctcatcacaaaagtaatgtgggccatggagtcaggccacctcctctgggctctgctgttcatgcagtccttgtggcctcaactgactgatggagccactcgagtctactacctgggcatccgggatgtgcagtggaactatgctcccaagggaagaaatgtcatcacgaaccagcctctggacagtgacatagtggcttccagcttcttaaagtctgacaagaaccggatagggggaacctacaagaagaccatctataaagaatacaaggatgactcatacacagatgaagtggcccagcctgcctggttgggcttcctggggccagtgttgcaggctgaagtgggggatgtcattcttattcacctgaagaattttgccactcgtccctataccatccaccctcatggtgtcttctacgagaaggactctgaaggttccctatacccagatggctcctctgggccactgaaagctgatgactctgttcccccggggggcagccatatctacaactggaccattccagaaggccatgcacccaccgatgctgacccagcgtgcctcacctggatctaccattctcatgtagatgctccacgagacattgcaactggcctaattgggcctctcatcacctgtaaaagaggagccctggatgggaactcccctcctcaacgccaggatgtagaccatgatttcttcctcctcttcagtgtggtagatgagaacctcagctggcatctcaatgagaacattgccacttactgctcagatcctgcttcagtggacaaagaagatgagacatttcaggagagcaataggatgcatgcaatcaatggctttgtttttgggaatttacctgagctgaacatgtgtgcacagaaacgtgtggcctggcacttgtttggcatgggcaatgaaattgatgtccacacagcatttttccatggacagatgctgactacccgtggacaccacactgatgtggctaacatctttccagccacctttgtgactgctgagatggtgccctgggaacctggtacctggttaattagctgccaagtgaacagtcactttcgagatggcatgcaggcactctacaaggtcaagtcttgctccatggcccctcctgtggacctgctcacaggcaaagttcgacagtacttcattgaggcccatgagattcaatgggactatggcccgatggggcatgatgggagtactgggaagaatttgagagagccaggcagtatctcagataagtttttccagaagagctccagccgaattgggggcacttactggaaagtgcgatatgaagcctttcaagatgagacattccaagagaagatgcatttggaggaagataggcatcttggaatcctggggccagtgatccgggctgaggtgggtgacaccattcaggtggtcttctacaaccgtgcctcccagccattcagcatgcagccccatggggtcttttatgagaaagactatgaaggcactgtgtacaatgatggctcatcttaccctggcttggttgccaagccctttgagaaagtaacataccgctggacagtcccccctcatgccggtcccactgctcaggatcctgcttgtctcacttggatgtacttctctgctgcagatcccataagagacacaaattctggcctggtgggcccgctgctggtgtgcagggctggtgccttgggtgcagatggcaagcagaaaggggtggataaagaattctttcttctcttcactgtgttggatgagaacaagagctggtacagcaatgccaatcaagcagctgctatgttggatttccgactgctttcagaggatattgagggcttccaagactccaatcggatgcatgccattaatgggtttctgttctctaacctgcccaggctggacatgtgcaagggtgacacagtggcctggcacctgctcggcctgggcacagagactgatgtgcatggagtcatgttccagggcaacactgtgcagcttcagggcatgaggaagggtgcagctatgctctttcctcatacctttgtcatggccatcatgcagcctgacaaccttgggacatttgagatttattgccaggcaggcagccatcgagaagcagggatgagggcaatctataatgtctcccagtgtcctggccaccaagccacccctcgccaacgctaccaagctgcaagaatctactatatcatggcagaagaagtagagtgggactattgccctgaccggagctgggaacgggaatggcacaaccagtctgagaaggacagttatggttacattttcctgagcaacaaggatgggctcctgggttccagatacaagaaagctgtattcagggaatacactgatggtacattcaggatccctcggccaaggactggaccagaagaacacttgggaatcttgggtccacttatcaaaggtgaagttggtgatatcctgactgtggtattcaagaataatgccagccgcccctactctgtgcatgctcatggagtgctagaatctactactgtctggccactggctgctgagcctggtgaggtggtcacttatcagtggaacatcccagagaggtctggccctgggcccaatgactctgcttgtgtttcctggatctattattctgcagtggatcccatcaaggacatgtatagtggcctggtggggcccttggctatctgccaaaagggcatcctggagccccatggaggacggagtgacatggatcgggaatttgcattgttgttcttgatttttgatgaaaataagtcttggtatttggaggaaaatgtggcaacccatgggtcccaggatccaggcagtattaacctacaggatgaaactttcttggagagcaataaaatgcatgcaatcaatgggaaactctatgccaaccttaggggtcttaccatgtaccaaggagaacgagtggcctggtacatgctggccatgggccaagatgtggatctacacaccatccactttcatgcagagagcttcctctatcggaatggcgagaactaccgggcagatgtggtggatctgttcccagggacttttgaggttgtggagatggtggccagcaaccctgggacatggctgatgcactgccatgtgactgaccatgtccatgctggcatggagaccctcttcactgttttttctcgaacagaacacttaagccctctcaccgtcatcaccaaagagactgaaaaagcagtgccccccagagacattgaagaaggcaatgtgaagatgctgggcatgcagatccccataaagaatgttgagatgctggcctctgttttggttgccattagtgtcacccttctgctcgttgttctggctcttggtggagtggtttggtaccaacatcgacagagaaagctacgacgcaataggaggtccatcctggatgacagcttcaagcttctgtctttcaaacagtaacatctggagcctggagatatcctcaggaagcacatctgtagtgcactcccagcaggccatggactagtcactaaccccacactcaaaggggcatgggtggtggagaagcagaaggagcaatcaagcttatctggatatttctttctttatttattttacatggaaataatatgatttcactttttctttagtttctttgctctacgtgggcacctggcactaagggagtaccttattatcctacatcgcaaatttcaacagctacattatatttccttctgacacttggaaggtattgaaatttctagaaatgtatccttctcacaaagtagagaccaagagaaaaactcattgattgggtttctacttctttcaaggactcaggaaatttcactttgaactgaggccaagtgagctgttaagataacccacacttaaactaaaggctaagaatataggcttgatgggaaattgaaggtaggctgagtattgggaatccaaattgaattttgattctccttggcagtgaactactttgaagaagtggtcaatgggttgttgctgccatgagcatgtacaacctctggagctagaagctcctcaggaaagccagttctccaagttcttaacctgtggcactgaaaggaatgttgagttacctcttcatgttttagacagcaaaccctatccattaaagtacttgttagaacactga

SEQ ID NO: 80802 - DNA, 4229 bp, Homo sapiens
ggaaaagagggcacccagcccttccccctccctcatcctcccatcccagtaaaccctgccaaattggaatcctggacttaatttaggagaaaggccctgtaaccaagatactgactgaacatggctggcggactcaggctggggtctgcagtgcagcattaatgggccgctgacatgaatatggagtagttttctctagcaaagagtggcttccagcttcttaaagtctgacaagaaccggatagggggaacctacaagaagaccatctataaagaatacaaggatgactcatacacagatgaagtggcccagcctgcctggttgggcttcctggggccagtgttgcaggctgaagtgggggatgtcattcttattcacctgaagaattttgccactcgtccctataccatccaccctcatggtgtcttctacgagaaggactctgaaggttccctatacccagatggctcctctgggccactgaaagctgatgactctgttcccccggggggcagccatatctacaactggaccattccagaaggccatgcacccaccgatgctgacccagcgtgcctcacctggatctaccattctcatgtagatgctccacgagacattgcaactggcctaattgggcctctcatcacctgtaaaagaggagccctggatgggaactcccctcctcaacgccaggatgtagaccatgatttcttcctcctcttcagtgtggtagatgagaacctcagctggcatctcaatgagaacattgccacttactgctcagatcctgcttcagtggacaaagaagatgagacatttcaggagagcaataggatgcatgcaatcaatggctttgtttttgggaatttacctgagctgaacatgtgtgcacagaaacgtgtggcctggcacttgtttggcatgggcaatgaaattgatgtccacacagcatttttccatggacagatgctgactacccgtggacaccacactgatgtggctaacatctttccagccacctttgtgactgctgagatggtgccctgggaacctggtacctggttaattagctgccaagtgaacagtcactttcgagatggcatgcaggcactctacaaggtcaagtcttgctccatggcccctcctgtggacctgctcacaggcaaagttcgacagtacttcattgaggcccatgagattcaatgggactatggcccgatggggcatgatgggagtactgggaagaatttgagagagccaggcagtatctcagataagtttttccagaagagctccagccgaattgggggcacttactggaaagtgcgatatgaagcctttcaagatgagacattccaagagaagatgcatttggaggaagataggcatcttggaatcctggggccagtgatccgggctgaggtgggtgacaccattcaggtggtcttctacaaccgtgcctcccagccattcagcatgcagccccatggggtcttttatgagaaagactatgaaggcactgtgtacaatgatggctcatcttaccctggcttggttgccaagccctttgagaaagtaacataccgctggacagtcccccctcatgccggtcccactgctcaggatcctgcttgtctcacttggatgtacttctctgctgcagatcccataagagacacaaattctggcctggtgggcccgctgctggtgtgcagggctggtgccttgggtgcagatggcaagcagaaaggggtggataaagaattctttcttctcttcactgtgttggatgagaacaagagctggtacagcaatgccaatcaagcagctgctatgttggatttccgactgctttcagaggatattgagggcttccaagactccaatcggatgcatgccattaatgggtttctgttctctaacctgcccaggctggacatgtgcaagggtgacacagtggcctggcacctgctcggcctgggcacagagactgatgtgcatggagtcatgttccagggcaacactgtgcagcttcagggcatgaggaagggtgcagctatgctctttcctcatacctttgtcatggccatcatgcagcctgacaaccttgggacatttgagatttattgccaggcaggcagccatcgagaagcagggatgagggcaatctataatgtctcccagtgtcctggccaccaagccacccctcgccaacgctaccaagctgcaagaatctactatatcatggcagaagaagtagagtgggactattgccctgaccggagctgggaacgggaatggcacaaccagtctgagaaggacagttatggttacattttcctgagcaacaaggatgggctcctgggttccagatacaagaaagctgtattcagggaatacactgatggtacattcaggatccctcggccaaggactggaccagaagaacacttgggaatcttgggtccacttatcaaaggtgaagttggtgatatcctgactgtggtattcaagaataatgccagccgcccctactctgtgcatgctcatggagtgctagaatctactactgtctggccactggctgctgagcctggtgaggtggtcacttatcagtggaacatcccagagaggtctggccctgggcccaatgactctgcttgtgtttcctggatctattattctgcagtggatcccatcaaggacatgtatagtggcctggtggggcccttggctatctgccaaaagggcatcctggagccccatggaggacggagtgacatggatcgggaatttgcattgttgttcttgatttttgatgaaaataagtcttggtatttggaggaaaatgtggcaacccatgggtcccaggatccaggcagtattaacctacaggatgaaactttcttggagagcaataaaatgcatgcaatcaatgggaaactctatgccaaccttaggggtcttaccatgtaccaaggagaacgagtggcctggtacatgctggccatgggccaagatgtggatctacacaccatccactttcatgcagagagcttcctctatcggaatggcgagaactaccgggcagatgtggtggatctgttcccagggacttttgaggttgtggagatggtggccagcaaccctgggacatggctgatgcactgccatgtgactgaccatgtccatgctggcatggagaccctcttcactgttttttctcgaacagaacacttaagccctctcaccgtcatcaccaaagagactgaaaaagcagtgccccccagagacattgaagaaggcaatgtgaagatgctgggcatgcagatccccataaagaatgttgagatgctggcctctgttttggttgccattagtgtcacccttctgctcgttgttctggctcttggtggagtggtttggtaccaacatcgacagagaaagctacgacgcaataggaggtccatcctggatgacagcttcaagcttctgtctttcaaacagtaacatctggagcctggagatatcctcaggaagcacatctgtagtgcactcccagcaggccatggactagtcactaaccccacactcaaaggggcatgggtggtggagaagcagaaggagcaatcaagcttatctggatatttctttctttatttattttacatggaaataatatgatttcactttttctttagtttctttgctctacgtgggcacctggcactaagggagtaccttattatcctacatcgcaaatttcaacagctacattatatttccttctgacacttggaaggtattgaaatttctagaaatgtatccttctcacaaagtagagaccaagagaaaaactcattgattgggtttctacttctttcaaggactcaggaaatttcactttgaactgaggccaagtgagctgttaagataacccacacttaaactaaaggctaagaatataggcttgatgggaaattgaaggtaggctgagtattgggaatccaaattgaattttgattctccttggcagtgaactactttgaagaagtggtcaatgggttgttgctgccatgagcatgtacaacctctggagctagaagctcctcaggaaagccagttctccaagttcttaacctgtggcactgaaaggaatgttgagttacctcttcatgttttagacagcaaaccctatccattaaagtacttgttagaacactga

SEQ ID NO: 80803 - DNA, 4814 bp, Homo sapiens
tttgtgtctatttttttaaacattacatttgtcataatcattcatattgttgtgtgtagttgtagtttgttcattattattgctataaagaatttcattttatgaataaaatgcaatgtattcattcattatagtgttcacgaacattttgactgtttctattttgggtttatgaatattctagtaaatattttttagtaaattctcacttgttgttaagtacaatttatagaggataggaagtggcaacaacaatgagtgttccccttttgcctatgggaaaagagaggcaaagggagaattagtgttagtggcccaataaggcttctggtgcctgtttcctgattcttgggacagagcacattcttcctgctacaccattgaaaaaactggatccagatctctcttctgaaggaactagtaatacatgattagcagcacgggtgactttttaactatgcccttcaaaatccaatcattgaaaacttattgaattaaaaggaatcaggtaagttaaagaaactgggctaaatgggttttgctttctcagtcactcaacctggctcttgcctcttcagttttctggacacgtagaaagcccctttgttctctttcttctacaccagcagtttttatttgcctgtttcccagagtaatgtgggccatggagtcaggccacctcctctgggctctgctgttcatgcagtccttgtggcctcaactgactgatggagccactcgagtctactacctgggcatccgggatgtgcagtggaactatgctcccaagggaagaaatgtcatcacgaaccagcctctggacagtgacatagtggcttccagcttcttaaagtctgacaagaaccggatagggggaacctacaagaagaccatctataaagaatacaaggatgactcatacacagatgaagtggcccagcctgcctggttgggcttcctggggccagtgttgcaggctgaagtgggggatgtcattcttattcacctgaagaattttgccactcgtccctataccatccaccctcatggtgtcttctacgagaaggactctgaaggttccctatacccagatggctcctctgggccactgaaagctgatgactctgttcccccggggggcagccatatctacaactggaccattccagaaggccatgcacccaccgatgctgacccagcgtgcctcacctggatctaccattctcatgtagatgctccacgagacattgcaactggcctaattgggcctctcatcacctgtaaaagagaccatgatttcttcctcctcttcagtgtggtagatgagaacctcagctggcatctcaatgagaacattgccacttactgctcagatcctgcttcagtggacaaagaagatgagacatttcaggagagcaataggatgcatgcaatcaatggctttgtttttgggaatttacctgagctgaacatgtgtgcacagaaacgtgtggcctggcacttgtttggcatgggcaatgaaattgatgtccacacagcatttttccatggacagatgctgactacccgtggacaccacactgatgtggctaacatctttccagccacctttgtgactgctgagatggtgccctgggaacctggtacctggttaattagctgccaagtgaacagtcactttcgagatggcatgcaggcactctacaaggtcaagtcttgctccatggcccctcctgtggacctgctcacaggcaaagttcgacagtacttcattgaggcccatgagattcaatgggactatggcccgatggggcatgatgggagtactgggaagaatttgagagagccaggcagtatctcagataagtttttccagaagagctccagccgaattgggggcacttactggaaagtgcgatatgaagcctttcaagatgagacattccaagagaagatgcatttggaggaagataggcatcttggaatcctggggccagtgatccgggctgaggtgggtgacaccattcaggtggtcttctacaaccgtgcctcccagccattcagcatgcagccccatggggtcttttatgagaaagactatgaaggcactgtgtacaatgatggctcatcttaccctggcttggttgccaagccctttgagaaagtaacataccgctggacagtcccccctcatgccggtcccactgctcaggatcctgcttgtctcacttggatgtacttctctgctgcagatcccataagagacacaaattctggcctggtgggcccgctgctggtgtgcagggctggtgccttgggtgcagatggcaagcagaaaggggtggataaagaattctttcttctcttcactgtgttggatgagaacaagagctggtacagcaatgccaatcaagcagctgctatgttggatttccgactgctttcagaggatattgagggcttccaagactccaatcggatgcatgccattaatgggtttctgttctctaacctgcccaggctggacatgtgcaagggtgacacagtggcctggcacctgctcggcctgggcacagagactgatgtgcatggagtcatgttccagggcaacactgtgcagcttcagggcatgaggaagggtgcagctatgctctttcctcatacctttgtcatggccatcatgcagcctgacaaccttgggacatttgagatttattgccaggcaggcagccatcgagaagcagggatgagggcaatctataatgtctcccagtgtcctggccaccaagccacccctcgccaacgctaccaagctgcaagaatctactatatcatggcagaagaagtagagtgggactattgccctgaccggagctgggaacgggaatggcacaaccagtctgagaaggacagttatggttacattttcctgagcaacaaggatgggctcctgggttccagatacaagaaagctgtattcagggaatacactgatggtacattcaggatccctcggccaaggactggaccagaagaacacttgggaatcttgggtccacttatcaaaggtgaagttggtgatatcctgactgtggtattcaagaataatgccagccgcccctactctgtgcatgctcatggagtgctagaatctactactgtctggccactggctgctgagcctggtgaggtggtcacttatcagtggaacatcccagagaggtctggccctgggcccaatgactctgcttgtgtttcctggatctattattctgcagtggatcccatcaaggacatgtatagtggcctggtggggcccttggctatctgccaaaagggcatcctggagccccatggaggacggagtgacatggatcgggaatttgcattgttgttcttgatttttgatgaaaataagtcttggtatttggaggaaaatgtggcaacccatgggtcccaggatccaggcagtattaacctacaggatgaaactttcttggagagcaataaaatgcatgcaatcaatgggaaactctatgccaaccttaggggtcttaccatgtaccaaggagaacgagtggcctggtacatgctggccatgggccaagatgtggatctacacaccatccactttcatgcagagagcttcctctatcggaatggcgagaactaccgggcagatgtggtggatctgttcccagggacttttgaggttgtggagatggtggccagcaaccctgggacatggctgatgcactgccatgtgactgaccatgtccatgctggcatggagaccctcttcactgttttttctcgaacagaacacttaagccctctcaccgtcatcaccaaagagactgaaaaagcagtgccccccagagacattgaagaaggcaatgtgaagatgctgggcatgcagatccccataaagaatgttgagatgctggcctctgttttggttgccattagtgtcacccttctgctcgttgttctggctcttggtggagtggtttggtaccaacatcgacagagaaagctacgacgcaataggaggtccatcctggatgacagcttcaagcttctgtctttcaaacagtaacatctggagcctggagatatcctcaggaagcacatctgtagtgcactcccagcaggccatggactagtcactaaccccacactcaaaggggcatgggtggtggagaagcagaaggagcaatcaagcttatctggatatttctttctttatttattttacatggaaataatatgatttcactttttctttagtttctttgctctacgtgggcacctggcactaagggagtaccttattatcctacatcgcaaatttcaacagctacattatatttccttctgacacttggaaggtattgaaatttctagaaatgtatccttctcacaaagtagagaccaagagaaaaactcattgattgggtttctacttctttcaaggactcaggaaatttcactttgaactgaggccaagtgagctgttaagataacccacacttaaactaaaggctaagaatataggcttgatgggaaattgaaggtaggctgagtattgggaatccaaattgaattttgattctccttggcagtgaactactttgaagaagtggtcaatgggttgttgctgccatgagcatgtacaacctctggagctagaagctcctcaggaaagccagttctccaagttcttaacctgtggcactgaaaggaatgttgagttacctcttcatgttttagacagcaaaccctatccattaaagtacttgttagaacactga

SEQ ID NO: 80804 - DNA, 4409 bp, Homo sapiens
ggaaaagagggcacccagcccttccccctccctcatcctcccatcccagtaaaccctgccaaattggaatcctggacttaatttaggagaaaggccctgtaaccaagatactgactgaacatggctggcggactcaggctggggtctgcagtgcagcattaatgggccgctgacatgaatatggagtagttttctctagcaaagagtaatgtgggccatggagtcaggccacctcctctgggctctgctgttcatgcagtccttgtggcctcaactgactgatggagccactcgagtctactacctgggcatccgggatgtgcagtggaactatgctcccaagggaagaaatgtcatcacgaaccagcctctggacagtgacatagtggcttccagcttcttaaagtctgacaagaaccggatagggggaacctacaagaagaccatctataaagaatacaaggatgactcatacacagatgaagtggcccagcctgcctggttgggcttcctggggccagtgttgcaggctgaagtgggggatgtcattcttattcacctgaagaattttgccactcgtccctataccatccaccctcatggtgtcttctacgagaaggactctgaaggttccctatacccagatggctcctctgggccactgaaagctgatgactctgttcccccggggggcagccatatctacaactggaccattccagaaggccatgcacccaccgatgctgacccagcgtgcctcacctggatctaccattctcatgtagatgctccacgagacattgcaactggcctaattgggcctctcatcacctgtaaaagaggagccctggatgggaactcccctcctcaacgccaggatgtagaccatgatttcttcctcctcttcagtgtggtagatgagaacctcagctggcatctcaatgagaacattgccacttactgctcagatcctgcttcagtggacaaagaagatgagacatttcaggagagcaataggatgcatgcaatcaatggctttgtttttgggaatttacctgagctgaacatgtgtgcacagaaacgtgtggcctggcacttgtttggcatgggcaatgaaattgatgtccacacagcatttttccatggacagatgctgactacccgtggacaccacactgatgtggctaacatctttccagccacctttgtgactgctgagatggtgccctgggaacctggtacctggttaattagctgccaagtgaacagtcactttcgagatggcatgcaggcactctacaaggtcaagtcttgctccatggcccctcctgtggacctgctcacaggcaaagttcgacagtacttcattgaggcccatgagattcaatgggactatggcccgatggggcatgatgggagtactgggaagaatttgagagagccaggcagtatctcagataagtttttccagaagagctccagccgaattgggggcacttactggaaagtgcgatatgaagcctttcaagatgagacattccaagagaagatgcatttggaggaagataggcatcttggaatcctggggccagtgatccgggctgaggtgggtgacaccattcaggtggtcttctacaaccgtgcctcccagccattcagcatgcagccccatggggtcttttatgagaaagactatgaaggcactgtgtacaatgatggctcatcttaccctggcttggttgccaagccctttgagaaagtaacataccgctggacagtcccccctcatgccggtcccactgctcaggatcctgcttgtctcacttggatgtacttctctgctgcagatcccataagagacacaaattctggcctggtgggcccgctgctggtgtgcagggctggtgccttgggtgcagatggcaagcagaaaggggtggataaagaattctttcttctcttcactgtgttggatgagaacaagagctggtacagcaatgccaatcaagcagctgctatgttggatttccgactgctttcagaggatattgagggcttccaagactccaatcggatgcatgccattaatgggtttctgttctctaacctgcccaggctggacatgtgcaagggtgacacagtggcctggcacctgctcggcctgggcacagagactgatgtgcatggagtcatgttccagggcaacactgtgcagcttcagggcatgaggaagggtgcagctatgctctttcctcatacctttgtcatggccatcatgcagcctgacaaccttgggacatttgagatttattgccaggcaggcagccatcgagaagcagggatgagggcaatctataatgtctcccagtgtcctggccaccaagccacccctcgccaacgctaccaagctgcaagaatctactatatcatggcagaagaagtagagtgggactattgccctgaccggagctgggaacgggaatggcacaaccagtctgagaaggacagttatggttacattttcctgagcaacaaggatgggctcctgggttccagatacaagaaagctgtattcagggaatacactgatggtacattcaggatccctcggccaaggactggaccagaagaacacttgggaatcttgggtccacttatcaaaggtgaagttggtgatatcctgactgtggtattcaagaataatgccagccgcccctactctgtgcatgctcatggagtgctagaatctactactgtctggccactggctgctgagcctggtgaggtggtcacttatcagtggaacatcccagagaggtctggccctgggcccaatgactctgcttgtgtttcctggatctattattctgcagtggatcccatcaaggacatgtatagtggcctggtggggcccttggctatctgccaaaagggcatcctggagccccatggaggacggagtgacatggatcgggaatttgcattgttgttcttgatttttgatgaaaataagtcttggtatttggaggaaaatgtggcaacccatgggtcccaggatccaggcagtattaacctacaggatgaaactttcttggagagcaataaaatgcatgcaatcaatgggaaactctatgccaaccttaggggtcttaccatgtaccaaggagaacgagtggcctggtacatgctggccatgggccaagatgtggatctacacaccatccactttcatgcagagagcttcctctatcggaatggcgagaactaccgggcagatgtggtggatctgttcccagggacttttgaggttgtggagatggtggccagcaaccctgggacatggctgatgcactgccatgtgactgaccatgtccatgctggcatggagaccctcttcactgttttttctcgaacagaacacttaagccctctcaccgtcatcaccaaagagactgaaaaagcagtgccccccagagacattgaagaaggcaatgtgaagatgctgggcatgcagatccccataaagaatgttgagatgctggcctctgttttggttgccattagtgtcacccttctgctcgttgttctggctcttggtggagtggtttggtaccaacatcgacagagaaagctacgacgcaataggaggtccatcctggatgacagcttcaagcttctgtctttcaaacagtaacatctggagcctggagatatcctcaggaagcacatctgtagtgcactcccagcaggccatggactagtcactaaccccacactcaaaggggcatgggtggtggagaagcagaaggagcaatcaagcttatctggatatttctttctttatttattttacatggaaataatatgatttcactttttctttagtttctttgctctacgtgggcacctggcactaagggagtaccttattatcctacatcgcaaatttcaacagctacattatatttccttctgacacttggaaggtattgaaatttctagaaatgtatccttctcacaaagtagagaccaagagaaaaactcattgattgggtttctacttctttcaaggactcaggaaatttcactttgaactgaggccaagtgagctgttaagataacccacacttaaactaaaggctaagaatataggcttgatgggaaattgaaggtaggctgagtattgggaatccaaattgaattttgattctccttggcagtgaactactttgaagaagtggtcaatgggttgttgctgccatgagcatgtacaacctctggagctagaagctcctcaggaaagccagttctccaagttcttaacctgtggcactgaaaggaatgttgagttacctcttcatgttttagacagcaaaccctatccattaaagtacttgttagaacactga

SEQ ID NO: 80805 - DNA, 5743 bp, Homo sapiens
gtgcccagcctgcctggagaaaagcgtctgctcctagccaagatctcctcatcacaaaagtaatgtgggccatggagtcaggccacctcctctgggctctgctgttcatgcagtccttgtggcctcaactgactgatggagccactcgagtctactacctgggcatccgggatgtgcagtggaactatgctcccaagggaagaaatgtcatcacgaaccagcctctggacagtgacatagtggcttccagcttcttaaagtctgacaagaaccggatagggggaacctacaagaagaccatctataaagaatacaaggatgactcatacacagatgaagtggcccagcctgcctggttgggcttcctggggccagtgttgcaggctgaagtgggggatgtcattcttattcacctgaagaattttgccactcgtccctataccatccaccctcatggtgtcttctacgagaaggactctgaaggttccctatacccagatggctcctctgggccactgaaagctgatgactctgttcccccggggggcagccatatctacaactggaccattccagaaggccatgcacccaccgatgctgacccagcgtgcctcacctggatctaccattctcatgtagatgctccacgagacattgcaactggcctaattgggcctctcatcacctgtaaaagaggagccctggatgggaactcccctcctcaacgccaggatgtagaccatgatttcttcctcctcttcagtgtggtagatgagaacctcagctggcatctcaatgagaacattgccacttactgctcagatcctgcttcagtggacaaagaagatgagacatttcaggagagcaataggatgcatgcaatcaatggctttgtttttgggaatttacctgagctgaacatgtgtgcacagaaacgtgtggcctggcacttgtttggcatgggcaatgaaattgatgtccacacagcatttttccatggacagatgctgactacccgtggacaccacactgatgtggctaacatctttccagccacctttgtgactgctgagatggtgccctgggaacctggtacctggttaattagctgccaagtgaacagtcactttcgagatggcatgcaggcactctacaaggtcaagtcttgctccatggcccctcctgtggacctgctcacaggcaaagttcgacagtacttcattgaggcccatgagattcaatgggactatggcccgatggggcatgatgggagtactgggaagaatttgagagagccaggcagtatctcagataagtttttccagaagagctccagccgaattgggggcacttactggaaagtgcgatatgaagcctttcaagatgagacattccaagagaagatgcatttggaggaagataggcatcttggaatcctggggccagtgatccgggctgaggtgggtgacaccattcaggtggtcttctacaaccgtgcctcccagccattcagcatgcagccccatggggtcttttatgagaaagactatgaaggcactgtgtacaatgatggctcatcttaccctggcttggttgccaagccctttgagaaagtaacataccgctggacagtcccccctcatgccggtcccactgctcaggatcctgcttgtctcacttggatgtacttctctgctgcagatcccataagagacacaaattctggcctggtgggcccgctgctggtgtgcagggctggtgccttgggtgcagatggcaagcagaaaggggtggataaagaattctttcttctcttcactgtgttggatgagaacaagagctggtacagcaatgccaatcaagcagctgctatgttggatttccgactgctttcagaggatattgagggcttccaagactccaatcggatgcatgccattaatgggtttctgttctctaacctgcccaggctggacatgtgcaagggtgacacagtggcctggcacctgctcggcctgggcacagagactgatgtgcatggagtcatgttccagggcaacactgtgcagcttcagggcatgaggaagggtgcagctatgctctttcctcatacctttgtcatggccatcatgcagcctgacaaccttgggacatttgagatttattgccaggcaggcagccatcgagaagcagggatgagggcaatctataatgtctcccagtgtcctggccaccaagccacccctcgccaacgctaccaagctgcaagaatctactatatcatggcagaagaagtagagtgggactattgccctgaccggagctgggaacgggaatggcacaaccagtctgagaaggacagttatggttacattttcctgagcaacaaggatgggctcctgggttccagatacaagaaagctgtattcagggaatacactgatggtacattcaggatccctcggccaaggactggaccagaagaacacttgggaatcttgggtccacttatcaaaggtgaagttggtgatatcctgactgtggtattcaagaataatgccagccgcccctactctgtgcatgctcatggagtgctagaatctactactgtctggccactggctgctgagcctggtgaggtggtcacttatcagtggaacatcccagagaggtctggccctgggcccaatgactctgcttgtgtttcctggatctattattctgcagtggatcccatcaaggacatgtatagtggcctggtggggcccttggctatctgccaaaagggcatcctggagccccatggaggacggagtgacatggatcgggaatttgcattgttgttcttgatttttgatgaaaataagtcttggtatttggaggaaaatgtggcaacccatgggtcccaggatccaggcagtattaacctacaggatgaaactttcttggagagcaataaaatgcatgcaatcaatgggaaactctatgccaaccttaggggtcttaccatgtaccaaggagaacgagtggcctggtacatgctggccatgggccaagatgtggatctacacaccatccactttcatgcagagagcttcctctatcggaatggcgagaactaccgggcagatgtggtggatctgttcccagggacttttgaggttgtggagatggtggccagcaaccctgggacatggctgatgcactgccatgtgactgaccatgtccatgctggcatggagaccctcttcactgttttttctcgaacagaacacttaagccctctcaccgtcatcaccaaagagactgaaaaagcagtgccccccagagacattgaagaaggcaatgtgaagatgctgggcatgcagatccccataaagaatgttgagatgctggcctctgttttggttgccattagtgtcacccttctgctcgttgttctggctcttggtggagtggtttggtaccaacatcgacagagaaagctacgacgcaataggaggtccatcctggatgacagcttcaagcttctgtctttcaaacagtaacatctggagcctggagatatcctcaggaagcacatctgtagtgcactcccagcaggccatggactagtcactaaccccacactcaaaggggcatgggtggtggagaagcagaaggagcaatcaagcttatctggatatttctttctttatttattttacatggaaataatatgatttcactttttctttagtttctttgctctacgtgggcacctggcactaagggagtaccttattatcctacatcgcaaatttcaacagctacattatatttccttctgacacttggaaggtattgaaatttctagaaatgtatccttctcacaaagtagagaccaagagaaaaactcattgattgggtttctacttctttcaaggactcaggaaatttcactttgaactgaggccaagtgagctgttaagataacccacacttaaactaaaggctaagaatataggcttgatgggaaattgaaggtaggctgagtattgggaatccaaattgaattttgattctccttggcagtgaactactttgaagaagtggtcaatgggttgttgctgccatgagcatgtacaacctctggagctagaagctcctcaggaaagccagttctccaagttcttaacctgtggcactgaaaggaatgttgagttacctcttcatgttttagacagcaaaccctatccattaaagtacttgttagaacactgaaagactgaatttggtgatttttgacagtctctgtggcttctgtcactgtgattgaaacagaaaatacttagggggtgagtgagtatagtatgtatttgtctagcctttgtagaacctacaagtttttgttttagagatgaggaagctgttccagaggaagcatcaaagagtgctgggtaccaccctagaaaaggagctgtcgcataaatgacaaaaattttctgagtgtcaagaaaatttgccagagggaaatagaagtctgagacgagactcaaacctgtccagtgggccaggggaagtaggaccatatcttatggggcctttttggcagtggtggtgtgaaaggtctagttgcaactttgggggcttccttataggatggagtcattctttctggtattttacagcaatattcctttgttacatgcaaatttgagccaaatattggttagagagcacagataagtgataaattttagattgggtaagatggcccaccccactgcaatatccataatattgtaccacatggcaagtggagaacagaagaggtatcaaggagagaaaagatgataactatgtactgttttacactttaaaaagcattttaattcttgattgcgtttggattacctcagggcaagtcattttacatttgagtaatgttatccatttatacatttgagtgaacaaaagcttatggacattaagtaacttcatccaagatccctcaggtagaagttgagcagggattcatgtattcatctgtttgactccaaatacctatttcatcctcatatatcatggaaacatccactaatctccatccaccttacccatattgattccaacttttctgtctgtccagcaatctgtctgtctaggtagcaatctcttgaagataaaatgtagaaactcacagagctggtgttcagttacgatataagtttggaggagaaaacacaatccagaagctatgattcctcttgtttttccatggtcaacgggtttctggagagctttactgagaatctcagaaataaagtgtgggtggaagggggatttagatggctagttatccaagagttagtgtttaggccattgcagaatcaatgatttaacagcagcagaactgttttggcctgcagttaacatgaatgttaatgaagaccaagtacatgctaggaattccagtcaattaatggttataatttacatgcaactaggaggttcttagcttggtctcagttataactctaagagactaggagaggtagatgagatggaatgcatttcttcttattttgtaatcctgctccaggtcaaggaatagaaactcagagcccatgtatttaagaaagaaatgtatttttgtggtaagtttgctccaagtagggatacaagtatctatttttgacaatcaagtgacattgccatctattcagttgctcaagctggaaattatcagtgtcaacacatc

SEQ ID NO: 80806 - DNA, 1020 bp, Homo sapiens
cctcttgtcttttttccccccaaccagaacacttaagccctctcaccgtcatcaccaaagagactgaaaaagcagtgccccccagagacattgaagaaggcaatgtgaagatgctgggcatgcagatccccataaagaatgttgagatgctggcctctgttttggttgccattagtgtcacccttctgctcgttgttctggctcttggtggagtggtttggtaccaacatcgacagagaaagctacgacgcaataggaggtccatcctggatgacagcttcaagcttctgtctttcaaacagtaacatctggagcctggagatatcctcaggaagcacatctgtagtgcactcccagcaggccatggactagtcactaaccccacactcaaaggggcatgggtggtggagaagcagaaggagcaatcaagcttatctggatatttctttctttatttattttacatggaaataatatgatttcactttttctttagtttctttgctctacgtgggcacctggcactaagggagtaccttattatcctacatcgcaaatttcaacagctacattatatttccttctgacacttggaaggtattgaaatttctagaaatgtatccttctcacaaagtagagaccaagagaaaaactcattgattgggtttctacttctttcaaggactcaggaaatttcactttgaactgaggccaagtgagctgttaagataacccacacttaaactaaaggctaagaatataggcttgatgggaaattgaaggtaggctgagtattgggaatccaaattgaattttgattctccttggcagtgaactactttgaagaagtggtcaatgggttgttgctgccatgagcatgtacaacctctggagctagaagctcctcaggaaagccagttctccaagttcttaacctgtggcactgaaaggaatgttgagttacctcttcatgttttagacagcaaaccctatccattaaagtacttgttagaacactga

SEQ ID NO: 80807 - DNA, 394 bp, Homo sapiens
gaaggcatcacaatgggaggtgcatgtactctgggccttgaaagctgagtcacattatgccatcagataagggatatgatgatggagagggcattgcaggcagaggaaacagcacaaaaaaacactaggttgtaaaaatgcttggtaggctaagagatcaataaatagtttagcctagataaagcataggtcagatagtgcatcttaactgagtcccaagataattgttagaatgaattcaaataacatagtggggtacttataaatgtaagatatcatgaggaaatgctgagaggcacagtgggcttgtatgagaagctggctccctgcggagtactgctacccagaaacaactccatctctttctctctctcccacttcctcccttcctcag

SEQ ID NO: 80808 - DNA, 2175 bp, Homo sapiens
cggccgccattgtccggcgttcggcgagtcgggtggtccctttggctggagtgcctctctggtctggggatcacctcaggcgctgtccttcactgggcgatccagcatggaccccgaggacgaaggggtagcgggagtgatgtctgtggggccgccggcggcccggcttcaggaaccagtgaccttccgggatgtggctgtggactttacccaggaggaatgggggcagctggaccctacccagaggatcctctaccgtgacgtgatgctggagacctttggtcacctgctctccataggtcctgagcttccgaagcctgaagtcatctcccagctggagcaagggaccgagctatgggtggctgagagaggaaccacccagggctgccatccagcctgggagcctcgatctgaaagccaagcatcacgcaaggaagagggcctgcctgaagaggagccatcccatgtcacgggaagggaaggattcccgacagatgctccttatcccaccacgttagggaaagacagggagtgtcagagccagagtctggcactcaaggagcagaataacttgaagcagttggaatttggcctcaaggaagcaccagttcaagatcaaggctacaaaactctcagactcagggaaaactgcgtcctgagttcaagcccaaatccattcccagagatctctagaggggagtatttgtatacttacgactcacagattacagactcagaacataactccagcttagtcagtcagcagacaggctccccaggaaaacagcccggtgaaaacagtgactgtcacagagattccagtcaggccattccaattacggaactcacaaaaagccaggtgcaggacaaaccctacaaatgtactgactgtgggaagtcgtttaaccataacgcacacctcaccgtgcacaagaggattcatacgggagaaagaccttatatgtgcaaggagtgtgggaaagccttcagccagaactcctccctcgtccagcatgagcgcatccacactggagacaagccctacaagtgtgccgaatgtgggaagtctttctgccatagtacacaccttaccgtccatcggaggattcacactggggagaagccctatgagtgtcaggactgtgggagggccttcaaccagaactcctccctggggcggcacaagaggacacacactggggagaagccatacacctgcagtgtgtgtgggaaatccttctctcggaccacttgccttttcctgcacctgagaactcacaccgaggagaggccctacgagtgtaaccactgcgggaagggcttcaggcacagctcatccctggcccagcaccagcggaagcacgcgggggagaagccctttgagtgccgccagaggctgatctttgagcagacgccagctctcacaaagcatgaatggacagaagccctgggctgtgacccacctttgagtcaagatgagaggactcaccgaagcgacagacccttcaaatgtaatcagtgtgggaagtgtttcattcagagctctcacctcatccggcaccagataactcacaccagagaggagcagccccatgggcgaagccggcggcgtgaacaatcctcgagcaggaactcacacctggttcagcatcaacacccgaactccagaaagagctctgcaggcggagcaaaggcagggcagccggaaagcagagccctggctttgtttgacatccaaaaaatcatgcaagagaaaaaccctgtgcacgttattggggtggaagagccttctgtgggtgcttccatgttatttgacatcagagaatccacataggagagaaactttgctgatgacttttaaccacaagtaaaaaatgtggtaagtccacatagtgtactcatggaaggaggggctgggggtagaaatgtcatgggtgacttctgactttctaaggaaatgatgcttcccaagcacccgaggttggttggtcccaaatctatcaaactcagtgccctctttagcgacatattttgtgacattccttccattacaccacagtgagttcacaggtaatataacctacccacctgtgtaatgtcaaaaaaaatcaatatgcggccccattttgtaaaggatcattaaaatgaaagtaatttatggtagagtaaattgta

SEQ ID NO: 80809 - DNA, 1430 bp, Homo sapiens
cggccgccattgtccggcgttcggcgagtcgggtggtccctttggctggagtgcctctctggtctggggatcacctcaggcgctgtccttcactgggcgatccagcatggaccccgaggacgaaggggtagcgggagtgatgtctgtggggccgccggcggcccggcttcaggtaacaataacaacaataacgacggcggcgggctccgggcaagcgtctcccgcgcagactgaccctttcacctcgcggcgcgatgagagcggcaccgctgttaatgcccttgacacgtggggaaactcagacgcgggtcggggcgtggtgaccgtcctggccggtcagagagggggccgggattccaaccaggcgcctggcccccgaatgcgcatgctccacgcggctctgtcctccccagggctggggtcggtcattcccgagagaatcgagcaggcccatctcctgcgttcggctccgccccgccgacacccttgcccattccaggaaggtctgtcctcgtgttgactgataacagtaattgtagcgttggccgggtgcccagatggcaagaatcatcgaatagagatgctttaacgcgtggagtcagcggacacccaccgggaccccagcaccgcggagcccctgccctggggcttgggcacaacctcttgggggcaatgatgggtcaccacgcactgagtgtgatgagagtgaccaccaggtcgtcccctgcgagactgtgggagaactgcagtgcagggcggtcagtgtttgcagggccatctggccatcagagctccactttctagacaaagtggttgcggcctgtgttctccataaagctgcctcgcgtggcaggaaacaacaataattatccttcctcaagctctgcaactttgaaattatacttttttttatttgttgtcgttggtttgttcatggggatttgcattatttcagatttggtacacaaagtgagacttgataatcttaggttgcaggttttcagatgtgtgttgctccaaatttgcatgaaatgctaccacgttttattttgttcttgctgtggatgggggacaaggaatgagtcgtaagaaaggcttgagagaaagtgtattagttacctgttgctgtgtaactcaaaacttcgtgacctggaacaacaataaatatctcacgagttctgacaggagtaatggaatgtcctagctggtggttctggttcaggcccatgaagttacagtgaagatgtcagcatagctgttgtcacctgagacctgagtctggaggatccacctccaggatggctcactcacatgtctgttgataggagacctcagttgttctccatgtaggcctctctttggaactgctagggatccttgcaacatggcatctggcttcccacagaacaagtgatccaggagagggcaag

SEQ ID NO: 80810 - DNA, 2105 bp, Homo sapiens
tcgtgacacaggcctgcctgttttctccttttccattcttcctctgccagaaagcactgatggagatagtccagctgattgagaatgtgtgtgatgtttcaggaaccagtgaccttccgggatgtggctgtggactttacccaggaggaatgggggcagctggaccctacccagaggatcctctaccgtgacgtgatgctggagacctttggtcacctgctctccataggtcctgagcttccgaagcctgaagtcatctcccagctggagcaagggaccgagctatgggtggctgagagaggaaccacccagggctgccatccagcctgggagcctcgatctgaaagccaagcatcacgcaaggaagagggcctgcctgaagaggagccatcccatgtcacgggaagggaaggattcccgacagatgctccttatcccaccacgttagggaaagacagggagtgtcagagccagagtctggcactcaaggagcagaataacttgaagcagttggaatttggcctcaaggaagcaccagttcaagatcaaggctacaaaactctcagactcagggaaaactgcgtcctgagttcaagcccaaatccattcccagagatctctagaggggagtatttgtatacttacgactcacagattacagactcagaacataactccagcttagtcagtcagcagacaggctccccaggaaaacagcccggtgaaaacagtgactgtcacagagattccagtcaggccattccaattacggaactcacaaaaagccaggtgcaggacaaaccctacaaatgtactgactgtgggaagtcgtttaaccataacgcacacctcaccgtgcacaagaggattcatacgggagaaagaccttatatgtgcaaggagtgtgggaaagccttcagccagaactcctccctcgtccagcatgagcgcatccacactggagacaagccctacaagtgtgccgaatgtgggaagtctttctgccatagtacacaccttaccgtccatcggaggattcacactggggagaagccctatgagtgtcaggactgtgggagggccttcaaccagaactcctccctggggcggcacaagaggacacacactggggagaagccatacacctgcagtgtgtgtgggaaatccttctctcggaccacttgccttttcctgcacctgagaactcacaccgaggagaggccctacgagtgtaaccactgcgggaagggcttcaggcacagctcatccctggcccagcaccagcggaagcacgcgggggagaagccctttgagtgccgccagaggctgatctttgagcagacgccagctctcacaaagcatgaatggacagaagccctgggctgtgacccacctttgagtcaagatgagaggactcaccgaagcgacagacccttcaaatgtaatcagtgtgggaagtgtttcattcagagctctcacctcatccggcaccagataactcacaccagagaggagcagccccatgggcgaagccggcggcgtgaacaatcctcgagcaggaactcacacctggttcagcatcaacacccgaactccagaaagagctctgcaggcggagcaaaggcagggcagccggaaagcagagccctggctttgtttgacatccaaaaaatcatgcaagagaaaaaccctgtgcacgttattggggtggaagagccttctgtgggtgcttccatgttatttgacatcagagaatccacataggagagaaactttgctgatgacttttaaccacaagtaaaaaatgtggtaagtccacatagtgtactcatggaaggaggggctgggggtagaaatgtcatgggtgacttctgactttctaaggaaatgatgcttcccaagcacccgaggttggttggtcccaaatctatcaaactcagtgccctctttagcgacatattttgtgacattccttccattacaccacagtgagttcacaggtaatataacctacccacctgtgtaatgtcaaaaaaaatcaatatgcggccccattttgtaaaggatcattaaaatgaaagtaatttatggtagagtaaattgta

SEQ ID NO: 80811 - DNA, 839 bp, Homo sapiens
ctgtgctgcaaccttggggcattgggctctgtctttcggcccctcggggtcagacccctgctgtgttgggggatccgaagtgctcccaagctgcctggaaagcattcaggcggggtcgctagcaagaactcaggctgggcagcggaggcggcacagtgcacacactcctgcaggaacaaccagacaggggctttgggaggggctgcgtgcagggggtcccgcagaacatatgcgccccagtcccgcaggaaggaccgccctgctctctcttggctcactggtaagttgaggtcagatggggagccttgggggataggcgcctatagccaccttcctctgcagctgccatgcacacaaaaccccctgggctccctgcaacctggagctctgtctctgcctactccctgggcagatccccctgccaattcaactgtctgtgggggtcataggatctcttatagctgggatcccagaaatacgtgaggagagtgggctgccccactgtcactttactcaacccttccctaggaaacgttctgggcctggaactagtcctggcactcaccccgcgcagggttcccagcttccttcctcttcagcctcgtgtctgtgtggccgctctgtggactcagcgtttcactgcgaagatctgctcagagtgtgttggtttacgggatattttggtgtctcggtgggagcagcacttattgactgcatctgttatttttctgggaaaaatcatctaatcaagatgtttctgggagcaatgtaacacaacaattcaaacgcaagaaggcatctcatcttgagcaaataaataggaataatgccaaatgctt

SEQ ID NO: 80812 - DNA, 481 bp, Homo sapiens
gaaacagcagtttgcaatatggttttaggtctcagcattggaagttggagtatgtttaagcaagcaatcaaaagaaaattttgttgtgagattcttgtagtgctccaattttaaacaaaatcatagtttgaagaaatgtaatcttaaggtttctcccattttgttgcagctcacaatcattagttaaaactttgattcatgacagggcgtggtggctcacgcctgtaatcccaggactttgggaggctgaggtgggcagatcacctaaggtcaggagttcgaaaccagcctgaccaatatgatgaaaccccgtctctactaaaactacagaaaaaattagccgggcatggtggcatgtaaccccagctgctccggaggctgagacaggagaactgcttaaacccgggaggtggaggttgcggtgagccgagatcacgccattgcactccatcctgggcaacaagagtgaaatgccgtctca

SEQ ID NO: 80813 - DNA, 406 bp, Homo sapiens
tggaatggttctgtatctgttctacataatatgatagccactaaccacatatgtagctattgagcacttgaaatgtgttaggtccaactaagattattaatttaaatattcgcatgtggctagtgcctattgtattggacatcaaaggtctggcatatggtcctctgtaatctgaggaaggccttctgctgctggtggtgttcttgtatgctttggcagggaacaagtaggtatagagaaaagcaacatagaaatactagcccttttattcattctagtcacagtttaaaaacattataactggcaggtgcagtggctcacgcctgtaatcccaatactctgggaggcaaaggtagaaggaatgattgagcccagagaccagcctgggcaatatactgagacctca

SEQ ID NO: 80814 - DNA, 325 bp, Homo sapiens
gggagggcggggcgggctttggacctgctccctcagcctttaggagaattcctctggtgaatttcaccctctcatccgccccttcccccagggacctgctcgcctctattcttgctgcatggactcagacctcctatcccagaattcctgggatgatctggccctagcacacgaaattccccgactatctccctccattcccaggacatgagacctgcacccagaattctgagactgaccctggcacgccacatctcccaatccccacacactcctgcgacttaacctctgcacacagaggctccctgaaccaccctccctcccc

SEQ ID NO: 80815 - DNA, 430 bp, Homo sapiens
ttgaagtgacttttctagtaagttgtagaggaggaccagaatctactgctcctggaagcactaatgatttcctgtaatagatttctaatattttcacagggatttcatgagcacaggcaaaacatacagagaaaatattgttgaaagtattttgaatcactgccttctttaaagctaaggtgagatatggagggtttttttttttctccttatttcacataagtaccatgtgctaactgattgcgccactggagctcctttcttcttatttctatagatcttgtataccaaggttagattagatcagattcagtaggttgaacctcacttttgatccaagtttcttcacagcccacatctagcagagcttttcccctcaaaggcctggttagaagaagtggcctttgtttctgatgtataatttacctct

SEQ ID NO: 80816 - DNA, 368 bp, Homo sapiens
ctggtaacttcctgattgggtttccccgcctcagccctttcccagggctattctcctcccacctgctgccaggcctttccctggccatcctgtgttaaatgtcatcccgcccctactgttatgttctccacagcacttgaacacgacccaacatgccttttcacttcaaggtttattcttctattagttttcccagagtctgcttccctagtgtccatctcccctgctcgaatgcctcttgagagccagtgcttgtattttggtccttgtggtatgggcctggcacatagtaggcagtcagcagatatttatggaacaaacaaatgaatttgtgtgactatagttcattgttcatagttcattcatag

SEQ ID NO: 80817 - DNA, 583 bp, Homo sapiens
gaccttccctgtctgcagcccagctttggactgtggagatgccctcagcctctactcagtggctccagcctcatatttgcgtgctatacctttaacctcaagttctcttgctgctaacttaagctgtgactgtccaggaccggcacacacacatacatgcacgcatgcacacacacacacacacacacacacacacagaaggtgaacacacaggatgaggccctgaaaactcatttcacccgtgtacctcacccaaaaattcccctttgtactcctatctttatctctaacagacagcatgaaggtagcccgaagtcccctcaccctgtctgtcctcctgattctctagcccagttccctctagctccagcacagactcttatctccagccctgactgctgaaaccctccagccccagctccagcccctcaggaggggactgcgtgggaggaatgactccagcaagccggcagctgacccgtctctggcctgcatgcctccccctgtggtccactgccggtggtcttcagctctctcctcgtcccacccccatggtctgctgacagcccagcccagtgcatcc

SEQ ID NO: 80818 - DNA, 237 bp, Homo sapiens
tatgaaactatggatttgggtgaagaaatagaaatccattgacatggtagggtgagaaaggaaaatcattctgtaaaaaacataggcttaaattcagtcctaaggtaaatgcccaaaaactattttatatgttacctagttttaagatccatattataagcttctcaagttcttgttttgttcaatccagatttctcatctagtcaccagctaaacaaagatactgagtgcacagtt

SEQ ID NO: 80819 - DNA, 1016 bp, Homo sapiens
gattaatccggcaaaaaccatgcagaaatgaaggagctttaaaatgatcatcattcatcaacccaaccatctcccttggatacccacttcattactaagagagtaattatttttgtgttgtcagttttagggaaaagcccttgaggattattcattggtaattggaaaaataaatgttaatgtcttctgtggattaggaaagaatgttttatgactaactgtttagacgcttctgttgcattgcctgagtttggaagcttcattggttttccagccaaggcttcataaaagctttcaaattacctgtagctgtcagagaggagtctcctcaaggagatggatgaagcttgcccacgatgccgcattccaggtttttgtaataatgctgtggcagccccatctttctcccgacttttattttattttattttattttcttgagatggagtctcattctgtcacccaggctggagtgcaaatgtgcaatcatggctcactgcaacctctgcctcccaggttcaggcaatcctcccacctcagcctcctgagtagctgggactacaggcgtgcaccactatgctggctaatttttctattttttgtagagacagggtttcaccatgttgcccagactggtctcactcttggactcaggcaatcctgcctgccttggcctcccaaagtgctggccccgactcttcttaaattgtggtcccaaggccaagctgtagtgccagtgattttcctcattgaggaaatgagctcaggttattagaagtgatgaagtcagcaggcccccacaggatgaggttttagtagccacagggcttgaggtgcagcctctgggaacccaatctcttgatctacaagggtggctctggggaatgtgaaaaaattggacaaaaatactatctagccccagcaggaaggattagggtggcccttgacagtgtggagtggtaaatacacccataaaaatatgttgaagaatgaggggccggggtggaattggcttc

SEQ ID NO: 80820 - DNA, 2647 bp, Homo sapiens
gtctgtcagcactgtccgtgccattcccagaggagcctgagaagaggcagaggaagggcgaaacatggctgctctaggagtccagagtatcaactggcagaaggccttcaaccgacaagcgcatcacacagacaagttctccagccaggagctcatcttgcggagaggccaaaacttccaggtcttaatgatcatgaacaaaggccttggctctaacgaaagactggagttcattgtctccacagggccttacccctcagagtcggccatgacgaaggctgtgtttccactctccaatggcagtagtggtggctggagtgcggtgcttcaggccagcaatggcaatactctgactatcagcatctccagtcctgccagcgcacccataggacggtacacaatggccctccagatcttctcccagggcggcatctcctctgtgaaacttgggacgttcatactgctttttaacccctggctgaatgtggatagcgtctttatgggtaaccatgctgagagagaagagtatgttcaggaagatgccggcatcatctttgtgggaagcacaaaccgaattggcatgattggctggaactttggacagtttgaagaagacattctcagcatctgcctctcaatcttggataggagtctgaatttccgccgtgacgctgctactgatgtggccagcagaaatgaccccaaatacgttggccgggtgctgagtgccatgatcaatagcaatgatgacaatggtgtgcttgctgggaattggagcggcacttacaccggtggccgggacccaaggagctgggacggcagcgtggagatcctcaaaaattggaaaaaatctggcttcagcccagtccgatatggccagtgctgggtctttgctgggaccctcaacacagcgctgcggtctttggggattccttcccgggtgatcaccaacttcaactcagctcatgacacagaccgaaatctcagtgtggatgtgtactacgaccccatgggaaaccccctggacaagggtagtgatagcgtatggaatttccatgtctggaatgaaggctggtttgtgaggtctgacctgggccccccgtacggtggatggcaggtgttggatgctaccccgcaggaaagaagccaaggggtgttccagtgcggccccgcttcggtcattggtgttcgagagggtgatgtgcagctgaacttcgacatgccctttatcttcgcggaggttaatgccgaccgcatcacctggctgtacgacaacaccactggcaaacagtggaagaattccgtgaacagtcacaccattggcaggtacatcagcaccaaggcggtgggcagcaatgctcgcatggacgtcacggacaagtacaagtacccagaaggctctgaccaggaaagacaagtgttccaaaaggctttggggaaacttaaacccaacacgccatttgccgcgacgtcttcaatgggtttggaaacagaggaacaggagcccagcatcatcgggaagctgaaggtcgctggcatgctggcagtaggcaaagaagtcaacctggtcctactgctcaaaaacctgagcagggatacgaagacagtgacagtgaacatgacagcctggaccatcatctacaacggcacgcttgtacatgaagtgtggaaggactctgccacaatgtccctggaccctgaggaagaggcagaacatcccataaagatctcgtacgctcagtatgagaagtacctgaagtcagacaacatgatccggatcacagcggtgtgcaaggtcccagatgagtctgaggtggtggtggagcgggacatcatcctggacaaccccaccttgaccctggaggtgctgaacgaggctcgtgtgcggaagcctgtgaacgtgcagatgctcttctccaatccactggatgagccggtgagggactgcgtgctgatggtggagggaagcggcctgctgttgggtaacctgaagatcgacgtgccgaccctagggcccaaggagcggtcccgggtccgttttgatatcctgccctcccggagtggcaccaagcaactgctcgccgacttctcctgcaacaagttccctgcaatcaaggccatgttgtccatcgatgtagccgaatgaagggcgctggtggcctcccgtacaaacttggacaacacggagcagggagagctcaccatggaatgaaccccccgcccatgctgtccggcctgggaaaccctctccatctcccaaggctgccagacatggacctccgggctccagcacatccccctctcctctcccccaggttggggctgggtccaccctgtcctatgacttgatcacttttgcacattccctggccgcttctccccagagctgcctgctctgtgagccccacagccctgctcattcctcacgcccttcaatgctgcaggatggactggcccctgacccagggactctccaaacgggatacaggagagaagctggtctagactgtttgctgatccccaacctgcacggggcattcctgcttctctctcaggccaccacagagggcaggggatggttagtcacctgccccagcactcacaccctaactcaaaataaatgttaaataagtgcgatcacacagca

SEQ ID NO: 80821 - DNA, 2578 bp, Homo sapiens
gtctgtcagcactgtccgtgccattcccagaggagcctgagaagaggcagaggaagggcgaaacatggctgctctaggagtccagagtatcaactggcagaaggccttcaaccgacaagcgcatcacacagacaagttctccagccaggagctcatcttgcggagaggccaaaacttccaggtcttaatgatcatgaacaaaggccttggctctaacgaaagactggagttcattgtctccacagggccttacccctcagagtcggccatgacgaaggctgtgtttccactctccaatggcagtagtggtggctggagtgcggtgcttcaggccagcaatggcaatactctgactatcagcatctccagtcctgccagcgcacccataggacggtacacaatggccctccagatcttctcccagggcggcatctcctctgtgaaacttgggacgttcatactgctttttaacccctggctgaatgtggatagcgtctttatgggtaaccatgctgagagagaagagtatgttcaggaagatgccggcatcatctttgtgggaagcacaaaccgaattggcatgattggctggaactttggacagtttgaagaagacattctcagcatctgcctctcaatcttggataggagtctgaatttccgccgtgacgctgctactgatgtggccagcagaaatgaccccaaatacgttggccgggtgctgagtgccatgatcaatagcaatgatgacaatggtgtgcttgctgggaattggagcggcacttacaccggtggccgggacccaaggagctgggacggcagcgtggagatcctcaaaaattggaaaaaatctggcttcagcccagtccgatatggccagtgctgggtctttgctgggaccctcaacacagcgctgcggtctttggggattccttcccgggtgatcaccaacttcaactcagctcatgacacagaccgaaatctcagtgtggatgtgtactacgaccccatgggaaaccccctggacaagggtagtgatagcgtatggaatttccatgtctggaatgaaggctggtttgtgaggtctgacctgggccccccgtacggtggatggcaggtgttggatgctaccccgcaggaaagaagccaaggggtgttccagtgcggccccgcttcggtcattggtgttcgagagggtgatgtgcagctgaacttcgacatgccctttatcttcgcggaggttaatgccgaccgcatcacctggctgtacgacaacaccactggcaaacagtggaagaattccgtgaacagtcacaccattggcaggtacatcagcaccaaggcggtgggcagcaatgctcgcatggacgtcacggacaagtacaagtacccagaaggctctgaccaggaaagacaagtgttccaaaaggctttggggaaacttaaacccaacacgccatttgccgcgacgtcttcaatgggtttggaaacagaggaacaggagcccagcatcatcgggaagctgaaggtcgctggcatgctggcagtaggcaaagaagtcaacctggtcctactgctcaaaaacctgagcagggatacgaagacagtgacagtgaacatgacagcctggaccatcatctacaacggcacgcttgtacatgaagtgtggaaggactctgccacaatgtccctggaccctgaggaagaggcagaacatcccataaagatctcgtacgctcagtatgagaagtacctgaagtcagacaacatgatccggatcacagcggtgtgcaaggtcccagatgagtctgaggtggtggtggagcgggacatcatcctggacaaccccaccttgaccctggaggtgctgaacgaggctcgtgtgcggaagcctgtgaacgtgcagatgctcttctccaatccactggatgagccggtgagggactgcgtgctgatggtggagggaagcggcctgctgttgggtaacctgaagatcgacgtgccgaccctagggcccaaggagcggtcccgggtccgttttgatatcctgccctcccggagtggcaccaagcaactgctcgccgacttctcctgcaacaagttccctgcaatcaaggccatgttgtccatcgatgtagccgaatgaagggcgctggtggcctcccgtacaaacttggacaacacggagcagggagagctcaccatggaatgaaccccccgcccatgctgtccggcctgggaaaccctctccatctcccaaggctgccagacatggacctccgggctccagcacatccccctctcctctcccccagagctgcctgctctgtgagccccacagccctgctcattcctcacgcccttcaatgctgcaggatggactggcccctgacccagggactctccaaacgggatacaggagagaagctggtctagactgtttgctgatccccaacctgcacggggcattcctgcttctctctcaggccaccacagagggcaggggatggttagtcacctgccccagcactcacaccctaactcaaaataaatgttaaataagtgcgatcacacagca

SEQ ID NO: 80822 - DNA, 254 bp, Homo sapiens
attacttcgtttttctgcttatattgctatttccttgtagcgctatgttaaattgctaattactactttttgtattctacttttcctgaagaatctgtatatggacttttagggccagcagaaataacttgttttagtactattaacactctggggaggaaactggtacttcagtgtattgcgaaatgcaaagcgtttgaaaaagtagtgatggatgatgagaacgacagcgagagtcgctgcgtgtactgctg

SEQ ID NO: 80823 - DNA, 386 bp, Homo sapiens
atactaccagattagtaatcctgctctcctaagcatactgagtggtagcctatgatttcttttgtggttcaaaatatgccctgtagcctgtgttttggttagcagaatggccagagcttagactaaaggccacgactcacacattccaaatacatataggcttgaagttatcctattataaaacagttaccacattcatgtaaatggccaggcaaaggtcaaaatatgagcaacattatttgtagctcagtgagagatttgatgttcaaagtctgtcagcatttgtcagaagactgatattgtcaatggctgtttcagattaagaccaactaaaaagtgatttggtgtgaactcagaatatagggaaaataagacaatttgaatgt

SEQ ID NO: 80824 - DNA, 762 bp, Homo sapiens
acagattcatagtttataaatttactttttttgaatgactaatttagttgactcttggttatctaggaacagattaaatggtaagtagttagccatggtattaaataacagtgtacttgatatgaagaattgaaattaatgtaagaaaatattaatatatttatactataatgtaattctgtttagaattatttggtacctactctagcttgggaatgttccttgatctcagctgtcaaagtaatttttggaagcagtgcctgcattctcttccagtctctagggaacagtggtctgcatatggggctgtgctgtgattggtggatatttctaacatattggctgcaaatactaatgtagttacagttcttttaaacgtttgtatgcgttctttcaaatggtaaatgtattctgaaatataggatgtgaattttagctaaattagtttaaaatgtcattttatgtggcattttaattagttttatgttaactaggattttggatatgtgagaacttttccttctacttttttttggctgcttaagaattatttctttacataaacatgtatgcacatgcatatatgtaggcaaacaatgtgtgtagtatgatcccaggtttagcatttcagctatataagtgatgtgataagttatgaaaatttaaatgctctgagtaaatcataattatggacaattatgaagtgtggagaaaatcctttaaaataattttggagaattcattttttttctatcagataca

SEQ ID NO: 80825 - DNA, 231 bp, Homo sapiens
cgccctcgcaaatgactcccgctcggttcggcctgggggaggaggcgccctcatggctactgcaggcctctccaccctccggactgggctgggcagcggccccgtcgcacgcaaccccccgcgcccttgccgggccgaacgggcgccgcgcttctcctacccgccgctagtgaacccagcccagagagaaacaaaggctcgggctccaggacccgctcggccaggccagcc

SEQ ID NO: 80826 - DNA, 466 bp, Homo sapiens
acaggaattaattttcttacagttttggagactagaagtcatagattaaggtattgcctggcttggtttctcctaagacctctcttcttgacttgcaggtagccaccttcttcccactttgtcctcacatggccttttctctgtgcctttgcatcccctcttgtctatcctttttgtaaggacactagtcatattggattagggcccacccatatgactttaaccttaattgtctctttaaaggccctatctcgaaatgtagtcatatcttgaaggaacatgtttcagtctataacagaaggttttttaatttccaggtaggagaacctttttaaaaagttaatttcggctgggcgcggtggctcacgcctgtaatcccagcactttgggaggccgaggcgggtggatcatgaggtcaggagatcgagaccatcctggctaacaaggtgaaaccccgtctctacta

SEQ ID NO: 80827 - DNA, 944 bp, Homo sapiens
attggcacccctagcattttaaattgatacaaagcattgaaattttgatatctttaagatgttactgttatcacatgacttttgagaatcccaaaaccctaaaaataagtctcgataagaaataataaaacagaaatattttagaaatagttcttaagcctttctgattacatgcaccattacaaatatgatagaaacagtgacccctcctcccagaaaaacgcacatgaacacagaatgtcacatccagttttagggatttcatgaacttcaagaagttcaccttggggtccaggctgatactcctgctttaagattttgtttttctttgatagtctgttttgtccttgcctccaaaattttggtgcaagttgtaatataatgagttcgttcgtttttgttatttcaacttcagctgtgcataggtggccctgtgtcccagtctgcccaggacagcccactccatggctattgattggttttgtttattcataattcccactcttgaaggtatccccaggtacagtggctcacacctgtaatcccggcattttgagaggctgaggcaggcagatcacttaagtccgggagttggagaccagcctgggcaacatggcaaaaccccatctctgtgaataatacaaaaatattagccgggcccggtgcctgtagtcccagctactctgatggctgaggtggcaggattgaatgagcccaggaggtagaggctacaatgagccatgatggtgccaccgcattccagcctgggaaacagagcaagatcctagctcaaaaaaaaaaaaaaaaaatccctatttgaaccaggtgcaactgcagtggtgtgcaccatatctcagctactaagaaggctgaggccagaggatctcttgagctcaggagtttgaggccagtctgggtaacatagcaagactctatttcgatta

SEQ ID NO: 80828 - DNA, 561 bp, Homo sapiens
cagagtacagcaaggcctcctgtctacctcgcaggacggggactcagaacactaacaaaccccaactcaaactagttttcacaaaagaaaatgtacgaccttgcaaaacaagaagagcagaggtcaggtgagagccagcactggctaattcagcagctcagcaagagctccaaggacctgggtgttttccaacctctccaggccaccctcctcacgggccagcttccacctccacctgaatgctgagcctttgcctaatttcctccctgatttcagttcaggtaacacttcccaggggcagactttcctgcctccctcctgtggtcagtccattttcccagctcttggatcacacctgggtttgctgcagtttcccttattacatgatgctgcagttaatgtcagccctccctattagactctaagctccataagggcaggaactgtgcattcttgctcactgttgtgaccctagagtctgccactcaaatatttgtcaagtgagtgaatgacagctctgtgcagggccaaggaacccgagccacaataaacatgccatat

SEQ ID NO: 80829 - DNA, 283 bp, Homo sapiens
gctgacttggagttacagtccttctcccccggtgcaaagcccaggaccaagggccagaaattagctttttatctttttataccaagtataagatttacatagtacttatcatggagagaaggatgagagagaagctgtgaaaacttaaaggaaacaataaaatagaaatgcagatggctccaagagggaaaggaggaagaatgagagagaaggcagagagaatcgggaaacagagaacacatttatccatccgcgaacctcaccgagcgcccatacagcaggc

SEQ ID NO: 80830 - DNA, 589 bp, Homo sapiens
cttcctctcatagctaactacaccatcactcagacagccaactcagagctcaagggtacccaccattccctcctcctccatcttaccaaaactcactcctcattttgtgagtgtcttgacaatccttcccttacccacatttagaacccatgccctcctctggaatccatgccctcctctctgtcctgaccaacctcctgtatttcttacctctgcaatttcagccatttttgttgttgttgttgagtttccttgctgctaatcccaacccttaagcatcacttctatggagccttctatgaattttttcccacttttctctcgtccctatctggccccactgtacgttgattcttattcctgttacagcctttatcatcctgaactacaattacctgtgtatctgcctccttctaaacaaggctgttaaaactcagtctccagatagtactggacatagtgcagaaaaacaatcaacacctgagaagtggattgatggagaaaaagaatgcaaatccacatgtgcctctctaccttacctctgtacctctttacaatattagcacttccattaaaatgccatccaagt

SEQ ID NO: 80831 - DNA, 757 bp, Homo sapiens
aaagaaaaactgatgaaactaaaatgaaaaaatagataaatctataattatatgtgaggattttaacatcttattcacagtaattgatagaactccttagacagaacatcatcaaggaaagagaagatctaaacaacacagtaaacctacaggaataaattaacattcatagagcattccacacacaaaaaaaactagcagaatatacatttgtgtacgtgtgagcctgtggaatattcaccaaaatcaatcatattttaggctataacaaaaatctcaaaaattgcaaaataattaaaattatatgctgtgctcactgatctgttctttcttttgttattttagattcaaagatatttgtgcaggtctgttatgtggacatattgtgtaatagtgaggttttagcttttagtgaacctatcacccaaatagggaacattgtacccaataggaaatttttgaacgcttgtgccgcttctacccaccccttctgggatccccagtgcctattatttgtatctttatgtccatgtgtacccattgcttatctctaacttataagtgagaacatgtgatatttgattttctgtttctgaattattccacttaggataatgacctccagctcatccatgttgatacaaaggatataatttaattctttttatggcttcatagtattccatggtgtatatatgccatattttctttatccaaataatcactgatagatacttaggttgattctatgactgtg

SEQ ID NO: 80832 - DNA, 491 bp, Homo sapiens
ttttaaagtgttaaagcaatttaggagaatggatttttaaagtgtgttttcatagacatgacttgattcagttttcatgctgtgctctttataatcctcccatttttgctaattatgaaagatatttgtgctgagggattatctgtagggagcatctaactaggaggaagagaagctggatcctcatccagttctgtgtgtctaatagctctgtgacctgaggcaagtaactcataggccttttccatatttaaaattcttactctaagtgagacaccagaataccgatctgtgatggcacaatcgtttctatgcaagcatattgtgattgtaacacttgatgtttttattgggcatcagcaggcagagaacccagaatgctgtttctattgaagcccagtgaagtgatggcaaaccaaagtgaaaagtcaggggtgtgtggccatggtggccttctccctcccctccggatgtcctctcctggtgccttg

SEQ ID NO: 80833 - DNA, 267 bp, Homo sapiens
tgccaaagcgtagtacccaaggccaagaatagctaagacactcctgaagaacagctaggcaaggagattcttcctaccagatgtcaaacttaatataaagtggtaattaatatagtgtcctttgggcaaaggaagatgcagagggatcagtagggccaaattgcatgcattgaaacagacatgctgtagtcggcattgcagctcagcggggtgggggatggacttggcaatgatggctgctgggatgcttgggtactacgtttggca

SEQ ID NO: 80834 - DNA, 352 bp, Homo sapiens
ataatctgctttggatctgctcttgtatttataattttgtatactattccttagggaagttcccccacattgtataaacttcatcctctacaaaactagcatgggccccttgtaggcttcttgcaaatatgccgcatcctccctccagcagcactgagcgcccagagtttgtgcagagtgggtgcgtcttgccagtgttgacacagagaatgagccggaatgagccgagaccagagaaaccccggcccacccagccagctgtggactactttggtgcttccttctctcttcaaagcattctcagatctattatttcacgtggccactggttgggcagatcaccaaatcccca

SEQ ID NO: 80835 - DNA, 1250 bp, Homo sapiens
tttaacttagataaaaaaaaaaaaaaaagaaatcgttttaataggagatttttaaaaaagtttctccggaatcgactcggttcatcaggaagctgcgaacgtgataaatgcgtttgaccgcgcaccttgtgtcgctggagctgagaacactttgttccttttgtttcactcaacttgccgacatctaactcagggacacgggtatgcagcttgtttgacaaataagccgagatacaccgaacatattcacacataccaatagacgatgattggaagttcaggatgcagtcaaaataaatgcttgcgtttggcccaggtttcacataacaccagtttcataaggcacttaggccgctaacggagcagtgcccctgaaaatagcccacaggggacacatcatttaaataaatgtgtttctttccctgaacagaagttcagttctgctcaattatcattaattttgctcctttatttcctttgcgggcgtgaacggagaagtcgtgctctttgaggttttgcgagctggccttggctggcagaggtgaccggcaatccttcagccggcggaaaaagtgcgagtgtgtgtgtgtgtgtgcttgtgaaaatgtgccgttcctcccagaaaaagtggaaacgtaggtggaaagctcagcacatgttggcgacacctaaaaaccatgttctcggtcctgaacctttagaagcggtatcccaggaacgagtctgagtctgtgcaacagggcacagatgattcgacaaacttcaatgactgcaccgcattcatgcattatatccattgaaaagtaaatccagcgtctccactcgcgcgcccacgtgcgtggataaacgcgggaattcggcagccctcaacgtcactctgcagagatttccgggctgtgagagagttggggtgtgcggcgggggaggggagggtctgatatcttcaggttgagagtcaagtcctgggggagcggcatgggcgggggtggccggggagaggcggaggatggagcgcgaaccagaaagcgcagaggaccctcggcccgcgccgcacccgctgtgattagctccagaggcgcgatccgggagggcggactctttcttaaccctcattgtctcctcctccctcttcctttttaaaagacgccttgcgggcagagctgtcagcaaccccgcggccgtttgtacttggccgcggcggagctgactcctgctcctgtgacagataggggctggggctgagcggccgc

SEQ ID NO: 80836 - DNA, 108 bp, Homo sapiens
attaataaatggaaaaagattaatgcctgaactgtaaagtttattattataaagatgccaattgccctcaaaaaaaaaccttaaacttcaatgcaatcatttaaaaac

SEQ ID NO: 80837 - DNA, 990 bp, Homo sapiens
gacgatgagatggcagctgtgatgggcttctctggctttggttccaccaagaagagttactgaggctttctgtgcttggcctgactttggcctatgctggacctaactttgcgtgtgtgtgtgtgtagtagggggtcatttctttttgggtaatgggaaagttcttaagagtgtcaatggggagggatagagggtgggggctcatggtttccctctactttgggagagggcacagattgcagaggtaatgctgtggcatattgcttctgcctcagtgtatcactggagtcacaggaccctgcccacctgagttcccaataaagaaaaacctccccttctgaggctgctttcccaaaactccccctgcatctttatctcttcatctatcccacctcttgtctgaacatcccacctttatcctgtgttctgcctttgttttaattttaactcatgttcatcctgcaacagaagcattctctaggtcccagtttccagttgattgcatatccttgatcagccctttttcccatcctgccctatggttctctagccacctgtgcatgcatgtgtatttctgcctggttctatggtgtgtggatgtgtgtgcatgaatctgtcatatagagggggtccgagctggaatcctagagcattgctgccctggggcctgatgttcttggcttcctcagagcatgtaacaggaaattaaatgggatgagtgtttggtgtggtttgtgtctgatgagttttttaacattcaggtgtagattgtttcagcttctcatgtttcattttcctgaagatttatgtttttgtctaccttgtgagcaggcttttggaagaacctgtttgatgcaaaaaagaaaatgaaaaacaaaacaaaaaatccccaaaaccttattatgggagcccgtcggtcttagaagctgtttgacatgtataataaatggcattgactgggcctgttttacatttggtgagaacattcca

SEQ ID NO: 80838 - DNA, 314 bp, Homo sapiens
tgacatggacctgtagtcccagctactcaggagtatgaggcaggaagaacccttgagccctggagtttgcaactacagtgagctatgatcatgacaaattagggtaacaacatccaggccacacctcttaagactcccagaaatattttctaagcctatagtgcctttcatacccctcggacgttctgtcttgtctctcataaaatgatactacagacataataagataaatctggagtttgcagtcccagtactaaagatcgtatcaatgataattaataatgacgaaaagaaatcagttgtagttaagatac

SEQ ID NO: 80839 - DNA, 2045 bp, Homo sapiens
  misc_feature (687)..(687): n is a, c, g, or t
  misc_feature (712)..(712): n is a, c, g, or t
ggggacctttagaattttgatagcaatttctttgaatctgtagattactttgtgtagtattgccatcttaacaatattaaatcttccagccaggcgccagtggctcaagcctgtaatctcagcattttgggaagccaaggtaggcagatcacttgagcacaggagtttgagacccccccgagcaacatggcgaagcctgtctctacaaaaaataaaaaatcagccaggtgtggtggtgcacgcctgttgtcccagtgctccagcctggctgacagaggcagaccttgtctcaaaaaaaaccaaaactaatattaagtcttccaatccatgaacaaggatatattttcatttatttagatcttttaaaatgtgtttcagcagtgtttttgttcatttgtgtgtttgtttttagttttctatatacaaatttcttcctgggtattttattctttttgatgctcttaaagggaattttctcaattttctttttggattgttcattgggtatgatgttagctgtgggtatttcatgaataccttgctttacatatttttaatgcagtgttttttggtgtgtaagattttgactcctgtatcttctgggtggattaaaatttgtattataaatgatattaaatgtatctgactctgaggctttttcttaatgtgcattttcttcttatatcntgcccagctaatttttgtatttttngtagagacagggtttcaccatgttggccaggatgtcttgatctcttgacctcgtgatctgcctgcctcagcctcccaaagtgctgggattacaggcgtgagccaccatgcctggcagcctcccttgtatttctaacagcttttgctgtctatattttttaattaaggtgaaattcttgtaacaaaaagctaaccatttaaaaatatacaattcaacagcatttactacattcaaaatgttcacaaatacctcctctatgtggttccaaaacatttcattttgaaactacaaaataggatccattaagctgcccctccctattctccgctccactatctcctggcaaccaccaatttcctttctgtctctgaatttacccgttctggatatttcgtataaatggcatcatagaatgtgtgaccttttgtgtcaggcttttttcacttagcataatgttttacaggttcatctatattgtagcatgtgtcagtagttcattcatttgtggctgagtaatattctgttatatgtatttaccacattttgcttagccattcatctgttgatgatatacatataacagaatattactgtggattgattccaccttttggctattgtaaatagcactccttcaacatttgtgtacaagtatttgttggagtacctgtttttaattctttaggggtgtatatttaggagtggaatttctgagtcatcttgtaattctatgtgtaactttggaggaatttccaaactgttttctgcaatggctgcaccattttacattcctgtcagcaatgtacaggattccagtttctccatatccctgccaacacttggtattttcctttttttcagttagttactctagtgggtatgtggtggttgtcccattgctgtttgttttgattttcattgtccctaatgactaatgatattgagcatctaatatccagttgtcccagcaacatttgtttgaagagactattctttcctgtgtaaatggtcttggcatctttgttgaaaatcgattggcagccaggtgcagtagctcacacctgtaatcccagcactttgggaggctgcgctgggcagatcgcttaagctcaggagtttgagtccagcctgggcaacgtggcaaaaccatgtctctactaaaaatacacaaattagccaggcatgatggcacgtgcctgtagtcccagctacttgggggactgaggccggaggatcacttgagcctgggaggcagcggttgcagtgagccaagattgcaccattgcactccagcatgggcgaacacagtgagaccctgtctccaaaaaaaaaa

SEQ ID NO: 80840 - DNA, 384 bp, Homo sapiens
aaatatcacataaggcaggaaggagggctcaagaatgtcatttcttcctttaagataggaacaattttcagatacaggatgtggtgaagatgaccaggtaatgtatgttgaactccaacagagatctgtgtttttcctgaatgtattgagtggatcaaatataacaagctggataatttccctctaatgaataactgactgtttaaaattgtatggaagtcctttggcctgcaagctggcatttggatatttgatgatgggtctttactctttaatgggttctcagaacttaactttgcaacttgtcaactaaggtgctccttgcttgggtccaatccatcttaattccctggcctttttcctcatctggttttgcctgtattt

SEQ ID NO: 80841 - DNA, 463 bp, Homo sapiens
cctgatttctgtgctgttttgtgccggaatgtttcgacagtagacctttgaattgaacagaggtaaaggtgatctatagtaccagctgtgttctcacccactcctccccctcatctgaacaaaaccagtgagttccagaagattaatattaggaaatgcaagatgcaggcatatgttaaaatttctgagtaagctaacatatacagtttcttaactttttcagagcctcagtttactaaatgatccatctattattccaggatagacattttagtcataaccatatatgtcaaggagttagttatgggtttaaccctttgatgtatttagtccttttgttctcaatatatttatacttctttatagaactcactgagagagttcagttctaaaaacttagtatgaactatagaatgacagaagtgattttatggtaatattaatatgtaaaagttgcattccc

SEQ ID NO: 80842 - DNA, 2832 bp, Homo sapiens
ttagggggaaccgcaggaccttttcatccccgtggtcccacggtcgactcgtcgccccgtgaggcggtgccagtccccgctcggacgctcgttgggccctatacccgccgccatggtcttcaaccggacgaccctctgcgcgcagatcatatggtaaacggaaccagtggaagacacagaccctagcactttatcctttaatatgtcatgacggagtatcccattcaagatacggaactccctaaagctgaagaatgtgatacaattactttgaactgcccacgaaattcagatatgaaaaatcagggagaagaaaatggctttccagatagcactggagatcctcttccagagatcagcaaggacaactcctgcaaagaaaactgtacttgttcctcctgcttgctccgggcccccaccataagtgacttgctcaatgatcaggacttactagacgtgatcaggataaagctggatccgtgtcacccaacggtgaaaaactggaggaattttgcaagcaaatgggggatgtcctatgacgaattgtgcttcctggagcagaggccacagagccccaccttggagttcttgctccggaacagtcagaggacggtgggccagctgatggagctctgcaggctctaccacagggccgacgtggagaaggttctgcgcaggtgggtggacgaggagtggcccaagcgggagcgtggagacccctccaggcacttctagagctcttcttcttccttcattggcctctccggatgttgaaacaaccacaggtcaagaaggaatgtgaatctgttgttttataagagtttaggacaaggacgtggaacagtggacactggttttccccaaagctggcagttttgtggaggggtagcttgtttcggtggtggatctctgtttatttttgcacatctgttataatttaatattcaaatctggaattaagaaaacatattttctagtatcctctaagggccaaagtcctacaatcggaatggattcatgccacgttgaagataaaattatcctctctctgaaatacggtaaagatttaaataggtcctgagactgttgatagccccagacatacccacagcattatatgtaacatctctcctgatcagtgccattcccacggtttcaaagaaaacagctacaaggaatgcttacctgagtgtctgcagcaccctccacttctctcctaggcaatgagacccagtggctagaaattcaccatgtctattctcaagatccatgccagggagctctttgactctcgtgggaatcccactgttgaggttgatctcttcacctcagaaggtctcttcagagctgctgtgcccagtggtgcttcaactggtatctatgaggtcctagagctccaggacaatgataagactcgctatatggggaagggtgtctcaaagcctgttgagcccatcaataaaactattgcacctgtcctggttagcaagaaactgaacgtcacagaacaagagaagattgacaaacttatgatagagatggatggaacagaaaataaatctaaatttggtgcaaatgccattctgggagtgtccctcgctgcctgcaaagctagtgctgttgagaagggggttcccctgtaccaccacatcgccgacttgtctggcaactccaaagtcatcttgccagtcccggtgttcaatgtcatcaatggcagttctcatgctgtcaccaagctggccatgcaggagttcatggtcctcccagtcggtgcagcaaacttcagggaagccatgccattggagcggaggtttaccacagcctgaagaatgtcatcaaggagaaatatgggaaagatgccaccggtgtgggggatggaggcgcgtttgctcccaacatcctggagaataaagaaggcctggagctgctgaagactgcgattgggaaagctggctacactgataaggtgatcgtcagcatggacgtagaggcctccgagttcttcaggtctggaaagtatgacctggaattcaagtttctcgacgaccccaccaggtacatctcacctgactgtctggctgacctgtacaagtccttcatcaaaaactacccagtggtgtctactgaagatccctttgaccaggatgactggggagcttggcagaagttcacggccagtgcaggaatccaggtagtggaggatgatctcagagtgaccaacccaaagaggacagcctcggccgtgaatgagaagaagtgcaactgcctcctgctcaaagtgaaccagattcgctctgtgactgagtcccttcaggcgtgcaagctggcccaggccaatggttggtgtgtcatggtgcctcatcattctggggagactgaaaataccttcatcactgacctggtggtggggctgtgacctgggcagctcaagactggtgccccttgctgatctgagcgcttggccaagtacaaccagctcctcagaattgaagaggagctgggcagcaaggctaagtttgccggcaggaacttcagaaaccccccagccaagtaagctgtgggcaggcaagcccttcagtcacctggtggctaattagacccctccccttgtgtcaactccggcagctcaagacccccgagcaacatttgtaggggccgctgctagttagctacccttgcccaccgccgtggagttcgcacctcttccttagaacttctacagaagcaggttgcagtgagccgagattgcgccactgcacaccagtctggagacagagtgagagtccgtcccaggtcgacgcggccgcgaatttagtagtagtaggcggccgc

SEQ ID NO: 80843 - DNA, 1078 bp, Homo sapiens
gagtatctgtgggtacccggagcacggagatctcgccggctttacgttcacctcggtgtctgcagcaccctccacttctctcctaggcaatgagacccagtggctagaaattcaccatgtctattctcaagatccatgccagggagctctttgactctcgtgggaatcccactgttgaggttgatctcttcacctcagaaggtctcttcagagctgctgtgcccagtggtgcttcaactggtatctatgaggtcctagagctccaggacaatgataagactcgctatatggggaagggtgtctcaaagcctgttgagcccatcaataaaactattgcacctgtcctggttagcaagaaactgaacgtcacagaacaagtccttcatcaaaaactacccagtggtgtctactgaagatccctttgaccaggaatccaggtagtggaggatgatctcagagtgaccaacccaaagaggacagcctcggccgtgaatgagaagaagtgcaactgcctcctgctcaaagtgaaccagattcgctctgtgactgagtcccttcaggcgtgcaagctggcccaggccaatggttggtgtgtcatggtgcctcatcattctggggagactgaaaataccttcatcactgacctggtggtggggctgtgacctgggcagctcaagactggtgccccttgctgatctgagcgcttggccaagtacaaccagctcctcagaattgaagaggagctgggcagcaaggctaagtttgccggcaggaacttcagaaaccccccagccaagtaagctgtgggcaggcaagcccttcagtcacctggtggctaattagacccctccccttgtgtcaactccggcagctcaagacccccgagcaacatttgtaggggccgctgctagttagctacccttgcccaccgccgtggagttcgcacctcttccttagaacttctacagaagcaggttgcagtgagccgagattgcgccactgcacaccagtctggagacagagtgagagtccgtcccaggtcgacgcggccgcgaatttagtagtagtaggcggccgc

SEQ ID NO: 80844 - DNA, 645 bp, Homo sapiens
atgcgtctctgctgatctgagcctgtcctgcagcatggacctgcaactttcctgaagcatctccagggctggatgccatgatattgagacccagagacctgattctcagccagctggtcttagccaacaacctggttcttttctctaaacgaatcccccagacaatggcagcttttggaatgaaatccttcctggacgaggctggatgaaacttgtcttctatctatacacagagtggccagaggggtttccctcagcaccgcctgtctccccagtggcttccaggccatgaagcttcaacctcagtatctctaggaggatggaactccgaattaggtccacaaagtgcattgttttctgctgccccctctgctggatcttgcaaattgtggcatatacccatattgcaatgcatgtaactggcccaatgaagagcaaaaacgtgagtatggaataaatgtataggtactctcctcacccattctaggatgattgctattcttagcaaatgcagtcattttctcccttgtggatggtatgtctttggccctcatggactacaccagcagctccatgatcctcttcttatatagacacaagcagacagtccaatgcattcgcagccacggcctctccccctgaaaa

SEQ ID NO: 80845 - DNA, 477 bp, Homo sapiens
gaaaactatattcttgatgacacagttgagctacagaattgtccaaccccggaggtgccccacttcgcgttgtgggagataatgcattttccttgctgtttaaaccactttgagctgagttttctattaccagcagcctaaagcattttgacagataaaagtagatacaaatgcacatatataatgagcatcctgactgaacgattaaatgtgtatgtaggcatgcattacctccccactccatttatgattgtcacatttatttttacttcagggaaaagcaactatagaatttaaaaaatcaggattgaaaacaaatacctgaatttcctacaattaaaaaatcaatccattaagtagtggtattatgctaaaataaaatgaatgcttagaaatttgttaagtgtttatgatgtaataagacatcaaataaaccatttttctttaagttctttaataaaaaaaatctgatgtgga

SEQ ID NO: 80846 - DNA, 663 bp, Homo sapiens
gggccgggggcttgggctccagagtctgactgtgtgtttgagtccggctgtggaaacctagccattgagatgccccctcttggtggctctgtcctcttaggatgggacaagtctgtgaaggctgctgcagcacccaccgtagacccctaatcgtgtgacgtcaccaggatggtccgggctgctcacttgccacagtggcctgtttgagcccgggaagccaacggggctgctcagctggacaccagccccccgagctgcccatgttggggtcacaggccccacctccctggttggggaggggcaactgagagtgtggagaggtgggacccaggtgtgctggtctccgcaggggctggatcagagcctgggatgggcagggtgagcctcctgacctttaacccagtggtgtcaggcaacgtggcccacccgccagccgcaccaggccccacccccgcaggtgaaggggtgggataggctgggcctgggccaggacacctctggaccacgcattcctcattgcttgggtccctggagcagcagggcctcccgagtgtggtgccgcctgccacctagtggccatttccacgaactcccaggcctggctggggagccggaactgcagcctccatttccaccccactccgggtcgggccacctccctga

SEQ ID NO: 80847 - DNA, 308 bp, Homo sapiens
atccacccactgcccccaaaacattgctcttaactccaccgcctatcccaaaacctataagaaccaatgataatcccaccaccctttgctgactccttttttggactcagcccgcctgcacccaggtgaaatcaacagccttgttgctcacataaagcctgtttggcagtctctccacacggacacctgagacagaaacctgagagtaatcactggactacaggcaacttagaaacagggacagctgttcatctttgaatcaccagatcctaccacagtgtccgacatggagaaggtgttcaatctat

SEQ ID NO: 80848 - DNA, 797 bp, Homo sapiens
ttcccgcccgtgcctctccctccacacctccccgcaactgagggagccggctccggcctcggccagcccagaaaggggctcacacagtgcagggccgggctgaagggctccttaagggcggccagagttggcgccaaggctgaggaggtgcccagagcgagcgagggctgccagggctgctagcaggctgtcacctctcaatagcagttttgtatatgggatctagcccctccctaagaggttgattctaaggaagccaacagccgtgttgtgagtacccaatggaaagtctgttgtggcagaaaactgatgtctccagccaacagcactgaggccctgagacctgccaactgtcatgatcttccgatgcctggacacagaaagagcagtggaaggggtcgttgcatgagcaaagacaaagagtgggacactgactgttacatctcaaggagaaggattgccagatcaaaagtcttgcagttaaccaggcgtggtggcagatacctgtaatcccagctattcgggaggctgaggcaggagaatcgcttgtacccgggaggcagaggttgcagttgagctgagaccgcgccattgactcctgcctgatgacaagagaagaatctacgtctcaacaaacaacaacacgcttgggcactggtattaactccataatccggtttattcataatgctgccatcatccaaaccatcatccaacctatttatcattcaccaatgccaccctgtgaatactggctttccattgactctttcaaaattgctactgggcctcaccaa

SEQ ID NO: 80849 - DNA, 253 bp, Homo sapiens
agatccactgttgaaattggcacttttctgtacttgtctctgaccagcaaaggcaaggaacattgcgtaaaataaattactgttgaattattggggcaaagtcaggttaatagcttaatccaaaaaaggaattacaagtgaaagaattttaccttaaatgtcattctgtttcattttgtaattaagaccttccaaatgtgtaagtagtaatgaccagaaatcttatcagatatggtcaaatgagaaaggtatt

SEQ ID NO: 80850 - DNA, 3057 bp, Homo sapiens
tttttctcttaatctgccttactattttctaatgtagttactgatcaaacttagcagtaacccactcattttgtgtgtaggcaaaagcaactatgaataaacagaagaagtctcccacagtgggtaaatgtgtggacctgggtttgaaacctgatgaaacttgctggctgtgaccccttgggccagggattaactgctgtcactcttagttccctcaaccctcaggtgcatgtgattatattcactgcctgatatggtttggctctgtgtccccacccaactctcatcttgtagctcccataattcccacgtgttgtgggagggacccggtgggaggtgatggaatcatgggggtgggtctttcctgtgctgttcttgtgatagtgaatgtgtctcatgagatctgatggttttaaaaacgggagtcctcctgcacaagttctctctttgcctgctgccatccacataagatgtaacttcctcctcctttccttctgctgtgattgtgtatcctccccagccacatggaactgtaagttcaataaacttctttcttttgtaaattgcccagtctcaggtatatctttatcagcagcatgagaacagatcaatacagtaatttggtagcaggtagtggggtgctactctaaagatacctgaaaatgtggaagtgattttggaactgggtaacaggcagaggttggaacagtttggagggctcagaagacaggaaaatgtggaaagtttgaaactccctagagagttgttgaatgactttgaccaaaatggtgataatgatatggacaatgaaatccaggctgaggtggtctcagatggggatgaggaactttttgggaagtagagcaaaggttatgtcttgttatgtgttagcaaagagactggtgggattttgcccctgacctagagatttgtggaaccttgagcttgagagagatcatttagggtatctggcagaagaaatttctaagcagcaaagcattcaagaggtaacttgggtgctgttaaaggcatttagttttataagggaagcagggcatgaaagtttggaaaatttgcagcctgacaatgcaatagaaaagaaaatcccatattctgaggagaaaatcaagctggctgcagaaatttgcatatgtaacaaggagttaaatgttaatccccaagacaatggggaaaatgtctccagggcatgccagaggtcttcacagcagcccctcccatcacaggcctgcaggcctaggaggaaaaagtgatctcttgggccaggcccagggtccccatgctgtgtgcagcctggggacttggtgccttgtgtcccagctgctccagccatggctgaaaggggccaacatagagctcggattgtggcttcagagggtgcaagctgtaagccttggcagcttccatgtggtgttgagcctgccagtgcacagaagtcaaaaattggggtttgggaacctctgcctagatttcagaagatgtatggaaatgcctggatgccctggcagaagtctgctgtaggggaggggccctcatggagaatctctgctagggcagtacagaagggaaatgtgggatcggagccccagcacagaatccctactggggcaccgcctagtggagctgtgagaagagggccaccatcctccagaccccagaatgatagatccactgacagcttgctccatgcacctggaaaaaccgcagacaacaccagcccatgaaagcagctaggcaggaggctgtaccctgcaaagccacaggggcggagctgcccaagatcatgggaacccacctcttgcatcagcatgacctggatgtgagatttggagttaaaggagatcattttggagctttaagatttgactgcccctctagatttcagacttgcatggggcctgtagcccctttgttttactcaatttctcccatttggaacagctgtgtttacacaatacctgtacccccattgtatctaggaagtagctaacttgcttttgattttacaggctcataggtagaagtgacttgccttgtctcaaatgagatgttggactgtggacttttgagttaatgctgacatgagttaacactttgggggactgtttggagcacatgattggttgtgaaatgtgaagacatgagatttgggaggggcaaggtgtggagtgatatggtttggctctgtgtccccacccaaatctcatcttgtagctcccataactcccacttgttgtgggagggacccagtgggagatgattacatcatggggctgggtctttctcttgctgttctcatgatagtgaatgggtctcacaagatctgatggttttaaaaacgggagtatgcctgcacaagctctctctttgcctgctgccatccacataagatgtgacttcctcttccttgccttctgccatgattgtgtggtctccccagccatgtgaaactgtaagtacaataaacttctttcttttgtaaattgcccgctcttgggtatgtctttatcagcagcatgaaaatgaactaacacactaccttagagtgttagtgtgaaaagaggcaatgtttgaaaatttttagcttggtgctgcccacactgtgagcattcagtaattgtgagctgtaatgctcactgttgtgttccattcccacagtaatttttgtgtatgtgttttgattttttagacttaaaaaatacagttttagatttatagaacaattgaacagataatacatagagttctatacacccaccccatccctacctctcaatttccctccacaatttcccctattattaacaacttgcattggtgtggtacatttgttaaaattaatgaaccaatattgatacatgattgttaactatagtccatagtttacatgagggctcactctttgtgttgtgtacttctatggttttgacaagagtataataacacatatccactgaaagggatcagaatatgctaccccaaaatattctactttggcataagaattattttgagctgaaggcaatttagaagcagcag

SEQ ID NO: 80851 - DNA, 3415 bp, Homo sapiens
  misc_feature (1133)..(1133): n is a, c, g, or t
  misc_feature (1154)..(1154): n is a, c, g, or t
  misc_feature (1674)..(1674): n is a, c, g, or t
  misc_feature (1805)..(1805): n is a, c, g, or t
cgcatcccaggaagaaggagttggagctccgtgatgccattcaaaaacagatgagatggggacagatttaacccaaaggacatagttcaactcctggtcttgacagaggagaagccctcaaagatggagtctcactctgttgccaggctagaatacaatggcacgaacttggctcactgcaacctccgcctcctgggttcaagagattctcctgcctcagcgtcctgagttgctgggactacgggcacacaccatcatgcccagctaatttttgtatttttagtagagacagggtttcaccatgttgaccaggatggtctcgatctcttgacctcgtgatctgcccacgtcggcctcccaaagtcctgggattacaggcatgagccagtgcgcctagcaaacgacagctttttgagcctctgtttaacaatctcttaaaccttataggtaggcagttctgagacagctcctaatcatctcccctcctggtattcaagccctgatggaatactctcttcttcaatgtgagctggacttagtggttttcttctaatccattgaatacacacaagtgatgagctgtcatttccaaaattagttcacacaaagctgtaacttttgttttgttcacagcctctctcaattgccttctcagcttgtatgctttgaagaagcaagctgcagtgttggagaggcccatgtggcaaggaaatgagggtggcctccagtcaatggctggtgagaaactgagaccttccttccaacaattgtcaagtaactgaatactcccaacaatcatatgggttaggttagaagtgaacctttctctagttgaggtttcagataagaccacagatattatactaacaccttgattgcaggcttatgagaaaccttgaaatgagaagactaagtaaaaccatatctggattcctgacttacagaaactgtgtgatgataaatgtgtgttatcttaagccacaaagtttttggggtgatttgttctacagcaattgataatgaatacttcaacctatagtgacaactggatgtctatttactcattttccccaccaaagtgtaaagttcctacaaggcagaggttacaacatattcatcctgctacctctcanagcccataatatacaacctgncccataaaacatgattaatcaatgtttgttaaattaacatgtattttgagtttcattgaaatcagttagttgaagtgataataacatttaaatgtgcatgagcagtaggacaaggcagatagctggttaggatagaaagtttttgaaaattgtgaggggaaaaattatttctatttgtaccctgttgtacccagcttaggtttcaaaaactttcagggggtttttattcatttaccaaagacttcaaagttggtgcctccccaccactctaaagaggtctttgcccttattgacccaaccatactgatttgcctggtgcacagtgggagctattataaggagaggggagaagaaggaaatagaaacaactgtgaaaaaggttgaaaaaaatagcgaaaaggatagaaaaagagcagaggaaagagaagaagtagtcaacatccaacccagatgcagagaaatgattcaaaagaaaaagtctgattttcctgtcggaaatatttttaaaaggaggtaggcntttatcaaaaaggaaaaaaaaaaaaaaagaataacagagtttgtcttccaaaggacccaatactcttggaattcaatgacctaattctgtgtatggttgcagtgtggagattgcctcttgtctgatctcanggcattgagacctctgatttctcaacagcacatgccacagcactatcagaagtcaggaataaagaacagagggtgtggggggcagtctagatattatgctcagcaaacatatttttaaatcagtgtaaattctatcttgctggttgcttatcttagcagttaaatcaacttttcgttacttttgtagacattatataatatcttctccccgcagctccagccaccagctgttagtcagcagaatgggagagggactgggtcagcttaagctgaataacttccatggtgacatttgagggaaccaattcccagccactgaacaaacctaaatgttctgctatggccatagaaccaaatagatcttaacaaagaaacctgagagcattcaaaggtcaaaacaattggagctagttccttcaagcttaaatatgctcatctgtaaagtggggacaataactgtgtgtcttatagggttattttgaaggctaaatatgtgtaaaagcctcagtctactgaaaggttgctcaactgtaacactcttttcattttgtgagggatcattctttgttggaggttagggacactgtctcgtgcattacaggatgtttagcaacatcctcagcttctatccatcagatgttagcaccccccccacggaccaccatcttctccatcatcaccatcaaatatgtctccagacatttccaagtgtcccctgggaggctaaaactgcccctggttgagaaccactgttctagtacttggcattgttccataaacatcagatgatatttttatcattataattattactaaaggcaacatcaccctgctatggagacaggtccttggtctcacggaatccctgcaatagttgctgcatttctgcatctttctgagagtaagggttgaaaagagataaggtcaattcatctgacaacaatccaatgggaaacctactgtctccgtagaaattcttttcatggaaagaaaaggggctaccattttgatctgctgcaggaactaggtctattcctcagcctcacagtttgcaaaacgctacagacttttccatgggcataaattctccagctttagggattgctggtatagttgactcttgaagctgctcttggatttccaagggtagcaccatttttacctgagaaaagaaggaaaaagatattcaagaaggagaacttttcaacagaagttactccatttgctgtttttgtggttttgtgcttgtttaggtttgcaagtgtgttttctgcccaaattgttcttgcatattctaacagtgtttgctttacgtgttttgatgccacgctgttttgaaggtacaaatgtttttcatggcatgtcttgtgttaagtgtacaaactgagacgtgaatgtcagtgactgaatagagtacagtattcctcaaagtttgtaactaaataaaccctaagagaaaagtgaagcgagatttctggaggtctggaagtggccagctgacaatatacatctctgtatctcctatttttatctttatgctaaatgcaaattttactttctgtgctaaaataatgtttcattagtttcaaggtaaaaatgtgtaaatagac

SEQ ID NO: 80852 - DNA, 3538 bp, Homo sapiens
  misc_feature (1256)..(1256): n is a, c, g, or t
  misc_feature (1277)..(1277): n is a, c, g, or t
  misc_feature (1797)..(1797): n is a, c, g, or t
  misc_feature (1928)..(1928): n is a, c, g, or t
cactgttgcggcttcatgtttcatcatgactagagatataataccttaagtagttagccaccaacactccaatcgcaaattctggaggtctgggattattccacaaatcactgggtagatgcaaaccttctagagaagtctagtatcagcagagtaaaacaatctccttttaaaaataagatttctttatcactccctgctttcacgcaatcacagcttctttttatttacttatttattttttagatggagtctcactctgttgccaggctagaatacaatggcacgaacttggctcactgcaacctccgcctcctgggttcaagagattctcctgcctcagcgtcctgagttgctgggactacgggcacacaccatcatgcccagctaatttttgtatttttagtagagacagggtttcaccatgttgaccaggatggtctcgatctcttgacctcgtgatctgcccacgtcggcctcccaaagtcctgggattacaggcatgagccagtgcgcctagcaaacgacagctttttgagcctctgtttaacaatctcttaaaccttataggtaggcagttctgagacagctcctaatcatctcccctcctggtattcaagccctgatggaatactctcttcttcaatgtgagctggacttagtggttttcttctaatccattgaatacacacaagtgatgagctgtcatttccaaaattagttcacacaaagctgtaacttttgttttgttcacagcctctctcaattgccttctcagcttgtatgctttgaagaagcaagctgcagtgttggagaggcccatgtggcaaggaaatgagggtggcctccagtcaatggctggtgagaaactgagaccttccttccaacaattgtcaagtaactgaatactcccaacaatcatatgggttaggttagaagtgaacctttctctagttgaggtttcagataagaccacagatattatactaacaccttgattgcaggcttatgagaaaccttgaaatgagaagactaagtaaaaccatatctggattcctgacttacagaaactgtgtgatgataaatgtgtgttatcttaagccacaaagtttttggggtgatttgttctacagcaattgataatgaatacttcaacctatagtgacaactggatgtctatttactcattttccccaccaaagtgtaaagttcctacaaggcagaggttacaacatattcatcctgctacctctcanagcccataatatacaacctgncccataaaacatgattaatcaatgtttgttaaattaacatgtattttgagtttcattgaaatcagttagttgaagtgataataacatttaaatgtgcatgagcagtaggacaaggcagatagctggttaggatagaaagtttttgaaaattgtgaggggaaaaattatttctatttgtaccctgttgtacccagcttaggtttcaaaaactttcagggggtttttattcatttaccaaagacttcaaagttggtgcctccccaccactctaaagaggtctttgcccttattgacccaaccatactgatttgcctggtgcacagtgggagctattataaggagaggggagaagaaggaaatagaaacaactgtgaaaaaggttgaaaaaaatagcgaaaaggatagaaaaagagcagaggaaagagaagaagtagtcaacatccaacccagatgcagagaaatgattcaaaagaaaaagtctgattttcctgtcggaaatatttttaaaaggaggtaggcntttatcaaaaaggaaaaaaaaaaaaaaagaataacagagtttgtcttccaaaggacccaatactcttggaattcaatgacctaattctgtgtatggttgcagtgtggagattgcctcttgtctgatctcanggcattgagacctctgatttctcaacagcacatgccacagcactatcagaagtcaggaataaagaacagagggtgtggggggcagtctagatattatgctcagcaaacatatttttaaatcagtgtaaattctatcttgctggttgcttatcttagcagttaaatcaacttttcgttacttttgtagacattatataatatcttctccccgcagctccagccaccagctgttagtcagcagaatgggagagggactgggtcagcttaagctgaataacttccatggtgacatttgagggaaccaattcccagccactgaacaaacctaaatgttctgctatggccatagaaccaaatagatcttaacaaagaaacctgagagcattcaaaggtcaaaacaattggagctagttccttcaagcttaaatatgctcatctgtaaagtggggacaataactgtgtgtcttatagggttattttgaaggctaaatatgtgtaaaagcctcagtctactgaaaggttgctcaactgtaacactcttttcattttgtgagggatcattctttgttggaggttagggacactgtctcgtgcattacaggatgtttagcaacatcctcagcttctatccatcagatgttagcaccccccccacggaccaccatcttctccatcatcaccatcaaatatgtctccagacatttccaagtgtcccctgggaggctaaaactgcccctggttgagaaccactgttctagtacttggcattgttccataaacatcagatgatatttttatcattataattattactaaaggcaacatcaccctgctatggagacaggtccttggtctcacggaatccctgcaatagttgctgcatttctgcatctttctgagagtaagggttgaaaagagataaggtcaattcatctgacaacaatccaatgggaaacctactgtctccgtagaaattcttttcatggaaagaaaaggggctaccattttgatctgctgcaggaactaggtctattcctcagcctcacagtttgcaaaacgctacagacttttccatgggcataaattctccagctttagggattgctggtatagttgactcttgaagctgctcttggatttccaagggtagcaccatttttacctgagaaaagaaggaaaaagatattcaagaaggagaacttttcaacagaagttactccatttgctgtttttgtggttttgtgcttgtttaggtttgcaagtgtgttttctgcccaaattgttcttgcatattctaacagtgtttgctttacgtgttttgatgccacgctgttttgaaggtacaaatgtttttcatggcatgtcttgtgttaagtgtacaaactgagacgtgaatgtcagtgactgaatagagtacagtattcctcaaagtttgtaactaaataaaccctaagagaaaagtgaagcgagatttctggaggtctggaagtggccagctgacaatatacatctctgtatctcctatttttatctttatgctaaatgcaaattttactttctgtgctaaaataatgtttcattagtttcaaggtaaaaatgtgtaaatagac

SEQ ID NO: 80853 - DNA, 460 bp, Homo sapiens
cgcatcccaggaagaaggagttggagctccgtgatgttctggaagctgagaagtctaaggtcaagactccagtggattacgcatctggcgagagcctacttcctggtttgtaggtggtgtcttctctctgtgtcctcacatggcataagggaaaagggacccctctgggatctatttttataagggtactaatcccctgcatgaggctccagcctcacaatcatggcagaaggcaaggagaagcaagttacatcttacatgggcagcagcagccattcaaaaacagatgagatggggacagatttaacccaaaggacatagttcaactcctggtcttgacagaggagaagccctcaaagcctactcaatgtgaagacaataaggatgaagaccattaatgatgttctgcttccacttaatgaataataaatatattttctcttctttatgattttcttaa

SEQ ID NO: 80854 - DNA, 576 bp, Homo sapiens
cgcatcccaggaagaaggagttggagctccgtgatgttctggaagctgagaagtctaaggtcaagactccagtggattacgcatctggcgagagcctacttcctggtttgtaggtggtgtcttctctctgtgtcctcacatggcataagggaaaagggacccctctgggatctatttttataagggtactaatcccctgcatgaggctccagcctcaagacctaatgtattgtccattttcatgctgctgataaagacatacctgagactgggcaatctacaaaagaaagaagtttaatggacttacaggttcacgtagctggggaagcctcacaatcatggcagaaggcaaggagaagcaagttacatcttacatgggcagcagcagccattcaaaaacagatgagatggggacagatttaacccaaaggacatagttcaactcctggtcttgacagaggagaagccctcaaagcctactcaatgtgaagacaataaggatgaagaccattaatgatgttctgcttccacttaatgaataataaatatattttctcttctttatgattttcttaa

SEQ ID NO: 80855 - DNA, 497 bp, Homo sapiens
aattaaaattaccgacttagaagatgataaatgctaagtaaaagtagaaggagaaagttgaaattctattaggattaagacagtgttatttaaaggcacatgcacccatttagtacctgcctaaatatttgcccttgtgtaagagcaaactcatttcagaaatatatcctgaattccaccagggtgatggttcaaattgttaaataaacctactctgaaagaagggtccatgttcctattctctctctgcagtgttgggaggtgatgttaacactctacatgttttgtatctgacccaatcatttcttccattctcattgcttctctcttaaacctcattgtatctctttactgtcattttctcccaattgtcttcttttgtctacagtgtgctcctaaaccagcagtctttggtgcctgttaaggctctttccttgtaggttttcttttatcaacctcgatctggcacacccgatgcggggacctctgaacagcta

SEQ ID NO: 80856 - DNA, 587 bp, Homo sapiens
aattaaaattaccgacttagaagatgataaatgctaagtaaaagtagaaggagaaagttgaaattctattaggattaagacagtgttatttaaaggcacatgcacccatttagtacctgcctaaatatttgcccttgtgtaagagcaaactcatttcagaaatatatcctgaattccaccagggtgatggttcaaattgttaaataaacctactctgaaagaagggtccatgttcctattctctctctgcagtgttgggaggtgatgttaacactctacatgttttgtatctgacccaatcatttcttccattctcattgcttctctcttaaacctcattgtatctctttactgtcattttctcccaattgtcttcttttgtctacagtgtgctcctaaaccagcagtctttggtgcctgttaaggctctttccttgtaggtttttaaactaaagatctatctgggaaacagatttggggtaggtcctgccagagtaatgaccatggtaggtgggaggaatatatctggctaccatacaaggtacttcagaagtaccattatggtttgcccagggccaagtggggag

SEQ ID NO: 80857 - DNA, 866 bp, Homo sapiens
tttagtcaggggtggggagtgcatcttagtcccagctactctactgaggaggctgaagtgggaggatggcttgaagccaggaattggaggctgcagtgagctatgatcatgccacggcactccagcctgggtgacagagggagatcctgtctctataaataaataaataaataaaatcagctcaactatttatgtcagtgtcgtaaatacagaaaccaaatccttaagatgccctagaagtggaggttgggtgggagggaatatcctccccaaacttcaaatcacatccatgctctgagagctccattgggttgccaagctccattcagtctcattttcctcttaacaatgcacgtgcgcaaaggcttcctgcctgggaaggcaccaggcatctttttaaagaagtgcaaggattttagatgaggtcaggagttgggcatgggagcgaggtgaagggtgaaaaaagttaagctactctggtgtaaaccaccacaaactccctgttcctgcttttattccttccctaaaacgttttcactttgggagaagaaaattttaacaaatcattattattaataaaaagctgtaaagtgggctgcacatggtgctcatgcctgtaatcccagcattttgggaggccaaggcgggaggatatcttgagcccaggagttcaggaccagcctgggcaacatggtgagacctcgtctctacaaaaacaaacaaaattagccaggtgtcctggctcgcactactccagaggttgaggcgggaggattgcttgatcccggcaggtcaaggctgcattgagctgtgatcacaccacttcactacagcctgagcagcaaagggaggactctgtcttccca

SEQ ID NO: 80858 - DNA, 602 bp, Homo sapiens
ctccctgtgcctcaggttcttgcagagtggaaatgcccacttcacagaatggctgagggtgtggatgaacggtggacgctcctgcccggcacccatgggtgctcacgacgattgtgttttactgttggctgcaatatgtcatgacttatcatgtgtgatccttgagtgaataggcagctgcgagcctgagcggactcctatgaaccagtcttctccagcaatagaccctccttcaactcgtggtagcctgtacgccaagggtgacagactggaaagcaggatccaccggttcatctatgggaaaaggagggggaatgagatcaaggattgaggacgctaatggagatggggtttcaccatgttgcccaggctggtcttgaactcctagactcaagtgatccactcgccttggcctcccaaaatgctggaattacaggagaaaagcagtccttctggtactggctgggtgtggtggctcacacctgtaatctcagcactttgggaggccaagacaggagaattgcttgagtccaggagattgagaccagcctgagcaacctacggagacccccctctctaccaaaaaaaaaaaaaaaaaaaaa

SEQ ID NO: 80859 - DNA, 921 bp, Homo sapiens
gcggccgcggcggcggctggggcgttcgcgggccggcgcgcggcgtgcggggccgtgctgctgacggagctgctggagcgcgccgctttctacggcatcacgtccaacctggtgctattcctgaacggggcgccgttctgctgggagggcgcgcaggccagcgaggcgctgctgctcttcatgggcctcacctacctgggctcgccgttcggaggctggctggccgacgcgcggctgggccgggcgcgcgccatcctgctgagcctggcgctctacctgctgggcatgctggccttcccgctgctggccgcgcccgccacgcgagccgcgctctgcggttccgcgcgcctgctcaactgcacggcgcctggtcccgacgccgccgcccgctgctgctcaccggccaccttcgcggggctggtgctggtgggcctgggcgtggccaccgtcaaggccaacatcacgcccttcggcgccgaccaggttaaagatcgaggtccggaagccactaggagattttttaattggttttattggagcattaacctgggagcgatcctgtcgttaggtggcattgcctatattcagcagaacgtcagctttgtcactggttatgcgatccccactgtctgcgtcggccttgcttttgtggtcttcctctgtggccagagcgttttcatcaccaagcctcctgatggcagtgccttcaccgacatgttcaagatactgacgtattcctgctgttcccagaagcgaagtggagagcgccagagtaatggatgcagacaacatatgttttacagagtcttcatttgaggattccagaaatttcaaatattacaaccactcctcacacgaaaagcaaatgcagattcatttggaaagaaatcttttcccagttccgttgtctctaaactgaag

SEQ ID NO: 80860 - DNA, 642 bp, Homo sapiens
agggcatccagcttaacaaaaagatccctgcttccaaaagcaaatctctttaaaagataaaagcatggtcagatgctgcaaggattttacataaatgccatatttatggtttccttcctgagaacaatcttgctcttgccatgttctttgatttaggctggtagtaaacacatttcatctgctgcttcaaaaagtacttactttttaaaccatcaacattacttttctttcttaaggcaaggcatgcataagagtcatttgagaccatgtgtcccatctcaagccacagagcaactcacggggtacttcacaccttacctagtcagagtgcttatatatagctttattttggtacgattgagactaaagactgatcatggttgtatgtaaggaaaacattcttttgaacagaaatagtgtaattaaaaataattgaaagtgttaaatgtgaacttgagctgtttgaccagtcacatttttgtattgttactgtacgtgtatctggggcttctccgtttgttaatactttttctgtatttgttgctgtatttttggcataactttattataaaaagcatctcaaatgcgaaatccaaaatctctctactctctatatcctgcagctaagtgtaccccctagtt

SEQ ID NO: 80861 - DNA, 443 bp, Homo sapiens
gcggccgcggcggcggctggggcgttcgcgggccggcgcgcggcgtgcggggccgtgctgctgacggagctgctggagcgcgccgctttctacggcatcacgtccaacctggtgctattcctgaacggggcgccgttctgctgggagggcgcgcaggccagcgaggcgctgctgctcttcatgggcctcacctacctgggctcgccgttcggaggctggctggccgacgcgcggctgggccgggcgcgcgccatcctgctgagcctggcgctctacctgctgggcatgctggccttcccgctgctggccgcgcccgccacgcgagccgcgctctgcggttccgcgcgcctgctcaactgcacggcgcctggtcccgacgtcgtcaaacagctgttgattaccgggggaattttggcttgcatcatgccttgttgctattgttc

SEQ ID NO: 80862 - DNA, 2674 bp, Homo sapiens
gcggccgcggcggcggctggggcgttcgcgggccggcgcgcggcgtgcggggccgtgctgctgacggagctgctggagcgcgccgctttctacggcatcacgtccaacctggtgctattcctgaacggggcgccgttctgctgggagggcgcgcaggccagcgaggcgctgctgctcttcatgggcctcacctacctgggctcgccgttcggaggctggctggccgacgcgcggctgggccgggcgcgcgccatcctgctgagcctggcgctctacctgctgggcatgctggccttcccgctgctggccgcgcccgccacgcgagccgcgctctgcggttccgcgcgcctgctcaactgcacggcgcctggtcccgacgccgccgcccgctgctgctcaccggccaccttcgcggggctggtgctggtgggcctgggcgtggccaccgtcaaggccaacatcacgcccttcggcgccgaccaggttaaagatcgaggtccggaagccactaggagattttttaattggttttattggagcattaacctgggagcgatcctgtcgttaggtggcattgcctatattcagcagaacgtcagctttgtcactggttatgcgatccccactgtctgcgtcggccttgcttttgtggtcttcctctgtggccagagcgttttcatcaccaagcctcctgatggcagtgccttcaccgacatgttcaagatactgacgtattcctgctgttcccagaagcgaagtggagagcgccagagtaatggtgaaggcattggagtctttcagcaatcttctaaacaaagtctgtttgattcatgtaagatgtctcatggtgggccatttacagaagagaaagtggaagatgtgaaagctctggtcaagattgtccctgttttcttggctttgataccttactggacagtgtatttccaaatgcagacaacatatgttttacagagtcttcatttgaggattccagaaatttcaaatattacaaccactcctcacacgctccctgcagcctggctgaccatgtttgatgctgtgctcatcctcctgctcatccctctgaaggacaaactggtcgatcccattttgagaagacatggcctgctcccatcctccctgaagaggatcgccgtgggcatgttctttgtcatgtgctcagcctttgctgcaggaattttggagagtaaaaggctgaaccttgttaaagagaaaaccattaatcagaccatcggcaacgtcgtctaccatgctgccgatctgtcgctgtggtggcaggtgccgcagtacttgctgattgggatcagcgagatctttgcaagtatcgcaggcctggaatttgcatactcagctgcccccaagtccatgcagagtgccataatgggcttgttctttttcttctctggcgtcgggtcgttcgtgggttctggactgctggcactggtgtctatcaaagccatcggatggatgagcagtcacacagactttggtaatattaacggctgctatttgaactattacttttttcttctggctgctattcaaggagctaccctcctgcttttcctcattatttctgtgaaatatgaccatcatcgagaccatcagcgatcaagagccaatggcgtgcccaccagcaggagggcctgaccttcctgaggccatgtgcggtttctgaggctgacatgtcagtaactgactggggtgcactgagaacaggcaagactttaaattcccataaaatgtctgacttcactgaaacttgcatgttgcctggattgatttcttctttccctctatccaaaggagcttggtaagtgccttactgcagcgtgtctcctggcacgctgggccctccgggaggagagctgcagatttcgagtatgtcgcttgtcattcaaggtctctgtgaatcctctagctgggttcccttttttacagaaactcacaaatggagattgcaaagtcttggggaactccacgtgttagttggcatcccagtttcttaaacaaatagtatcacctgcttcccatagccatatctcactgtaaaaaaaaaaattaataaactgttacttatatttaagaaagtgaggatttttttttttttaaagataaaagcatggtcagatgctgcaaggattttacataaatgccatatttatggtttccttcctgagaacaatcttgctcttgccatgttctttgatttaggctggtagtaaacacatttcatctgctgcttcaaaaagtacttactttttaaaccatcaacattacttttctttcttaaggcaaggcatgcataagagtcatttgagaccatgtgtcccatctcaagccacagagcaactcacggggtacttcacaccttacctagtcagagtgcttatatatagctttattttggtacgattgagactaaagactgatcatggttgtatgtaaggaaaacattcttttgaacagaaatagtgtaattaaaaataattgaaagtgttaaatgtgaacttgagctgtttgaccagtcacatttttgtattgttactgtacgtgtatctggggcttctccgtttgttaatactttttctgtatttgttgctgtatttttggcataactttattataaaaagcatctcaaatgcgaaatcca

SEQ ID NO: 80863 - DNA, 2616 bp, Homo sapiens
gcggccgcggcggcggctggggcgttcgcgggccggcgcgcggcgtgcggggccgtgctgctgacggagctgctggagcgcgccgctttctacggcatcacgtccaacctggtgctattcctgaacggggcgccgttctgctgggagggcgcgcaggccagcgaggcgctgctgctcttcatgggcctcacctacctgggctcgccgttcggaggctggctggccgacgcgcggctgggccgggcgcgcgccatcctgctgagcctggcgctctacctgctgggcatgctggccttcccgctgctggccgcgcccgccacgcgagccgcgctctgcggttccgcgcgcctgctcaactgcacggcgcctggtcccgacgccgccgcccgctgctgctcaccggccaccttcgcggggctggtgctggtgggcctgggcgtggccaccgtcaaggccaacatcacgcccttcggcgccgaccaggttaaagatcgaggtccggaagccactaggagattttttaattggttttattggagcattaacctgggagcgatcctgtcgttaggtggcattgcctatattcagcagaacgtcagctttgtcactggttatgcgatccccactgtctgcgtcggccttgcttttgtggtcttcctctgtggccagagcgttttcatcaccaagcctcctgatggcagtgccttcaccgacatgttcaagatactgacgtattcctgctgttcccagaagcgaagtggagagcgccagagtaatggatgtctcatggtgggccatttacagaagagaaagtggaagatgtgaaagctctggtcaagattgtccctgttttcttggctttgataccttactggacagtgtatttccaaatgcagacaacatatgttttacagagtcttcatttgaggattccagaaatttcaaatattacaaccactcctcacacgctccctgcagcctggctgaccatgtttgatgctgtgctcatcctcctgctcatccctctgaaggacaaactggtcgatcccattttgagaagacatggcctgctcccatcctccctgaagaggatcgccgtgggcatgttctttgtcatgtgctcagcctttgctgcaggaattttggagagtaaaaggctgaaccttgttaaagagaaaaccattaatcagaccatcggcaacgtcgtctaccatgctgccgatctgtcgctgtggtggcaggtgccgcagtacttgctgattgggatcagcgagatctttgcaagtatcgcaggcctggaatttgcatactcagctgcccccaagtccatgcagagtgccataatgggcttgttctttttcttctctggcgtcgggtcgttcgtgggttctggactgctggcactggtgtctatcaaagccatcggatggatgagcagtcacacagactttggtaatattaacggctgctatttgaactattacttttttcttctggctgctattcaaggagctaccctcctgcttttcctcattatttctgtgaaatatgaccatcatcgagaccatcagcgatcaagagccaatggcgtgcccaccagcaggagggcctgaccttcctgaggccatgtgcggtttctgaggctgacatgtcagtaactgactggggtgcactgagaacaggcaagactttaaattcccataaaatgtctgacttcactgaaacttgcatgttgcctggattgatttcttctttccctctatccaaaggagcttggtaagtgccttactgcagcgtgtctcctggcacgctgggccctccgggaggagagctgcagatttcgagtatgtcgcttgtcattcaaggtctctgtgaatcctctagctgggttcccttttttacagaaactcacaaatggagattgcaaagtcttggggaactccacgtgttagttggcatcccagtttcttaaacaaatagtatcacctgcttcccatagccatatctcactgtaaaaaaaaaaattaataaactgttacttatatttaagaaagtgaggatttttttttttttaaagataaaagcatggtcagatgctgcaaggattttacataaatgccatatttatggtttccttcctgagaacaatcttgctcttgccatgttctttgatttaggctggtagtaaacacatttcatctgctgcttcaaaaagtacttactttttaaaccatcaacattacttttctttcttaaggcaaggcatgcataagagtcatttgagaccatgtgtcccatctcaagccacagagcaactcacggggtacttcacaccttacctagtcagagtgcttatatatagctttattttggtacgattgagactaaagactgatcatggttgtatgtaaggaaaacattcttttgaacagaaatagtgtaattaaaaataattgaaagtgttaaatgtgaacttgagctgtttgaccagtcacatttttgtattgttactgtacgtgtatctggggcttctccgtttgttaatactttttctgtatttgttgctgtatttttggcataactttattataaaaagcatctcaaatgcgaaatcca

SEQ ID NO: 80864 - DNA, 2505 bp, Homo sapiens
gcggccgcggcggcggctggggcgttcgcgggccggcgcgcggcgtgcggggccgtgctgctgacggagctgctggagcgcgccgctttctacggcatcacgtccaacctggtgctattcctgaacggggcgccgttctgctgggagggcgcgcaggccagcgaggcgctgctgctcttcatgggcctcacctacctgggctcgccgttcggaggctggctggccgacgcgcggctgggccgggcgcgcgccatcctgctgagcctggcgctctacctgctgggcatgctggccttcccgctgctggccgcgcccgccacgcgagccgcgctctgcggttccgcgcgcctgctcaactgcacggcgcctggtcccgacgccgccgcccgctgctgctcaccggccaccttcgcggggctggtgctggtgggcctgggcgtggccaccgtcaaggccaacatcacgcccttcggcgccgaccaggttaaagatcgaggtccggaagccactaggagattttttaattggttttattggagcattaacctgggagcgatcctgtcgttaggtggcattgcctatattcagcagaacgtcagctttgtcactggttatgcgatccccactgtctgcgtcggccttgcttttgtggtcttcctctgtggccagagcgttttcatcaccaagcctcctgatggcagtgccttcaccgacatgttcaagatactgacgtattcctgctgttcccagaagcgaagtggagagcgccagagtaatggatgcagacaacatatgttttacagagtcttcatttgaggattccagaaatttcaaatattacaaccactcctcacacgctccctgcagcctggctgaccatgtttgatgctgtgctcatcctcctgctcatccctctgaaggacaaactggtcgatcccattttgagaagacatggcctgctcccatcctccctgaagaggatcgccgtgggcatgttctttgtcatgtgctcagcctttgctgcaggaattttggagagtaaaaggctgaaccttgttaaagagaaaaccattaatcagaccatcggcaacgtcgtctaccatgctgccgatctgtcgctgtggtggcaggtgccgcagtacttgctgattgggatcagcgagatctttgcaagtatcgcaggcctggaatttgcatactcagctgcccccaagtccatgcagagtgccataatgggcttgttctttttcttctctggcgtcgggtcgttcgtgggttctggactgctggcactggtgtctatcaaagccatcggatggatgagcagtcacacagactttggtaatattaacggctgctatttgaactattacttttttcttctggctgctattcaaggagctaccctcctgcttttcctcattatttctgtgaaatatgaccatcatcgagaccatcagcgatcaagagccaatggcgtgcccaccagcaggagggcctgaccttcctgaggccatgtgcggtttctgaggctgacatgtcagtaactgactggggtgcactgagaacaggcaagactttaaattcccataaaatgtctgacttcactgaaacttgcatgttgcctggattgatttcttctttccctctatccaaaggagcttggtaagtgccttactgcagcgtgtctcctggcacgctgggccctccgggaggagagctgcagatttcgagtatgtcgcttgtcattcaaggtctctgtgaatcctctagctgggttcccttttttacagaaactcacaaatggagattgcaaagtcttggggaactccacgtgttagttggcatcccagtttcttaaacaaatagtatcacctgcttcccatagccatatctcactgtaaaaaaaaaaattaataaactgttacttatatttaagaaagtgaggatttttttttttttaaagataaaagcatggtcagatgctgcaaggattttacataaatgccatatttatggtttccttcctgagaacaatcttgctcttgccatgttctttgatttaggctggtagtaaacacatttcatctgctgcttcaaaaagtacttactttttaaaccatcaacattacttttctttcttaaggcaaggcatgcataagagtcatttgagaccatgtgtcccatctcaagccacagagcaactcacggggtacttcacaccttacctagtcagagtgcttatatatagctttattttggtacgattgagactaaagactgatcatggttgtatgtaaggaaaacattcttttgaacagaaatagtgtaattaaaaataattgaaagtgttaaatgtgaacttgagctgtttgaccagtcacatttttgtattgttactgtacgtgtatctggggcttctccgtttgttaatactttttctgtatttgttgctgtatttttggcataactttattataaaaagcatctcaaatgcgaaatcca

SEQ ID NO: 80865 - DNA, 3123 bp, Homo sapiens
gcggccgcggcggcggctggggcgttcgcgggccggcgcgcggcgtgcggggccgtgctgctgacggagctgctggagcgcgccgctttctacggcatcacgtccaacctggtgctattcctgaacggggcgccgttctgctgggagggcgcgcaggccagcgaggcgctgctgctcttcatgggcctcacctacctgggctcgccgttcggaggctggctggccgacgcgcggctgggccgggcgcgcgccatcctgctgagcctggcgctctacctgctgggcatgctggccttcccgctgctggccgcgcccgccacgcgagccgcgctctgcggttccgcgcgcctgctcaactgcacggcgcctggtcccgacgccgccgcccgctgctgctcaccggccaccttcgcggggctggtgctggtgggcctgggcgtggccaccgtcaaggccaacatcacgcccttcggcgccgaccaggttaaagatcgaggtccggaagccactaggagattttttaattggttttattggagcattaacctgggagcgatcctgtcgttaggtggcattgcctatattcagcagaacgtcagctttgtcactggttatgcgatccccactgtctgcgtcggccttgcttttgtggtcttcctctgtggccagagcgttttcatcaccaagcctcctgatggcagtgccttcaccgacatgttcaagatactgacgtattcctgctgttcccagaagcgaagtggagagcgccagagtaatggtgaaggcattggagtctttcagcaatcttctaaacaaagtctgtttgattcatgtaagatgtctcatggtgggccatttacagaagagaaagtggaagatgtgaaagctctggtcaagattgtccctgttttcttggctttgataccttactggacagtgtatttccaaatgcagacaacatatgttttacagagtcttcatttgaggattccagaaatttcaaatattacaaccactcctcacacgctccctgcagcctggctgaccatgtttgatgctgtgctcatcctcctgctcatccctctgaaggacaaactggtcgatcccattttgagaagacatggcctgctcccatcctccctgaagaggatcgccgtgggcatgttctttgtcatgtgctcagcctttgctgcaggaattttggagagtaaaaggctgaaccttgttaaagagaaaaccattaatcagaccatcggcaacgtcgtctaccatgctgccgatctgtcgctgtggtggcaggtgccgcagtacttgctgattgggatcagcgagatctttgcaagtatcgcaggcctggaatttgcatactcagctgcccccaagtccatgcagagtgccataatgggcttgttctttttcttctctggcgtcgggtcgttcgtgggttctggactgctggcactggtgtctatcaaagccatcggatggatgagcagtcacacagactttggtaagagccagcatcctgtccctttttgaaaatagccagtgagggggaggcgcaggcactcaggagatggctgagtgagcggaggtgttttcacgtggatggcctgtcccgagctgcctgtccaccgctccttccacagcactgctctgtgctgcttgcatcactgtgtttccttacatcatgaacggttttcaggagacaagcaggcctctcttctcatcccaggggccaagcctgccctggccacagcccagcgagcagctgctgcagccaccgctccttacggggacgtccttgacagacaagcaccttctccacgcccgtccagctcagtcttcgtgaggcagctgaatctgtaccccaagcttccctttctttaacttggtggtgtactttcgttttcttttcctaacagcaccttttctgatacgaaaaagacaagatagatagtaatattaacggctgctatttgaactattacttttttcttctggctgctattcaaggagctaccctcctgcttttcctcattatttctgtgaaatatgaccatcatcgagaccatcagcgatcaagagccaatggcgtgcccaccagcaggagggcctgaccttcctgaggccatgtgcggtttctgaggctgacatgtcagtaactgactggggtgcactgagaacaggcaagactttaaattcccataaaatgtctgacttcactgaaacttgcatgttgcctggattgatttcttctttccctctatccaaaggagcttggtaagtgccttactgcagcgtgtctcctggcacgctgggccctccgggaggagagctgcagatttcgagtatgtcgcttgtcattcaaggtctctgtgaatcctctagctgggttcccttttttacagaaactcacaaatggagattgcaaagtcttggggaactccacgtgttagttggcatcccagtttcttaaacaaatagtatcacctgcttcccatagccatatctcactgtaaaaaaaaaaattaataaactgttacttatatttaagaaagtgaggatttttttttttttaaagataaaagcatggtcagatgctgcaaggattttacataaatgccatatttatggtttccttcctgagaacaatcttgctcttgccatgttctttgatttaggctggtagtaaacacatttcatctgctgcttcaaaaagtacttactttttaaaccatcaacattacttttctttcttaaggcaaggcatgcataagagtcatttgagaccatgtgtcccatctcaagccacagagcaactcacggggtacttcacaccttacctagtcagagtgcttatatatagctttattttggtacgattgagactaaagactgatcatggttgtatgtaaggaaaacattcttttgaacagaaatagtgtaattaaaaataattgaaagtgttaaatgtgaacttgagctgtttgaccagtcacatttttgtattgttactgtacgtgtatctggggcttctccgtttgttaatactttttctgtatttgttgctgtatttttggcataactttattataaaaagcatctcaaatgcgaaatcca

SEQ ID NO: 80866 - DNA, 2620 bp, Homo sapiens
gcggccgcggcggcggctggggcgttcgcgggccggcgcgcggcgtgcggggccgtgctgctgacggagctgctggagcgcgccgctttctacggcatcacgtccaacctggtgctattcctgaacggggcgccgttctgctgggagggcgcgcaggccagcgaggcgctgctgctcttcatgggcctcacctacctgggctcgccgttcggaggctggctggccgacgcgcggctgggccgggcgcgcgccatcctgctgagcctggcgctctacctgctgggcatgctggccttcccgctgctggccgcgcccgccacgcgagccgcgctctgcggttccgcgcgcctgctcaactgcacggcgcctggtcccgacgccgccgcccgctgctgctcaccggccaccttcgcggggctggtgctggtgggcctgggcgtggccaccgtcaaggccaacatcacgcccttcggcgccgaccaggttaaagatcgaggtccggaagccactaggagattttttaattggttttattggagcattaacctgggagcgatcctgtcgttaggtggcattgcctatattcagcagaacgtcagctttgtcactggttatgcgatccccactgtctgcgtcggccttgcttttgtggtcttcctctgtggccagagcgttttcatcaccaagcctcctgatggcagtgccttcaccgacatgttcaagatactgacgtattcctgctgttcccagaagcgaagtggagagcgccagagtaatggtgaaggcattggagtctttcagcaatcttctaaacaaagtctgtttgattcatgtaagatgtctcatggtgggccatttacagaagagaaagtggaagatgtgaaagctctggtcaagattgtccctgttttcttggctttgataccttactggacagtgtatttccaaatgcagacaacatatgttttacagagtcttcatttgaggattccagaaatttcaaatattacaaccactcctcacacgctccctgcagcctggctgaccatgtttgatgctgtgctcatcctcctgctcatccctctgaaggacaaactggtcgatcccattttgagaagacatggcctgctcccatcctccctgaagaggatcgccgtgggcatgttctttgtcatgtgctcagcctttgctgcaggaattttggagagtaaaaggctgaaccttgttaaagagaaaaccattaatcagaccatcggcaacgtcgtctaccatgctgccgatctgtcgctgtggtggcaggtgccgcagtacttgctgattgggatcagcgagatctttgcaagtatcgcaggcctggaatttgcatactcagctgcccccaagtccatgcagagtgccataatgggcttgttctttttcttctctggcgtcgggtcgttcgtgggttctggactgctggcactggtgtctatcaaagccatcggatggatgagcagtcacacagactttggtaatattaacggctgctatttgaactattacttttttcttctggctgctattcaaggagctaccctcctgcttttcctcattatttctgtgaaatatgaccatcatcgagaccatcagcgatcaagagccaatggcgtgcccaccagcaggagggcctgaccttcctgaggccatgtgcggtttctgaggctgacatgtcagtaactgactggggtgcactgagaacaggcaagactttaaattcccatcctctatccaaaggagcttggtaagtgccttactgcagcgtgtctcctggcacgctgggccctccgggaggagagctgcagatttcgagtatgtcgcttgtcattcaaggtctctgtgaatcctctagctgggttcccttttttacagaaactcacaaatggagattgcaaagtcttggggaactccacgtgttagttggcatcccagtttcttaaacaaatagtatcacctgcttcccatagccatatctcactgtaaaaaaaaaaattaataaactgttacttatatttaagaaagtgaggatttttttttttttaaagataaaagcatggtcagatgctgcaaggattttacataaatgccatatttatggtttccttcctgagaacaatcttgctcttgccatgttctttgatttaggctggtagtaaacacatttcatctgctgcttcaaaaagtacttactttttaaaccatcaacattacttttctttcttaaggcaaggcatgcataagagtcatttgagaccatgtgtcccatctcaagccacagagcaactcacggggtacttcacaccttacctagtcagagtgcttatatatagctttattttggtacgattgagactaaagactgatcatggttgtatgtaaggaaaacattcttttgaacagaaatagtgtaattaaaaataattgaaagtgttaaatgtgaacttgagctgtttgaccagtcacatttttgtattgttactgtacgtgtatctggggcttctccgtttgttaatactttttctgtatttgttgctgtatttttggcataactttattataaaaagcatctcaaatgcgaaatcca

SEQ ID NO: 80867 - DNA, 2053 bp, Homo sapiens
cggagtacaagtcaggtcggtacccagcagcatagatattaccggctctgaaagaagctgagaacaggtacgcttctggtttttcaggcccctcttgttaatgtaatttctcctttggataactggccattctttttcaaaattgatctccagaggactttacgatgaccaaatcattgacctgtctgttttcaaacttgagccattgtctatttctgggagtcactgtgtgtcgcatctgagtctagcttaggggaggggcaggatgcttagagtgtttgagagcacagttggtccacatataatgatactgttttttatacctagatgcagacaacatatgttttacagagtcttcatttgaggattccagaaatttcaaatattacaaccactcctcacacgctccctgcagcctggctgaccatgtttgatgctgtgctcatcctcctgctcatccctctgaaggacaaactggtcgatcccattttgagaagacatggcctgctcccatcctccctgaagaggatcgccgtgggcatgttctttgtcatgtgctcagcctttgctgcaggaattttggagagtaaaaggctgaaccttgttaaagagaaaaccattaatcagaccatcggcaacgtcgtctaccatgctgccgatctgtcgctgtggtggcaggtgccgcagtacttgctgattgggatcagcgagatctttgcaagtatcgcaggcctggaatttgcatactcagctgcccccaagtccatgcagagtgccataatgggcttgttctttttcttctctggcgtcgggtcgttcgtgggttctggactgctggcactggtgtctatcaaagccatcggatggatgagcagtcacacagactttggtaatattaacggctgctatttgaactattacttttttcttctggctgctattcaaggagctaccctcctgcttttcctcattatttctgtgaaatatgaccatcatcgagaccatcagcgatcaagagccaatggcgtgcccaccagcaggagggcctgaccttcctgaggccatgtgcggtttctgaggctgacatgtcagtaactgactggggtgcactgagaacaggcaagactttaaattcccataaaatgtctgacttcactgaaacttgcatgttgcctggattgatttcttctttccctctatccaaaggagcttggtaagtgccttactgcagcgtgtctcctggcacgctgggccctccgggaggagagctgcagatttcgagtatgtcgcttgtcattcaaggtctctgtgaatcctctagctgggttcccttttttacagaaactcacaaatggagattgcaaagtcttggggaactccacgtgttagttggcatcccagtttcttaaacaaatagtatcacctgcttcccatagccatatctcactgtaaaaaaaaaaattaataaactgttacttatatttaagaaagtgaggatttttttttttttaaagataaaagcatggtcagatgctgcaaggattttacataaatgccatatttatggtttccttcctgagaacaatcttgctcttgccatgttctttgatttaggctggtagtaaacacatttcatctgctgcttcaaaaagtacttactttttaaaccatcaacattacttttctttcttaaggcaaggcatgcataagagtcatttgagaccatgtgtcccatctcaagccacagagcaactcacggggtacttcacaccttacctagtcagagtgcttatatatagctttattttggtacgattgagactaaagactgatcatggttgtatgtaaggaaaacattcttttgaacagaaatagtgtaattaaaaataattgaaagtgttaaatgtgaacttgagctgtttgaccagtcacatttttgtattgttactgtacgtgtatctggggcttctccgtttgttaatactttttctgtatttgttgctgtatttttggcataactttattataaaaagcatctcaaatgcgaaatcca

SEQ ID NO: 80868 - DNA, 2625 bp, Homo sapiens
gcggccgcggcggcggctggggcgttcgcgggccggcgcgcggcgtgcggggccgtgctgctgacggagctgctggagcgcgccgctttctacggcatcacgtccaacctggtgctattcctgaacggggcgccgttctgctgggagggcgcgcaggccagcgaggcgctgctgctcttcatgggcctcacctacctgggctcgccgttcggaggctggctggccgacgcgcggctgggccgggcgcgcgccatcctgctgagcctggcgctctacctgctgggcatgctggccttcccgctgctggccgcgcccgccacgcgagccgcgctctgcggttccgcgcgcctgctcaactgcacggcgcctggtcccgacgccgccgcccgctgctgctcaccggccaccttcgcggggctggtgctggtgggcctgggcgtggccaccgtcaaggccaacatcacgcccttcggcgccgaccaggttaaagatcgaggtccggaagccactaggagattttttaattggttttattggagcattaacctgggagcgatcctgtcgttaggtggcattgcctatattcagcagaacgtcagctttgtcactggttatgcgatccccactgtctgcgtcggccttgcttttgtggtcttcctctgtggccagagcgttttcatcaccaagcctcctgatggcagtgccttcaccgacatgttcaagatactgacgtattcctgctgttcccagaagcgaagtggagagcgccagagtaatggtgaaggcattggagtctttcagcaatcttctaaacaaagtctgtttgattcatgtaagatgtctcatggtgggccatttacagaagagaaagtggaagatgtgaaagctctggtcaagattgtccctgttttcttggctttgataccttactggacagtgtatttccaaatgcagacaacatatgttttacagagtcttcatttgaggattccagaaatttcaaatattacaaccactcctcacacgctccctgcagcctggctgaccatgtttgatgctgtgctcatcctcctgctcatccctctgaaggacaaactggtcgatcccattttgagaagacatggcctgctcccatcctccctgaagaggatcgccgtgggcatgttctttgtcatgtgctcagcctttgctgcaggaattttggagagtaaaaggctgaaccttgttaaagagaaaaccattaatcagaccatcggcaacgtcgtctaccatgctgccgatctgtcgctgtggtggcaggtgccgcagtacttgctgattgggatcagcgagatctttgcaagtatcgcaggcctggaatttgcatactcagctgcccccaagtccatgcagagtgccataatgggcttgttctttttcttctctggcgtcgggtcgttcgtgggttctggactgctggcactggtgtctatcaaagccatcggatggatgagcagtcacacagactttggtaatattaacggctgctatttgaactattacttttttcttctggctgctattcaaggagctaccctcctgcttttcctcattatttctgtgaaatatgaccatcatcgagaccatcagcgatcaagagccaatggcgtgcccaccagcaggagggcctgaccttcctgaggccatgtgcggtttctgaggctgacatgtcagtaactgactggggtgcactgagaacaggcaagactttaaattcccataaaatgtctgacttcactgaaacttgcatgttgcctggattgatttcttctttccctctatccaaaggagcttggtaagtgccttactgcagcgtgtctcctggcacgctgggccctccgggaggagagctgcagatttcgagtatgtcgcttgtcattcaaggtctctgtgaatcctctagctgggttcccttttttacagaaactcacaaatggagattgcaaagtcttggggaactccacgtgttagttggcatcccagtttcttaaacaaatagtatcacctgcttcccatagccatatctcactgtaaaaaaaaaaattaataaactgttacttatatttaagaaagtgaggatttttttttttttaaagataaaagcatggtcagatgctgcaaggattttacataaatgccatatttatggtttccttcctgagaacaatcttgctcttgccatgtttacttactttttaaaccatcaacattacttttctttcttaaggcaaggcatgcataagagtcatttgagaccatgtgtcccatctcaagccacagagcaactcacggggtacttcacaccttacctagtcagagtgcttatatatagctttattttggtacgattgagactaaagactgatcatggttgtatgtaaggaaaacattcttttgaacagaaatagtgtaattaaaaataattgaaagtgttaaatgtgaacttgagctgtttgaccagtcacatttttgtattgttactgtacgtgtatctggggcttctccgtttgttaatactttttctgtatttgttgctgtatttttggcataactttattataaaaagcatctcaaatgcgaaatcca

SEQ ID NO: 80869 - DNA, 2076 bp, Homo sapiens
catgtttaagacacattcagaaaccagctcatctcttcctttgatacattgcccagctgtcggccctggtgtgttgggtgtgtcagtgacccatgcagtgaatccagaattcacgatgttcaggctgtgtcatagtgcaatctgtgatgctaaaaagtgcacaggttccatagccaagttacaaagacgctcacctcaggattcgataaagagatagtcaggcgctcttttgttatcttcgcatctgccttcctcaacaatgcagttccaggccaatcataactataaatggaggaagttcccctgaagtagttgaggagaggaacactgcctcagaaaaggcaggaaggaaataacaccagaccggctaacacttgtttctggtggcaagaacacaggaaggtaattttttactttgcccagctgttctggtgtggggggattagcagtcacaggaggctgggttggcaggtttccccttgctcctgatttgcagccttgtcgtgcggccttaggcacactctccgtcgacactgtccccttcaccaccgcatgtgtgtctgcaggccacgcagggattttcctgagtactggggagctaccttttctagtttcctcagggaacctcctccttttaccttacagaagagagggatgggctgctaggggcaggtggggggctgcagacagcccacctccagagcccccggtggcgatgtatctgacttcagggagcttcttcagtggttttgaaagcaagatgcttgtgcattttggactacagagacaacatttgttactttttttatgactccagttaaaccttagtgggaaccagattaaatagtaaagtcttgaaaaaatacctgtagcagcgcagcttacctgccgctttccttttgttttctccaggtaatattaacggctgctatttgaactattacttttttcttctggctgctattcaaggagctaccctcctgcttttcctcattatttctgtgaaatatgaccatcatcgagaccatcagcgatcaagagccaatggcgtgcccaccagcaggagggcctgaccttcctgaggccatgtgcggtttctgaggctgacatgtcagtaactgactggggtgcactgagaacaggcaagactttaaattcccataaaatgtctgacttcactgaaacttgcatgttgcctggattgatttcttctttccctctatccaaaggagcttggtaagtgccttactgcagcgtgtctcctggcacgctgggccctccgggaggagagctgcagatttcgagtatgtcgcttgtcattcaaggtctctgtgaatcctctagctgggttcccttttttacagaaactcacaaatggagattgcaaagtcttggggaactccacgtgttagttggcatcccagtttcttaaacaaatagtatcacctgcttcccatagccatatctcactgtaaaaaaaaaaattaataaactgttacttatatttaagaaagtgaggatttttttttttttaaagataaaagcatggtcagatgctgcaaggattttacataaatgccatatttatggtttccttcctgagaacaatcttgctcttgccatgttctttgatttaggctggtagtaaacacatttcatctgctgcttcaaaaagtacttactttttaaaccatcaacattacttttctttcttaaggcaaggcatgcataagagtcatttgagaccatgtgtcccatctcaagccacagagcaactcacggggtacttcacaccttacctagtcagagtgcttatatatagctttattttggtacgattgagactaaagactgatcatggttgtatgtaaggaaaacattcttttgaacagaaatagtgtaattaaaaataattgaaagtgttaaatgtgaacttgagctgtttgaccagtcacatttttgtattgttactgtacgtgtatctggggcttctccgtttgttaatactttttctgtatttgttgctgtatttttggcataactttattataaaaagcatctcaaatgcgaaatcca

SEQ ID NO: 80870 - DNA, 906 bp, Homo sapiens
  misc_feature (28)..(28): n is a, c, g, or t
  misc_feature (31)..(31): n is a, c, g, or t
  misc_feature (88)..(88): n is a, c, g, or t
tttttaaaaaaaaccccctttttggggnccnccccaaaagggagcccgggttgtttggtttttccccttttcccaaccttgggggggnactaacccagagctgggccctccgggaggagagctgcagatttcgagtatgtcgcttgtcattcaaggtctctgtgaatcctctagctgggttcccttttttacagaaactcacaaatggagattgcaaagtcttggggaactccacgtgttagttggcatcccagtttcttaaacaaatagtatcacctgcttcccatagccatatctcactgtaaaaaaaaaaattaataaactgttacttatatttaagaaagtgaggatttttttttttttaaagataaaagcatggtcagatgctgcaaggattttacataaatgccatatttatggtttccttcctgagaacaatcttgctcttgccatgttctttgatttaggctggtagtaaacacatttcatctgctgcttcaaaaagtacttactttttaaaccatcaacattacttttctttcttaaggcaaggcatgcataagagtcatttgagaccatgtgtcccatctcaagccacagagcaactcacggggtacttcacaccttacctagtcagagtgcttatatatagctttattttggtacgattgagactaaagactgatcatggttgtatgtaaggaaaacattcttttgaacagaaatagtgtaattaaaaataattgaaagtgttaaatgtgaacttgagctgtttgaccagtcacatttttgtattgttactgtacgtgtatctggggcttctccgtttgttaatactttttctgtatttgttgctgtatttttggcataactttattataaaaagcatctcaaatgcgaaatcca

SEQ ID NO: 80871 - DNA, 2186 bp, Homo sapiens
  misc_feature (1864)..(1865): n is a, c, g, or t
  misc_feature (1867)..(1867): n is a, c, g, or t
  misc_feature (1901)..(1901): n is a, c, g, or t
  misc_feature (1918)..(1918): n is a, c, g, or t
  misc_feature (1947)..(1947): n is a, c, g, or t
  misc_feature (1949)..(1949): n is a, c, g, or t
  misc_feature (1966)..(1966): n is a, c, g, or t
  misc_feature (1972)..(1972): n is a, c, g, or t
gcggccgcggcggcggctggggcgttcgcgggccggcgcgcggcgtgcggggccgtgctgctgacggagctgctggagcgcgccgctttctacggcatcacgtccaacctggtgctattcctgaacggggcgccgttctgctgggagggcgcgcaggccagcgaggcgctgctgctcttcatgggcctcacctacctgggctcgccgttcggaggctggctggccgacgcgcggctgggccgggcgcgcgccatcctgctgagcctggcgctctacctgctgggcatgctggccttcccgctgctggccgcgcccgccacgcgagccgcgctctgcggttccgcgcgcctgctcaactgcacggcgcctggtcccgacgccgccgcccgctgctgctcaccggccaccttcgcggggctggtgctggtgggcctgggcgtggccaccgtcaaggccaacatcacgcccttcggcgccgaccaggttaaagatcgaggtccggaagccactaggagattttttaattggttttattggagcattaacctgggagcgatcctgtcgttaggtggcattgcctatattcagcagaacgtcagctttgtcactggttatgcgatccccactgtctgcgtcggccttgcttttgtggtcttcctctgtggccagagcgttttcatcaccaagcctcctgatggcagtgccttcaccgacatgttcaagatactgacgtattcctgctgttcccagaagcgaagtggagagcgccagagtaatggtgaaggcattggagtctttcagcaatcttctaaacaaagtctgtttgattcatgtaagatgtctcatggtgggccatttacagaagagaaagtggaagatgtgaaagctctggtcaagattgtccctgttttcttggctttgataccttactggacagtgtatttccaaatgcagacaacatatgttttacagagtcttcatttgaggattccagaaatttcaaatattacaaccactcctcacacgctccctgcagcctggctgaccatgtttgatgctgtgctcatcctcctgctcatccctctgaaggacaaactggtcgatcccattttgagaagacatggcctgctcccatcctccctgaagaggatcgccgtgggcatgttctttgtcatgtgctcagcctttgctgcaggaattttggagagtaaaaggctgaaccttgttaaagagaaaaccattaatcagaccatcggcaacgtcgtctaccatgctgccgatctgtcgctgtggtggcaggtgccgcagtacttgctgattgggatcagcgagatctttgcaagtatcgcaggcctggaatttgcatactcagctgcccccaagtccatgcagagtgccataatgggcttgttctttttcttctctggcgtcgggtcgttcgtgggttctggactgctggcactggtgtctatcaaagccatcggatggatgagcagtcacacagactttggtaatattaacggctgctatttgaactattacttttttcttctggctgctattcaaggagctaccctcctgcttttcctcattatttctgtgaaatatgaccatcatcgagaccatcagcgatcaagagccaatggcgtgcccaccagcaggagggcctgaccttcctgaggccatgtgcggtttctgaggctgacatgtcagtaactgactggggtgcactgagaacaggcaagactttaaattcccataaaatgtctgacttcactgaaacttgcatgttgcctggattgatttcttctttccctctatccaaaggagcttggtaagtaagaaagaaggggggcgggggggnnanaaaatttttttttaaaaccccccggggggggganaaaaatttttgaaaggnaaaaatttaaaagggcccccccctttggntnttccccttggaaaaccntgaacnagccagatggcccccagcctatgggggatctggcctctgccagggacctctgagtagctctgaggtggcactgtccagccctggatagggggggcagtgggccagctaccgtaagcaaaggctgttttttactgagagaatttctaaagtaggctcatcacttttttttaaatatcattttgggaagggaagacagggttaaggaactttattt

SEQ ID NO: 80872 - DNA, 2005 bp, Homo sapiens
gcggccgcggcggcggctggggcgttcgcgggccggcgcgcggcgtgcggggccgtgctgctgacggagctgctggagcgcgccgctttctacggcatcacgtccaacctggtgctattcctgaacggggcgccgttctgctgggagggcgcgcaggccagcgaggcgctgctgctcttcatgggcctcacctacctgggctcgccgttcggaggctggctggccgacgcgcggctgggccgggcgcgcgccatcctgctgagcctggcgctctacctgctgggcatgctggccttcccgctgctggccgcgcccgccacgcgagccgcgctctgcggttccgcgcgcctgctcaactgcacggcgcctggtcccgacgccgccgcccgctgctgctcaccggccaccttcgcggggctggtgctggtgggcctgggcgtggccaccgtcaaggccaacatcacgcccttcggcgccgaccaggttaaagatcgaggtccggaagccactaggagattttttaattggttttattggagcattaacctgggagcgatcctgtcgttaggtggcattgcctatattcagcagaacgtcagctttgtcactggttatgcgatccccactgtctgcgtcggccttgcttttgtggtcttcctctgtggccagagcgttttcatcaccaagcctcctgatggcagtgccttcaccgacatgttcaagatactgacgtattcctgctgttcccagaagcgaagtggagagcgccagagtaatggtgaaggcattggagtctttcagcaatcttctaaacaaagtctgtttgattcatgtaagatgtctcatggtgggccatttacagaagagaaagtggaagatgtgaaagctctggtcaagattgtccctgttttcttggctttgataccttactggacagtgtatttccaaatgcagacaacatatgttttacagagtcttcatttgaggattccagaaatttcaaatattacaaccactcctcacacgctccctgcagcctggctgaccatgtttgatgctgtgctcatcctcctgctcatccctctgaaggacaaactggtcgatcccattttgagaagacatggcctgctcccatcctccctgaagaggatcgccgtgggcatgttctttgtcatgtgctcagcctttgctgcaggaattttggagagtaaaaggctgaaccttgttaaagagaaaaccattaatcagaccatcggcaacgtcgtctaccatgctgccgatctgtcgctgtggtggcaggtgccgcagtacttgctgattgggatcagcgagatctttgcaagtatcgcaggcctggaatttgcatactcagctgcccccaagtccatgcagagtgccataatgggcttgttctttttcttctctggcgtcgggtcgttcgtgggttctggactgctggcactggtgtctatcaaagccatcggatggatgagcagtcacacagactttggtaagagccagcatcctgtccctttttgaaaatagccagtgagggggaggcgcaggcactcaggagatggctgagtgagcggaggtgttttcacgtggatggcctgtcccgagctgcctgtccaccgctccttccacagcactgctctgtgctgcttgcatcactgtgtttccttacatcatgaacggttttcaggagacaagcaggcctctcttctcatcccaggggccaagcctgccctggccacagcccagcgagcagctgctgcagccaccgctccttacggggacgtccttgacagacaagcaccttctccacgcccgtccagctcagtcttcgtgaggcagctgaatctgtaccccaagcttccctttctttaacttggtggtgtactttcgttttcttttcctaacagcaccttttctgatacgaaaaagacaagatagatagtaagttacttttaaaaataaacatattacttgtgatcaatcataa

SEQ ID NO: 80873 - DNA, 1810 bp, Homo sapiens
gcggccgcggcggcggctggggcgttcgcgggccggcgcgcggcgtgcggggccgtgctgctgacggagctgctggagcgcgccgctttctacggcatcacgtccaacctggtgctattcctgaacggggcgccgttctgctgggagggcgcgcaggccagcgaggcgctgctgctcttcatgggcctcacctacctgggctcgccgttcggaggctggctggccgacgcgcggctgggccgggcgcgcgccatcctgctgagcctggcgctctacctgctgggcatgctggccttcccgctgctggccgcgcccgccacgcgagccgcgctctgcggttccgcgcgcctgctcaactgcacggcgcctggtcccgacgccgccgcccgctgctgctcaccggccaccttcgcggggctggtgctggtgggcctgggcgtggccaccgtcaaggccaacatcacgcccttcggcgccgaccaggttaaagatcgaggtccggaagccactaggagattttttaattggttttattggagcattaacctgggagcgatcctgtcgttaggtggcattgcctatattcagcagaacgtcagctttgtcactggttatgcgatccccactgtctgcgtcggccttgcttttgtggtcttcctctgtggccagagcgttttcatcaccaagcctcctgatggcagtgccttcaccgacatgttcaagatactgacgtattcctgctgttcccagaagcgaagtggagagcgccagagtaatggtgaaggcattggagtctttcagcaatcttctaaacaaagtctgtttgattcatgtaagatgtctcatggtgggccatttacagaagagaaagtggaagatgtgaaagctctggtcaagattgtccctgttttcttggctttgataccttactggacagtgtatttccaaatgcagacaacatatgttttacagagtcttcatttgaggattccagaaatttcaaatattacaaccactcctcacacgctccctgcagcctggctgaccatgtttgatgctgtgctcatcctcctgctcatccctctgaaggacaaactggtcgatcccattttgagaagacatggcctgctcccatcctccctgaagaggatcgccgtgggcatgttctttgtcatgtgctcagcctttgctgcaggaattttggagagtaaaaggctgaaccttgttaaagagaaaaccattaatcagaccatcggcaacgtcgtctaccatgctgccgatctgtcgctgtggtggcaggtgccgcagtacttgctgattgggatcagcgagatctttgcaagtatcgcaggcctggaatttgcatactcagctgcccccaagtccatgcagagtgccataatgggcttgttctttttcttctctggcgtcgggtcgttcgtgggttctggactgctggcactggtgtctatcaaagccatcggatggatgagcagtcacacagactttggagacaagcaggcctctcttctcatcccaggggccaagcctgccctggccacagcccagcgagcagctgctgcagccaccgctccttacggggacgtccttgacagacaagcaccttctccacgcccgtccagctcagtcttcgtgaggcagctgaatctgtaccccaagcttccctttctttaacttggtggtgtactttcgttttcttttcctaacagcaccttttctgatacgaaaaagacaagatagatagtaagttacttttaaaaataaacatattacttgtgatcaatcataa

SEQ ID NO: 80874 - DNA, 419 bp, Homo sapiens
ttctacagcagaatatacttggaaaaactctctagcatttgttggaatttagtgtaattaagtgaaacctacctagcaactgtagtaattaaaagcgtggggtgtgctttttgttgagatccgtgaatgtttctgtaaacacaattttgattgtgttgcgcttcttaaaggttgtgatgacaacggtaattttaaccacttgaccgtatatggttttcatccttgaagactgtcatatattttcaagtgtctttcctccctgttattttaggttaaagatcgaggtccggaagccactaggagattttttaattggttttattggagcattaacctgggagcgatcctgtcgttaggtggcattgcctatattcagcagaacgtcagctttgtcactggttatgcgatccccactgtct

SEQ ID NO: 80875 - DNA, 180 bp, Homo sapiens
aaagttgctcgtgtgctgccattcccgcatggcccgccacagtccctcctccagcgtcatggtgggcttccgccgggccagggatcggagaactgggctgtaaaccagtgcagtcagtcccagtctgtaagcccaccctccatcccgggcccacctggtcccaacacctggctcctgtcc

SEQ ID NO: 80876 - DNA, 913 bp, Homo sapiens
ctctcctgggccgtttcatctcaccgagagcgagatccgctttcctagaggctgggaggaccaggcccgggcacaggactggcttcgcaccactggccccgcagtcgggtccccggggacgcgccacgggtcactgctgcctgctaaagcgacacaaggcgccttcattcctcaggccgaggcggccgaacgccttggctctggccgacagtgagcacccactgcgagtccgcacacactgcagcgcccccgggcacgccccgcagtccgcccagcgtcccccggggcggggcacagccagaggacggcccgagagccctgctgtccccgtcagcgccgcaggagggcgcgacttccccgctgggccgaggcctttgccgggccctctactgtacgccggtcctagggctgggaccgccgtcctggaccgacctcagcccactgttctgcggaggccgcgtgttgggcgacagcagccacccagcccggaagcagccgttccgagcgcaggggcgccaagagccccgcgccccgcctgtgcgccggccctgagacttggaacgatggtgcaggcaggaggggtcaccggtagggatgccactggagggactgggccgtccacacggaccagctgacacactaagtgctgggtacacagcaggacaatggcaagggctgctcagactgcgtttttaaaatcgcctcaccacgaaagacagaaagtagggaagggtaccttgctgtggccaaggccgccctcgctgagtcagctggcattcccacgactccacgagtccccaaagggcttgtcagagcccagcggcaccctcgccctggaagtgccctgcgtcctcctcaagagccttatttgggacagagatcagatcaaccgcgccaccaccctcccacccac

SEQ ID NO: 80877 - DNA, 289 bp, Homo sapiens
caggcttggcattggagtagatgctttaaaaaaaaaaaaaaggaatgatacgctctaccttgcaagtttttcagagagacaggacttgtgtgtgtgaaaagtgcaatagagtttgcaaggcagcatacagtcccattagcatttgtattgcttcatatttctagactaagtgatgttgcagaacaccagtattctgttctatacaatccgttcacatttctaagagcatgagcgttcatttgtcttttcaattgtttcccactttctctgcatacacaatacttgctgg

SEQ ID NO: 80878 - DNA, 698 bp, Homo sapiens
aaaagaaaaaaaaaaaaaaagcatggatgatataatactctcacccttcctgttaaatttcaaagtccctaaatacttcttgactgtggtgtggaggcttccacaatgctctggggagctggtcagtctgccctgggtgttttttctcagaagggcctgggaattccagctcagatcctgccctgctgggaggcacctacccctgcaggatgccgatcatcagtctcacaagactaaacaaatctctccctctccccgcaggctgcctgggttgcacaacacaccgttttgggcctaggaaggccatctctttggtccttagattcagatttttggggtttctattgtttatttcctcttccctctaccttttaaaaggaggtagtgtcggctgggtgcagtggttcacatctgtaatcccagcactttgggaggccaaggcaagtggataacttgaggtcaagagttcaagaccagcctggccaacatggtgaaaccccggctctgctaaaaatacaaaaattagctgggcatggtggtgcatgcctgtagtcccatctacttgggaggctgaggcacgagaatctctggaacctgggaggcagaggttgcagtgagccaagatcgcaccactgcactccagcctgggtgagagtgagactccatctcaaaaaaaaaaaaaaaaaagggaggtcgtg

SEQ ID NO: 80879 - DNA, 758 bp, Homo sapiens
cacagtccggctggaaacaagctccccccaatttcagggccgttgtcgcctccgggcggtccgcgggtcccgagcggactgggactctggagacgtgcccccaaccccaccgccattcaccctgtcattgcaggggagagaacagaataaagacgggtacattttccatctcacctctgaacctcggttaggaaaacgctgtagccctgactagtgggctcaagggccgactggaaaagggcgagtcagcgttcaaagccgattcggggcagccctctctaacgcagagggccgaggataagaagacgacaatgtgttaggggccctccgggctaggactgtcctcaccactttgtacattgccaaagtaaatataacgtagaggtcaagcgcaggcgctttgtgggcagacatgactgagctccactcgcgactcctctaatggcgtgccagctgcggacctcattagccccgcctcaatcattcagtatgttttggttgtctacagtgtacgaagccctgttctcacaattagataaaatgagtgtgaagtgctcaacataattcctagtgtagtaggccttcaaagaactattatcattattaattactcatatagaatacaactttatgaaatgataggatcccattttaagatgaggaaaatgaggctatcagagacgttaaggaacttaatgtcacacagttaataaacgatagaggtgcgatttgaacacaggttgtctaataccagacct

SEQ ID NO: 80880 - DNA, 185 bp, Homo sapiens
ttctataataaagattatttagttgaggggagggacaaatttgtagtttccaactaaacaaaataagtgtgcattaaaagacaaaatcaagtcatttttcggatttttactaatgcctttaaatagcccaaaagttgaaccagaggcccactttgccagagaatctgtccacagccaggcagggc

SEQ ID NO: 80881 - DNA, 789 bp, Homo sapiens
ctttgacatatctttttggggaacacagtacaacccacagcacctggagaactgaatgtaggtgcctgttgttggaacataacttgtgaggggtgtaatggaaggaagggggtgaggttgtaaggttataatggcctctttttgtcccttcccaacaatctccagcttctgggtttatgcttgacctaggataagccctcagggcattccagtttctggccgtgctgattgttttgaaatgggtttatgattgattttaatggactcaatcagagtgaatctcaggacttttgtcggagatccctttcctctgtgggcgtttagaaggacatgtgttgccttcttttctgtgtggcgaggccataatgcctagaactgttaagagttagcgttgctgctgtaaggaattcacctcaggtcagaacaactcccagaagatggaggatggcagagaaatggagccggagacctgataactttctgaatctctggatcaaaacttgcctgaaggtgtagtttttggtttgtgaagtactgcagtccatgtttttcttaagccggttagagttggatttccttccacttacagtagaacaattcctaacatacagagggagggaggtagagccagctgactagggttagtcagttagggcttctgtaacaaattaccatagactttacctcgatgaaaggttcccaagatgggcagatgctttttatttaccgcagtatagaggacaggtatgtacgcaggagaaaaaggagagtgtgtgtttatgatcagaa

SEQ ID NO: 80882 - DNA, 498 bp, Homo sapiens
gttacctacatagctccaatgctcaaaacacctccaaatgtcttttaactatggcaactaaactagatccttctgcccagcttttcagacccaccacaatctggcctcacactacagtcagttcccattaattcccaccactcagccttggtcctccatcagacaaatctctgcactgtcttaagagctgctaagcccattcccgcttctttgcctttgttctgtcccctggctggactattttccatgctactattctaatgccgccactcattctttagtgcccagaaaagtcctacattctttgtggaacatatactaactattcattcattctctctctctctctctctcactctcggatcttgctctgtggcccaggctggagtgcagtggcatgatcacagttcaatgcagcctcaacctccagggctcaagggatcctcctgtttcagccttcagtagttgggactaaaggcgcatgccaccatgcccagc

SEQ ID NO: 80883 - DNA, 188 bp, Homo sapiens
tggccctgtggggtggaccaggggtttctccccagacgcctgttggggccagggctgccccctcagacctccaagacgtcgagtgtggaggacaccctggaggaggagatggaaccctcctgtttgctggggctcggcccccggtgaggctggctgcaggtgaccacagagacctagcctggtgtcgt

SEQ ID NO: 80884 - DNA, 366 bp, Homo sapiens
gttttactcaaccaggctttgtgtggaggtattcactgcaaagaagttttgcctgtaactgtcacagctagaatctataacctcatatgaaaacaaaaaaaggaaaaacatatggaaatgtgttgggactttgtctcaattgtgcttaagctaaactttctcagtttttagctggcaacttctattgaatttgtggtaattttgttaaaagttaataccagtctttttaatgatttgactctaagttttgaaactaccaagttagttaaacctttcatatcaaaaggacatattttgggctatttcttttccaatattctgcaatattttgatttgtggacagattccatgctgacagaaaacaac

SEQ ID NO: 80885 - DNA, 371 bp, Homo sapiens
acttccaaattgaactagatctaacagcccaagaaaacaggattaccgctatttacatatgacttaatcacacttacagactggttgtcctttaagcaaaactccgttttggcagatgtgcatagaaaaagccatcagctccaggacctattcaacatgctttcaattaactaaagctgcagcacagtaaataatacttcaggaacctcaaagagaatgcatcttccaaagggccccatcttattggaagtggaggcatatttaggcactggaaacacttggctcaaaataattaaaggagaaaatggacttggaaaacctgtttactttagatctacttcccgactttgacatgctgtattagacctaat

SEQ ID NO: 80886 - DNA, 316 bp, Homo sapiens
cctggcatcatttctctaaaacataaaactggccattcctcatttccatagtctcccaattactaacacgtttataaagctcaataatgactgtcacgtttgtttagggagctaaaggtggaagtccaactttaaagcaggatttcaagtttcctgatcacattgaattctttttttggtctgtcctgtgtgtatgtcgatatcctgaaatttcagccccattggtactacgtgcgagacagcctttaaaatttctctgcctccagtgctgaaagccaggaaaaagaaactgaaagtgtctgccattgggccaggg

SEQ ID NO: 80887 - DNA, 839 bp, Homo sapiens
gctgctgctgctccagctctccggatctctccaacagctgctccagctccgagaacctcttcttgtactggagaatctggggattgggagctgatgagtcttactctgttgcccaggctgcggtgcaatggcgcgatctcggctcacagtaacctccacctcccgggttcaagcgattctcctgcctcagcctcccgagtagttgggattacagacacacaccactgcgcccggtaagtatgagatcttcgggctctgccccgacacagcctcatacgcctcactctttacacacacggtcacttgccccgcgcactcccgagccctttccagccctgacacacagctgggattctcacttccgatccgcggtcctgaacccgctcccagggcacgggaactccttcgtggcgaagcagcaagtggcgaagcagcagcctctgcgctgcctcatctacatagaagtcgccctgtccgtgatgtcaccgacagtgccttgcccagtccccgtctgcctttctgccactcaaccgaccaatctgctgccagagccgccaaggggaagtgacgtctgcctctccctttttccctcccgcccctgcgtctgttctctcccaaagaagctggtccttagcctgtgttaaggagcaacctttcggtggccagatggagccggggcatccttcttcaaataatggcttttaattcgcagactagaatgtttcggattacaaaagaaaccggttctcttcacatccttatccttgtgatgcagcattccgcttgcaattggaagccgtttaatatcagagagaaaccatatttatgaaagtaaagag

SEQ ID NO: 80888 - DNA, 966 bp, Homo sapiens
ccttcaccctgactctgatctaaatactgattgaacatactctaggcagtaatgacttgatataagagatatactactttcagagttgtcttcacaactgtttgcccttctaaaattatctcctatttttctactcctattttgatgattgaatgagtgctttccaaagatgataaatacaagttaaaagccaaagtagtaaacttgtaagtgtgaagtctgtgttccctttgtcctgtaatcctatttcttataatttgcctaaaattatagtaagttgaaaaatgtatgcagaaagttcatttcagcattcactatttagtgaaaataggagaacaacctaaatctgtagcaataaagtaccaaattagcaaattatctgtacacaaaagaatattatgcagacatcaaaaataatgccatagttttatgtttattgatttgccaggatgtttgtgatacagaataatgtctgtgatgtattattaaataaaaagcaaattgcagagcagcatttatatgttcccatttgtgcaggattgtatacttatttctgcatgtgtattcatggagcactgtctgggaagtatgttaaaacattgattatagctagtggcagatttggagatttctttccttgctaattattcatgcttggaaccaatactatgatattgaaatatatctatcccttttagtgttttttataccatattaatgtaatttttaagaaattttaatatttaacatttgtgtttaataattatggctcttggatctctttttttaatttttatgttactgagcctgcaaaacatgaagaccacagttggtttctaatattgactctgccacatttcagtatcttagtattttaattatgtccttagcttatgtcttattagcacctcttccttagcttatgtattttctaagtataggaactgcatttgttaaagttgatct

SEQ ID NO: 80889 - DNA, 948 bp, Homo sapiens
acttcctgccgccagaggctccgggttcacttccggcgtgcctacgcctcctcttgcgctgtcctgttaatggcgggcagtagccgctgaggggattgcagataaccgcttcccgcacggggaaagtctaccctgcctgccactttctgctcgccgtcagcgccggagctcgccagcatgtctgtggtaccgcccaatcgctcgcagaccggctggccccggggggtcactcagttcggcaacaagtacatccagcagacgaagcccctcaccctggagcgcaccatcaacctgtaccctcttaccaattatacttttggtacaaaagagcccctctacgagaaggacagctctgttgcagccagatttcagcgcatgagggaagaatttgataaaattggaatgaggaggactgtagaaggggttctgattgtacatgagcaccggctaccccatgtgttactgctgcagctgggaacaactttcttcaaactacctggtggtgaacttaacccaggagaagatgaagttgaaggactaaaacgcttaatgacagagatactgggtcgtcaggatggagttttgcaagactgggtcattgacgattgcattggtaactggtggagaccaaattttgaacctcctcagtatccatatattcctgcacatattacaaagcctaaggaacataagaagttgtttctggttcagcttcaagaaaaagccttgtttgcagtccctaaaaattacaagctggtagctgcaccattgtttgaattgtatgacaatgcaccaggatatggacccatcatttctagtctccctcagctgttgagcaggttcaattttatttacaactgaattcctgcgcagtggagaagtaaaagaagccgcttgtctctgtgagcacagctatatacagtgtagaataaatgtggtagaaaagtt

SEQ ID NO: 80890 - DNA, 968 bp, Homo sapiens
  misc_feature (894)..(894): n is a, c, g, or t
  misc_feature (896)..(896): n is a, c, g, or t
acttcctgccgccagaggctccgggttcacttccggcgtgcctacgcctcctcttgcgctgtcctgttaatggcgggcagtagccgctgaggggattgcagataaccgcttcccgcacggggaaagtctaccctgcctgccactttctgctcgccgtcagcgccggagctcgccagcatgtctgtggtaccgcccaatcgctcgcagaccggctggccccggggggtcactcagttcggcaacaagtacatccagcagacgaagcccctcaccctggagcgcaccatcaacctgtaccctcttaccaattatacttttggtacaaaagagcccctctacgagaaggacagctctgttgcagccagatttcagcgcatgagggaagaatttgataaaattggaatgaggaggactgtagaaggggttctgattgtacatgagcaccggctaccccatgtgttactgctgcagctgggaacaactttcttcaaactacctggtggtgaacttaacccaggagaagatgaagttgaaggactaaaacgcttaatgacagagatactgggtcgtcaggatggagttttgcaagactgggtcattgacgattgcattggtaactggtggagaccaaattttgaacctcctcagtatccatatattcctgcacatattacaaagcctaaggaacataagaagttgtttctggttcagcttcaagaaaaagccttgtttgcagtccctaaaaattacaagctggtagctgcaccattgtttgaattgtatgacaatgcaccaggatatggacccatcatttctagtctccctcagctgttgagcaggttcaattttatttacaactgaattctggcggggagtaaaaagcggtggtttggngncaagtttacggtggaaacgggggaaaagtggggaaccttgggacacaagggttttggggtgtaattggaaag

SEQ ID NO: 80891 - DNA, 945 bp, Homo sapiens
acttcctgccgccagaggctccgggttcacttccggcgtgcctacgcctcctcttgcgctgtcctgttaatggcgggcagtagccgctgaggggattgcagataaccgcttcccgcacggggaaagtctaccctgcctgccactttctgctcgccgtcagcgccggagctcgccagcatgtctgtggtaccgcccaatcgctcgcagaccggctggccccggggggtcactcagttcggcaacaagtacatccagcagacgaagcccctcaccctggagcgcaccatcaacctgtaccctcttaccaattatacttttggtacaaaagagcccctctacgagaaggacagctctgttgcagccagatttcagcgcatgagggaagaatttgataaaattggaatgaggaggactgtagaaggggttctgattgtacatgagcaccggctaccccatgtgttactgctgcagctgggaacaactttcttcaaactacctggtggtgaacttaacccaggagaagatgaagttgaaggactaaaacgcttaatgacagagatactgggtcgtcaggatggagttttgcaagactgggtcattgacgattgcattggtaactggtggagaccaaattttgaacctcctcagtatccatatattcctgcacatattacaaagcctaaggaacataagaagttgtttctggttcagcttcaagaaaaagccttgtttgcagtccctaaaaattacaagctggtagctgcaccattgtttgaattgtatgacaatgcaccaggatatggacccatcatttctagtctccctcagctgttgagcaggttcaattttatttacaactgaattcctgcgcagtggagaagtaaaagaaccgctgtcttcgttgttgaagcatataagcctagagaggcacgtgaagatatgtga

SEQ ID NO: 80892 - DNA, 740 bp, Homo sapiens
  misc_feature (620)..(620): n is a, c, g, or t
  misc_feature (623)..(623): n is a, c, g, or t
  misc_feature (631)..(631): n is a, c, g, or t
  misc_feature (633)..(634): n is a, c, g, or t
  misc_feature (651)..(651): n is a, c, g, or t
  misc_feature (656)..(656): n is a, c, g, or t
  misc_feature (660)..(660): n is a, c, g, or t
  misc_feature (696)..(696): n is a, c, g, or t
  misc_feature (702)..(702): n is a, c, g, or t
acttcctgccgccagaggctccgggttcacttccggcgtgcctacgcctcctcttgcgctgtcctgttaatggcgggcagtagccgctgaggggattgcagataaccgcttcccgcacggggaaagtctaccctgcctgccactttctgctcgccgtcagcgccggagctcgccagcatgtctgtggtaccgcccaatcgctcgcagaccggctggccccggggggtcactcagttcggcaacaagtacatccagcagacgaagcccctcaccctggagcgcaccatcaacctgtaccctcttaccaattatacttttggtacaaaagagcccctctacgagaaggacagctctgttgcagccagatttcagcgcatgagggaagaatttgataaaattggaatgaggaggactgtagaaggggttctgattgtacatgagcaccggctaccccatgtgttactgctgcagctgggaacaactttcttcaaactacctggtggtgaacttaacccaggagaagatgaagttgaaggactaaaacgcttaatgacagagatactgggtcgtcaggatggagttttgcaagactgggtcattgacgattgcatttgggtaanctnggttgggngnncccaaaattttttgaanccctncctncaagtaatccccataataattccctgggaaccattntttccnaaaaggcctttaagggaacccatttaaggaagtttgtt

SEQ ID NO: 80893 - DNA, 4448 bp, Homo sapiens
acttcctgccgccagaggctccgggttcacttccggcgtgcctacgcctcctcttgcgctgtcctgttaatggcgggcagtagccgctgaggggattgcagataaccgcttcccgcacggggaaagtctaccctgcctgccactttctgctcgccgtcagcgccggagctcgccagcatgtctgtggtaccgcccaatcgctcgcagaccggctggccccggggggtcactcagttcggcaacaagtacatccagcagacgaagcccctcaccctggagcgcaccatcaacctgtaccctcttaccaattatacttttggtacaaaagagcccctctacgagaaggacagctctgttgcagccagatttcagcgcatgagggaagaatttgataaaattggaatgaggaggactgtagaaggggttctgattgtacatgagcaccggctaccccatgtgttactgctgcagctgggaacaactttcttcaaactacctggtggtgaacttaacccaggagaagatgaagttgaaggactaaaacgcttaatgacagagatactgggtcgtcaggatggagttttgcaagactgggtcattgacgattgcattggtaactggtggagaccaaattttgaacctcctcagtatccatatattcctgcacatattacaaagcctaaggaacataagaagttgtttctggttcagcttcaagaaaaagccttgtttgcagtccctaaaaattacaagctggtagctgcaccattgtttgaattgtatgacaatgcaccaggatatggacccatcatttctagtctccctcagctgttgagcaggttcaattttatttacaactgaattcctgcgcagtggagaagtaaaagaagccgcttgtctctgtgagcacagctatatacagtgtagaataaatgtggtagaaaagtttttttggttttatctcttttgcgatccctaaattgccacctttctattgtttgaatagtaaaattaatatgaagaactagatagtggtgtaaacaaatgtgataatgtttatttactttcggttctgctcatacttttttgtacaacattaaagaaaatggactttttttattttaatttctcattaaacttctaaaattcttataggtgaggatcatttttccccccaccttaggatggtgaatgttgcaacacaatgacaggtttaagtcagtcaagtttattggacccttgctttgataccattcttgggcacatactccaagattgtattagatttttgtgatgaagagcttccattacttctgaaaactatatttatctgagtgagtccaaggtgcaactcctaaatgaattgtgttgcagagaactcccagtataattcactgaccagtacattttataaccatccaggccttggtttgcaagcaacagaccttaaacatacaggaaactattaaaattggctcgatcagtagtcataggaattggtataagaagagactcatttagagctcagagttttcttcacataatgggggtattaattatttgtgctgttgcgaaattatgtgtcttattcttaaagccatggtaaaaatagggatctgtgaaggaaatttctaaaattggatgtattaggttttgaactctgagattgcacaaatattcaattaacttgaagttgtgtacatagagaagaaaatttggttttagcaaatgacagagccttcaaaaatatttttggaataatgtgaatcaaccgaaaactgggggcaaggcagaggacaggttttctcaggttaagagaaaaacgaaattttaaaaactttaaaaaatactgataaattcggatcaaatttgggggaataaaaaatattagagcaaaggagtttgctggttgtgtcattatttaatgatcaaagtatagcatgtatgccttattacagacttgttgactataggcttaatgtaaaaaggaatcttgccagatgtagctacttaaggaaaaaagggtttttaatagaaatgaacttttgattagtatggtaccagtcacagggctattttcctgaatattgggtgatgtcaaaggtatatgatacttgaggaaatcaggccaagtgtagctgagcaattaataaacactcaagtttttttagttggggtcatgtcaaaccctcacatggtggttaagtagtgactaactgtgcatgtccttcatggtaggtgagcaccagtctccatgatcaaaaatgccccagtttcctttgaaaaagccactagttctgtgaattgtccttttccctcctgcccctaacagtcctacccctctagcctacattagcatatttctcatgtaatgtattttgctggtaagctcatccattagctgcgtccttcagctattcctttagattggaggaagtggatatgaagatggattgattcagctcaccttccatgattgcttttgagggaaaagctacagtggccacatttcagatgttcacttttgcaatttgtggagggtggagagaggtagacttttgttgtgtgttttataaagtactctcagtaaggagtgtttgagttgaagagtcatctgattcgaggccactcatgttctttgtaacttaaactttgaccaagaaattcttcacttctcacttcttcacttcttcccaatatacagtaagtacgtgagccagtcatccatacactaaggcctagttgagaaaaacctttgattcaggatggctgggttactaaccttgaaatgtaagagatctggttttgaatgtaaaagttgcaacacacaaacggaagtcttaaaaactttttgctctggtcagttacaggtggatccccaataatctgtttttggttttctgatggaaataatagaattaggggaaatcaaatctggttggtaggtgtctacagtattagaagagggtataagggcactgtttaacactaagttctaatacttccagaaactgtgcattccagatctacatactaaatgctcttatcattttgaaatgggctcttgattaatagacccatattttttagtggcttctatgttgtatatttgtctaaaatgaaagctcttttgcgttctaaaactacaatatatgtcatcttattttccctgagtatccaagtatagtgcagattctatgtaaaactactaaatgacactggaatatgtttagtagattagggggaaaaactataaaggtttatacaattgtttgtagttacatttaggatggacttatccctttggagaagagtgaagtttgttttttcgccatgtgatgaagaccactgtgattttttaaaaaagtagataatacttaaaatggcgtaataattctgcacttgaatttgtactgttaacagcacatttggaagattttaaaactttttattgtcttataaatagcattcacttattattttggatatttaagggttccattaagttaacactgtatttggacaaagtgtgaccaaattagccagtctgttttcttccatgtttaattagaagtgagaggtagaagtacttcaaattcaacaggccagcaagcaatcggcttaaaattccctttcttaaatgttgtgctcttatgttctcggctttttaatgactttatttttacagtacttgttcagtcacttgagatgaaatgcttggggtagcttttccatcctcaaacttaatgtttttactagttcatagtgtttggaacagtatatgccaatcactgagactgcatcagagtttgcaattttgtatgtttcattgccaaagaaggcttagtggttgttgactgtagtataagtcagctttctgtagcataagatttgattttcccatacttacttcacttgttatacatcactgattatttgggttaaactggactcatttcaagcagtttgcttttgttcaaatcgtgatgagaaacctaatactgtaatttgatttgagccataaaacacattttaatattagcttgtattatagttattaagcttgtttttgtggaaaaaaacttactaaaacctaggtaactctagattaggccagttcaggtgtattttgtatcttagtaatggatcatatcgtaaaaatagagataagttgggaagatatattgattatgctgttctgttgagggaaaggtcatgtatttagaaatttaaacttttggttattgtgttcacatcatagtattcaagcatcatttatagtttggttttgagaacttttctggtattacgtttatggcaaatgtataaaagaaacaagttttggttatatttttatatttgtaaagtaagtttggttaaagtgatcactgttctttttttattttattgtcatttcaataaaaaatatttgaaagaaaaaaaaaaaa

SEQ ID NO: 80894 - DNA, 4562 bp, Homo sapiens
  misc_feature (4562)..(4562): n is a, c, g, or t
acttcctgccgccagaggctccgggttcacttccggcgtgcctacgcctcctcttgcgctgtcctgttaatggcgggcagtagccgctgaggggattgcagataaccgcttcccgcacggggaaagtctaccctgcctgccactttctgctcgccgtcagcgccggagctcgccagcatgtctgtggtaccgcccaatcgctcgcagaccggctggccccggggggtcactcagttcggcaacaagtacatccagcagacgaagcccctcaccctggagcgcaccatcaacctgtaccctcttaccaattatacttttggtacaaaagagcccctctacgagaaggacagctctgttgcagccagatttcagcgcatgagggaagaatttgataaaattggaatgaggaggactgtagaaggggttctgattgtacatgagcaccggctaccccatgtgttactgctgcagctgggaacaactttcttcaaactacctggtggtgaacttaacccaggagaagatgaagttgaaggactaaaacgcttaatgacagagatactgggtcgtcaggatggagttttgcaagactgggtcattgacgattgcattggtaactggtggagaccaaattttgaacctcctcagtatccatatattcctgcacatattacaaagcctaaggaacataagaagttgtttctggttcagcttcaagaaaaagccttgtttgcagtccctaaaaattacaagctggtagctgcaccattgtttgaattgtatgacaatgcaccaggatatggacccatcatttctagtctccctcagctgttgagcaggttcaattttatttacaactgaattcctgcgcagtggagaagtaaaagaagccgcttgtctctgtgagcacagctatatacagtgtagaataaatgtggtagaaaagtttttttggttttatctcttttgcgatccctaaattgccacctttctattgtttgaatagtaaaattaatatgaagaactagatagtggtgtaaacaaatgtgataatgtttatttactttcggttctgctcatacttttttgtacaacattaaagaaaatggactttttttattttaatttctcattaaacttctaaaattcttataggtgaggatcatttttccccccaccttaggatggtgaatgttgcaacacaatgacaggtttaagtcagtcaagtttattggacccttgctttgataccattcttgggcacatactccaagattgtattagatttttgtgatgaagagcttccattacttctgaaaactatatttatctgagtgagtccaaggtgcaactcctaaatgaattgtgttgcagagaactcccagtataattcactgaccagtacattttataaccatccaggccttggtttgcaagcaacagaccttaaacatacaggaaactattaaaattggctcgatcagtagtcataggaattggtataagaagagactcatttagagctcagagttttcttcacataatgggggtattaattatttgtgctgttgcgaaattatgtgtcttattcttaaagccatggtaaaaatagggatctgtgaaggaaatttctaaaattggatgtattaggttttgaactctgagattgcacaaatattcaattaacttgaagttgtgtacatagagaagaaaatttggttttagcaaatgacagagccttcaaaaatatttttggaataatgtgaatcaaccgaaaactgggggcaaggcagaggacaggttttctcaggttaagagaaaaacgaaattttaaaaactttaaaaaatactgataaattcggatcaaatttgggggaataaaaaatattagagcaaaggagtttgctggttgtgtcattatttaatgatcaaagtatagcatgtatgccttattacagacttgttgactataggcttaatgtaaaaaggaatcttgccagatgtagctacttaaggaaaaaagggtttttaatagaaatgaacttttgattagtatggtaccagtcacagggctattttcctgaatattgggtgatgtcaaaggtatatgatacttgaggaaatcaggccaagtgtagctgagcaattaataaacactcaagtttttttagttggggtcatgtcaaaccctcacatggtggttaagtagtgactaactgtgcatgtccttcatggtaggtgagcaccagtctccatgatcaaaaatgccccagtttcctttgaaaaagccactagttctgtgaattgtccttttccctcctgcccctaacagtcctacccctctagcctacattagcatatttctcatgtaatgtattttgctggtaagctcatccattagctgcgtccttcagctattcctttagattggaggaagtggatatgaagatggattgattcagctcaccttccatgattgcttttgagggaaaagctacagtggccacatttcagatgttcacttttgcaatttgtggagggtggagagaggtagacttttgttgtgtgttttataaagtactctcagtaaggagtgtttgagttgaagagtcatctgattcgaggccactcatgttctttgtaacttaaactttgaccaagaaattcttcacttctcacttcttcacttcttcccaatatacagtaagtacgtgagccagtcatccatacactaaggcctagttgagaaaaacctttgattcaggatggctgggttactaaccttgaaatgtaagagatctggttttgaatgtaaaagttgcaacacacaaacggaagtcttaaaaactttttgctctggtcagttacaggtggatccccaataatctgtttttggttttctgatggaaataatagaattaggggaaatcaaatctggttggtaggtgtctacagtattagaagagggtataagggcactgtttaacactaagttctaatacttccagaaactgtgcattccagatctacatactaaatgctcttatcattttgaaatgggctcttgattaatagacccatattttttagtggcttctatgttgtatatttgtctaaaatgaaagctcttttgcgttctaaaactacaatatatgtcatcttattttccctgagtatccaagtatagtgcagattctatgtaaaactactaaatgacactggaatatgtttagtagattagggggaaaaactataaaggtttatacaattgtttgtagttacatttaggatggacttatccctttggagaagagtgaagtttgttttttcgccatgtgatgaagaccactgtgattttttaaaaaagtagataatacttaaaatggcgtaataattctgcacttgaatttgtactgttaacagcacatttggaagattttaaaactttttattgtcttataaatagcattcacttattattttggatatttaagggttccattaagttaacactgtatttggacaaagtgtgaccaaattagccagtctgttttcttccatgtttaattagaagtgagaggtagaagtacttcaaattcaacaggccagcaagcaatcggcttaaaattccctttcttaaatgttgtgctcttatgttctcggctttttaatgactttatttttacagtacttgttcagtcacttgagatgaaatgcttggggtagcttttccatcctcaaacttaatgtttttactagttcatagtgtttggaacagtatatgccaatcactgagactgcatcagagtttgcaattttgtatgtttcattgccaaagaaggcttagtggttgttgactgtagtataagtcagctttctgtagcataagatttgattttcccatacttacttcacttgttatacatcactgattatttgggttaaactggactcatttcaagcagtttgcttttgttcaaatcgtgatgagaaacctaatactgtaatttgatttgagccataaaacacattttaatattagcttgtattatagttattaagcttgtttttgtggaaaaaaacttactaaaacctaggtaactctagattaggccagttcaggtgtattttgtatcttagtaatggatcatatcgtaaaaatagagataagttgggaagatatattgattatgctgttctgttgagggaaaggtcatgtatttagaaatttaaacttttggttattgtgttcacatcatagtattcaagcatcatttatagtttggttttgagaacttttctggtattacgtttatggcaaatgtataaaagaaacaagttttggttatatttttatatttgtaaagtaagtttggttaaagtgatcactgttctttttttatgtcattcataaaaattttgatacaaaaaaaaaaaaaaattgtgggcgggcccaaaatttaaactgtgggggggcgagaagaagggaggcaggaacgggaaaggggtttccaaaaccgggggggtaaacgggtggttgttacggagacttcacgggggtn

SEQ ID NO: 80895 - DNA, 4256 bp, Homo sapiens
acttcctgccgccagaggctccgggttcacttccggcgtgcctacgcctcctcttgcgctgtcctgttaatggcgggcagtagccgctgaggggattgcagataaccgcttcccgcacggggaaagtctaccctgcctgccactttctgctcgccgtcagcgccggagctcgccagcatgtctgtggtaccgcccaatcgctcgcagaccggctggccccggggggtcactcagttcggcaacaagtacatccagcagacgaagcccctcaccctggagcgcaccatcaacctgtaccctcttaccaattatacttttggtacaaaagagcccctctacgagaaggacagctctgttgcagccagatttcagcgcatgagggaagaatttgataaaattggaatgaggaggactgtagaaggggttctgattgtacatgagcaccggctaccccatgtgttactgctgcagctgggaacaactttcttcaaactacctggtggtgaacttaacccaggagaagatgaagttgaaggactaaaacgcttaatgacagagatactgggtcgtcaggatggagttttgcaagactgggtcattgacgattgcattggtaactggtggagaccaaattttgaacctcctcagtatccatatattcctgcacatattacaaagcctaaggaacataagaagttgtttctggttcagcttcaagaaaaagccttgtttgcagtccctaaaaattacaagctggtagctgcaccattgtttgaattgtatgacaatgcaccaggatatggacccatcatttctagtctccctcagctgttgagcaggttcaattttatttacaactgaattcctgcgcagtggagaagtaaaagaagccgcttgtctctgtgagcacagctatatacagtgtagaataaatgtggtagaaaagtttttttggttttatctcttttgcgatccctaaattgccacctttctattgtttgaatagtaaaattaatatgaagaactagatagtggtgtaaacaaatgtgataatgtttatttactttcggttctgctcatacttttttgtacaacattaaagaaaatggactttttttattttaatttctcattaaacttctaaaattcttataggtgaggatcatttttccccccaccttaggatggtgaatgttgcaacacaatgacaggtttaagtcagtcaagtttattggacccttgctttgataccattcttgggcacatactccaagattgtattagatttttgtgatgaagagcttccattacttctgaaaactatatttatctgagtgagtccaaggtgcaactcctaaatgaattgtgttgcagagaactcccagtataattcactgaccagtacattttataaccatccaggccttggtttgcaagcaacagaccttaaacatacaggaaactattaaaattggctcgatcagtagtcataggaattggtataagaagagactcatttagagctcagagttttcttcacataatgggggtattaattatttgtgctgttgcgaaattatgtgtcttattcttaaagccatggtaaaaatagggatctgtgaaggaaatttctaaaattggatgtattaggttttgaactctgagattgcacaaatattcaattaacttgaagttgtgtacatagagaagaaaatttggttttagcaaatgacagagccttcaaaaatatttttggaataatgtgaatcaaccgaaaactgggggcaaggcagaggacaggttttctcaggttaagagaaaaacgaaattttaaaaactttaaaaaatactgataaattcggatcaaatttgggggaataaaaaatattagagcaaaggagtttgctggttgtgtcattatttaatgatcaaagtatagcatgtatgccttattacagacttgttgactataggcttaatgtaaaaaggaatcttgccagatgtagctacttaaggaaaaaagggtttttaatagaaatgaacttttgattagtatggtaccagtcacagggctattttcctgaatattgggtgatgtcaaaggtatatgatacttgaggaaatcaggccaagtgtagctgagcaattaataaacactcaagtttttttagttggggtcatgtcaaaccctcacatggtggttaagtagtgactaactgtgcatgtccttcatggtaggtgagcaccagtctccatgatcaaaaatgccccagtttcctttgaaaaagccactagttctgtgaattgtccttttccctcctgcccctaacagtcctacccctctagcctacattagcatatttctcatgtaatgtattttgctggtaagctcatccattagctgcgtccttcagctattcctttagattggaggaagtggatatgaagatggattgattcagctcaccttccatgattgcttttgagggaaaagctacagtggccacatttcagatgttcacttttgcaatttgtggagggtggagagaggtagacttttgttgtgtgttttataaagtactctcagtaaggagtgtttgagttgaagagtcatctgattcgaggccactcatgttctttgtaacttaaactttgaccaagaaattcttcacttctcacttcttcacttcttcccaatatacagtaagtacgtgagccagtcatccatacactaaggcctagttgagaaaaacctttgattcaggatggctgggttactaaccttgaaatgtaagagatctggttttgaatgtaaaagttgcaacacacaaacggaagtcttaaaaactttttgctctggtcagttacaggtggatccccaataatctgtttttggttttctgatggaaataatagaattaggggaaatcaaatctggttggtaggtgtctacagtattagaagagggtataagggcactgtttaacactaagttctaatacttccagaaactgtgcattccagatctacatactaaatgctcttatcattttgaaatgggctcttgattaatagacccatattttttagtggcttctatgttgtatatttgtctaaaatgaaagctcttttgcgttctaaaactacaatatatgtcatcttattttccctgagtatccaagtatagtgcagattctatgtaaaactactaaatgacactggaatatgtttagtagattagggggaaaaactataaaggtttatacaattgtttgtagttacatttaggatggacttatccctttggagaagagtgaagtttgttttttcgccatgtgatgaagaccactgtgattttttaaaaaagtagataatacttaaaatggcgtaataattctgcacttgaatttgtactgttaacagcacatttggaagattttaaaactttttattgtcttataaatagcattcacttattattttggatatttaagggttccattaagttaacactgtatttggacaaagtgtgaccaaattagccagtctgttttcttccatgtttaattagaagtgagaggtagaagtacttcaaattcaacaggccagcaagcaatcggcttaaaattccctttcttaaatgttgtgctcttatgttctcggctttttaatgactttatttttacagtacttgttcagtcacttgagatgaaatgcttggggtagcttttccatcctcaaacttaatgtttttactagttcatagtgtttggaacagtatatgccaatcactgagactgcatcagagtttgcaattttgtatgtttcattgccaaagaaggcttagtggttgttgactgtagtataagtcagctttctgtagcataagatttgattttcccatacttacttcacttgttatacatcactgattatttgggttaaactggactcatttcaagcagtttgcttttgttcaaatcgtgatgagaaacctaatactgtaatttgatttgagccataaaacacattttaatattagcttgtattatagttattaagcttgtttttgtggaaaaaaacttactaaaacctaggtaactctagattaggccagttcaggtgtattttgtatcttagtaatggatcatatcgtaaaaatagagataagttgggaagatatattgattatgctgttctgttgagggagaaaagaccctggggtaacgcgctcgaattcctgatcctagtctagg

SEQ ID NO: 80896 - DNA, 4239 bp, Homo sapiens
acttcctgccgccagaggctccgggttcacttccggcgtgcctacgcctcctcttgcgctgtcctgttaatggcgggcagtagccgctgaggggattgcagataaccgcttcccgcacggggaaagtctaccctgcctgccactttctgctcgccgtcagcgccggagctcgccagcatgtctgtggtaccgcccaatcgctcgcagaccggctggccccggggggtcactcagttcggcaacaagtacatccagcagacgaagcccctcaccctggagcgcaccatcaacctgtaccctcttaccaattatacttttggtacaaaagagcccctctacgagaaggacagctctgttgcagccagatttcagcgcatgagggaagaatttgataaaattggaatgaggaggactgtagaaggggttctgattgtacatgagcaccggctaccccatgtgttactgctgcagctgggaacaactttcttcaaactacctggtggtgaacttaacccaggagaagatgaagttgaaggactaaaacgcttaatgacagagatactgggtcgtcaggatggagttttgcaagactgggtcattgacgattgcattggtaactggtggagaccaaattttgaacctcctcagtatccatatattcctgcacatattacaaagcctaaggaacataagaagttgtttctggttcagcttcaagaaaaagccttgtttgcagtccctaaaaattacaagctggtagctgcaccattgtttgaattgtatgacaatgcaccaggatatggacccatcatttctagtctccctcagctgttgagcaggttcaattttatttacaactgaattcctgcgcagtggagaagtaaaagaagccgcttgtctctgtgagcacagctatatacagtgtagaataaatgtggtagaaaagtttttttggttttatctcttttgcgatccctaaattgccacctttctattgtttgaatagtaaaattaatatgaagaactagatagtggtgtaaacaaatgtgataatgtttatttactttcggttctgctcatacttttttgtacaacattaaagaaaatggactttttttattttaatttctcattaaacttctaaaattcttataggtgaggatcatttttccccccaccttaggatggtgaatgttgcaacacaatgacaggtttaagtcagtcaagtttattggacccttgctttgataccattcttgggcacatactccaagattgtattagatttttgtgatgaagagcttccattacttctgaaaactatatttatctgagtgagtccaaggtgcaactcctaaatgaattgtgttgcagagaactcccagtataattcactgaccagtacattttataaccatccaggccttggtttgcaagcaacagaccttaaacatacaggaaactattaaaattggctcgatcagtagtcataggaattggtataagaagagactcatttagagctcagagttttcttcacataatgggggtattaattatttgtgctgttgcgaaattatgtgtcttattcttaaagccatggtaaaaatagggatctgtgaaggaaatttctaaaattggatgtattaggttttgaactctgagattgcacaaatattcaattaacttgaagttgtgtacatagagaagaaaatttggttttagcaaatgacagagccttcaaaaatatttttggaataatgtgaatcaaccgaaaactgggggcaaggcagaggacaggttttctcaggttaagagaaaaacgaaattttaaaaactttaaaaaatactgataaattcggatcaaatttgggggaataaaaaatattagagcaaaggagtttgctggttgtgtcattatttaatgatcaaagtatagcatgtatgccttattacagacttgttgactataggcttaatgtaaaaaggaatcttgccagatgtagctacttaaggaaaaaagggtttttaatagaaatgaacttttgattagtatggtaccagtcacagggctattttcctgaatattgggtgatgtcaaaggtatatgatacttgaggaaatcaggccaagtgtagctgagcaattaataaacactcaagtttttttagttggggtcatgtcaaaccctcacatggtggttaagtagtgactaactgtgcatgtccttcatggtaggtgagcaccagtctccatgatcaaaaatgccccagtttcctttgaaaaagccactagttctgtgaattgtccttttccctcctgcccctaacagtcctacccctctagcctacattagcatatttctcatgtaatgtattttgctggtaagctcatccattagctgcgtccttcagctattcctttagattggaggaagtggatatgaagatggattgattcagctcaccttccatgattgcttttgagggaaaagctacagtggccacatttcagatgttcacttttgcaatttgtggagggtggagagaggtagacttttgttgtgtgttttataaagtactctcagtaaggagtgtttgagttgaagagtcatctgattcgaggccactcatgttctttgtaacttaaactttgaccaagaaattcttcacttctcacttcttcacttcttcccaatatacagtaagtacgtgagccagtcatccatacactaaggcctagttgagaaaaacctttgattcaggatggctgggttactaaccttgaaatgtaagagatctggttttgaatgtaaaagttgcaacacacaaacggaagtcttaaaaactttttgctctggtcagttacaggtggatccccaataatctgtttttggttttctgatggaaataatagaattaggggaaatcaaatctggttggtaggtgtctacagtattagaagagggtataagggcactgtttaacactaagttctaatacttccagaaactgtgcattccagatctacatactaaatgctcttatcattttgaaatgggctcttgattaatagacccatattttttagtggcttctatgttgtatatttgtctaaaatgaaagctcttttgcgttctaaaactacaatatatgtcatcttattttccctgagtatccaagtatagtgcagattctatgtaaaactactaaatgacactggaatatgtttagtagattagggggaaaaactataaaggtttatacaattgtttgtagttacatttaggatggacttatccctttggagaagagtgaagtttgttttttcgccatgtgatgaagaccactgtgattttttaaaaaagtagataatacttaaaatggcgtaataattctgcacttgaatttgtactgttaacagcacatttggaagattttaaaactttttattgtcttataaatagcattcacttattattttggatatttaagggttccattaagttaacactgtatttggacaaagtgtgaccaaattagccagtctgttttcttccatgtttaattagaagtgagaggtagaagtacttcaaattcaacaggccagcaagcaatcggcttaaaattccctttcttaaatgttgtgctcttatgttctcggctttttaatgactttatttttacagtacttgttcagtcacttgagatgaaatgcttggggtagcttttccatcctcaaacttaatgtttttactagttcatagtgtttggaacagtatatgccaatcactgagactgcatcagagtttgcaattttgtatgtttcattgccaaagaaggcttagtggttgttgactgtagtataagtcagctttctgtagcataagatttgattttcccatacttacttcacttgttatacatcactgattatttgggttaaactggactcatttcaagcagtttgcttttgttcaaatcgtgatgagaaacctaatactgtaatttgatttgagccataaaacacattttaatattagcttgtattatagttattaagcttgtttttgtggaaaaaaacttactaaaacctaggtaactctagattaggccagttcaggtgtattttgtatcttagtaatggatcatatcgtaaaaatagagataagttgggaagatatattgattatgctgttctgttgagggaatggtccgcacagcgggatcctctaaagtc

SEQ ID NO: 80897 - DNA, 3849 bp, Homo sapiens
atgtcacactacgcattactctccctggcccgtccccacactcctctgtctacctcacattcctgcacatattacaaagcctaaggaacataagaagttgtttctggttcagcttcaagaaaaagccttgtttgcagtccctaaaaattacaagctggtagctgcaccattgtttgaattgtatgacaatgcaccaggatatggacccatcatttctagtctccctcagctgttgagcaggttcaattttatttacaactgaattcctgcgcagtggagaagtaaaagaagccgcttgtctctgtgagcacagctatatacagtgtagaataaatgtggtagaaaagtttttttggttttatctcttttgcgatccctaaattgccacctttctattgtttgaatagtaaaattaatatgaagaactagatagtggtgtaaacaaatgtgataatgtttatttactttcggttctgctcatacttttttgtacaacattaaagaaaatggactttttttattttaatttctcattaaacttctaaaattcttataggtgaggatcatttttccccccaccttaggatggtgaatgttgcaacacaatgacaggtttaagtcagtcaagtttattggacccttgctttgataccattcttgggcacatactccaagattgtattagatttttgtgatgaagagcttccattacttctgaaaactatatttatctgagtgagtccaaggtgcaactcctaaatgaattgtgttgcagagaactcccagtataattcactgaccagtacattttataaccatccaggccttggtttgcaagcaacagaccttaaacatacaggaaactattaaaattggctcgatcagtagtcataggaattggtataagaagagactcatttagagctcagagttttcttcacataatgggggtattaattatttgtgctgttgcgaaattatgtgtcttattcttaaagccatggtaaaaatagggatctgtgaaggaaatttctaaaattggatgtattaggttttgaactctgagattgcacaaatattcaattaacttgaagttgtgtacatagagaagaaaatttggttttagcaaatgacagagccttcaaaaatatttttggaataatgtgaatcaaccgaaaactgggggcaaggcagaggacaggttttctcaggttaagagaaaaacgaaattttaaaaactttaaaaaatactgataaattcggatcaaatttgggggaataaaaaatattagagcaaaggagtttgctggttgtgtcattatttaatgatcaaagtatagcatgtatgccttattacagacttgttgactataggcttaatgtaaaaaggaatcttgccagatgtagctacttaaggaaaaaagggtttttaatagaaatgaacttttgattagtatggtaccagtcacagggctattttcctgaatattgggtgatgtcaaaggtatatgatacttgaggaaatcaggccaagtgtagctgagcaattaataaacactcaagtttttttagttggggtcatgtcaaaccctcacatggtggttaagtagtgactaactgtgcatgtccttcatggtaggtgagcaccagtctccatgatcaaaaatgccccagtttcctttgaaaaagccactagttctgtgaattgtccttttccctcctgcccctaacagtcctacccctctagcctacattagcatatttctcatgtaatgtattttgctggtaagctcatccattagctgcgtccttcagctattcctttagattggaggaagtggatatgaagatggattgattcagctcaccttccatgattgcttttgagggaaaagctacagtggccacatttcagatgttcacttttgcaatttgtggagggtggagagaggtagacttttgttgtgtgttttataaagtactctcagtaaggagtgtttgagttgaagagtcatctgattcgaggccactcatgttctttgtaacttaaactttgaccaagaaattcttcacttctcacttcttcacttcttcccaatatacagtaagtacgtgagccagtcatccatacactaaggcctagttgagaaaaacctttgattcaggatggctgggttactaaccttgaaatgtaagagatctggttttgaatgtaaaagttgcaacacacaaacggaagtcttaaaaactttttgctctggtcagttacaggtggatccccaataatctgtttttggttttctgatggaaataatagaattaggggaaatcaaatctggttggtaggtgtctacagtattagaagagggtataagggcactgtttaacactaagttctaatacttccagaaactgtgcattccagatctacatactaaatgctcttatcattttgaaatgggctcttgattaatagacccatattttttagtggcttctatgttgtatatttgtctaaaatgaaagctcttttgcgttctaaaactacaatatatgtcatcttattttccctgagtatccaagtatagtgcagattctatgtaaaactactaaatgacactggaatatgtttagtagattagggggaaaaactataaaggtttatacaattgtttgtagttacatttaggatggacttatccctttggagaagagtgaagtttgttttttcgccatgtgatgaagaccactgtgattttttaaaaaagtagataatacttaaaatggcgtaataattctgcacttgaatttgtactgttaacagcacatttggaagattttaaaactttttattgtcttataaatagcattcacttattattttggatatttaagggttccattaagttaacactgtatttggacaaagtgtgaccaaattagccagtctgttttcttccatgtttaattagaagtgagaggtagaagtacttcaaattcaacaggccagcaagcaatcggcttaaaattccctttcttaaatgttgtgctcttatgttctcggctttttaatgactttatttttacagtacttgttcagtcacttgagatgaaatgcttggggtagcttttccatcctcaaacttaatgtttttactagttcatagtgtttggaacagtatatgccaatcactgagactgcatcagagtttgcaattttgtatgtttcattgccaaagaaggcttagtggttgttgactgtagtataagtcagctttctgtagcataagatttgattttcccatacttacttcacttgttatacatcactgattatttgggttaaactggactcatttcaagcagtttgcttttgttcaaatcgtgatgagaaacctaatactgtaatttgatttgagccataaaacacattttaatattagcttgtattatagttattaagcttgtttttgtggaaaaaaacttactaaaacctaggtaactctagattaggccagttcaggtgtattttgtatcttagtaatggatcatatcgtaaaaatagagataagttgggaagatatattgattatgctgttctgttgagggaaaggtcatgtatttagaaatttaaacttttggttattgtgttcacatcatagtattcaagcatcatttatagtttggttttgagaacttttctggtattacgtttatggcaaatgtataaaagaaacaagttttggttatatttttatatttgtaaagtaagtttggttaaagtgatcactgttctttttttattttattgtcatttcaataaaaaatatttgaaagaaaaaaaaaaaa

SEQ ID NO: 80898 - DNA, 2410 bp, Homo sapiens
acttcctgccgccagaggctccgggttcacttccggcgtgcctacgcctcctcttgcgctgtcctgttaatggcgggcagtagccgctgaggggattgcagataaccgcttcccgcacggggaaagtctaccctgcctgccactttctgctcgccgtcagcgccggagctcgccagcatgtctgtggtaccgcccaatcgctcgcagaccggctggccccggggggtcactcagttcggcaacaagtacatccagcagacgaagcccctcaccctggagcgcaccatcaacctgtaccctcttaccaattatacttttggtacaaaagagcccctctacgagaaggacagctctgttgcagccagatttcagcgcatgagggaagaatttgataaaattggaatgaggaggactgtagaaggggttctgattgtacatgagcaccggctaccccatgtgttactgctgcagctgggaacaactttcttcaaactacctggtggtgaacttaacccaggagaagatgaagttgaaggactaaaacgcttaatgacagagatactgggtcgtcaggatggagttttgcaagactgggtcattgacgattgcattggtaactggtggagaccaaattttgaacctcctcagtatccatatattcctgcacatattacaaagcctaaggaacataagaagttgtttctggttcagcttcaagaaaaagccttgtttgcagtccctaaaaattacaagctggtagctgcaccattgtttgaattgtatgacaatgcaccaggatatggacccatcatttctagtctccctcagctgttgagcaggttcaattttatttacaactgaattcctgcgcagtggagaagtaaaagaagccgcttgtctctgtgagcacagctatatacagtgtagaataaatgtggtagaaaagtttttttggttttatctcttttgcgatccctaaattgccacctttctattgtttgaatagtaaaattaatatgaagaactagatagtggtgtaaacaaatgtgataatgtttatttactttcggttctgctcatacttttttgtacaacattaaagaaaatggactttttttattttaatttctcattaaacttctaaaattcttataggtgaggatcatttttccccccaccttaggatggtgaatgttgcaacacaatgacaggtttaagtcagtcaagtttattggacccttgctttgataccattcttgggcacatactccaagattgtattagatttttgtgatgaagagcttccattacttctgaaaactatatttatctgagtgagtccaaggtgcaactcctaaatgaattgtgttgcagagaactcccagtataattcactgaccagtacattttataaccatccaggccttggtttgcaagcaacagaccttaaacatacaggaaactattaaaattggctcgatcagtagtcataggaattggtataagaagagactcatttagagctcagagttttcttcacataatgggggtattaattatttgtgctgttgcgaaattatgtgtcttattcttaaagccatggtaaaaatagggatctgtgaaggaaatttctaaaattggatgtattaggttttgaactctgagattgcacaaatattcaattaacttgaagttgtgtacatagagaagaaaatttggttttagcaaatgacagagccttcaaaaatatttttggaataatgtgaatcaaccgaaaactgggggcaaggcagaggacaggttttctcaggttaagagaaaaacgaaattttaaaaactttaaaaaatactgataaattcggatcaaatttgggggaataaaaaatattagagcaaaggagtttgctggttgtgtcattatttaatgatcaaagtatagcatgtatgccttattacagacttgttgactataggcttaatgtaaaaaggaatcttgccagatgtagctacttaaggaaaaaagggtttttaatagaaatgaacttttgattagtatggtaccagtcacagggctattttcctgaatattgggtgatgtcaaaggtatatgatacttgaggaaatcaggccaagtgtagctgagcaattaataaacactcaagtttttttagttggggtcatgtcaaaccctcacactctctccacactggggaggtgatagcattgctttcgtgtaaattatgtaatgcaaaatttttttaatcttcgccttaatacttttttatttggttttatttggaatgatgagccttcgtgcccccccttcccccttttttgtcccccacttgagatgtatgaaggctttggtctcctgggagtgggtggaggcagcagggctacctgtacatga

SEQ ID NO: 80899 - DNA, 1894 bp, Homo sapiens
acttcctgccgccagaggctccgggttcacttccggcgtgcctacgcctcctcttgcgctgtcctgttaatggcgggcagtagccgctgaggggattgcagataaccgcttcccgcacggggaaagtctaccctgcctgccactttctgctcgccgtcagcgccggagctcgccagcatgtctgtggtaccgcccaatcgctcgcagaccggctggccccggggggtcactcagttcggcaacaagtacatccagcagacgaagcccctcaccctggagcgcaccatcaacctgtaccctcttaccaattatacttttggtacaaaagagcccctctacgagaaggacagctctgttgcagccagatttcagcgcatgagggaagaatttgataaaattggaatgaggaggactgtagaaggggttctgattgtacatgagcaccggctaccccatgtgttactgctgcagctgggaacaactttcttcaaactacctggtggtgaacttaacccaggagaagatgaagttgaaggactaaaacgcttaatgacagagatactgggtcgtcaggatggagttttgcaagactgggtcattgacgattgcattggtaactggtggagaccaaattttgaacctcctcagtatccatatattcctgcacatattacaaagcctaaggaacataagaagttgtttctggttcagcttcaagaaaaagccttgtttgcagtccctaaaaattacaagctggtagctgcaccattgtttgaattgtatgacaatgcaccaggatatggacccatcatttctagtctccctcagctgttgagcaggttcaattttatttacaactgaattcctgcgcagtggagaagtaaaagaagccgcttgtctctgtgagcacagctatatacagtgtagaataaatgtggtagaaaagtttttttggttttatctcttttgcgatccctaaattgccacctttctattgtttgaatagtaaaattaatatgaagaactagatagtggtgtaaacaaatgtgataatgtttatttactttcggttctgctcatacttttttgtacaacattaaagaaaatggactttttttattttaatttctcattaaacttctaaaattcttataggtgaggatcatttttccccccaccttaggatggtgaatgttgcaacacaatgacaggtttaagtcagtcaagtttattggacccttgctttgataccattcttgggcacatactccaagattgtattagatttttgtgatgaagagcttccattacttctgaaaactatatttatctgagtgagtccaaggtgcaactcctaaatgaattgtgttgcagagaactcccagtataattcactgaccagtacattttataaccatccaggccttggtttgcaagcaacagaccttaaacatacaggaaactattaaaattggctcgatcagtagtcataggaattggtataagaagagactcatttagagctcagagttttcttcacataatgggggtattaattatttgtgctgttgcgaaattatgtgtcttattcttaaagccatggtaaaaatagggatctgtgaaggaaatttctaaaattggatgtattaggttttgaactctgagattgcacaaatattcaattaacttgaagttgtgtacatagagaagaaaatttggttttagcaaatgacagagccttcaaaaatatttttggaataatgtgaatcaaccgaaaactgggggcaaggcagaggacaggttttctcaggttaagagaaaaacgaaattttaaaaactttaaaaaatactgataaattcggatcaaatttgggggaataaaaaatattagagc

SEQ ID NO: 80900 - DNA, 782 bp, Homo sapiens
  misc_feature (12)..(12): n is a, c, g, or t
acccccttccancatctcatttctcttgttcagtcacttgagatgaaatgcttggggtagcttttccatcctcaaacttaatgtttttactagttcatagtgtttggaacagtatatgccaatcactgagactgcatcagagtttgcaattttgtatgtttcattgccaaagaaggcttagtggttgttgactgtagtataagtcagctttctgtagcataagatttgattttcccatacttacttcacttgttatacatcactgattatttgggttaaactggactcatttcaagcagtttgcttttgttcaaatcgtgatgagaaacctaatactgtaatttgatttgagccataaaacacattttaatattagcttgtattatagttattaagcttgtttttgtggaaaaaaacttactaaaacctaggtaactctagattaggccagttcaggtgtattttgtatcttagtaatggatcatatcgtaaaaatagagataagttgggaagatatattgattatgctgttctgttgagggaaaggtcatgtatttagaaatttaaacttttggttattgtgttcacatcatagtattcaagcatcatttatagtttggttttgagaacttttctggtattacgtttatggcaaatgtataaaagaaacaagttttggttatatttttatatttgtaaagtaagtttggttaaagtgatcactgttctttttttattttattgtcatttcaataaaaaatatttgaaagaaaaaaaaaaaa

SEQ ID NO: 80901 - DNA, 295 bp, Homo sapiens
gcggccgcctactactactactactgctcgaattcaagcttctaacgatgtacgggaaggtcatgtatttagaaatttaaacttttggttattgtgttcacatcatagtattcaagcatcatttatagtttggttttgagaacttttctggtattacgtttatggcaaatgtataaaagaaacaagttttggttatatttttatatttgtaaagtaagtttggttaaagtgatcactgttctttttttattttattgtcatttcaataaaaaatatttgaaagaaaaaaaaaaaa

SEQ ID NO: 80902 - DNA, 1893 bp, Homo sapiens
acttcctgccgccagaggctccgggttcacttccggcgtgcctacgcctcctcttgcgctgtcctgttaatggcgggcagtagccgctgaggggattgcagataaccgcttcccgcacggggaaagtctaccctgcctgccactttctgctcgccgtcagcgccggagctcgccagcatgtctgtggtaccgcccaatcgctcgcagaccggctggccccggggggtcactcagttcggcaacaagtacatccagcagacgaagcccctcaccctggagcgcaccatcaacctgtaccctcttaccaattatacttttggtacaaaagagcccctctacgagaaggacagctctgttgcagccagatttcagcgcatgagggaagaatttgataaaattggaatgaggaggactgtagaaggggttctgattgtacatgagcaccggctaccccatgtgttactgctgcagctgggaacaactttcttcaaactacctggtggtgaacttaacccaggagaagatgaagttgaaggactaaaacgcttaatgacagagatactgggtcgtcaggatggagttttgcaagactgggtcattgacgattgcattggtaactggtggagaccaaattttgaacctcctcagtatccatatattcctgcacatattacaaagcctaaggaacataagaagttgtttctggttcagcttcaagaaaaagccttgtttgcagtccctaaaaattacaagctggtagctgcaccattgtttgaattgtatgacaatgcaccaggatatggacccatcatttctagtctccctcagctgttgagcaggttcaattttatttacaactgaattcctgcgcagtggagaagtaaaagaagccgcttgtctctgtgagcacagctatatacagtgtagaataaatgtggtagaaaagtttttttggttttatctcttttgcgatccctaaattgccacctttctattgtttgaatagtaaaattaatatgaagaactagatagtggtgtaaacaaatgtgataatgtttatttactttcggttctgctcatacttttttgtacaacattaaagaaaatggactttttttattttaatttctcattaaacttctaaaattcttataggtgaggatcatttttccccccaccttaggatggtgaatgttgcaacacaatgacaggtttaagtcagtcaagtttattggacccttgctttgataccattcttgggcacatactccaagattgtattagatttttgtgatgaagagcttccattacttctgaaaactatatttatctgagtgagtccaaggtgcaactcctaaatgaattgtgttgcagagaactcccagtataattcactgaccagtacattttataaccatccaggccttggtttgcaagcaacagaccttaaacatacaggaaactattaaaattggctcgatcagtagtcataggaattggtataagaagagactcatttagagctcagagttttcttcacataatgggggtattaattatttgtgctgttgcgaaattatgtgtcttattcttaaagccatggtaaaaatagggatctgtgaaggaaatttctaaaattggatgtattaggttttgaactctgagattgcacaaatattcaattaacttgaagttgtgtacatagagaagaaaatttggttttagcaaatgacagagccttcaaaaatatttttggaataatgtgaatcaaccgaaaactgggggcaaggcagaggacaggttttctcaggttaagagaaaaacgaaattttaaaaactttaaaaaatactgataaattcggatcaaatttggcacttgcggttggaccggct

SEQ ID NO: 80903 - DNA, 154 bp, Homo sapiens
ggatctctgtcttaaatctgtcaggatggccctgtggccacttctgcaaaaacccctggggacaaaatttattgttattcctcaatagctttttgttcacttccaatataggggtcctgggtcatgctaacgattgtggagagacaaaatgctc

SEQ ID NO: 80904 - DNA, 496 bp, Homo sapiens
agtatacccccttttaaagaaaatacatgtcaagtctttcatcttctgagaacaaaaactgtgaacaactttctgaatgggaaaatcactgggcattttgaaatatagttaaagagtattggggtaacttataaatggtgggtcagtcaactgcgtgtgttgtttacacaattccagtgactagttgggaagttgtttcctctgaaaagggacttgctcagctggaattgcttgctaaaaggctaggtttgttaaatagatttgtactctgttttgggaagccaaaatgtccctgaaactatactgttctgagatgacacagtttgaaattaggtgaaagcatttactatggagttgctcttaattaaatttgaaagatgagtcattgatcttggagatgatgatttgtcataattctatcttggtggcagagttagtatgaggtactaagggcttttatttaagctgtgtgccatctcacttatttgtgtttttc

SEQ ID NO: 80905 - DNA, 408 bp, Homo sapiens
ctcgaccctcagcctcctgtgcagctgggattacaggcatgcaccaccacactttgctaatttttgtatttttagtagagatggggtttcaccatcttggccaggatggtcttgaactcctgacctcgtgatccacctgcctcggcctccctaagtgctgggattacaggcatgagtcactgcacccagcccactacttggctttccgttttctttttttcttttttttttgagtgttgtcagaactaccaataggtaaaatataattctcaggtagtctatacaattctccctgccagtcccctgtacttttcctggtatttacaatgttaaagcttttaaggacacgtcacctataactctgggagtctggctttcagggagtgctttgtattaactgtgtcgacg

SEQ ID NO: 80906 - DNA, 331 bp, Homo sapiens
gaaacatttcaagaaagcatactaaatgacagaaattctacttaatattttataacatgttcaactaatgataaataattttgtgaactctggaaacagaaaaggaacaatgtcatggaagagaaaaatttctgcaataggaaaactcttcattagtgaaaatgataccaataaaagaacaaaaattagcggggggtggtgatgcatgcctgtaatcccagctactggggaggctaagacaggagaatcactcgaaccggggaggtgaaggtggcagtgagccaagatcatgccactgcactccagccggggtgacagtgcaagactcctc

SEQ ID NO: 80907 - DNA, 397 bp, Homo sapiens
accctgttgtattgcccctcttccctgctgtttctcccttcccagggcacagattctagaatctcttcatcttccccaactgtagccttggaagcagtgtcttgcagaggtggaattagatgcaccaaaaagttaatcttggtccctacagtgccaacctggcagtccccagtgcttatggctttgtgtatatccccagtgcccggcacagtgcctggcacataatagatgctcaataaatggttgctgaattgaagcaaattaagctgaatctcccagatgatattgctgtctccccaaattggcaatctgatgggcagaggcagggattggtccctgagactgtcacggtcctgtctccaccccctttcctagacttattccctaccctgggcac

SEQ ID NO: 80908 - DNA, 271 bp, Homo sapiens
agtctaggggcaaaattttgatgaagatcagaatattttcaaagtctactcaccaattatgtactacttgcaagggaaaaacatagtaaatgtaccacagcaaaaaatgacaatacgtgaattgagtgatcaaaattaatatcaacaatgaggggcaggtagacatcatgtacttaggaatgcaagaccccaaaagactcactgtcacctatatagcattccagatttggaatttataatctaaagaaacattagaccaatcctaaacaag

SEQ ID NO: 80909 - DNA, 562 bp, Homo sapiens
ggaggctgaggtgggaggattacttgagcctaggaatctgaggctgcagtgagccacagagaccccatctctaaaacaaacaacaaaactacacacacagaggcaaacagaagaaagcatgtaagaaagcacagatagtatgtgcagagattacatgtagtctagttttactgcaggacctagagagattgagagagaggtagatgatgccaagaaagatggaactgagaacctattccaattgtccagaagataacagcctgaagtaaaatccttccttctaaattgcatgtgccatttagaattatctaaaggaagagagagaaaaaaagcaaagcctgccttgtcttccaggctgaaggagcccagggaattctaccacaaaatatggctccctggtataagtattttgaattaaagccccatcagagatcaacagatgctagaagagactttttccctatctacaaaaagaccagacagattccccaaggggaacaattgttttcccttctcctcctcagggagaagggaaaacaattttattatttgctgcagaaaa

SEQ ID NO: 80910 - DNA, 395 bp, Homo sapiens
aggccaagaatgaagaaagacaggaaaccagaagaataatcaaatgctaaagttgcagctgccctgaagttgttctctaaaatagaaacatgaaaccacttggggatcaggaaacaaggccttcggcctgaagaaggtagggaataggaattgagattctccacacagagtggggaccctcaaagcacattagtgggcttcagtaatgtaattcagccccagtaatggactcagaaataactgcttccaacaaagaaagaccacaagaacaattgttggtgccagccttcactatggatggggatgtaaaagtctgatatgagaatttctacgtattcaggcttaaatttacacagtttgcatgctcttggaaaccaacagcaagaacttggagt

SEQ ID NO: 80911 - DNA, 434 bp, Homo sapiens
tagcagcagcaggaatagagataagggaatggatttttaaaatcttgagaagttagagatgaagcctggtgactaactggatatgggagatgatggagcaagagtgggagatgagcaggtttctactggatgggacagaaagcaaaaaggacaggactcagcaagaacaagtcatggcaagtgtcagaaagaccatgtagacagcatttaacttggcagatagcccactgggacctctcatttgggccaacagaaaggtgacaggaaagcggagaaatttctgtggtgatgtatgggtatctctgcagatgtcagcagaggcaggctcctctgggagaagaggaggaatctggggaattaacgcgtattctccacaaaaggagaattagtggaggctgggcaaccagagtcagcccaattaacctcactgtcct

SEQ ID NO: 80912 - DNA, 1534 bp, Homo sapiens
  misc_feature (247)..(247): n is a, c, g, or t
  misc_feature (1028)..(1029): n is a, c, g, or t
ccacgagctgcccacgtcctctccaggaggggacaccgggttcacgagctgcccacgccctctccaggaggggacaccgggttcacgagctgcccacgtcctctccaggaggggacaccgggttcatgagctgcccacgccctttccaggaagggaccccgggttcacgagctgcccacgtcctctccaggaagggaccccgggttcacgagctgcccacgtcctctccaggaagggaccccgggtncacgagctgcccacgtcctctccaggaagggacccgggtcacgaactgcccacgtcctctccaggaagggaccccgggttcacgagctgcccacgtcctctccaggaggggacaccgggttcacgagctgcccacgccctctccaggaagggaccccgggttcatgagctgcccacgtcctctccaggaagggacccgggtcacgaactgcccacgccctctccaggaggggacccgggtcacgagctgcccacgtcgtctccaggaagggacccgggtcacgagctgcccacgtcctctccaggaagggacccgggtcacgaactgcccacgcgctctccaggaggggacaccgggttcacgagctgcccacgccctctccaggaagggaccccgggttcacgagctgcccacgtcctctccaggaggggacaccgggttcacgagctgcccacgtcctctccaggaggggacaccgggttcacgagctgcccacgccctctccaggaggggacaccgggttcacgagctgcccacgtcctctccaggaagggacccgggtcacgagctgcccacgtcctctccaggaggggacaccgggttcacgagctgcccacgcactttccaggaagggaccccgggttcaggtctcctgccggcccacatcgtgcctttgtgtaaatcagaagaaagatgaggaacaggccctcctctctctccaggcaggctttggtggaggggctggatctcctgccgcaccttccctggcaggcaccctgtnnttgagccccagaactgcaggcggccggcagagaaggggtccatgatggcgcctcggtgcggccttggacctgcccccatggacctggagacagggtttctcctcattggccaggctggtctcgaactcctgacctcagacgatccacctgcctcagcctcccgaagtgttgggattacaggcacgagccactgtgcccggccatcattcctttttactgctgactaatagtctgctgtgtgaatccaccgctagaaacccactcatcagttgatggtcatgtgggttgcttctgctattcgcttattatgaacagtgctggaataaacgttcctgtgcactcttgggcatacgcctaggagtggaactgctgggtcaaatggtgactttacgtttaacgttctgaggagccgccaggcgttttaacacagtgactgcaccatttcacattcctgccaacaatgtgtgagaattccaatttctctacatccccaacattttccttt

SEQ ID NO: 80913 - DNA, 442 bp, Homo sapiens
tttttttttttgtatttttaatagagacagggtttctcctcattggccaggctggtctcgaactcctgacctcagacgatccacctgcctcagcctcccgaagtgttgggattacaggcacgagccactgtgcccggccatcattcctttttactgctgactaatagtctgctgtgtgaatccaccgctagaaacccactcatcagttgatggtcatgtgggttgcttctgctattcgcttattatgaacagtgctggaataaacgttcctgtgcactcttgggcatacgcctaggagtggaactgctgggtcaaatggtgactttacgtttaacgttctgaggagccgccaggcgttttaacacagtgactgcaccatttcacattcctgccaacaatgtgtgagaattccaatttctctacatccccaacattttccttt

SEQ ID NO: 80914 - DNA, 374 bp, Homo sapiens
cacttactttcactctattgcaaggtgcacagttctagataattccgtgggaaggcactcagacagcctccatatgttttgtttgttggtgcctgacggatgactggcggagagggccatggactctgcggggaggccgcttgcctgttgtctctgctttccaggtggagatctgcattccaggctcttgctgtatgactttgggccagtttgttaacctctctgagcctcagcttctgaatctgtatgtaaactggagatgataattatagcttcttcataaagttgtgaggaatgaaaatactgtataaaagcactgacacctaagtgttaaatattcttataagtcataagttgtaatattctcttttcat

SEQ ID NO: 80915 - DNA, 520 bp, Homo sapiens
tgcggagatggggtctcactgtgttgcctaggctggtctcaaactcctaggctcagctgatcctcccaaagtgctgggattacaggtgtgtgccatatagtcttagccatccttccatttcagctgatgtaaatctacttcattctttttaacagatgcagagttttccatatgtggaggtactgtagtttattcttaagacccaactgatgaacattaaaggtgtcttcagttgattatgaaaaggttttttaatgaacattgttgtattttaaccatatattatatatttgatccttgtgcacttgtacaagcatttcttcatgatggattcctagagaagggcctgctgaggcagtgagtttatacatattaaactatggtatgttgcatattatttctttcagcagtgtgcctcagtttacacacccgtaagcagtagagataaggatgtcatttttctgtcaccacttgatagtgtcagtattttaaaacaaatgcaagtgttagaaattacaaa

SEQ ID NO: 80916 - DNA, 696 bp, Homo sapiens
tctgttttctataccttacttccattttcagtgactcacttctgttttttataccttatttccatcttctgtatcttacttttcactacctcacttctgtttttcctatctcacttccatttcctgtgacttatttctgttttctctacctcacttcctgttattagacctcacttctgtttttttacctcattttcatcttctgtacatcacttgtttttcatgactctcttcggtttcctgtgacttctgttttctgtacctcacttctgtttccctaacatcattagcatcttctgtacctcacttctatttttcataactgacttccgttttctgtgacttacttccgttttctctacctcacttccgtttgctgtacctcacttctgttttctgtaacttccgttttcactacctcaattccgttttttataccttatttttgtcttctgtatcttattttttcactacctcacttccggttttcatgactcacttccgtttgtttacttcacttccgttttccgtacctctcttctgttttcctaacatcatttgcatcttctgtacctcacttctgtttttcataactcacttccgttttctgtgacttacttccgttttttctacctcacttccgtttttctacctcacttctgttttatgtaccttacttccgttttcactacttta

SEQ ID NO: 80917 - DNA, 437 bp, Homo sapiens
  misc_feature (332)..(332): n is a, c, g, or t
  misc_feature (368)..(368): n is a, c, g, or t
  misc_feature (392)..(392): n is a, c, g, or t
  misc_feature (428)..(428): n is a, c, g, or t
acaaattagtggtgctgtaaccagttaataattcagcttaatccttctgtcatgaaggtttcatattgttttaatcttagtcatgtattttattaactcttactcattgtttcaatacttcattcaatagatcaacggttagagacaagaagcattaagaaaattaagtcgataatgaaatactagatgatgagcataaaaatgtaaatgattctaaatatttggttcacgatttttgttacttttttctttttttttgagacagagttttactctgtcgccaggttggagtgcagtggcgatagagggagtactctgtctttaaaaaaganaaaagtgaacaaagtgaacacctgtgaccaaatttngaacacaaggtttatggacccttnacacttaggactgggtattggctaattcgggaggcntgaggttgg

SEQ ID NO: 80918 - DNA, 606 bp, Homo sapiens
ctgctccacgcaatttctcagtgatcctctgcatctctgcctacaagggcctccctgacacccaagttcatattgctcagaaacagtgaacttgagtttttcgttttatcttgatctctctctgacaaagaaatccagatgatgcgagacctgatgaagacaatacatggaaaatgacagtcttggaaataactttggctgtcatcctgactctactgggacttgccatcctggctattttgttaacaagatgggcacgacgtaagcaaagtgaaatgcatatctccagatacagttcagaacaaagtgctagacttctggactatgaggatggtagaggatcccgacatgcatattcaacacaaagtgacacttcatgtgataaccgagagagatccaaaagagattacacaccatcaaccaactctctagtgtctatggcatctaagttctccctgggacaaacagaactcattcttcttttgatgtgttttattttagcactgtctcgatcaagtattggtagtataaaatgtttacaaacaactgaagaacttccttccagaactgcaggagccatgatgcaattcacagcccctattcccg

SEQ ID NO: 80919 - DNA, 614 bp, Homo sapiens
tgtggagacgggggtctcactggtgtggcccaggccgggagcgcaggggctggtttataggctctgtcacagtcactggcacgctccagctccggggcagtcctccggcctcagcttcctgcgtaggtgggactccgggcccatgccactgcacccagcttatgatgctggttttggaaatgggggtggctattcccagggttgagtgtctgtgggggagttggggcatggtagtgggagttataaattcaactgaggtctttattttcattaagtggatcctcattcctaagcaaataactgacgtgctcttgttggatagaagatggtatgggaagacagggtgaggattggtttgcattttgagttgagtatttttttattattattaagtcaggtttattgagatataatttgtttactcttcatcatgataaattttccccaattccagaagaaattaaatggagttacattcacagtacaaaattgagatattatactaaagtaagaagctaaaggaagacctctttagttgtaccagtctgtaaattgtggcaaacacaagtcttgtgaattaccaccacactcaagacagagaaccatttcctcac

SEQ ID NO: 80920 - DNA, 687 bp, Homo sapiens
tgcaagatcaagttgggataaagtaatgcttgtggctttaaggatgaaagcttgcgtgccagtgtagaaaccatattcccagactatagtgaggaatactgagcctgctagggtaagctttcttttatttagtgggccctagaaatgtccagcttctagaaaggtagctatttaaggaatgatatttcaacaggaaagtctttaaatgcatacatcaatacagaattctgggatcatgccagtcagtagatataaatccagccatactggttggaagtggcaaatggtatatgcatgagctgaaatatttctgtttcttcttggacattttaggttctcaactataaagacattttataactatttaaaacattaggatttcagccatactaatattttattttacaaaactagttttattttacaaaactagtagtgatttccagataacagtctgaattttttactgaagaattcagtgtctgagtattgtggaagctaccaaaataataataataataataattaaaggccaggtatggaggctcatgcctgtaatcccagcactttgggaggctgaggcaggaggatcccttgaaatcagttcaagactagcctgagcaacaaagcagaacccatctctacaaaaacaagcaataaactatatctacttatatgtataaacta

SEQ ID NO: 80921 - DNA, 363 bp, Homo sapiens
atcatggtcttgattgctattatcggtttccatacgcagttagaaacgtcatttcttccagcttttgaattaaagaaaagctgtttttgaagttgagatctgatgtaaattattttagtatttttttctaagacacttctaagcccctgaattgctaattatatcctcatcttccatttacaaaattccttctaaacttcagataagagaactcaaatcttctcttttctaaaaaaaaaaactatcaatgtaaaaatagtatagaaattatggaaaataattcagtgaaactttttgtaaatgttaaaatagtatctatgaaatctatgtattaattatgggatgtgccttaccattgtaatt

SEQ ID NO: 80922 - DNA, 231 bp, Homo sapiens
cctgtaatcccagcactttgggaggccgaggtgggtggatcacctgagcctcccaaattgtgggattacaggcatgagccactgtgctcagcttattatttctttactgctgaagaataatttcaaacatttgcaaagcaaaagcacagagcaagtcttgcccgtcaataaagtttaaccttacagagaaatgaaaggggaactttttgcatgttatacattaaaatggga

SEQ ID NO: 80923 - DNA, 298 bp, Homo sapiens
gtgctttacacaatttttatcatttaatcctcattataaattctaccaataaaatactgccgttaatttcattttgcagatgggaaaactgtggtacagaaaagaaataaaactcacgtaaagtttcccatgatgcctctatttccttcgtacctaggatcctttctcatctgtggcacattctacaccagagttagtggaaaaatccatctgtataactcaaataactcaacagttaacactcaagtgatttctgctatggccttgactgatagttgtacaggatggtatagaaagt

SEQ ID NO: 80924 - DNA, 397 bp, Homo sapiens
ttactgtccccaaagcagccagcataacctcttcatttagagcatggcactcccctgctcaagatctccccaagagcttcccatcaaactggagtaaaaccttaacttcttcctacagcctacaagccaaaaggccctgtgagctatggtactgcctgaagggcctcatctccactctttccctcattcttcactctgactatgctggtcaccttgctgtttgttcctcaaacacacatgaaatgcatttctgtctgtcttggcagtcatcctgctgcctgtaatgtcagcactctttcccgtcgcgccttcagtcaggtcactgttctaatgtcagctctctagagaggctcttccttatctgtctacctaaaatagcccccaatcactctgtatc

SEQ ID NO: 80925 - DNA, 4995 bp, Homo sapiens
  misc_feature (1)..(1): n is a, c, g, or t
  misc_feature (585)..(585): n is a, c, g, or t
  misc_feature (713)..(713): n is a, c, g, or t
  misc_feature (851)..(851): n is a, c, g, or t
  misc_feature (993)..(993): n is a, c, g, or t
  misc_feature (2066)..(2066): n is a, c, g, or t
  misc_feature (2174)..(2174): n is a, c, g, or t
  misc_feature (3290)..(3290): n is a, c, g, or t
  misc_feature (3513)..(3513): n is a, c, g, or t
  misc_feature (3644)..(3644): n is a, c, g, or t
  misc_feature (3652)..(3652): n is a, c, g, or t
ngtctgtaatgacaattttacatgtctaaatcaggaacaagcctaagtcatacttaagtcattgtacctaggaaagtacaatgtcagcttctaaaataaatcaagatttttctaggctgtaactttgttgacaacaggaatcacatctgttttatatatcactgtattaccatagtcacttatttggtgactgagtcataaaagattcaaagatggcaattataactttaaagcaaacttttaaactattttgtcatttttaaaggcaatttgaaatcagatcttgtaacagtgctgcaattgggcccataatttgggcaatagatgtaaaataaaagtatgaggaatgatgcttaatctctgtaattatttttaagaacctactaagagatgaattttagtcattttagcataactggtgagacctcttgctagataataatttgctggcctttattttacataattaagattctgcatgtaatcttacagcattaagatataatctaaaacttttattttagacagaatgaaaacaggcctagatgcaccaaaagagcctcaaaacaatataacttggatgantcattatgcgacgtgggagtgattatggcttagaaaggtttataccttttttttttttttgacacagagttttactcttgttgcccaggctggagcaagactcgatctcaaaaaaaaaaaaaaaaagntttctgttattcttttttcaaaatcttggaatatggaaaggctttctaaataagacacaaaacccagaagccataagaggaaattctgagaagtctgaatatgtaaaagtaaaaaatttataaggcagaaaaattttnttgactaactaaaaggtagtaacaaagtagaaagaataggcattttacagaaataggcaagttcataaggtgagaaatacaaatggctggaaaaagaacacatgaaaagatgttcaacctcaatcgtatttaaatatgcaanttaagctcccaagaaaaagatgaaaatttaaataacctaaagcaacaatatatttttacctattaaactgactagataatacttttttcaaccacctacaaaatatgatgagtggggaaaggaaggaggaaagaatattcttataaatgttaccaaaaatgttacccatttgtaagtatgggagcataaactggtaaaatctctttagagagagcctcaaaattgaaattggcaacatttattggcagtcattagtgtccttccccacattcttctggctctctgtctcccaggtatgtggtagaactgtgcctccctgttcctgctgaattaggtgtggctgtgtgctttgttttagctacagagtaacatgcgttgaggcagaggcttaaggagccactgctcacccactatgtttccttggtcatggaagcacagagatggagcttcccttaacctgggtcccttggtgagggtgatggagaacagaggccaccagctaatctatatgggacaggaaatgtgagctagaaataaatcttagttgtttttaagacatggtttgttactgcaacataaccaagcctaaatgatacatctatcaaaattaaaaacacatatatccttggacacagcagtttcactcctagtaatctcacagtctgccaagatacttggacatgggtacaattatgtgtacacaaggatttttattgcagcactgttcataaaaacaagattagcaactacttaaggtctatcaagaatggactggttagatattatggtacacaatactatgcagccatttcttaaaaagcagatcctgctgacatggaattctctcaaagagataaagacaaaaaaaagagacataatcctagaagaatacaaaatgaactgtttgagaaactagttatctctagtgaggggaatttttcattatataccctttagttctgttttcagttttttaaaaaagcaagtatgtaggaaaatattttaatgcaattcctatcagaattccagttgacttctatgtagaaattgacaaactgattctaaaatttacntagaatttcaagagactctaaatagccaagcctatcttgaaaaagaaccaagcaggagaactcacatgtcccaatttaataataaaataattacagtaattaagaccntatggtattggcataaagaacatatagaacaatggaaaagaattgagagtccagaaatgaacccacgcatttatggtcaactggttttttacaggggtgccaaaatcactcaatgaggagaaaaagtcttttcaacaaatggtgctgggatacttggatagccacatgcaaaagaatgaagttggattcttacttcatgccatgatatagaaattgcatcagaatggatgaaagatcaaagactagaatataagaactaatattatataactcttaggaggaaaaaataggggtaaatctttatgacctcacctcagagttagaaactgtttcttaggacaccaaacgcaagagcaataaaagaaaaaatacatagagtttggacttcagccaaataaaaaacttgtgcttaaaggacaccatcaagaaagtgaaagacaatacacagaatgggagaaaattgcaaatcatggaagggacttatttctagaatatacagagaactcatacaacttaacaataaagatgaataacctaatttaaaagtaggcaaaggatatgaataggcatttctccaaagaaaatatgcaaatggccagtaagcacatgaaatgatgcttgacatcattagccaatagggaaatgcaaatcaaaatcacaattaaatactttgcagccactaggatggcaagtaacacaaagtcagataaaagcgttgttgaaaatggggagaaatgaaaaccctcacacacagctggtgagaatacaaatcactttggaaaacagtatggcaacaattccactgctgaaaaggtggaaaaaaacaaaatgtctattaactgatgaatgaataaatgaaatgcagtgtatttatataatggcatatttggccataaaaaggaaagaacatgttgctgctataccatagatgagtcatgaaagatcagattccattttatatcacgtgtccagaatatgtaaatttatcgagaaagaaagtagattagtggttgcctagtgctgagtgagggtgggggtaatgggatagggaggtgatagcttacaggatatgaggtttcctgtagaggagatgaaagtgttctactggctgggtgntggctgcacatatcagtgaataaactaaaaactgatgtatactataagtcaactgcatgtatattaactatatctcaataaagctgttaaaataatgactaaacattaaaaaattttaaagaataatagatttacgtaacttaatatatttaagaaagtgtactgttctcatttagtgaatgtcagacatattgtagagtatgtgcatattatataatcccgngtgttcacagacccatgtgtatagtgtgttcctgctttaagaacagtgtgtgtatacacatatatacacacacgtatgtgtatgtgaatataaagggaatgaatataatgggaaggggaatataatggganggggattnagtgaatctaatgggaaggggataagtaactgctaatagagaatacctctcacagttaaataagggaaaagctggaggaagtgacaagtcaaaggttgaaaagaaacacatttttattgcatttgttttttaaaatttcttttactgagtgtgttattttcataatactttttaaaggtattaatttaatgtaagaaataaccagctagtaggtagagctctccaaaaccagaatatgctaccttaggaggcagtttgtgtctcataagaatttaaagtacagaaaggatttacacttgataggctggatgggtacgtggactggataacctttggagtagaattcttcatgccctttaaagtctcttccaattctgacatttaccccaaattaaaaaggtatttagtcttaagactgggaggaacctacaagtagtagggctaatttgaaaaaaatattctgtaagtggtccaatgtcaactaatcttaattgctgagtttattattgttattttagagacaaagtcttgctacattgccctggctggtcttgaactcctgcactcaagcagtcttcctgcctcagactcccgagtagctcgaactacaggcatgtgctactgcagtaggcttttatttaataaagtgatttcaatgtcaacaaagaataacaaaaaggtatttccaatgaaaagatacataaagttaaacaaagtacaagttttagaatctgaactaaataaaattatatttccttttgaagagtatcttgctcattgaatttgtgccacaataaacattttttattaaatctcattaaaaagaaacgtgttgtgatttggatagatgtactagtgaaaaatggtaaggagtgggaaacacaaagtccaagaagctaattttcaactcataatttttcttacttgtatttctattttaggttcaaagtcaaggctactgcttaacactatggtaggactttaaacataactgaggaaaaaccatattaaagtatcattaaaaatatttatcattttatatatgtaattttttttctttaaataataaaaagtttaccagctaagtcaataccacagatggagttgtgtggaaattgtatttggcagcaatgttagttttttttaagagtttctggcttctgtaacaaaataagaaagtaggcctttttctctccaccatgaaaatttgttggaatgctttgtcctccatacctataaaagttgccagtgttacaacaggcataccacccaactctagcttccaaaaaatgttgaaactatcattcagcatattctgagacattctagtgtcttacgggata

SEQ ID NO: 80926 - DNA, 223 bp, Homo sapiens
tagagacagggtttcaacatgttggccagcccagtctccaactcctgaccttaagtgagcccatacacaatcaagaagagagcgagacctgttctttttttctgtctttgactatttgagacagtcttgctctgtcacccgagatggagtacattagtgtgatcttggctcactgcaacctctgcctcctggactcaagcaattctcttttttttttttttgg

SEQ ID NO: 80927 - DNA, 871 bp, Homo sapiens
ggattacaggcgtgagccaccgtgctcggccagtagtaaacttttaatgtcatttcccacttctctggctgcccctctcttcttcttctgatagaactgttcactgagatcctctggtcttccttccgtcctcatactcgccatggcttcagcattaaagtcataggctttggcgtcaaacccgactgggttctagttctcctacctacattttggtgactcttaaccccaaattgctaatttctgaaagtgtttttgagctgtagtttcacatttgtaactgcttccttggcaggcatgttcatatccctgactagttagttcctcagatccagctttctaaaatcactcagcatctttaccctcctctttctggattttcaaagtctgctaatgtagcctccgtttttctcagaactagggagtcattgacatctttccctcctttgcccttcctaattcatttagtggccagcacttttcaatgttatcctcaaaagagcttgagaagctactccttggtctctaccccaactgccactatccccctgaattattcttggagtcttcttgtgtaacaaacccgtttttcagattctcatctcatctattacacaccatccccttagcttttgtagagcttttattttgaagtaattttagactttcaaagatactgcaaaaatagtgcagagacccaacacaaagaaatgatacacgtttgaggtgatgggtatgctaattaccctaatttgatcattacacattgcatacatgtatcaaaatatcacactgtaccccataaatatgtacaattattgtgtcaatttaaaataataaaagtaaataaaataattctcttgtaggcaaa

SEQ ID NO: 80928 - DNA, 4242 bp, Homo sapiens
  misc_feature (212)..(212): n is a, c, g, or t
gggccgagccgcaggcgctgcccgagccgcgggcgctggagcggctgtcggcgcggtggcaggcgggagccaggagtccggggctcgggcgggcggagcgcagcgcggggacgcggcggagcgggccccgcggctcggcgggggccggcagacaggtgtgccggcggcgggcggctcgcacgcaggcggctccaggcctccaccggcggtcnggaggggaggcgggaggcgagcgaggacccgcgcccgcagtccagtctgtgcgcgcccgtgctcgcttggcgcggtgcgggaccagcgccggccacccgaagcctagtgcgtcgccgggtgggtgggcccgcccggcgccatgggctcaggatgccggtgcggaggggccacgtcgcgccgcagaacaccttcctggacaccatcatccgcaagtttgagggccagagccgtaagttcatcatcgccaacgctcgggtggagaactgcgccgtcatctactgcaacgacggcttctgcgagctgtgcggctactcgcgggccgaggtgatgcagcgaccctgcacctgcgacttcctgcacgggccgcgcacgcagcgccgcgctgccgcgcagatcgcgcaggcactgctgggcgccgaggagcgcaaagtggaaatcgccttctaccggaaagatgggagctgcttcctatgtctggtggatgtggtgcccgtgaagaacgaggatggggctgtcatcatgttcatcctcaatttcgaggtggtgatggagaaggacatggtggggtccccggctcatgacaccaaccaccggggcccccccaccagctggctggccccaggccgcgccaagaccttccgcctgaagctgcccgcgctgctggcgctgacggcccgggagtcgtcggtgcggtcgggcggcgcgggcggcgcgggcgccccgggggccgtggtggtggacgtggacctgacgcccgcggcacccagcagcgagtcgctggccctggacgaagtgacagccatggacaaccacgtggcagggctcgggcccgcggaggagcggcgtgcgctggtgggtcccggctctccgccccgcagcgcgcccggccagctcccatcgccccgggcgcacagcctcaaccccgacgcctcgggctccagctgcagcctggcccggacgcgctcccgagaaagctgcgccagcgtgcgccgcgcctcgtcggccgacgacatcgaggccatgcgcgccggggtgctgcccccgccaccgcgccacgccagcaccggggccatgcacccactgcgcagcggcttgctcaactccacctcggactccgacctcgtgcgctaccgcaccattagcaagattccccaaatcaccctcaactttgtggacctcaagggcgaccccttcttggcttcgcccaccagtgaccgtgagatcatagcacctaagataaaggagcgaacccacaatgtcactgagaaggtcacccaggtcctgtccctgggcgccgacgtgctgcctgagtacaagctgcaggcaccgcgcatccaccgctggaccatcctgcattacagccccttcaaggccgtgtgggactggctcatcctgctgctggtcatctacacggctgtcttcacaccctactcggctgccttcctgctgaaggagacggaagaaggcccgcctgctaccgagtgtggctacgcctgccagccgctggctgtggtggacctcatcgtggacatcatgttcattgtggacatcctcatcaacttccgcaccacctacgtcaatgccaacgaggaggtggtcagccaccccggccgcatcgccgtccactacttcaagggctggttcctcatcgacatggtggccgccatccccttcgacctgctcatcttcggctctggctctgaggagctgatcgggctgctgaagactgcgcggctgctgcggctggtgcgcgtggcgcggaagctggatcgctactcagagtacggcgcggccgtgctgttcttgctcatgtgcacctttgcgctcatcgcgcactggctagcctgcatctggtacgccatcggcaacatggagcagccacacatggactcacgcatcggctggctgcacaacctgggcgaccagataggcaaaccctacaacagcagcggcctgggcggcccctccatcaaggacaagtatgtgacggcgctctacttcaccttcagcagcctcaccagtgtgggcttcggcaacgtctctcccaacaccaactcagagaagatcttctccatctgcgtcatgctcattggctccctcatgtacgctagcatcttcggcaacgtgtcggccatcatccagcggctgtactcgggcacagcccgctaccacacacagatgctgcgggtgcgggagttcatccgcttccaccagatccccaatcccctgcgccagcgcctcgaggagtacttccagcacgcctggtcctacaccaacggcatcgacatgaacgcggtgctgaagggcttccctgagtgcctgcaggctgacatctgcctgcacctgaaccgctcactgctgcagcactgcaaacccttccgaggggccaccaagggctgccttcgggccctggccatgaagttcaagaccacacatgcaccgccaggggacacactggtgcatgctggggacctgctcaccgccctgtacttcatctcccggggctccatcgagatcctgcggggcgacgtcgtcgtggccatcctggggaagaatgacatctttggggagcctctgaacctgtatgcaaggcctggcaagtcgaacggggatgtgcgggccctcacctactgtgacctacacaagatccatcgggacgacctgctggaggtgctggacatgtaccctgagttctccgaccacttctggtccagcctggagatcaccttcaacctgcgagataccaacatgatcccgggctcccccggcagtacggagttagagggtggcttcagtcggcaacgcaagcgcaagttgtccttccgcaggcgcacggacaaggacacggagcagccaggggaggtgtcggccttggggccgggccgggcgggggcagggccgagtagccggggccggccgggggggccgtggggggagagcccgtccagtggcccctccagccctgagagcagtgaggatgagggcccaggccgcagctccagccccctccgcctggtgcccttctccagccccaggccccccggagagccgccgggtggggagcccctgatggaggactgcgagaagagcagcgacacttgcaaccccctgtcaggcgccttctcaggagtgtccaacattttcagcttctggggggacagtcggggccgccagtaccaggagctccctcgatgccccgcccccacccccagcctcctcaacatccccctctccagcccgggtcggcggccccggggcgacgtggagagcaggctggatgccctccagcgccagctcaacaggctggagacccggctgagtgcagacatggccactgtcctgcagctgctacagaggcagatgacgctggtcccgcccgcctacagtgctgtgaccaccccggggcctggccccacttccacatccccgctgttgcccgtcagccccctccccaccctcaccttggactcgctttctcaggtttcccagttcatggcgtgtgaggagctgcccccgggggccccagagcttccccaagaaggccccacacgacgcctctccctaccgggccagctgggggccctcacctcccagcccctgcacagacacggctcggacccgggcagttagtggggctgcccagtgtggacacgtggctcacccagggatcaaggcgctgctgggccgctccccttggaggccctgctcaggaggccctgaccgtggaaggggagaggaactcgaaagcacagctcctcccccagcccttgggaccatcttctcctgcagtcccctgggccccagtgagaggggcaggggcagggccggcagtaggtggggcctgtggtccccccactgccctgagggcattagctggtctaactgcccggaggcacccggccctgggccttaggcacctcaaggacttttctgctatttactgctcttattgttaaggataataattaaggatcatatgaataattaatgaagatgctgatgactatgaataataaataattatcctga

SEQ ID NO: 80929 - DNA, 3511 bp, Homo sapiens
  misc_feature (212)..(212): n is a, c, g, or t
  misc_feature (3504)..(3510): n is a, c, g, or t
gggccgagccgcaggcgctgcccgagccgcgggcgctggagcggctgtcggcgcggtggcaggcgggagccaggagtccggggctcgggcgggcggagcgcagcgcggggacgcggcggagcgggccccgcggctcggcgggggccggcagacaggtgtgccggcggcgggcggctcgcacgcaggcggctccaggcctccaccggcggtcnggaggggaggcgggaggcgagcgaggacccgcgcccgcagtccagtctgtgcgcgcccgtgctcgcttggcgcggtgcgggaccagcgccggccacccgaagcctagtgcgtcgccgggtgggtgggcccgcccggcgccatgggctcaggatgccggtgcggaggggccacgtcgcgccgcagaacaccttcctggacaccatcatccgcaagtttgagggccagagccgtaagttcatcatcgccaacgctcgggtggagaactgcgccgtcatctactgcaacgacggcttctgcgagctgtgcggctactcgcgggccgaggtgatgcagcgaccctgcacctgcgacttcctgcacgggccgcgcacgcagcgccgcgctgccgcgcagatcgcgcaggcactgctgggcgccgaggagcgcaaagtggaaatcgccttctaccggaaagatgggagctgcttcctatgtctggtggatgtggtgcccgtgaagaacgaggatggggctgtcatcatgttcatcctcaatttcgaggtggtgatggagaaggacatggtggggtccccggctcatgacaccaaccaccggggcccccccaccagctggctggccccaggccgcgccaagaccttccgcctgaagctgcccgcgctgctggcgctgacggcccgggagtcgtcggtgcggtcgggcggcgcgggcggcgcgggcgccccgggggccgtggtggtggacgtggacctgacgcccgcggcacccagcagcgagtcgctggccctggacgaagtgacagccatggacaaccacgtggcagggctcgggcccgcggaggagcggcgtgcgctggtgggtcccggctctccgccccgcagcgcgcccggccagctcccatcgccccgggcgcacagcctcaaccccgacgcctcgggctccagctgcagcctggcccggacgcgctcccgagaaagctgcgccagcgtgcgccgcgcctcgtcggccgacgacatcgaggccatgcgcgccggggtgctgcccccgccaccgcgccacgccagcaccggggccatgcacccactgcgcagcggcttgctcaactccacctcggactccgacctcgtgcgctaccgcaccattagcaagattccccaaatcaccctcaactttgtggacctcaagggcgaccccttcttggcttcgcccaccagtgaccgtgagatcatagcacctaagataaaggagcgaacccacaatgtcactgagaaggtcacccaggtcctgtccctgggcgccgacgtgctgcctgagtacaagctgcaggcaccgcgcatccaccgctggaccatcctgcattacagccccttcaaggccgtgtgggactggctcatcctgctgctggtcatctacacggctgtcttcacaccctactcggctgccttcctgctgaaggagacggaagaaggcccgcctgctaccgagtgtggctacgcctgccagccgctggctgtggtggacctcatcgtggacatcatgttcattgtggacatcctcatcaacttccgcaccacctacgtcaatgccaacgaggaggtggtcagccaccccggccgcatcgccgtccactacttcaagggctggttcctcatcgacatggtggccgccatccccttcgacctgctcatcttcggctctggctctgaggagctgatcgggctgctgaagactgcgcggctgctgcggctggtgcgcgtggcgcggaagctggatcgctactcagagtacggcgcggccgtgctgttcttgctcatgtgcacctttgcgctcatcgcgcactggctagcctgcatctggtacgccatcggcaacatggagcagccacacatggactcacgcatcggctggctgcacaacctgggcgaccagataggcaaaccctacaacagcagcggcctgggcggcccctccatcaaggacaagtatgtgacggcgctctacttcaccttcagcagcctcaccagtgtgggcttcggcaacgtctctcccaacaccaactcagagaagatcttctccatctgcgtcatgctcattggctccctcatgtacgctagcatcttcggcaacgtgtcggccatcatccagcggctgtactcgggcacagcccgctaccacacacagatgctgcgggtgcgggagttcatccgcttccaccagatccccaatcccctgcgccagcgcctcgaggagtacttccagcacgcctggtcctacaccaacggcatcgacatgaacgcggtgctgaagggcttccctgagtgcctgcaggctgacatctgcctgcacctgaaccgctcactgctgcagcactgcaaacccttccgaggggccaccaagggctgccttcgggccctggccatgaagttcaagaccacacatgcaccgccaggggacacactggtgcatgctggggacctgctcaccgccctgtacttcatctcccggggctccatcgagatcctgcggggcgacgtcgtcgtggccatcctgggtatggggtggggggcgggcactggactggaaatgccctctgcagcctcaagaggtgcgagccttctgaatatgcagtcactggggctgtggacctgggactgcctgcagggtcactgggctcctttaattcacctaaactcaggccctccaagcggggccatggagaggagccccacgtggggtgaggctgctgaactctggggttcccacattctccttcccttcaggatccgccacaaacagacactttttgcttccttaaagtaggatcaaatctagatcctctagcctgggcagtagaggaagaaatgctagcctggaagctcggcatttggtttcactaagggccatgtggttccctgcagcctcatgcctggccccttgacacatccaaagcaaagggagtcctgccccctccccccacttcctttctaccctgcctgtgcacagtgggtgggttggtgtgtctggacactgaggacttcctccccctttgcctgtccttccctcggccctgtgtgcctcagggcagatatagcaagctctttcgaccatagttgatggtaggacattttagactttgtttctcagctctgtacaaacacaaatacacacccccacaaaactaaaatcaaagtttcactacataacactgggccttactgcatgtggttcattctagcatttctgttctgtgctgtgctaagctatactactgtatgttctttcagtaaaaaaaannnnnnna

SEQ ID NO: 80930 - DNA, 426 bp, Homo sapiens
gtgcccagaggtggggaattgggtggagcccctgacctcggatgggttgggatgctgggcaggaacagtgccccccaccccaggtagactgctgggtgtggattggcaccaaatgaaagcaagccggcgttgtgttctgagaagtgatggacaccttctgtggtagcaggatggcgctgtacctgccactctgggccccagtgagaggggcaggggcagggccggcagtaggtggggcctgtggtccccccactgccctgagggcattagctggtctaactgcccggaggcacccggccctgggccttaggcacctcaaggacttttctgctatttactgctcttattgttaaggataataattaaggatcatatgaataattaatgaagatgctgatgactatgaataataaataattatcctga

SEQ ID NO: 80931 - DNA, 3340 bp, Homo sapiens
  misc_feature (212)..(212): n is a, c, g, or t
  misc_feature (3333)..(3339): n is a, c, g, or t
gggccgagccgcaggcgctgcccgagccgcgggcgctggagcggctgtcggcgcggtggcaggcgggagccaggagtccggggctcgggcgggcggagcgcagcgcggggacgcggcggagcgggccccgcggctcggcgggggccggcagacaggtgtgccggcggcgggcggctcgcacgcaggcggctccaggcctccaccggcggtcnggaggggaggcgggaggcgagcgaggacccgcgcccgcagtccagtctgtgcgcgcccgtgctcgcttggcgcggtgcgggaccagcgccggccacccgaagcctagtgcgtcgccgggtgggtgggcccgcccggcgccatgggctcaggatgccggtgcggaggggccacgtcgcgccgcagaacaccttcctggacaccatcatccgcaagtttgagggccagagccgtaagttcatcatcgccaacgctcgggtggagaactgcgccgtcatctactgcaacgacggcttctgcgagctgtgcggctactcgcgggccgaggtgatgcagcgaccctgcacctgcgacttcctgcacgggccgcgcacgcagcgccgcgctgccgcgcagatcgcgcaggcactgctgggcgccgaggagcgcaaagtggaaatcgccttctaccggaaagatgggagctgcttcctatgtctggtggatgtggtgcccgtgaagaacgaggatggggctgtcatcatgttcatcctcaatttcgaggtggtgatggagaaggacatggtggtggacgtggacctgacgcccgcggcacccagcagcgagtcgctggccctggacgaagtgacagccatggacaaccacgtggcagggctcgggcccgcggaggagcggcgtgcgctggtgggtcccggctctccgccccgcagcgcgcccggccagctcccatcgccccgggcgcacagcctcaaccccgacgcctcgggctccagctgcagcctggcccggacgcgctcccgagaaagctgcgccagcgtgcgccgcgcctcgtcggccgacgacatcgaggccatgcgcgccggggtgctgcccccgccaccgcgccacgccagcaccggggccatgcacccactgcgcagcggcttgctcaactccacctcggactccgacctcgtgcgctaccgcaccattagcaagattccccaaatcaccctcaactttgtggacctcaagggcgaccccttcttggcttcgcccaccagtgaccgtgagatcatagcacctaagataaaggagcgaacccacaatgtcactgagaaggtcacccaggtcctgtccctgggcgccgacgtgctgcctgagtacaagctgcaggcaccgcgcatccaccgctggaccatcctgcattacagccccttcaaggccgtgtgggactggctcatcctgctgctggtcatctacacggctgtcttcacaccctactcggctgccttcctgctgaaggagacggaagaaggcccgcctgctaccgagtgtggctacgcctgccagccgctggctgtggtggacctcatcgtggacatcatgttcattgtggacatcctcatcaacttccgcaccacctacgtcaatgccaacgaggaggtggtcagccaccccggccgcatcgccgtccactacttcaagggctggttcctcatcgacatggtggccgccatccccttcgacctgctcatcttcggctctggctctgaggagctgatcgggctgctgaagactgcgcggctgctgcggctggtgcgcgtggcgcggaagctggatcgctactcagagtacggcgcggccgtgctgttcttgctcatgtgcacctttgcgctcatcgcgcactggctagcctgcatctggtacgccatcggcaacatggagcagccacacatggactcacgcatcggctggctgcacaacctgggcgaccagataggcaaaccctacaacagcagcggcctgggcggcccctccatcaaggacaagtatgtgacggcgctctacttcaccttcagcagcctcaccagtgtgggcttcggcaacgtctctcccaacaccaactcagagaagatcttctccatctgcgtcatgctcattggctccctcatgtacgctagcatcttcggcaacgtgtcggccatcatccagcggctgtactcgggcacagcccgctaccacacacagatgctgcgggtgcgggagttcatccgcttccaccagatccccaatcccctgcgccagcgcctcgaggagtacttccagcacgcctggtcctacaccaacggcatcgacatgaacgcggtgctgaagggcttccctgagtgcctgcaggctgacatctgcctgcacctgaaccgctcactgctgcagcactgcaaacccttccgaggggccaccaagggctgccttcgggccctggccatgaagttcaagaccacacatgcaccgccaggggacacactggtgcatgctggggacctgctcaccgccctgtacttcatctcccggggctccatcgagatcctgcggggcgacgtcgtcgtggccatcctgggtatggggtggggggcgggcactggactggaaatgccctctgcagcctcaagaggtgcgagccttctgaatatgcagtcactggggctgtggacctgggactgcctgcagggtcactgggctcctttaattcacctaaactcaggccctccaagcggggccatggagaggagccccacgtggggtgaggctgctgaactctggggttcccacattctccttcccttcaggatccgccacaaacagacactttttgcttccttaaagtaggatcaaatctagatcctctagcctgggcagtagaggaagaaatgctagcctggaagctcggcatttggtttcactaagggccatgtggttccctgcagcctcatgcctggccccttgacacatccaaagcaaagggagtcctgccccctccccccacttcctttctaccctgcctgtgcacagtgggtgggttggtgtgtctggacactgaggacttcctccccctttgcctgtccttccctcggccctgtgtgcctcagggcagatatagcaagctctttcgaccatagttgatggtaggacattttagactttgtttctcagctctgtacaaacacaaatacacacccccacaaaactaaaatcaaagtttcactacataacactgggccttactgcatgtggttcattctagcatttctgttctgtgctgtgctaagctatactactgtatgttctttcagtaaaaaaaannnnnnna

SEQ ID NO: 80932 - DNA, 1603 bp, Homo sapiens
  misc_feature (1596)..(1602): n is a, c, g, or t
ggccggctggaggagctgaggttccgagtgcggccgctgctgggctggcgggcgggcagagcacggcaccctggcagcagggcccacgccacggggccatgggcagctcgagccaggcaggctgctgcccacgcttactgccagggtgaccccagccctggggcccagccacaaccaccctggcttcatgccaggggctgctctggttgccagtcggccagcctcgggggtgcagcctgggctgggactgctgctggggtgcaggtgaggcagtggccgggccctcaggccccagggcaggcaggctgcagggagccaagtcctccatggcggccccagccgggaaggcgagcaggacaggggctctgcggcccagggcccagaaaggccgggtgaggcgggccgtgcgcatctccagcctcgtggcccaggaggtcctgtccctgggcgccgacgtgctgcctgagtacaagctgcaggcaccgcgcatccaccgctggaccatcctgcattacagccccttcaaggccgtgtgggactggctcatcctgctgctggtcatctacacggctgtcttcacaccctactcggctgccttcctgctgaaggagacggaagaaggcccgcctgctaccgagtgtggctacgcctgccagccgctggctgtggtggacctcatcgtggacatcatgttcattgtggacatcctcatcaacttccgcaccacctacgtcaatgccaacgaggaggtggtcagccaccccggccgcatcgccgtccactacttcaagggctggttcctcatcgacatggtggccgccatccccttcgacctgctcatcttcggctctggctctgaggagctgatcgggctgctgaagactgcgcggctgctgcggctggtgcgcgtggcgcggaagctggatcgctactcagagtacggcgcggccgtgctgttcttgctcatgtgcacctttgcgctcatcgcgcactggctagcctgcatctggtacgccatcggcaacatggagcagccacacatggactcacgcatcggctggctgcacaacctgggcgaccagataggcaaaccctacaacagcagcggcctgggcggcccctccatcaaggacaagtatgtgacggcgctctacttcaccttcagcagcctcaccagtgtgggcttcggcaacgtctctcccaacaccaactcagagaagatcttctccatctgcgtcatgctcattggctccctcatgtacgctagcatcttcggcaacgtgtcggccatcatccagcggctgtactcgggcacagcccgctaccacacacagatgctgcgggtgcgggagttcatccgcttccaccagatccccaatcccctgcgccagcgcctcgaggagtacttccagcacgcctggtcctacaccaacggcatcgacatgaacgcggtgctgaagggcttccctgagtgcctgcaggctgacatctgcctgcacctgaaccgctcactgctgcagcactgcaaacccttccgaggggccaccctgtgctgtgctaagctatactactgtatgttctttcagtaaaaaaaannnnnnna

SEQ ID NO: 80933 - DNA, 2084 bp, Homo sapiens
  misc_feature (212)..(212): n is a, c, g, or t
gggccgagccgcaggcgctgcccgagccgcgggcgctggagcggctgtcggcgcggtggcaggcgggagccaggagtccggggctcgggcgggcggagcgcagcgcggggacgcggcggagcgggccccgcggctcggcgggggccggcagacaggtgtgccggcggcgggcggctcgcacgcaggcggctccaggcctccaccggcggtcnggaggggaggcgggaggcgagcgaggacccgcgcccgcagtccagtctgtgcgcgcccgtgctcgcttggcgcggtgcgggaccagcgccggccacccgaagcctagtgcgtcgccgggtgggtgggcccgcccggcgccatgggctcaggatgccggtgcggaggggccacgtcgcgccgcagaacaccttcctggacaccatcatccgcaagtttgagggccagagccgtaagttcatcatcgccaacgctcgggtggagaactgcgccgtcatctactgcaacgacggcttctgcgagctgtgcggctactcgcgggccgaggtgatgcagcgaccctgcacctgcgacttcctgcacgggccgcgcacgcagcgccgcgctgccgcgcagatcgcgcaggcactgctgggcgccgaggagcgcaaagtggaaatcgccttctaccggaaagatgggagctgcttcctatgtctggtggatgtggtgcccgtgaagaacgaggatggggctgtcatcatgttcatcctcaatttcgaggtggtgatggagaaggacatggtggtggacgtggacctgacagacccgacggaaaaccagacagagaagtcgacatggaccttgagacagaagctgacagaccaaatggacaaaacacagtggacagggacatacgaggacaccagcaagaaggaagcggacgaatagacaggcatggatgggggaataccaggggcaacatcacagaaaacacaaatatacatgacaggcacacagagacaaagacaaccacaaacgaaccacagagagacgacacaaagacatcaaaaccacaagaaagacacatagcgagaaatacaagacaggcaaacacatgaacaccacggggatcctgtacgacataacacagaggataaaagagttgacgaccagtacggatgaaagcacagaggaacgatagattcggagaacgaacataaaacatagaaagggacacatatgccgacgtaaacgtggagaatggcgttgtcacaaacagaacgaacaccgtgcggtcacacactgacacaaggaaaaccaggtgttgtacgcacgtttgacaagaccacgattatgtccattcaaatgaaggagacagtaatggacataacaacaagatcaacgatacaatcgaaaggacacaatcacggaaacagcattcaatatgccggtcataaaacatgagaacgtaaataacagtcaagtaggaatattcaccgcccaacgttctagaccccatctaaaaatctaatagtagagaacaccattcacaaaagaggatagaaaacacccataattaacatatggagctttactatcaccacataacaagttataaaacccaggaagcaaaaaaatcacatatagctaaatcacctacaaacaactatacaaacgagaacaccataaaatccaacaccaaaacaatagtaccacaatgtaagaaacatggatacacacacccaaaggaagtaccattgattaccccaatagaagcctgccccagacaaactagtacctatgaccacgcataggattagataacaaaatcgatcaagagacaaaacagcaacatgacatcatatacaccaacaactgtcatgtgttgaccacacagatccactattacacacccactcacactcacacccgcacatttagacaaggagttagcatagatagctagacagaacatggaattacacatacacactagacacaacgatcgatagtgacgcacaacatgaaactactacagtagacagtgagcctataaacaaccagcctacacaaaatatgagacgcgaatcagaacccgtacatcacaatgc

SEQ ID NO: 80934 - DNA, 469 bp, Homo sapiens
aggggccattattttgtagcgtcaccaaagtgccctagaagctggtgggagtgggcaggcaccctagggtgatcactgcacctgtcagtgcccctgtttcctcatccacactatgggggctgcctctgtcccaaagctagcactaagattaatgagacacctgtgctgggcccagtgtgggcttcacctcttaggaggagggtctaggaagtctttggggatctgacctctgatgctcgctctgagggccgcagcacctcccctcctcccttgccccccttgccccatcaacggaatgtgccccttccctgtcccccagctgatcgggctgctgaagactgcgcggctgctgcggctggtgcgcgtggcgcggaagctggatcgctactcagagtacggcgcggccgtgctgttcttgctcatgtgcacctttgcgctcatcgcgcactggctagcctgcatctggtac

SEQ ID NO: 80935 - DNA, 855 bp, Homo sapiens
  misc_feature (212)..(212): n is a, c, g, or t
gggccgagccgcaggcgctgcccgagccgcgggcgctggagcggctgtcggcgcggtggcaggcgggagccaggagtccggggctcgggcgggcggagcgcagcgcggggacgcggcggagcgggccccgcggctcggcgggggccggcagacaggtgtgccggcggcgggcggctcgcacgcaggcggctccaggcctccaccggcggtcnggaggggaggcgggaggcgagcgaggacccgcgcccgcagtccagtctgtgcgcgcccgtgctcgcttggcgcggtgcgggaccagcgccggccacccgaagcctagtgcgtcgccgggtgggtgggcccgcccggcgccatgggctcaggatgccggtgcggaggggccacgtcgcgccgcagaacaccttcctggacaccatcatccgcaagtttgagggccagagccgtaagttcatcatcgccaacgctcgggtggagaactgcgccgtcatctactgcaacgacggcttctgcgagctgtgcggctactcgcgggccgaggtgatgcagcgaccctgcacctgcgacttcctgcacgggccgcgcacgcagcgccgcgctgccgcgcagatcgcgcaggcactgctgggcgccgaggagcgcaaagtggaaatcgccttctaccggaaagatgggagctgcttcctatgtctggtggatgtggtgcccgtgaagaacgaggatggggctgtcatcatgttcatcctcaatttcgaggtggtgatggagaaggacatggtggggtccccggctcatgacaccaaccaccggggcccccccaccagctggctggccccaggtaagtgtacttgctttagg

SEQ ID NO: 80936 - DNA, 3185 bp, Homo sapiens
ggccggctggaggagctgaggttccgagtgcggccgctgctgggctggcgggcgggcagagcacggcaccctggcagcagggcccacgccacggggccatgggcagctcgagccaggcaggctgctgcccacgcttactgccagggtgaccccagccctggggcccagccacaaccaccctggcttcatgccaggggctgctctggttgccagtcggccagcctcgggggtgcagcctgggctgggactgctgctggggtgcaggtgaggcagtggccgggccctcaggccccagggcaggcaggctgcagggagccaagtcctccatggcggccccagccgggaaggcgagcaggacaggggctctgcggcccagggcccagaaaggccgggtgaggcgggccgtgcgcatctccagcctcgtggcccaggaggtcctgtccctgggcgccgacgtgctgcctgagtacaagctgcaggcaccgcgcatccaccgctggaccatcctgcattacagccccttcaaggccgtgtgggactggctcatcctgctgctggtcatctacacggctgtcttcacaccctactcggctgccttcctgctgaaggagacggaagaaggcccgcctgctaccgagtgtggctacgcctgccagccgctggctgtggtggacctcatcgtggacatcatgttcattgtggacatcctcatcaacttccgcaccacctacgtcaatgccaacgaggaggtggtcagccaccccggccgcatcgccgtccactacttcaagggctggttcctcatcgacatggtggccgccatccccttcgacctgctcatcttcggctctggctctgaggagctgatcgggctgctgaagactgcgcggctgctgcggctggtgcgcgtggcgcggaagctggatcgctactcagagtacggcgcggccgtgctgttcttgctcatgtgcacctttgcgctcatcgcgcactggctagcctgcatctggtacgccatcggcaacatggagcagccacacatggactcacgcatcggctggctgcacaacctgggcgaccagataggcaaaccctacaacagcagcggcctgggcggcccctccatcaaggacaagtatgtgacggcgctctacttcaccttcagcagcctcaccagtgtgggcttcggcaacgtctctcccaacaccaactcagagaagatcttctccatctgcgtcatgctcattggctccctcatgtacgctagcatcttcggcaacgtgtcggccatcatccagcggctgtactcgggcacagcccgctaccacacacagatgctgcgggtgcgggagttcatccgcttccaccagatccccaatcccctgcgccagcgcctcgaggagtacttccagcacgcctggtcctacaccaacggcatcgacatgaacgcggtgctgaagggcttccctgagtgcctgcaggctgacatctgcctgcacctgaaccgctcactgctgcagcactgcaaacccttccgaggggccaccaagggctgccttcgggccctggccatgaagttcaagaccacacatgcaccgccaggggacacactggtgcatgctggggacctgctcaccgccctgtacttcatctcccggggctccatcgagatcctgcggggcgacgtcgtcgtggccatcctggggaagaatgacatctttggggagcctctgaacctgtatgcaaggcctggcaagtcgaacggggatgtgcgggccctcacctactgtgacctacacaagatccatcgggacgacctgctggaggtgctggacatgtaccctgagttctccgaccacttctggtccagcctggagatcaccttcaacctgcgagataccaacatgatcccgggctcccccggcagtacggagttagagggtggcttcagtcggcaacgcaagcgcaagttgtccttccgcaggcgcacggacaaggacacggagcagccaggggaggtgtcggccttggggccgggccgggcgggggcagggccgagtagccggggccggccgggggggccgtggggggagagcccgtccagtggcccctccagccctgagagcagtgaggatgagggcccaggccgcagctccagccccctccgcctggtgcccttctccagccccaggccccccggagagccgccgggtggggagcccctgatggaggactgcgagaagagcagcgacacttgcaaccccctgtcaggcgccttctcaggagtgtccaacattttcagcttctggggggacagtcggggccgccagtaccaggagctccctcgatgccccgcccccacccccagcctcctcaacatccccctctccagcccgggtcggcggccccggggcgacgtggagagcaggctggatgccctccagcgccagctcaacaggctggagacccggctgagtgcagacatggccactgtcctgcagctgctacagaggcagatgacgctggtcccgcccgcctacagtgctgtgaccaccccggggcctggccccacttccacatccccgctgttgcccgtcagccccctccccaccctcaccttggactcgctttctcaggtttcccagttcatggcgtgtgaggagctgcccccgggggccccagagcttccccaagaaggccccacacgacgcctctccctaccgggccagctgggggccctcacctcccagcccctgcacagacacggctcggacccgggcagttagtggggctgcccagtgtggacacgtggctcacccagggatcaaggcgctgctgggccgctccccttggaggccctgctcaggaggccctgaccgtggaaggggagaggaactcgaaagcacagctcctcccccagcccttgggaccatcttctcctgcagtcccctgggccccagtgagaggggcaggggcagggccggcagtaggtggggcctgtggtccccccactgccctgagggcattagctggtctaactgcccggaggcacccggccctgggccttaggcacctcaaggacttttctgctatttactgctcttattgttaaggataataattaaggatcatatgaataattaatgaagatgctgatgactatgaataataaataattatcctga

SEQ ID NO: 80937 - DNA, 1429 bp, Homo sapiens
ggccggctggaggagctgaggttccgagtgcggccgctgctgggctggcgggcgggcagagcacggcaccctggcagcagggcccacgccacggggccatgggcagctcgagccaggcaggctgctgcccacgcttactgccagggtgaccccagccctggggcccagccacaaccaccctggcttcatgccaggggctgctctggttgccagtcggccagcctcgggggtgcagcctgggctgggactgctgctggggtgcaggtgaggcagtggccgggccctcaggccccagggcaggcaggctgcagggagccaagtcctccatggcggccccagccgggaaggcgagcaggacaggggctctgcggcccagggcccagaaaggccgggtgaggcgggccgtgcgcatctccagcctcgtggcccaggaggtcctgtccctgggcgccgacgtgctgcctgagtacaagctgcaggcaccgcgcatccaccgctggaccatcctgcattacagccccttcaaggccgtgtgggactggctcatcctgctgctggtcatctacacggctgtcttcacaccctactcggctgccttcctgctgaaggagacggaagaaggcccgcctgctaccgagtgtggctacgcctgccagccgctggctgtggtggacctcatcgtggacatcatgttcattgtggacatcctcatcaacttccgcaccacctacgtcaatgccaacgaggaggtggtcagccaccccggccgcatcgccgtccactacttcaagggctggttcctcatcgacatggtggccgccatccccttcgacctgctcatcttcggctctggctctgaggagctgatcgggctgctgaagactgcgcggctgctgcggctggtgcgcgtggcgcggaagctggatcgctactcagagtacggcgcggccgtgctgttcttgctcatgtgcacctttgcgctcatcgcgcactggctagcctgcatctggtacgccatcggcaacatggagcagccacacatggactcacgcatcggctggctgcacaacctgggcgaccagataggcaaaccctacaacagcagcggcctgggcggcccctccatcaaggacaagtatgtgacggcgctctacttcaccttcagcagcctcaccagtgtgggcttcggcaacgtctctcccaacaccaactcagagaagatcttctccatctgcgtcatgctcattggctccctcatgtacgctagcatcttcggcaacgtgtcggccatcatccagcggctgtactcgggcacagcccgctaccacacacagatgctgcgggtgcgggagttcatccgcttccaccagccccatctccccgcatctccctcaccagcctccactcagcactccagcaacacctcact

SEQ ID NO: 80938 - DNA, 393 bp, Homo sapiens
tgagggtaatagtttttaaataactgtagtgacatgctgtagaagaggcataggataattcattctgtgttgctccagaggcaaatctagaatcaacagataaaagttaaagaatcacatttaggttcaatgtaaaaaacaaactttctagaatcaatgccttatatggcagtgttcctaatcacaatgccaatgttaagcatacaactgctcatcacagaaagtacaatggacttaaagtgggtcagaagtccttggattctaatctcatcttgaccatttactagctgtgttatatgaggcaaggtatttacaacctctctgaatctcagcttttcttatgtatttatttacctcctgatatcactaagaggaataaataagatgatatgt

SEQ ID NO: 80939 - DNA, 971 bp, Homo sapiens
cctgtgtctgcataccctgatgttcggtgcccagcttagagaaggagaaggggcttacctactgcagacacctgtccactgagaggacccacttgtcatccctggtcaattacatgatcatgtctctggacttgccctgtgatgctggacaggagctgacagccgggatctgggagcaataccttcaggatagcacagcaaggtttagctgggcttgatctgcagtggtgtagaggctgcaaaggaggggcgattttgttatgtgagaaataagcccacctacttgtggggactcaagatgacttgtttggattctgcatatgcaaattgaagatctcctcctcttcttgagagttccaagacccacaactcacttttgcccgtgagtgtggagattgaaggggatggaaaacatgctcacctgggatgaataaagagaaagtcagtgagtaagtatttattatgaagcattagtttgtatcactcctgcacaaggtgctgagacatggccccagccagaaggaatttacagtccagtcaaaactgcctagaagtgtgacagcagctgagttggagggaggcagctgaaccaagaaaaccttatcagcactatttgaaacttttatctcatctggcttggcgcctgaggttctcccattaggggtccagcttcatccttttgcatgtggatatccagttctcccagcaccattcttcaaagaaatgagtgttttccccactgaatggtcttgtacctaagtttttactcagctcggtgaaaacgtgctctcactgatgaggctgataaggttttgtcttgaattgggacctgggaatagtgctggtaatttggagatgacatgaacatttatttggggctaccccagtgctctctgctggttgagcaactgcgccatccagccagttggaaggtttgtaatgagggagctgaatgagacagagacgagaag

SEQ ID NO: 80940 - DNA, 848 bp, Homo sapiens
ctgaaactaggtttggagcccttgtttgacaatggggaaaagtgcagctcagtgtatcgggtttgggcgatactgcggggaacagatagtaactgtatggcgttcatagtgctgatttgcctctgggaaacaggaatcttttccaggaaaaacagacctgacctagagcttttccagcttgagattttgggaaacaggagaatcacatgaggaacatatccaaaaactgctggtattgaagccatttctgattgctttaccagggaagattaggattaaggtaaaacggcaaaatcctccataattatcaaagaggtggtgagtggtagattttttttttgtcgttttgtttccaagcctcacagaaggatatggattacagaaagataaggttaaagggaagaagaaatcaatcttcaaagggcaaaaaagcgaaaaacagacatctcagaatccttgaaaagagcatcgaaaaggaacatctctgttgcttcaggctggggtattagtggaatgtgtggaatctatacagtcacccccaacatcaggtcgtccagaccatttgtcgttagactctgctgtatgtgccagtgtggtctctgaatttcttttcttttctttctttctttctttctttctttctttctttctttctttgaggtacggcctcgtcctgttgcacaggctagggtgtagtgccacagccatggctcactgcagcctcgacctcctaggctcaagcgatcctcccacctcaactttcccagtagctgggaccacaggcatgtgccaccaagttcctgggctcaatcgatcctcccacctcagcttcctgagtagctgggacc

SEQ ID NO: 80941 - DNA, 334 bp, Homo sapiens
aagctttgttggcagtatactaaaaggttctaggaatgcagtgattaggttttagtgggacatggagaatatgtcctactgaggacctgaaggaactgttgaggaactgaagatagaattattattgtagttcagaccttacattagggacaggtggaaataatttgcagcaccattaaatatgagctaaaaaatagggcagtgggagagggcaatgtttgaagctgtgaatctgtaaaggaaaaggttgtatcataattcatggtttggaaatgaaactgctcacatgctcagctacccggaatttcgtaatcatggttcatagctgttttcc

SEQ ID NO: 80942 - DNA, 363 bp, Homo sapiens
ataaaaccataagagacagtgtcttctgagtacagtctcgcttttaaaaaatctaaacatgcactgccctattttggatacagtgactgtagaaaaatttcccattggtaactttgggagggttttctgttgttgttgttgttcctttttcattgattatcagccagtataaattttaagctttctgtcaaatatttttctggagatgtcagtcttagggaaaagaaatcctaaagtgttatctgtaggagtctccttctcccaatttcaccccctccccgaaacctccacctcccaccccccaacacacatagtgttttttagatatcagtaaagtctttttctggtgtaactggagaggtt

SEQ ID NO: 80943 - DNA, 568 bp, Homo sapiens
cagtgtgcaagctcattttaagcttctgataatgtcactaatctgttagcatcctgttggtcaaggaaagtcacatgaccaagcacagcgccagggcagggaaatgtatttcacttttttatttgttttaattttttattatattttttgagatagagtctcactctgtcatccaggctggagtgcagtggcgtgatcacaggttccgtctcccaggttcaagtgagtattgtgtctcagaccccggagtagccgggattacaggcaccggccaccacacctgactaatttttgtattttcactagagatggggttttaccatgttgaccaggctggtctcaaactcctgacctcaagtgatctgcccgcctcagcctttcaaagtgctggaattacaaacgtgagctaccaggaccagcctatttcacttttttagtgtgagaaactgcaaatacttgtggcaaagggcatggatatggagaagagtgaagaaatagagccattaaaatactcttccccagtgggagaagggtgtatgaagagggagttgcattttttcctgctttg

SEQ ID NO: 80944 - DNA, 283 bp, Homo sapiens
aatgtctttctccttcaaaactcatgttgaaatttggttgccattgtaatagtattaagaggtggaacaacttaagaaagaagtaggccaggaggctctaccattatgggtggggttaattacattgcaaaaagatgaattcagcctctttttgttctctctcttatcttctacaatgtgatgatgtagcaagaagcctctcaacacatgttggcacctccatattgaaattcccagcgtccagaactgtgaactaataaatttcttcattgtaaatcaaaca

SEQ ID NO: 80945 - DNA, 921 bp, Homo sapiens
atgtaagggaggctctctttgctagcatgagtctggtgctcactcctcagccaatgaaatctcaccaaatttgtggagtttgggaagagtttgacagctactatggcagtcatgtggacatccttgagcagctgaagagatgccctgcccggagaggaggaatctagagaggcaatctggctacagtggctttgccgagctacagtgggctctacccagtttgaacctcctggcagctttgtttacactgtgaggggaaaaccatctacttaagcctcagtaatggcagacgctcctctctctaaggtcaagtgtaactgtttacttcagactgttgtgctggctgtgagaatttcaagcccgtggatctcagcttgctgggctccatgggggtgggatccactgagataaaccacttggctccctggcttaagccttcttttcagacacagaagaaagatgatgataagaagccatacattgtaagacatttaggctcactcaggtcattcacagttctgtttttcctttgactggactaagctccagctttgaatccaagtggtgcagttaacaaggaggagcaagaaagcaggacaaataaagcagagagctagtcaccagagggatgtgtttgatccagcacaccccttctcttcatagcagagaatcgacacccaatcaatcacagcaaagtacatttcacaaatttggagtaaacttttatgtgtactcaagggagatgtttagaaagggttatcttcgaagagacgcttcagaaaggagagagaatttggggaaccttttccatgatttgaagaagacggcaagaagcctctcaacacatgttggcacctccatattgaaattcccagcgtccagaactgtgaactaataaatttcttcattgtaaatcaaaca

SEQ ID NO: 80946 - DNA, 993 bp, Homo sapiens
atgtaagggaggctctctttgctagcatgagtctggtgctcactcctcagccaatgaaatctcaccaaatttgtggagtttgggaagagtttgacagctactatggcagtcatgtggacatccttgagcagctgaagagatgccctgcccggagaggaggaatctagagaggcaatctggctacagtggctttgccgagctacagtgggctctacccagtttgaacctcctggcagctttgtttacactgtgaggggaaaaccatctacttaagcctcagtaatggcagacgctcctctctctaaggtcaagtgtaactgtttacttcagactgttgtgctggctgtgagaatttcaagcccgtggatctcagcttgctgggctccatgggggtgggatccactgagataaaccacttggctccctggcttaagccttcttttcagacacagaagaaagatgatgataagaagccatacattgtaagacatttaggctcactcaggtcattcacagttctgtttttcctttgactggactaagctccagctttgaatccaagtggtgcagttaacaaggaggagcaagaaagcaggacaaataaagcagagagctagtcaccagagggatgtgtttgatccagcacaccccttctcttcatagcagagaatcgacacccaatcaatcacagcaaaggtgctcactgtgcctgacatttctattctacctaaaattaatcagcattgactgagcatctccctaggccagtacatttcacaaatttggagtaaacttttatgtgtactcaagggagatgtttagaaagggttatcttcgaagagacgcttcagaaaggagagagaatttggggaaccttttccatgatttgaagaagacggcaagaagcctctcaacacatgttggcacctccatattgaaattcccagcgtccagaactgtgaactaataaatttcttcattgtaaatcaaaca

SEQ ID NO: 80947 - DNA, 507 bp, Homo sapiens
ggaggatacagaggttgtgatgtatccaataaagcctgtgaagcccaacaggtttctcagaggaaggtgggagattgagtggcatatctatgtctacaacacaaaagacataccaagctgcacgtgcattcagtgactagaagctgtgagagcacagaggctccaccatcttgccctggaacaggactggaaaaattcttgctctagagctcctacagggaggccaaggcttcatcatgcctgcatcatggcttggcatcttctgtacaatgcagcctcctttccccttttcacaggtgttgattcctaataaattttgatccaccacccaaaaaaaagaaaaaaaaaaaaaaaaagaaacaaaaaaaaaaaaaaaagaaaaaaaagagagagagagagaggggcgggcgcgcggcatataagaaggtctctctcgccgcggcgggcggcgcccaagtgtagcggaggcacacccaggttttattgtagagaaggagggggacgaca

SEQ ID NO: 80948 - DNA, 464 bp, Homo sapiens
ggtaatgtttttacccataaatgtgaatacattttgaaattatactgcagaatatttttacgcaatataaagccaatctagttgtaaaatctaccattttgcactaggcagtgcctcatttctctcaaatttgtacaaagcctctattaatacaacatttatcactttaacaatttaaagaaagtaattgcaaaaccttactgattgttggagggctgcatgcccatttcccatggggactgatttaagcctctgtatctgcatgtgacatgcaaggatagttgtgccacatctaattgaaaatgctccttagtgctggagaagagttcaggaggctgggcgcggtggcttataacctttaatcccagcactttgagaagccaaggtgggtggatcacttgaggtcaggagtcaaagaccagcctggccaacatagtgaaaccccatctctactaaaaatgcaa

SEQ ID NO: 80949 - DNA, 240 bp, Homo sapiens
ctggtgatccacccgcctctgcctcccaaaatgctgggattacaggtgtgagcttctgtgcccagctttgatctgcttttattaatgaaatgttttttagggaccacagtgtggggcttgagagtgctgattgatttcactgtaatttacatttaattacagtttccctttgaacaatatgggtttgaactgcccaggtccacttctatgtgaatttttttcagtaaaagttacatgagt

SEQ ID NO: 80950 - DNA, 367 bp, Homo sapiens
gtataagcatgagagttttggaggtagccaccagaactgaaattaacccttgttgcctgtacttgtctctctcaatgagaccaatgagtgagaaactgttgctcttcattttatacattttgattcctttttgctttttttttttactatgtgcaaatattcctcagatttaaagataaactcaaaatatttaaataatttctttaactttcttattttccttactttagggtaaccttgagcaagtcagaagtataggtttaagcttgttggtgggtgggccctagcataggaaattccctcactttctcagagttcttaatgtctccagcatgttcttgataccactagggcagaggaaatgcct

SEQ ID NO: 80951 - DNA, 203 bp, Homo sapiens
tcaggtctttgcttaatgtcaccccatcagataccctttcttgaccactgtatctagaatagcatcatctattgctccttattcccttatcttgttttatcagccttatagctcttatcattatctgatggtatatattacgtattatttgcttattcactgtctgtaacatcctctagattgcaaacttcatgagtgtaggg

SEQ ID NO: 80952 - DNA, 732 bp, Homo sapiens
gaccaaatgctattcacctccaagtctgtcagagtccggagcctgggctcttcgttcaccatgctggacattttagttatgctttaatttcaagatatattcaattttctcatttttatacccttggaatcttgtcagatttcaatttttaaaaattagaaaatgggctatttaattaatataaatttaaaatatccccttttaacgtcaacagtcattgaatatgaatggatttgagtactccaatggtattttaggatactcagtatatctactggaaaaaaaatgacaaattgaatagctatatcactgtgaagtaagttctgtaataaaagtgagaataaaatgtggtgggagcacgaagtaaatgacaaattttctatccaggagtctctgctgtgagtctgaactcccagcacctagtgtaaagctgtactcatctatggtaactataggagacagaaatatgtccagctaatgctgcttaaaaggctttctggttttcttagaaaactgtgaatattcattctagacttttctgttgataaagagaagaaagactctgaagggagcttttgggggctcaatagataggaattagattggtagtccttgctcctaaaaggaagaagttgcttctttattaaactgtgtgattttttttgtttgtttgtttttgtttttttttttttgttttaaccagaaagagacaggtttgttcagtttggtatt

SEQ ID NO: 80953 - DNA, 567 bp, Homo sapiens
agaacaggtttaggaatggatctagatttacctggaagcttgctcctgtggacctgatccaggcccacggggcctggaggtgtggtgagataatgctgatgggatgagaaggtgatgaggagccagccagcactggcaggtgtcttcctagccctgatcttgttctccccagcgttttgaaagaggcggccagcagactctggggacctcagacgtctgtgctccacatgcgtatcggccgctctagagattgcctgggaagctggagggaatgggagacaccccggtgcagctgcgccctgagttctctgagcctggctcctggctccctgcagccctcccctccttgttcctgacccagagtgactttacctgtaccggctccctgctcgataggcctctgggtgcttaaattcttgaggggagcgatgcagtcggcaagggaacagataaacaaggtaatttcggatgggagcaggagcgctgctgtaatacaatgacggtgtgatacgggaacgggggagctgcacatagggaagggggaggccaggacctgggaggaactga

SEQ ID NO: 80954 - DNA, 895 bp, Homo sapiens
ggagttgatttgtctggccagaaagctgtacagcttgaccaacagcctcaggtagatatcccggctcttgggctccttgcgcggaacgttttttggtccttgttggggcggatgtcaactcccatgatggcgcctcctgctcggccagttccggaaagccaggtttctaatttctaacaagccccgggtgatgttgttaccaaggtccacctgccacagtttatagagggccgtggaggtgggagtggggtggggtaggcagaggagagaaacaggaggttgcagttgggacagctgtgctcatcctcacttgtaactgactctcgtaaattgtcatttaacttctcaacacccaccctcctccctcatcaatatgataaagaaagaacatcagaacatctgtgttcttggtctcccaggaaagcccacccagtcaggaccccaggatgtggcaggcaagtccctccctccccctgaagccccagtgactccagctctaggtgcttatgctggggtgggggcaggacactgtgaatctgcagctgctccccacattgttgaggggagcgcatagtatgtggggagaggtgaggagaggactttcctcttcctagaacttctggtctggtccccagggcacaggtgttaatgaagaaggaggaatggcctcttcctaatgggcctttcaaggcctgccagagccagcagggtgggcaggggacagggaggaacttgtgcttcccggcagggacaggaacccgctggatgcaccgctttgaccttggctcattgtaaacatgctctaatgtggggcgttgaagccaagagatgggacaattatcattgcaagggaagttatcttaaagttaatttataaattccagtcaaggtccta

SEQ ID NO: 80955 - DNA, 455 bp, Homo sapiens
gtctatcttatgaataaactttttacattaaagaataataataaacctttttcttaggtagtgggagaattgtttacctacattgtgttctatgagtatcactcattttggtgacactagtatgaatcctttaagcttccaaaggtcaatgaacagttactttgtagaagaggcatttcttgcttgcttctttgcagtgacttgttctttgcatgctaagtttctattgcctgtggaaagtctgggattgttttgttttcctggtagcatagaatgctgttcttcagatgcagtttattaatgctgtgaaatacttagactgctgtgaggagtatccataatgtctctttccagtctctgagttccaccactactaaagtttgttaatctaacccatgtgtttgattattcaagttgagaaaataaataataatgtaatcattaagtgtgccaaa

SEQ ID NO: 80956 - DNA, 394 bp, Homo sapiens
agtacacatatatttttaaatcttcaaaaacctctggaaaaaaatccactacaattcacataatatgtagggcatttaagttttaatgtttgctgatcttttgacctagagactgttaaaaaataatcccgtatcacaacaaggataatatgtccttaatagccttgatacatcttgccgaatccagttttcgttatgaaaattgtatagtgtgggtgaatcatatcataaaacatcattttacattttcatttgttctgcttacatttagtgaaaaactagttcagaaatgtagtgacatttgagtaccaaataatgttttattttgtgtgaaatctaaagtgctttcctcagcaggcaaagtctttgaatagcttctcattaagggattgcc

SEQ ID NO: 80957 - DNA, 348 bp, Homo sapiens
cagtgagccaagatcacgccattgcactccagcctggaagacagagcgagactccatcttaaaaacaaacaaacaaaaaaacccagctgaaatggcagatatgacccaccttcccacccagctcccaaccttcctcctcaggaagagctgggctctctgactgtgttgtttcctcggcaccatccctgtttctaatacagcccttattgatttgaaaggtaggtggtgtgcttaaaagtctcctcccccactaactgtaagtccctaagaacagggactatgacttgatcatctctgtagtgccagggcctagaaccttgcctgggacagggtagatgctaactcatt

SEQ ID NO: 80958 - DNA, 241 bp, Homo sapiens
cttctctcccaactctcacatccaaaccatcacttcctctccattttaccatctcgaatttctcacatctatgtctctccaccaccactacaaactttccagtctaaacaactgtcactttttgcctggactacatcaggagtctgctaacaggtttccctggatcttctcatgaccacctcaaataaactgttcaattatacagccaaagtgacctttttgaaatagaaaatctgtcatc

SEQ ID NO: 80959 - DNA, 361 bp, Homo sapiens
cttgtagtcatgctttggcctttctgatgtccagcccctgtcctcaagttacctatgggctgccagccatcagtcaactcattaatatacaaggatgccttcaggcatatttttctaggttattaatggaggttaaattcccagactagttacaaaaagtattttttaaattcacagtaaaactgtaatgttactttatattctaggaacaggatactgtgcaggaaagaccactgtcaaattcagagttttgttttgggaatgccttaccacttcattttcattccctcttagttctccagtcctctttctcaagtagctgatgttctcatatttctgtgagtacactttgcatcttcac

SEQ ID NO: 80960 - DNA, 443 bp, Homo sapiens
acagagatagggtctccttatgttgcccaggctggtctcaaactcctaagctcaagcaatcctaacaccccagcctcccaaaagtgttgaaattacaggtgtgagccaccatgcccggccaagttaccacacttcactgtgtacatcctttccccaccccactaaactggaatatatacacccctcagatatagcagttctacctcattccttatttttgtatctaaccctaatgcttaatgtgtctgacagagatagtaggtgtttaatatgccaacatttttgagttaattgattattatagcaggaataatggtggtgggcaatgccatctaattaaatgaatggtggtgagagggatataagatagtacttgcccctgatgcatttcagactgaaaaaggttgggttaagggccatcagaaggatctgctaacttgctg

SEQ ID NO: 80961 - DNA, 946 bp, Homo sapiens
gaaaagacaagccccagtgcacaagtgctttccaaacttctgcttgcctgatgtttcttaatgtctccttggctgaagcaatggccaagcccacattcaagagctagagacagagcttatacctgttgatgggaggaagagcagagtcacattgcaaaggggtatgcctacaattttggaaggaattcgtggacattcggcaatttcttacagacatgtgacactttcgggctgaagcacttaagagccagtgtgccctgtccatttctgtcttctgtcctgtggatttggaagcatgtgttgacagaacaatgtcttatggtgaaggaagcctaaacccctgagtcattggatggaggagagcccatgttgacccataaaggacttcatatttgtccacgtctctgccctggttcaaatccttcagaggctccccatctaccacagggatgatctttctgaaatggatttgggcatgccagtctcctggctgaaacaggcctcctgggtccttgtcactcaaaggaaaaggcaaactcctcaagacttccacataatggccaccttcccaaaccaggctctcctactggcatctctctcctaaacctaacttccaaagcctacttggggttcagcctcacatgctggagtttccccatctctgagacttcattcaggccagttccttctgggcttcggaggggttctttgttcctaaagttccatactttaagaacctagcctgaaatatcagggttctgggactctgcaggtgaccacgagccactggtgctcctgcgaatggcccacgaaacctggtggcagaaaccccggcttcacacctaaaatggatctctatgagtgctacaatggagtccctggggcctgctggtagatcccgaatcggatgaagtcggaacaggagaggagcacaaaagcggaaaga

SEQ ID NO: 80962 - DNA, 528 bp, Homo sapiens
cctacgtttccgtgttcctcggttagtgcaatttcatgaacagcattgccatttggtggacgttacgcacaaatggctccccttcgctgcctctttcaatcttgcaggactaatgtgtcctgcttggatgaataatatccgacagtcagcgtgaaggcacaggcgtctgagcttggctcaggctgtgagctgtggggccttgggcaagctacttgaacttgccaaacttcagaatcctcatctgcaagatgggaagcattgtattatgtttgccacatgggctgttgcaggaataaaatgaagggttatatagacagtattagcacagtctccggtactcattaagagctcaataaatgtctgttgttgatagcagcattaaagcagagtaatagagggccaccctataaacactgtcaattgctgtaataagatccaccattcctaaacagcactgcggttgctcatccttcaggttgagtcagggtttgctgggggccctggcatccttgtagcaggaataaacac

SEQ ID NO: 80963 - DNA, 781 bp, Homo sapiens
gtcataggcgaaggcctctgggaaggtggaggccggcagggcggaggcggagcccgggaaggaaaggtggaaccagagggcagaaggcgggacctaaggagaggcgatttttacaggaagttgctgcctgtcctggacccatctggggattactactactggtggctgaacacaatggtcttcccagtcatgtataacctcatcatcctcgtgtgcagagcctgcttccccgacttgcagcacggttatctggtggcctggttggtgctggactacacgagtgacctgctatacctactagacatggtggtgcgcttccacacaggattcttggaacagggcatcctggtggtggacaagggtaggatctcgagtcgctacgttcgcacctggagtttcttcttggacctggcttccctgatgcccacagatgtggtctacgtgcggctgggcccgcacacacccaccctgaggctgaaccgctttctccgcgcgccccgcctcttcgaggccttcgaccgcacagagacccgcacagcttacccaaatgcctttcgcattgccaagctgatgctttacatttttgtcgtcatccattggaacagctgcctatactttgccctatcccggtacctgggcttcgggcgtgacgcatgggtgtacccggaccccgcgcagcctggctttgagcgcctgcggcgccagtacctctatagcttttacttctccacgctgatactgactacagtgggcgatacaccgccgccagccagggaagaag

SEQ ID NO: 80964 - DNA, 363 bp, Homo sapiens
cattctgtcctccacactcagggagatgtcttgataccagaggtaaacagcaagcacagacaaatgaatgtgctgccatgaaacctaacagttcataaggtgaggatccatttctcctatgcatctggcacaccgcagaagaattctgtctccaggagtgagtaactgcttgtgacagaactgtgtcccaaaccacaggctctgagattttgcagtggcacaggcagaaaagagcaggtgttctcagaaaaatcatctttaaataataaagcaagaagaaatgatcaaaaacacaggatactcaatagcccataaacataatacttctcacctgatgacattaaactctgaaaataacaaact

SEQ ID NO: 80965 - DNA, 386 bp, Homo sapiens
ttgaatgtgggccagacctagtgattgacctctaatgaatagaatatgacaaatggcacatatagctgtcagttctgagattaggttacagaagactgtggcttccttctttggctgttctgtcttgttcttttgcacactttctccgaaggaagccagctggcatgttgtgagcagctctatggaggggcatttgtgcaagaaactgagaatagcatctgacccacagccagtgaggagccacagtcctcagtccaacaacctgtgaggaaaggaattctgccaataactatatgaatgagcttggaagtgaatcttcccccagttgagctttcagatgagtcctcacctcaggcaacctcagtgtacctgcagcctcacgaaag

SEQ ID NO: 80966 - DNA, 2785 bp, Homo sapiens
  misc_feature (1048)..(1048): n is a, c, g, or t
  misc_feature (1464)..(1464): n is a, c, g, or t
  misc_feature (1834)..(1834): n is a, c, g, or t
  misc_feature (2455)..(2455): n is a, c, g, or t
caaaaaaagcccacaaaaatcagtaactcaaccccttttacaatagctgcaaaaaaaaaaaaaaaaaaaaggaatacctaatcattaagcactttggaaacaaattaatattttggaaagtattcagatttttttcctctatgtgaaaggtaaatcatgataaatttatttcttcttttgtctcttgggtcaagaaaagcactaatttaatgtcttctattagctgtatctttttttctgtcaccccagttttcatttcaggttaattgaagtgtgggttttccaaattggtttttgcttaggctcagtaaagttgatccattagctctgaatttctttctatacatacttcgaaagctagagttattgaaaggagtaattttttccatttaaatgtactttgcttattatttcccaggttctgatagcaatatactgctcagtgggaaaagatttctcctgtgattgactgttcctagcactgtgtttaggaaatttctttcaaatttttctcttaatatttttctagtgctgagatcctgtggtttgaaggacttttatttcagagacataggccatgcttagtggagactcattcacaatggaaacaaagcttagatgctgattatccaaataccccattttgaatatgagacttcttactgaaaggacaatttggagagatatatggtcaaatgactaggctaaatttatctatattcatttcctaaacaatgtaggtaaattgcacattttaaaatattccagcatctcaaaacatggcacctaccatcaatatttctaataatcattcacttgttcagcacatatacagcacttaaccacatgaatgctttgtaaaagtctaggggaacatgagaaataagtcagacacagtccctgttgtccccgtttacaatctactgtgagacacagataattaagaaggtgattataatcatgtgggaaaagcagttcttactgtagattcagacaagagattctagattttcaagggatctacatctcaaacccaaagaagtaaatncccaaagtgctgggattacaggtgtgggccaccatgccaggcctattttttgattttttggttatggccattcttccaggagtaaggtggtatcgcatcgtggttttgatttgcatttccctgattattagtgatgtcgagcattttttcatatgtttgttggccatttgtatatcctcttctgagaaatgtctattcatgtccttagcccactttttgatgggactgtttggttttttcttgctaatttgtttgagttcattgtagattctgggtattagtcctttgtcaggtgtatggattgtgaagattttctcccactctgtgggttgtctgtttactctgctgactgttccttttgctgtgcaaatgctctttggtttaattaagtctaaactatttatctttgtttttantgcatttgcttaaatgggttcttggtcatgaaatccttgcctaagccaatgtctagaagagtttttcctatgttgtctctagaagttttatagtttcaggtcttagatttaaattcctgatccatcttgagttgatttttgtataacctaagagatgtggatccagtttcattcttccacatgtgacttgccatttttcccagcatcatttgttgaatagggtgtctttcccctactttacgtttttgtttactttgttgaagatcagttggctgtaagtattagggtttatttcttggttctctattctgttccattggtctatgtgcctatttttatgccagtatgatactgttttggtgactatggncttatagtatactttgaaatcaggtaatgtgatgtctccagatttgttctttttgcttaatcttgctttggctgtgcgggctcttttttggttccatatgaattttaggattttttttttctaattctgtgaagaatgatagtgatatttggaggggaattgcattgaattgtagattgcttttggcagtatggtccgtttcacaatattgattctacctatccacgagcatgagcttggggtgtgtttccatttgtttgtgttgtctatgatttctttcagcagtgttttgtagttttccttaaagatgcccactgtcaccactcctcttcaacatagtactagaagtcctagccagagcaatcagacaagagaaagaaaaaaagggcatccaaattggtaaagaggaagtcaaactgttgctgtttgccgatgatatgattgtttagctagaaaaccctaaaggctccttcagaaagctcctggaactgataaaataattctgcaaagtttctggatacaaaatcaatgtacacaaatcagtagctcttctatacaccaacagcgaccaagctgagaatgaaatcaacaactcaggccgggcattgtctctcatgcctntaatctcagcactttgggaggctgaggtgagcagatcacctgaggtcaggagtttgagaccagtctggccaacacggtgaaaccctgtctctactaaaaatacaaaaattagcggggctgtgatggcgtgcctgtaatcgcagctacttgggaggctgaggcaggagaatcacttgaacccgggaggcagaggttgcagtgagctgagatcgtgccactgcactccagcctgggtaacagagcgaggctccatctcaaaacaacaacaacaacaaaacaacaaaaaaagcccacaaaaatcagtaactcaaccccttttacaatagctgc

SEQ ID NO: 80967 - DNA, 726 bp, Homo sapiens
ccatttttcaaaggcagaagagaagaaagttttggaaagcaaaaaacttacaacacataccattaaagaaaggcaagagagttgttagctaaactgatctgtctgcatgatagacagtttaaaaattcatcccagttccatatgctggtaacttacaggagatatacctgtattatagaaagacaatctgagatacagctgtaaccaaggtgatgacaattgtctctgctgtgtggttcaaagaacattcccttaggtgttgacatcagtgaactcagttcttggatgtaaacataaaggcttcatcctgacagtaagctatgaggattacatgctacattgcttcttaaagtttcatcaactgtattccatcattctgctttagctttcatctctaccaatagctacttgtggtacaataaattatttttaagaagtaaaactctggggctggacgctgtggctcacacctgtaatctcagcactttgggaggccgaggcggggagatcacctgaggtgaggagttcgagaccagcctggccaacatggtgaaaccatgtctctactaaaaatacaaaaaattagccaggcgtggtgacagtggcacctgtaatcccagctacttggggggctgaggcagaagtttgaacccaggaaacaggttacagtaggccaaaattgcgccactgcactccagcctaggcgacaacagcaagactgtgtcc

SEQ ID NO: 80968 - DNA, 223 bp, Homo sapiens
  misc_feature (122)..(122): n is a, c, g, or t
gacagcaataaacccaggttaggcaggggcagcacctgtgggtctgggctccacaccatgcctggacagtgcaattagaggagtgagaggcattgagatgatcctggtcctcaccaggtatnaccagcatctgagcaggggctaagcagcaaattccatgtggtttcgtgtggcatggacatgactgggagcagggccagcctgctcctgagacccccctcat

SEQ ID NO: 80969 - DNA, 114 bp, Homo sapiens
aacaaacaaacaaataatcagatacctgagtgaagtgggttatgggggtggtagggacaggactcaccttccttgagggacccagaagacttgtgaggcctatgaatgatggct

SEQ ID NO: 80970 - DNA, 537 bp, Homo sapiens
gggaaaattgataagacgacttgaggcactgatgatgctctcaactttgggaagtagcagaaggccccactcctgggcaacatggcaaaaccccatcaaaaaaaaatgaaagaaagaaagaaaaattagccaggcatggtggtgcacacctgtagtcccagatactcgggaggctgaggtgggaggatcacctgagcccagggaggctgaggctgcagtgagccatgatcatgccactgcactgtagcctgggcaacagagtgagaccctgccaacaaagcaggaaaaaaataaaagcctttctgaggaggtggtaaggagccaaccctgcaaaggcttagggaatagtgctgcagacagaagggatgcgcaagtgaaggtcttgaggctggaaagagtttgatgtgtttcagaaactgaaatgaggccagtgtaaaggtatggaggggaagacaggaaggaactgggtcctgtgggcctcagtaagccagagttagagagttggggctttgggtattctcctttgagcagtaggag

SEQ ID NO: 80971 - DNA, 869 bp, Homo sapiens
gggactacaggcgtgcgccaccttgcccggctaatttttctatttttttgtagagacgggttttcgccatgttgcctcagctaaaatgtctcaaaatctcctcaactaaaatgtctcaaaatctcagcctcccacagtgctggatgacaggagtgagccagccagcatcatgcatccctgtgcgccctgccagggctggcgggaccctcccacccttgttgatgggcagtgctagattatttgtcacgaatcatcccctacaaacaatgatttccctccgcttgcactctctaactagagccatggatggccaaatgctttttgggaagaagccaatggattctcctcggctctgcctgcaagtaacaaaggcttttgactccactccctccacgctgtcagatcgccattccccttcaggaaaacttcgaatggggctgtggacctcactccccaaaatgtcacaacacatgtgcagcaccccgacattcagaaccatgaagggagaaggtggctggtgtctgtaggagggacaggtgtccgtcctgggccagtgtcaggccagcaggtgcagggacagatgggccatccacattctccaagattagcttctacctcaaccagcacacctcagcaagatgccaggattgggctccacaggcagccatgaaatgggtttctggaggaaagatcagcacaggaaaaggggtcagtcaggtcgcaggcaaagtgctagggaaatcccatctcatgcagagctcccaccaagaggagcgtgagttgtgctgtcctggctcgagaagaaggcagcacaggatctgtagctgagggtggccctcccaccaggggacgctggtcagtgcctctcc

SEQ ID NO: 80972 - DNA, 555 bp, Homo sapiens
accattacagctacaggagacggaagtaggggagagagaaggcagagtggcacaattagcaggaagcagaaaagaactgacaattacaggcaagtgctgagcccagggaggcaggatgcagctcccatcaaaggccagaggggcaatgcagaaaggaggaatgaggcatccggagggcgtggattttaggagcaactgctgtgcaaataagcttgcagaaagaaggtgagaggtctaactacaaatgtaactgcaaaaaggtgaaagaggccaggagttcaagaccagcctggccaacatggcgaaaccctgtgtctactaaaaatacaaaagaattagccgagcgtggtggtgtatgcctgtagccccagctgccagggaggctgaggcaaaagattgcttgaacccaggaggtagaggctgtagtgagctgagatcacaccactgcactccagcctgggagacagactctgaaaaaatactactaataaaaaagaacaaataggttctaacgacaaatttatttctcacttatagaggctgggaagtctgaag

SEQ ID NO: 80973 - DNA, 355 bp, Homo sapiens
ggcagagaggtgctcgagtgctctggacgcccaaggagtttaactctgactggccagcagagggcagggacaggaagggtgtctccatgcaagcgtgccgattttacaagatggcgtccagtttggtcaaaacagcccagaaggcttgcctcaggaacaggcctgctgcggacacccccaggagtgagggtacaggagaccatggaaaggcatctaagatgacaagcttggctgggggaacaagacaatcctcaaggtgagaattacaacttccagcattattgtagacatagcataaaaaacattcatcaaacccactgccaaaggaattgtccttaaatacaagtccgtaaac

SEQ ID NO: 80974 - DNA, 135 bp, Homo sapiens
actggatggacggtcactgatggcctggccactgccactggtccagccatgagtctgggctggggacgcccacacctttggatattgactcagcacagggttactgatcccctgggttaagagggcaccccaggc

SEQ ID NO: 80975 - DNA, 1907 bp, Homo sapiens
tccggcgtccttccctctcagggaagctccagctgtccctcccgcagttggccctgtggtgttccgaagccggttacgtacggcctgagggccaggcgaacctcaggctctttgtcctactaaaaagcgcacgacaatggtagaagcagatcatcctggcaagcttttcattggtggcctcaatagagaaaccaatgagaagatgcttaaagcagtatttgggaaacatggtcccatatcagaagttcttttgataaaggatcgaaccagcaaatccagaggctttgcatttattacttttgagaaccctgcagatgctaagaatgctgccaaagatatgaatggaaagtctttgcatggaaaagcaataaaagtagaacaagccaagaaaccatcttttcaaagtggtggtaggcggagaccaccagcttcttcgagaaacagaagcccttcaggaagtctgagatctgcaagaggaagccgtggaggaacaagagggtggcttccctcacatgaagggcacctggatgatggtggatacactcctgatctcaagatgagttattctaggggactcattccagttaaaagaggtccatcttcaagaagtggaggtcctcctccgaaaaaatctgctccttctgctgtggcaagaagcaatagttggatgggaagccaaggtcccatgtcacaaagaagagagaattatggagttcctccacgcagagcgacaatatcttcctggagaaatgatcgcatgtcaacaagacatgatggttatgcaactaacgatggaaatcatccaagttgccaagaaacgagggattatgctccaccatctagaggctatgcataccgtgataatggtcattctaatcgggatgaacattcctctagaggatatagaaatcatcgaagttcccgagaaactagggattatgctccaccatctagaggccatgcataccgtgattatggtcattctcgtcgggatgaaagttattctagaggatacagaaatcgtcgaagttcccgagaaactagggagtatgctccaccatctagaggccatggataccgtgattatggtcattctcgtcgacatgaaagttattctagaggatatagaaatcatccaagttcccgagaaaccagggattatgctccaccacatagagactatgcataccgtgattatggtcattctagttgggatgaacattcctctagaggatatagttatcatgatggctacggtgaggcccttggtagagatcattctgaacatctaagtggaagttcttatagagatgcacttcagagatacgggacctctcatggtgcaccacctgcaagagggcctcggatgtcttatggtggaagcacctgccacgcatatagtaatacacgagatagatatggcagaagttgggagagttactcgagctgtggtgattttcattattgtgatcgtgagcatgtttgcagaaaagaccaaaggaatccgccttctctgggtagggtgctccctgatcctcgtgaagcatgtggtagctcaagttatgtggcatctatagtagatggtggggagagtcgatctgaaaaaggagactcgagcagatattaaagcaagcattgaaaataatagttattgcataccaatccttgtttgcaaatcaaaaattgaaatgttatttctgcattgttacctgcatattactgaaagaaacatgttggttttgtggagagaggtagatactaacttcctccatgaattttttgaggtattcaaaggaaaaggaattgttttcaaagtaatttcatacttgttgatgctatttgaaaagtgtttagatgtaatatctaccttaaaattttcacaataaaatttgacatgtactgcaaga

SEQ ID NO: 80976 - DNA, 220 bp, Homo sapiens
gcggccgcctactactactactgctcgaattcaagcttctaacgatgtacggggacatgacctttactgtgttagctctttgaatgttcttgaaattttagactttctttgtaaacaaatgatatgtccttatcattgtataaaagctgttatgtgcaacagtgtggagattccttgtctgatttaataaaatacttaaaatacttaaacactgaaaaaa

SEQ ID NO: 80977 - DNA, 967 bp, Homo sapiens
tagaggatcccggacgagcatctttacatattctggaatcccagcagtttctttctgtttttgcgaggtaagtctgttcatttaaatgacaaatggagagaggctctctaaaaggaagtgatctgtatttgggaatagggcattgcaatgggaatgcctgtgctatagtcaactatgtacatattcagaggagtaaaggaaaacaagtttttaaggacaaatgacgaggattacaaaattactttgaggtaattattcttggctaccaagatcaataacaaggatgacaccagtccaaggttgacaggcagttgctaggcagattttctcacgagagaagttttttggtgcaaggttgcagtggcctttgtgtaaggttgtagtttttgtaaaaaggaaaaaaaaacccttaatccttgttatcagacatacaagggtgagacccttctcttcagggttgcatttttgttaacactagtgactccattttgattttgacaacttgcacatatcttagttgttgggttttttttgtttgttttttgttttgttttttttttttttttgacaatggtgacttgctctgtcacccaggctggggtgcagtggcccgatcatggctcactgcagcctcaagcagtcctcccccttcagcctccaaactgtttggattataggcaagagctacttactacacctggccatggatcttcttgtgtcaactttgagaccaaatttactgcagtgcttaaaatgttttaagaagttatacacatgtgctggatgtggtagctcacgcctgtaatcctgtagcaggacaagccgcagacaaatcccctcagacaccgagttaaagaaggaagggctttatttggctgggagctttggcaagactcacgtctccaaaaactgagctccccgagtgagcaattcctgacctttttaagggcttacaactaagggagtc

SEQ ID NO: 80978 - DNA, 274 bp, Homo sapiens
aaatagaggatcccctaaatggctgttatggctgtggggaaggagagtcccctgaaggtctgacacgtctgcctacccattcgtggtgatcaattaaatgtaggtatgaataagttcgaagctccgtgagtgaaccatcattataaacgtgatgatcagctgtttgtcatagggcagttggaaacggcctcctagggaaaagttcatagggtctcttcaggttcttagtgtcacttacctagatttacagccattaggtacagccatttaggta

SEQ ID NO: 80979 - DNA, 1444 bp, Homo sapiens
atactgtgcttttacctttctactgatgtgctaattctagaaaagtttagaagctgattatataagtcctttcttcctcttttttcttttttaaagatcactatgttgtagttggggcccagagagatgcatggggccctggagctgcaaaatccggtgtaggcacagctctcctattgaaacttgcccagatgttctcagatatggtcttaaaaggtagagtacaaattttgattcttttgaatattggtgcactgcatacagttctagatgttatactgtgctttgctcactttgcctgcattcctgtggttctcatgctagactctagttcttaaatacaaggcagattgtcttttgttgtagctgccttttcctttgaaacagctttccataaagtgtcttaactgtgctagaaatcaccagtttctttgagacagtggagttactgagccctagtgcttagtgtggtggatccagagtgataaggtggatcatagtccctaagcaatctatttgaaagcagtagcatacctctctactcatgtactgaggcctaacagctattgaaattttgttctgtttattcatttattcattttttgagacagagtttcactctgttgcccaggctggagtgcagtggtgtgatctcacttagctcactgcaacctctgcctcccgacttcaagcaattctcctgcctcagcctcctgagtagctgggattacaggcacccacaaccacacccggccaatttttgtatttttactagagacagggtttcgccatgttggccaggctagtctcctgacctcaagtgattcacccgcctcagcctcccaaaatgctgctagtgagccaccgtgccctgcctcttttgtttatttttgagcctttctgtcctactttccactctttcacactcctacccacccacacattcaaaatcacgtcacattcttgaatctttgggtcttagggcaaactgcaatgcttaactttaatacagagtacattaatggagaaaaagatacagtgagggaagtgggagggatggagggcagtgtgatacatgtaacctcaaaaggtgctgtcacaaatatagtttctctgcaaactcttcttgtaacttaaatttgtgaatttttattttattttagaattatttttttaaaaatccaatgtttggatttacctctgaagatttttctcaagatgtgcatcatcatgcttacactgttttcaatgatctctgggtccagaagttaaggaactccaagaatgaaattgtgaaagggtgactactggcccctgctatgtactcaaaatcttatttgcagatctcctatcttgctctttgtaggttacttaaaaaaaaattattcctattcttttattcttttacctggggtctcaaaaaaagattttgttagtttttttt

SEQ ID NO: 80980 - DNA, 338 bp, Homo sapiens
tgctgggattacaggggtgagccacttcgccgggctgagagtaagttttgtttatatgtcctcttaatctgtaacttcactggacaggagtaaaccctgggcaaggaacaataactcagaacttacgcctgctttctgattctaggaatatggaaggagactgtccctctgactggaaaacagactctacatgtaggatggtaacctcagaaagcaagaatgtgaagctcactgtgagcaatgtgctgaaagagataaaaattcttaacatctttggagttattaaaggctttgtagaaccaggtaaagaccgccccccccccccgccccgctttttt

SEQ ID NO: 80981 - DNA, 869 bp, Homo sapiens
tcccgggttcatgccattctcctgcctcagcctcccgagtagctgggactacaggtgcccgccaccacacccggctaattttttgtatttttagtagagacggggtttcaactgtgccagccaagatggtctcgatctcctggaccttgtgatccacccgtctgggcctcccaaagtcctgggattacaggcgtgagccaccgtgcccggcctaactgctctgatatttttaaaaaaggtgacttggattaaagtatgcaaactcaaggagtagtacgagcccacttgagtgaagttagcttagttgctaaagagcttgataccaaaattacttttgtttacttgatgaatgggatagttgttgcacagggccactgatctagattactgtcttatttgtcaagtacttatagttgtagaagtagcagtgtgaaaattatcggaatggagaaggggcaatgataaaacaatttattttcaggtaccagcaacttcaaggtttctgccagcccactgttgtatacgcttattgagaaaacaatgcaaaatgtgagtatatacctcattacaaaaatgtatgacttaatttttgttgaatcaacctgagataaaaaacactgatatgtaaaccgtagtcagtaacaaaaaataggaattgagaataaattttatagcagcgttatttaagggatacttgcctattgaaccatatgagatgagggctccaatcttaaagaatatgttgtttatttaggaatatataacaaaatgccatgaggcctaagctgtagtgcaggggcccacaggggattgtctatagagtcacaatgctaaggaaggcttaaatcaacttgaactatactttgaga

SEQ ID NO: 80982 - DNA, 1377 bp, Homo sapiens
tctcaaacttctgggctcaagtgatcctcccagctcggcctcccaaagtgttgggattgcagttgtgaactaccccacccggcctaggcccacttttaaaatgttaattaagaagaaaacattttttcctcaccataactaaaggaactgacaacatgagcctagttagtaataacttaaagttgagattgttttaactatcataaataatttcttttcaagaagatataatacaagttttttatttaaaaattgttatagagtaacatgttagtgactagcctgaataaataagttccaaaaggttagttttaatgataatttcttatcttacaggtgaagcatccggttactgggcaatttctatatcaggacagcaactgggccagcaaagttgagaaactcactttagacaatgctgctttccctttccttgcatattctggaatcccagcagtttctttctgtttttgcgaggtaagtctgttcatttaaatgacaaatggagagaggctctctaaaaggaagtgatctgtatttgggaatagggcattgcaatgggaatgcctgtgctatagtcaactatgtacatattcagaggagtaaaggaaaacaagtttttaaggacaaatgacgaggattacaaaattactttgaggtaattattcttggctaccaagatcaataacaaggatgacaccagtccaaggttgacaggcagttgctaggcagattttctcacgagagaagttttttggtgcaaggttgcagtggcctttgtgtaaggttgtagtttttgtaaaaaggaaaaaaaaacccttaatccttgttatcagacatacaagggtgagacccttctcttcagggttgcatttttgttaacactagtgactccattttgattttgacaacttgcacatatcttagttgttgggttttttttgtttgttttttgttttgttttttttttttttttgacaatggtgacttgctctgtcacccaggctggggtgcagtggcccgatcatggctcactgcagcctcaagcagtcctcccccttcagcctccaaactgtttggattataggcaagagctacttactacacctggccatggatcttcttgtgtcaactttgagaccaaatttactgcagtgcttaaaatgttttaagaagttatacacatgtgctggatgtggtagctcacgcctgtaatcctgtagcaggacaagccgcagacaaatcccctcagacaccgagttaaagaaggaagggctttatttggctgggagctttggcaagactcacgtctccaaaaactgagctccccgagtgagcaattcctgacctttttaagggcttacaactaagggagtc

SEQ ID NO: 80983 - DNA, 1076 bp, Homo sapiens
cagctaaagaatttattttggatggggggactagcacgatagaacagtctattctttaaaacactttctaaagacacattctttgtctttgcagtgagaaactcactttagacaatgctgctttccctttccttgcatattctggaatcccagcagtttctttctgtttttgcgaggtaagtctgttcatttaaatgacaaatggagagaggctctctaaaaggaagtgatctgtatttgggaatagggcattgcaatgggaatgcctgtgctatagtcaactatgtacatattcagaggagtaaaggaaaacaagtttttaaggacaaatgacgaggattacaaaattactttgaggtaattattcttggctaccaagatcaataacaaggatgacaccagtccaaggttgacaggcagttgctaggcagattttctcacgagagaagttttttggtgcaaggttgcagtggcctttgtgtaaggttgtagtttttgtaaaaaggaaaaaaaaacccttaatccttgttatcagacatacaagggtgagacccttctcttcagggttgcatttttgttaacactagtgactccattttgattttgacaacttgcacatatcttagttgttgggttttttttgtttgttttttgttttgttttttttttttttttgacaatggtgacttgctctgtcacccaggctggggtgcagtggcccgatcatggctcactgcagcctcaagcagtcctcccccttcagcctccaaactgtttggattataggcaagagctacttactacacctggccatggatcttcttgtgtcaactttgagaccaaatttactgcagtgcttaaaatgttttaagaagttatacacatgtgctggatgtggtagctcacgcctgtaatcctgtagcaggacaagccgcagacaaatcccctcagacaccgagttaaagaaggaagggctttatttggctgggagctttggcaagactcacgtctccaaaaactgagctccccgagtgagcaattcctgacctttttaagggcttacaactaagggagtc

SEQ ID NO: 80984 - DNA, 441 bp, Homo sapiens
ttcgagctcggactccgttggccaggctggtcttgaactcctgacctcaggtgatccacccatctcagcctcccaaagtgctaggattacaggtgtgagccaccccgcccagcagtatgtgtcacttttgtctactcagaacatagtggttcgtacttataattgcagcactttgggaggccaaggtgggaggattgttagaggccaggagttcaagaccagcctgggcaacatagggtgaccttgtctctacaaaaagaaaaaaaaagaattatgtatataacaaactttaaaaaggatcccacttaatttagctgtcatgtaaactatggttaaataccttttctagaaaagtgataatgtattttaaaaatctaatgtatcatttagcctggtaataggaagctcactaatctgatacagtagtatctttttcaataa

SEQ ID NO: 80985 - DNA, 5595 bp, Homo sapiens
cagtgcgcccatcgcgcggctcctcggggcacctgctgccttggcgccttttcccttggccttcgcctcgcccgcagcgccctccgcatagggccccgcccgctgcgcgcgcatccccgccccccgggcgatctgtcagagcacctcgcgagcgtacgtgcctcaggaagtgacgcacagcccccctgggggccgggggcggggccaggctataaaccgccggttaggggccgccatcccctcagagcgtcgggatatcgggtggcggctcgggacggaggacgcgctagtgtgagtgcgggcttctagaactacaccgaccctcgtgtcctcccttcatcctgcggggctggctggagcggccgctccggtgctgtccagcagccatagggagccgcacggggagcgggaaagcggtcgcggccccaggcggggcggccgggatggagcggggccgcgagcctgtggggaaggggctgtggcggcgcctcgagcggctgcaggttcttctgtgtggcagttcagaatgatggatcaagctagatcagcattctctaacttgtttggtggagaaccattgtcatatacccggttcagcctggctcggcaagtagatggcgataacagtcatgtggagatgaaacttgctgtagatgaagaagaaaatgctgacaataacacaaaggccaatgtcacaaaaccaaaaaggtgtagtggaagtatctgctatgggactattgctgtgatcgtctttttcttgattggatttatgattggctacttgggctattgtaaaggggtagaaccaaaaactgagtgtgagagactggcaggaaccgagtctccagtgagggaggagccaggagaggacttccctgcagcacgtcgcttatattgggatgacctgaagagaaagttgtcggagaaactggacagcacagacttcaccagcaccatcaagctgctgaatgaaaattcatatgtccctcgtgaggctggatctcaaaaagatgaaaatcttgcgttgtatgttgaaaatcaatttcgtgaatttaaactcagcaaagtctggcgtgatcaacattttgttaagattcaggtcaaagacagcgctcaaaactcggtgatcatagttgataagaacggtagacttgtttacctggtggagaatcctgggggttatgtggcgtatagtaaggctgcaacagttactggtaaactggtccatgctaattttggtactaaaaaagattttgaggatttatacactcctgtgaatggatctatagtgattgtcagagcagggaaaatcacctttgcagaaaaggttgcaaatgctgaaagcttaaatgcaattggtgtgttgatatacatggaccagactaaatttcccattgttaacgcagaactttcattctttggacatgctcatctggggacaggtgacccttacacacctggattcccttccttcaatcacactcagtttccaccatctcggtcatcaggattgcctaatatacctgtccagacaatctccagagctgctgcagaaaagctgtttgggaatatggaaggagactgtccctctgactggaaaacagactctacatgtaggatggtaacctcagaaagcaagaatgtgaagctcactgtgagcaatgtgctgaaagagataaaaattcttaacatctttggagttattaaaggctttgtagaaccagatcactatgttgtagttggggcccagagagatgcatggggccctggagctgcaaaatccggtgtaggcacagctctcctattgaaacttgcccagatgttctcagatatggtcttaaaagatgggtttcagcccagcagaagcattatctttgccagttggagtgctggagactttggatcggttggtgccactgaatggctagagggatacctttcgtccctgcatttaaaggctttcacttatattaatctggataaagcggttcttggtaccagcaacttcaaggtttctgccagcccactgttgtatacgcttattgagaaaacaatgcaaaatgtgaagcatccggttactgggcaatttctatatcaggacagcaactgggccagcaaagttgagaaactcactttagacaatgctgctttccctttccttgcatattctggaatcccagcagtttctttctgtttttgcgaggacacagattatccttatttgggtaccaccatggacacctataaggaactgattgagaggattcctgagttgaacaaagtggcacgagcagctgcagaggtcgctggtcagttcgtgattaaactaacccatgatgttgaattgaacctggactatgagaggtacaacagccaactgctttcatttgtgagggatctgaaccaatacagagcagacataaaggaaatgggcctgagtttacagtggctgtattctgctcgtggagacttcttccgtgctacttccagactaacaacagatttcgggaatgctgagaaaacagacagatttgtcatgaagaaactcaatgatcgtgtcatgagagtggagtatcacttcctctctccctacgtatctccaaaagagtctcctttccgacatgtcttctggggctccggctctcacacgctgccagctttactggagaacttgaaactgcgtaaacaaaataacggtgcttttaatgaaacgctgttcagaaaccagttggctctagctacttggactattcagggagctgcaaatgccctctctggtgacgtttgggacattgacaatgagttttaaatgtgatacccatagcttccatgagaacagcagggtagtctggtttctagacttgtgctgatcgtgctaaattttcagtagggctacaaaacctgatgttaaaattccatcccatcatcttggtactactagatgtctttaggcagcagcttttaatacagggtagataacctgtacttcaagttaaagtgaataaccacttaaaaaatgtccatgatggaatattcccctatctctagaattttaagtgctttgtaatgggaactgcctctttcctgttgttgttaatgaaaatgtcagaaaccagttatgtgaatgatctctctgaatcctaagggctggtctctgctgaaggttgtaagtggtcgcttactttgagtgatcctccaacttcatttgatgctaaataggagataccaggttgaaagaccttctccaaatgagatctaagcctttccataaggaatgtagctggtttcctcattcctgaaagaaacagttaactttcagaagagatgggcttgttttcttgccaatgaggtctgaaatggaggtccttctgctggataaaatgaggttcaactgttgattgcaggaataaggccttaatatgttaacctcagtgtcatttatgaaaagaggggaccagaagccaaagacttagtatattttcttttcctctgtcccttcccccataagcctccatttagttctttgttatttttgtttcttccaaagcacattgaaagagaaccagtttcaggtgtttagttgcagactcagtttgtcagactttaaagaataatatgctgccaaattttggccaaagtgttaatcttaggggagagctttctgtccttttggcactgagatatttattgtttatttatcagtgacagagttcactataaatggtgtttttttaatagaatataattatcggaagcagtgccttccataattatgacagttatactgtcggttttttttaaataaaagcagcatctgctaataaaacccaacagatactggaagttttgcatttatggtcaacacttaagggttttagaaaacagccgtcagccaaatgtaattgaataaagttgaagctaagatttagagatgaattaaatttaattaggggttgctaagaagcgagcactgaccagataagaatgctggttttcctaaatgcagtgaattgtgaccaagttataaatcaatgtcacttaaaggctgtggtagtactcctgcaaaattttatagctcagtttatccaaggtgtaactctaattcccattttgcaaaatttccagtacctttgtcacaatcctaacacattatcgggagcagtgtcttccataatgtataaagaacaaggtagtttttacctaccacagtgtctgtatcggagacagtgatctccatatgttacactaagggtgtaagtaattatccgggaacagtgtttcccataattttcttcatgcaatgacatcttcaaagcttgaagatcgttagtatctaacatgtatcccaactcctataattccctatcttttagttttagttgcagaaacattttgtggtcattaagcattgggtgggtaaattcaaccactgtaaaatgaaattactacaaaatttgaaatttagcttgggtttttgttacctttatggtttctccaggtcctctacttaatgagatagtagcatacatttataatgtttgctattgacaagtcattttaactttatcacattatttgcatgttacctcctataaacttagtgcggacaagttttaatccagaattgaccttttgacttaaagcagagggactttgtatagaaggtttgggggctgtggggaaggagagtcccctgaaggtctgacacgtctgcctacccattcgtggtgatcaattaaatgtaggtatgaataagttcgaagctccgtgagtgaaccatcattataaacgtgatgatcagctgtttgtcatagggcagttggaaacggcctcctagggaaaagttcatagggtctcttcaggttcttagtgtcacttacctagatttacagcctcacttgaatgtgtcactactcacagtctctttaatcttcagttttatctttaatctcctcttttatcttggactgacatttagcgtagctaagtgaaaaggtcatagctgagattcctggttcgggtgttacgcacacgtacttaaatgaaagcatgtggcatgttcatcgtataacacaatatgaatacagggcatgcattttgcagcagtgagtctcttcagaaaacccttttctacagttagggttgagttacttcctatcaagccagtacgtgctaacaggctcaatattcctgaatgaaatatcagactagtgacaagctcctggtcttgagatgtcttctcgttaaggagatgggccttttggaggtaaaggataaaatgaatgagttctgtcatgattcactattctagaacttgcatgacctttactgtgttagctctttgaatgttcttgaaattttagactttctttgtaaacaaatgatatgtccttatcattgtataaaagctgttatgtgcaacagtgtggagattccttgtctgatttaataaaatacttaaacactgaaaaaaaaaacaacaaaaacgaaaattgcggggcttcatatgcagggggtgggaacaaaaggaggttttgaatgtggccatgtggcatagggtgtttcttgaacccaagttttttggttaaagagggg

SEQ ID NO: 80986 - DNA, 5542 bp, Homo sapiens
cagtgcgcccatcgcgcggctcctcggggcacctgctgccttggcgccttttcccttggccttcgcctcgcccgcagcgccctccgcatagggccccgcccgctgcgcgcgcatccccgccccccgggcgatctgtcagagcacctcgcgagcgtacgtgcctcaggaagtgacgcacagcccccctgggggccgggggcggggccaggctataaaccgccggttaggggccgccatcccctcagagcgtcgggatatcgggtggcggctcgggacggaggacgcgctagtgtgagtgcgggcttctagaactacaccgaccctcgtgtcctcccttcatcctgcggggctggctggagcggccgctccggtgctgtccagcagccatagggagccgcacggggagcgggaaagcggtcgcggccccaggcggggcggccgggatggagcggggccgcgagcctgtggggaaggggctgtggcggcgcctcgagcggctgcaggttcttctgtgtggcagttcagaatgatggatcaagctagatcagcattctctaacttgtttggtggagaaccattgtcatatacccggttcagcctggctcggcaagtagatggcgataacagtcatgtggagatgaaacttgctgtagatgaagaagaaaatgctgacaataacacaaaggccaatgtcacaaaaccaaaaaggtgtagtggaagtatctgctatgggactattgctgtgatcgtctttttcttgattggatttatgattggctacttgggctattgtaaaggggtagaaccaaaaactgagtgtgagagactggcaggaaccgagtctccagtgagggaggagccaggagaggacttccctgcagcacgtcgcttatattgggatgacctgaagagaaagttgtcggagaaactggacagcacagacttcaccagcaccatcaagctgctgaatgaaaattcatatgtccctcgtgaggctggatctcaaaaagatgaaaatcttgcgttgtatgttgaaaatcaatttcgtgaatttaaactcagcaaagtctggcgtgatcaacattttgttaagattcaggtcaaagacagcgctcaaaactcggtgatcatagttgataagaacggtagacttgtttacctggtggagaatcctgggggttatgtggcgtatagtaaggctgcaacagttactggtaaactggtccatgctaattttggtactaaaaaagattttgaggatttatacactcctgtgaatggatctatagtgattgtcagagcagggaaaatcacctttgcagaaaaggttgcaaatgctgaaagcttaaatgcaattggtgtgttgatatacatggaccagactaaatttcccattgttaacgcagaactttcattctttggacatgctcatctggggacaggtgacccttacacacctggattcccttccttcaatcacactcagtttccaccatctcggtcatcaggattgcctaatatacctgtccagacaatctccagagctgctgcagaaaagctgtttgggaatatggaaggagactgtccctctgactggaaaacagactctacatgtaggatggtaacctcagaaagcaagaatgtgaagctcactgtgagcaatgtgctgaaagagataaaaattcttaacatctttggagttattaaaggctttgtagaaccagatcactatgttgtagttggggcccagagagatgcatggggccctggagctgcaaaatccggtgtaggcacagctctcctattgaaacttgcccagatgttctcagatatggtcttaaaagatgggtttcagcccagcagaagcattatctttgccagttggagtgctggagactttggatcggttggtgccactgaatggctagagggatacctttcgtccctgcatttaaaggctttcacttatattaatctggataaagcggttcttggtaccagcaacttcaaggtttctgccagcccactgttgtatacgcttattgagaaaacaatgcaaaatgtgaagcatccggttactgggcaatttctatatcaggacagcaactgggccagcaaagttgagaaactcactttagacaatgctgctttccctttccttgcatattctggaatcccagcagtttctttctgtttttgcgaggacacagattatccttatttgggtaccaccatggacacctataaggaactgattgagaggattcctgagttgaacaaagtggcacgagcagctgcagaggtcgctggtcagttcgtgattaaactaacccatgatgttgaattgaacctggactatgagaggtacaacagccaactgctttcatttgtgagggatctgaaccaatacagagcagacataaaggaaatgggcctgagtttacagtggctgtattctgctcgtggagacttcttccgtgctacttccagactaacaacagatttcgggaatgctgagaaaacagacagatttgtcatgaagaaactcaatgatcgtgtcatgagagtggagtatcacttcctctctccctacgtatctccaaaagagtctcctttccgacatgtcttctggggctccggctctcacacgctgccagctttactggagaacttgaaactgcgtaaacaaaataacggtgcttttaatgaaacgctgttcagaaaccagttggctctagctacttggactattcagggagctgcaaatgccctctctggtgacgtttgggacattgacaatgagttttaaatgtgatacccatagcttccatgagaacagcagggtagtctggtttctagacttgtgctgatcgtgctaaattttcagtagggctacaaaacctgatgttaaaattccatcccatcatcttggtactactagatgtctttaggcagcagcttttaatacagggtagataacctgtacttcaagttaaagtgaataaccacttaaaaaatgtccatgatggaatattcccctatctctagaattttaagtgctttgtaatgggaactgcctctttcctgttgttgttaatgaaaatgtcagaaaccagttatgtgaatgatctctctgaatcctaagggctggtctctgctgaaggttgtaagtggtcgcttactttgagtgatcctccaacttcatttgatgctaaataggagataccaggttgaaagaccttctccaaatgagatctaagcctttccataaggaatgtagctggtttcctcattcctgaaagaaacagttaactttcagaagagatgggcttgttttcttgccaatgaggtctgaaatggaggtccttctgctggataaaatgaggttcaactgttgattgcaggaataaggccttaatatgttaacctcagtgtcatttatgaaaagaggggaccagaagccaaagacttagtatattttcttttcctctgtcccttcccccataagcctccatttagttctttgttatttttgtttcttccaaagcacattgaaagagaaccagtttcaggtgtttagttgcagactcagtttgtcagactttaaagaataatatgctgccaaattttggccaaagtgttaatcttaggggagagctttctgtccttttggcactgagatatttattgtttatttatcagtgacagagttcactataaatggtgtttttttaatagaatataattatcggaagcagtgccttccataattatgacagttatactgtcggttttttttaaataaaagcagcatctgctaataaaacccaacagatactggaagttttgcatttatggtcaacacttaagggttttagaaaacagccgtcagccaaatgtaattgaataaagttgaagctaagatttagagatgaattaaatttaattaggggttgctaagaagcgagcactgaccagataagaatgctggttttcctaaatgcagtgaattgtgaccaagttataaatcaatgtcacttaaaggctgtggtagtactcctgcaaaattttatagctcagtttatccaaggtgtaactctaattcccattttgcaaaatttccagtacctttgtcacaatcctaacacattatcgggagcagtgtcttccataatgtataaagaacaaggtagtttttacctaccacagtgtctgtatcggagacagtgatctccatatgttacactaagggtgtaagtaattatccgggaacagtgtttcccataattttcttcatgcaatgacatcttcaaagcttgaagatcgttagtatctaacatgtatcccaactcctataattccctatcttttagttttagttgcagaaacattttgtggtcattaagcattgggtgggtaaattcaaccactgtaaaatgaaattactacaaaatttgaaatttagcttgggtttttgttacctttatggtttctccaggtcctctacttaatgagatagtagcatacatttataatgtttgctattgacaagtcattttaactttatcacattatttgcatgttacctcctataaacttagtgcggacaagttttaatccagaattgaccttttgacttaaagcagagggactttgtatagaaggtttgggggctgtggggaaggagagtcccctgaaggtctgacacgtctgcctacccattcgtggtgatcaattaaatgtaggtatgaataagttcgaagctccgtgagtgaaccatcattataaacgtgatgatcagctgtttgtcatagggcagttggaaacggcctcctagggaaaagttcatagggtctcttcaggttcttagtgtcacttacctagatttacagcctcacttgaatgtgtcactactcacagtctctttaatcttcagttttatctttaatctcctcttttatcttggactgacatttagcgtagctaagtgaaaaggtcatagctgagattcctggttcgggtgttacgcacacgtacttaaatgaaagcatgtggcatgttcatcgtataacacaatatgaatacagggcatgcattttgcagcagtgagtctcttcagaaaacccttttctacagttagggttgagttacttcctatcaagccagtacgtgctaacaggctcaatattcctgaatgaaatatcagactagtgacaagctcctggtcttgagatgtcttctcgttaaggagatgggccttttggaggtaaaggataaaatgaatgagttctgtcatgattcactattctagaacttgcatgacctttactgtgttagctctttgaatgttcttgaaattttagactttctttgtaaacaaatgatatgtccttatcattgtataaaagctgttatgtgcaacagtgtggagattccttgtctgatttaataaaatacttaaacctgggaaaaaaaaaaggcacatacacaccacacacaaaaaaaaacacaaccaaccaacaaaaaaaggggggggtacacc

SEQ ID NO: 80987 - DNA, 5487 bp, Homo sapiens
cagtgcgcccatcgcgcggctcctcggggcacctgctgccttggcgccttttcccttggccttcgcctcgcccgcagcgccctccgcatagggccccgcccgctgcgcgcgcatccccgccccccgggcgatctgtcagagcacctcgcgagcgtacgtgcctcaggaagtgacgcacagcccccctgggggccgggggcggggccaggctataaaccgccggttaggggccgccatcccctcagagcgtcgggatatcgggtggcggctcgggacggaggacgcgctagtgtgagtgcgggcttctagaactacaccgaccctcgtgtcctcccttcatcctgcggggctggctggagcggccgctccggtgctgtccagcagccatagggagccgcacggggagcgggaaagcggtcgcggccccaggcggggcggccgggatggagcggggccgcgagcctgtggggaaggggctgtggcggcgcctcgagcggctgcaggttcttctgtgtggcagttcagaatgatggatcaagctagatcagcattctctaacttgtttggtggagaaccattgtcatatacccggttcagcctggctcggcaagtagatggcgataacagtcatgtggagatgaaacttgctgtagatgaagaagaaaatgctgacaataacacaaaggccaatgtcacaaaaccaaaaaggtgtagtggaagtatctgctatgggactattgctgtgatcgtctttttcttgattggatttatgattggctacttgggctattgtaaaggggtagaaccaaaaactgagtgtgagagactggcaggaaccgagtctccagtgagggaggagccaggagaggacttccctgcagcacgtcgcttatattgggatgacctgaagagaaagttgtcggagaaactggacagcacagacttcaccagcaccatcaagctgctgaatgaaaattcatatgtccctcgtgaggctggatctcaaaaagatgaaaatcttgcgttgtatgttgaaaatcaatttcgtgaatttaaactcagcaaagtctggcgtgatcaacattttgttaagattcaggtcaaagacagcgctcaaaactcggtgatcatagttgataagaacggtagacttgtttacctggtggagaatcctgggggttatgtggcgtatagtaaggctgcaacagttactggtaaactggtccatgctaattttggtactaaaaaagattttgaggatttatacactcctgtgaatggatctatagtgattgtcagagcagggaaaatcacctttgcagaaaaggttgcaaatgctgaaagcttaaatgcaattggtgtgttgatatacatggaccagactaaatttcccattgttaacgcagaactttcattctttggacatgctcatctggggacaggtgacccttacacacctggattcccttccttcaatcacactcagtttccaccatctcggtcatcaggattgcctaatatacctgtccagacaatctccagagctgctgcagaaaagctgtttgggaatatggaaggagactgtccctctgactggaaaacagactctacatgtaggatggtaacctcagaaagcaagaatgtgaagctcactgtgagcaatgtgctgaaagagataaaaattcttaacatctttggagttattaaaggctttgtagaaccagatcactatgttgtagttggggcccagagagatgcatggggccctggagctgcaaaatccggtgtaggcacagctctcctattgaaacttgcccagatgttctcagatatggtcttaaaagatgggtttcagcccagcagaagcattatctttgccagttggagtgctggagactttggatcggttggtgccactgaatggctagagggatacctttcgtccctgcatttaaaggctttcacttatattaatctggataaagcggttcttggtaccagcaacttcaaggtttctgccagcccactgttgtatacgcttattgagaaaacaatgcaaaatgtgaagcatccggttactgggcaatttctatatcaggacagcaactgggccagcaaagttgagaaactcactttagacaatgctgctttccctttccttgcatattctggaatcccagcagtttctttctgtttttgcgaggacacagattatccttatttgggtaccaccatggacacctataaggaactgattgagaggattcctgagttgaacaaagtggcacgagcagctgcagaggtcgctggtcagttcgtgattaaactaacccatgatgttgaattgaacctggactatgagaggtacaacagccaactgctttcatttgtgagggatctgaaccaatacagagcagacataaaggaaatgggcctgagtttacagtggctgtattctgctcgtggagacttcttccgtgctacttccagactaacaacagatttcgggaatgctgagaaaacagacagatttgtcatgaagaaactcaatgatcgtgtcatgagagtggagtatcacttcctctctccctacgtatctccaaaagagtctcctttccgacatgtcttctggggctccggctctcacacgctgccagctttactggagaacttgaaactgcgtaaacaaaataacggtgcttttaatgaaacgctgttcagaaaccagttggctctagctacttggactattcagggagctgcaaatgccctctctggtgacgtttgggacattgacaatgagttttaaatgtgatacccatagcttccatgagaacagcagggtagtctggtttctagacttgtgctgatcgtgctaaattttcagtagggctacaaaacctgatgttaaaattccatcccatcatcttggtactactagatgtctttaggcagcagcttttaatacagggtagataacctgtacttcaagttaaagtgaataaccacttaaaaaatgtccatgatggaatattcccctatctctagaattttaagtgctttgtaatgggaactgcctctttcctgttgttgttaatgaaaatgtcagaaaccagttatgtgaatgatctctctgaatcctaagggctggtctctgctgaaggttgtaagtggtcgcttactttgagtgatcctccaacttcatttgatgctaaataggagataccaggttgaaagaccttctccaaatgagatctaagcctttccataaggaatgtagctggtttcctcattcctgaaagaaacagttaactttcagaagagatgggcttgttttcttgccaatgaggtctgaaatggaggtccttctgctggataaaatgaggttcaactgttgattgcaggaataaggccttaatatgttaacctcagtgtcatttatgaaaagaggggaccagaagccaaagacttagtatattttcttttcctctgtcccttcccccataagcctccatttagttctttgttatttttgtttcttccaaagcacattgaaagagaaccagtttcaggtgtttagttgcagactcagtttgtcagactttaaagaataatatgctgccaaattttggccaaagtgttaatcttaggggagagctttctgtccttttggcactgagatatttattgtttatttatcagtgacagagttcactataaatggtgtttttttaatagaatataattatcggaagcagtgccttccataattatgacagttatactgtcggttttttttaaataaaagcagcatctgctaataaaacccaacagatactggaagttttgcatttatggtcaacacttaagggttttagaaaacagccgtcagccaaatgtaattgaataaagttgaagctaagatttagagatgaattaaatttaattaggggttgctaagaagcgagcactgaccagataagaatgctggttttcctaaatgcagtgaattgtgaccaagttataaatcaatgtcacttaaaggctgtggtagtactcctgcaaaattttatagctcagtttatccaaggtgtaactctaattcccattttgcaaaatttccagtacctttgtcacaatcctaacacattatcgggagcagtgtcttccataatgtataaagaacaaggtagtttttacctaccacagtgtctgtatcggagacagtgatctccatatgttacactaagggtgtaagtaattatccgggaacagtgtttcccataattttcttcatgcaatgacatcttcaaagcttgaagatcgttagtatctaacatgtatcccaactcctataattccctatcttttagttttagttgcagaaacattttgtggtcattaagcattgggtgggtaaattcaaccactgtaaaatgaaattactacaaaatttgaaatttagcttgggtttttgttacctttatggtttctccaggtcctctacttaatgagatagtagcatacatttataatgtttgctattgacaagtcattttaactttatcacattatttgcatgttacctcctataaacttagtgcggacaagttttaatccagaattgaccttttgacttaaagcagagggactttgtatagaaggtttgggggctgtggggaaggagagtcccctgaaggtctgacacgtctgcctacccattcgtggtgatcaattaaatgtaggtatgaataagttcgaagctccgtgagtgaaccatcattataaacgtgatgatcagctgtttgtcatagggcagttggaaacggcctcctagggaaaagttcatagggtctcttcaggttcttagtgtcacttacctagatttacagcctcacttgaatgtgtcactactcacagtctctttaatcttcagttttatctttaatctcctcttttatcttggactgacatttagcgtagctaagtgaaaaggtcatagctgagattcctggttcgggtgttacgcacacgtacttaaatgaaagcatgtggcatgttcatcgtataacacaatatgaatacagggcatgcattttgcagcagtgagtctcttcagaaaacccttttctacagttagggttgagttacttcctatcaagccagtacgtgctaacaggctcaatattcctgaatgaaatatcagactagtgacaagctcctggtcttgagatgtcttctcgttaaggagatgggccttttggaggtaaaggataaaatgaatgagttctgtcatgattcactattctagaacttgcatgacctttactgtgttagctctttgaatgttcttgaaattttagactttctttgtaaacaaatgatatgtccttatcattgtataaaagctgttatgtgcaacagtgtggagattccttgtctgatttaataaaatacttaaagagagagagagagagagagagagag

SEQ ID NO: 80988 - DNA, 5501 bp, Homo sapiens
  misc_feature (5498)..(5498): n is a, c, g, or t
cagtgcgcccatcgcgcggctcctcggggcacctgctgccttggcgccttttcccttggccttcgcctcgcccgcagcgccctccgcatagggccccgcccgctgcgcgcgcatccccgccccccgggcgatctgtcagagcacctcgcgagcgtacgtgcctcaggaagtgacgcacagcccccctgggggccgggggcggggccaggctataaaccgccggttaggggccgccatcccctcagagcgtcgggatatcgggtggcggctcgggacggaggacgcgctagtgtgagtgcgggcttctagaactacaccgaccctcgtgtcctcccttcatcctgcggggctggctggagcggccgctccggtgctgtccagcagccatagggagccgcacggggagcgggaaagcggtcgcggccccaggcggggcggccgggatggagcggggccgcgagcctgtggggaaggggctgtggcggcgcctcgagcggctgcaggttcttctgtgtggcagttcagaatgatggatcaagctagatcagcattctctaacttgtttggtggagaaccattgtcatatacccggttcagcctggctcggcaagtagatggcgataacagtcatgtggagatgaaacttgctgtagatgaagaagaaaatgctgacaataacacaaaggccaatgtcacaaaaccaaaaaggtgtagtggaagtatctgctatgggactattgctgtgatcgtctttttcttgattggatttatgattggctacttgggctattgtaaaggggtagaaccaaaaactgagtgtgagagactggcaggaaccgagtctccagtgagggaggagccaggagaggacttccctgcagcacgtcgcttatattgggatgacctgaagagaaagttgtcggagaaactggacagcacagacttcaccagcaccatcaagctgctgaatgaaaattcatatgtccctcgtgaggctggatctcaaaaagatgaaaatcttgcgttgtatgttgaaaatcaatttcgtgaatttaaactcagcaaagtctggcgtgatcaacattttgttaagattcaggtcaaagacagcgctcaaaactcggtgatcatagttgataagaacggtagacttgtttacctggtggagaatcctgggggttatgtggcgtatagtaaggctgcaacagttactggtaaactggtccatgctaattttggtactaaaaaagattttgaggatttatacactcctgtgaatggatctatagtgattgtcagagcagggaaaatcacctttgcagaaaaggttgcaaatgctgaaagcttaaatgcaattggtgtgttgatatacatggaccagactaaatttcccattgttaacgcagaactttcattctttggacatgctcatctggggacaggtgacccttacacacctggattcccttccttcaatcacactcagtttccaccatctcggtcatcaggattgcctaatatacctgtccagacaatctccagagctgctgcagaaaagctgtttgggaatatggaaggagactgtccctctgactggaaaacagactctacatgtaggatggtaacctcagaaagcaagaatgtgaagctcactgtgagcaatgtgctgaaagagataaaaattcttaacatctttggagttattaaaggctttgtagaaccagatcactatgttgtagttggggcccagagagatgcatggggccctggagctgcaaaatccggtgtaggcacagctctcctattgaaacttgcccagatgttctcagatatggtcttaaaagatgggtttcagcccagcagaagcattatctttgccagttggagtgctggagactttggatcggttggtgccactgaatggctagagggatacctttcgtccctgcatttaaaggctttcacttatattaatctggataaagcggttcttggtaccagcaacttcaaggtttctgccagcccactgttgtatacgcttattgagaaaacaatgcaaaatgtgaagcatccggttactgggcaatttctatatcaggacagcaactgggccagcaaagttgagaaactcactttagacaatgctgctttccctttccttgcatattctggaatcccagcagtttctttctgtttttgcgaggacacagattatccttatttgggtaccaccatggacacctataaggaactgattgagaggattcctgagttgaacaaagtggcacgagcagctgcagaggtcgctggtcagttcgtgattaaactaacccatgatgttgaattgaacctggactatgagaggtacaacagccaactgctttcatttgtgagggatctgaaccaatacagagcagacataaaggaaatgggcctgagtttacagtggctgtattctgctcgtggagacttcttccgtgctacttccagactaacaacagatttcgggaatgctgagaaaacagacagatttgtcatgaagaaactcaatgatcgtgtcatgagagtggagtatcacttcctctctccctacgtatctccaaaagagtctcctttccgacatgtcttctggggctccggctctcacacgctgccagctttactggagaacttgaaactgcgtaaacaaaataacggtgcttttaatgaaacgctgttcagaaaccagttggctctagctacttggactattcagggagctgcaaatgccctctctggtgacgtttgggacattgacaatgagttttaaatgtgatacccatagcttccatgagaacagcagggtagtctggtttctagacttgtgctgatcgtgctaaattttcagtagggctacaaaacctgatgttaaaattccatcccatcatcttggtactactagatgtctttaggcagcagcttttaatacagggtagataacctgtacttcaagttaaagtgaataaccacttaaaaaatgtccatgatggaatattcccctatctctagaattttaagtgctttgtaatgggaactgcctctttcctgttgttggctggtctctgctgaaggttgtaagtggtcgcttactttgagtgatcctccaacttcatttgatgctaaataggagataccaggttgaaagaccttctccaaatgagatctaagcctttccataaggaatgtagctggtttcctcattcctgaaagaaacagttaactttcagaagagatgggcttgttttcttgccaatgaggtctgaaatggaggtccttctgctggataaaatgaggttcaactgttgattgcaggaataaggccttaatatgttaacctcagtgtcatttatgaaaagaggggaccagaagccaaagacttagtatattttcttttcctctgtcccttcccccataagcctccatttagttctttgttatttttgtttcttccaaagcacattgaaagagaaccagtttcaggtgtttagttgcagactcagtttgtcagactttaaagaataatatgctgccaaattttggccaaagtgttaatcttaggggagagctttctgtccttttggcactgagatatttattgtttatttatcagtgacagagttcactataaatggtgtttttttaatagaatataattatcggaagcagtgccttccataattatgacagttatactgtcggttttttttaaataaaagcagcatctgctaataaaacccaacagatactggaagttttgcatttatggtcaacacttaagggttttagaaaacagccgtcagccaaatgtaattgaataaagttgaagctaagatttagagatgaattaaatttaattaggggttgctaagaagcgagcactgaccagataagaatgctggttttcctaaatgcagtgaattgtgaccaagttataaatcaatgtcacttaaaggctgtggtagtactcctgcaaaattttatagctcagtttatccaaggtgtaactctaattcccattttgcaaaatttccagtacctttgtcacaatcctaacacattatcgggagcagtgtcttccataatgtataaagaacaaggtagtttttacctaccacagtgtctgtatcggagacagtgatctccatatgttacactaagggtgtaagtaattatccgggaacagtgtttcccataattttcttcatgcaatgacatcttcaaagcttgaagatcgttagtatctaacatgtatcccaactcctataattccctatcttttagttttagttgcagaaacattttgtggtcattaagcattgggtgggtaaattcaaccactgtaaaatgaaattactacaaaatttgaaatttagcttgggtttttgttacctttatggtttctccaggtcctctacttaatgagatagtagcatacatttataatgtttgctattgacaagtcattttaactttatcacattatttgcatgttacctcctataaacttagtgcggacaagttttaatccagaattgaccttttgacttaaagcagagggactttgtatagaaggtttgggggctgtggggaaggagagtcccctgaaggtctgacacgtctgcctacccattcgtggtgatcaattaaatgtaggtatgaataagttcgaagctccgtgagtgaaccatcattataaacgtgatgatcagctgtttgtcatagggcagttggaaacggcctcctagggaaaagttcatagggtctcttcaggttcttagtgtcacttacctagatttacagcctcacttgaatgtgtcactactcacagtctctttaatcttcagttttatctttaatctcctcttttatcttggactgacatttagcgtagctaagtgaaaaggtcatagctgagattcctggttcgggtgttacgcacacgtacttaaatgaaagcatgtggcatgttcatcgtataacacaatatgaatacagggcatgcattttgcagcagtgagtctcttcagaaaacccttttctacagttagggttgagttacttcctatcaagccagtacgtgctaacaggctcaatattcctgaatgaaatatcagactagtgacaagctcctggtcttgagatgtcttctcgttaaggagatgggccttttggaggtaaaggataaaatgaatgagttctgtcatgattcactattctagaacttgcatgacctttactgtgttagctctttgaatgttcttgaaattttagactttctttgtaaacaaatgatatgtccttatcattgtataaaagctgttatgtgcaacagtgtggagattccttgtctgatttaataaaatacttaaacactgaaaaaaaaaaaaaaagcggcgcgccgcttctagtagtatctcctcgtagggagacacaaggcttacgcggtacccatgctttcnttg

SEQ ID NO: 80989 - DNA, 5527 bp, Homo sapiens
  misc_feature (5524)..(5524): n is a, c, g, or t
cagtgcgcccatcgcgcggctcctcggggcacctgctgccttggcgccttttcccttggccttcgcctcgcccgcagcgccctccgcatagggccccgcccgctgcgcgcgcatccccgccccccgggcgatctgtcagagcacctcgcgagcgtacgtgcctcaggaagtgacgcacagcccccctgggggccgggggcggggccaggctataaaccgccggttaggggccgccatcccctcagagcgtcgggatatcgggtggcggctcgggacggaggacgcgctagtgtgagtgcgggcttctagaactacaccgaccctcgtgtcctcccttcatcctgcggggctggctggagcggccgctccggtgctgtccagcagccatagggagccgcacggggagcgggaaagcggtcgcggccccaggcggggcggccgggatggagcggggccgcgagcctgtggggaaggggctgtggcggcgcctcgagcggctgcaggttcttctgtgtggcagttcagaatgatggatcaagctagatcagcattctctaacttgtttggtggagaaccattgtcatatacccggttcagcctggctcggcaagtagatggcgataacagtcatgtggagatgaaacttgctgtagatgaagaagaaaatgctgacaataacacaaaggccaatgtcacaaaaccaaaaaggtgtagtggaagtatctgctatgggactattgctgtgatcgtctttttcttgattggatttatgattggctacttgggctattgtaaaggggtagaaccaaaaactgagtgtgagagactggcaggaaccgagtctccagtgagggaggagccaggagaggacttccctgcagcacgtcgcttatattgggatgacctgaagagaaagttgtcggagaaactggacagcacagacttcaccagcaccatcaagctgctgaatgaaaattcatatgtccctcgtgaggctggatctcaaaaagatgaaaatcttgcgttgtatgttgaaaatcaatttcgtgaatttaaactcagcaaagtctggcgtgatcaacattttgttaagattcaggtcaaagacagcgctcaaaactcggtgatcatagttgataagaacggtagacttgtttacctggtggagaatcctgggggttatgtggcgtatagtaaggctgcaacagttactggtaaactggtccatgctaattttggtactaaaaaagattttgaggatttatacactcctgtgaatggatctatagtgattgtcagagcagggaaaatcacctttgcagaaaaggttgcaaatgctgaaagcttaaatgcaattggtgtgttgatatacatggaccagactaaatttcccattgttaacgcagaactttcattctttggacatgctcatctggggacaggtgacccttacacacctggattcccttccttcaatcacactcagtttccaccatctcggtcatcaggattgcctaatatacctgtccagacaatctccagagctgctgcagaaaagctgtttgggaatatggaaggagactgtccctctgactggaaaacagactctacatgtaggatggtaacctcagaaagcaagaatgtgaagctcactgtgagcaatgtgctgaaagagataaaaattcttaacatctttggagttattaaaggctttgtagaaccagatcactatgttgtagttggggcccagagagatgcatggggccctggagctgcaaaatccggtgtaggcacagctctcctattgaaacttgcccagatgttctcagatatggtcttaaaagatgggtttcagcccagcagaagcattatctttgccagttggagtgctggagactttggatcggttggtgccactgaatggctagagggatacctttcgtccctgcatttaaaggctttcacttatattaatctggataaagcggttcttggtaccagcaacttcaaggtttctgccagcccactgttgtatacgcttattgagaaaacaatgcaaaatgtgaagcatccggttactgggcaatttctatatcaggacagcaactgggccagcaaagttgagaaactcactttagacaatgctgctttccctttccttgcatattctggaatcccagcagtttctttctgtttttgcgaggacacagattatccttatttgggtaccaccatggacacctataaggaactgattgagaggattcctgagttgaacaaagtggcacgagcagctgcagaggtcgctggtcagttcgtgattaaactaacccatgatgttgaattgaacctggactatgagaggtacaacagccaactgctttcatttgtgagggatctgaaccaatacagagcagacataaaggaaatgggcctgagtttacagtggctgtattctgctcgtggagacttcttccgtgctacttccagactaacaacagatttcgggaatgctgagaaaacagacagatttgtcatgaagaaactcaatgatcgtgtcatgagagtggagtatcacttcctctctccctacgtatctccaaaagagtctcctttccgacatgtcttctggggctccggctctcacacgctgccagctttactggagaacttgaaactgcgtaaacaaaataacggtgcttttaatgaaacgctgttcagaaaccagttggctctagctacttggactattcagggagctgcaaatgccctctctggtgacgtttgggacattgacaatgagttttaaatgtgatacccatagcttccatgagaacagcagggtagtctggtttctagacttgtgctgatcgtgctaaattttcagtagggctacaaaacctgatgttaaaattccatcccatcatcttggtactactagatgtctttaggcagcagcttttaatacagggtagataacctgtacttcaagttaaagtgaataaccacttaaaaaatgtccatgatggaatattcccctatctctagaattttaagtgctttgtaatgggaactgcctctttcctgttgttgttaatgaaaatgtcagaaaccagttatgtgaatgatctctctgaatcctaagggctggtctctgctgaaggttgtaagtggtcgcttactttgagtgatcctccaacttcatttgatgctaaataggagataccaggttgaaagaccttctccaaatgagatctaagcctttccataaggaatgtagctggtttcctcattcctgaaagaaacagttaactttcagaagagatgggcttgttttcttgccaatgaggtctgaaatggaggtccttctgctggataaaatgaggttcaactgttgattgcaggaataaggccttaatatgttaacctcagtgtcatttatgaaaagaggggaccagaagccaaagacttagtatattttcttttcctctgtcccttcccccataagcctccatttagttctttgttatttttgtttcttccaaagcacattgaaagagaaccatttgtcagactttaaagaataatatgctgccaaattttggccaaagtgttaatcttaggggagagctttctgtccttttggcactgagatatttattgtttatttatcagtgacagagttcactataaatggtgtttttttaatagaatataattatcggaagcagtgccttccataattatgacagttatactgtcggttttttttaaataaaagcagcatctgctaataaaacccaacagatactggaagttttgcatttatggtcaacacttaagggttttagaaaacagccgtcagccaaatgtaattgaataaagttgaagctaagatttagagatgaattaaatttaattaggggttgctaagaagcgagcactgaccagataagaatgctggttttcctaaatgcagtgaattgtgaccaagttataaatcaatgtcacttaaaggctgtggtagtactcctgcaaaattttatagctcagtttatccaaggtgtaactctaattcccattttgcaaaatttccagtacctttgtcacaatcctaacacattatcgggagcagtgtcttccataatgtataaagaacaaggtagtttttacctaccacagtgtctgtatcggagacagtgatctccatatgttacactaagggtgtaagtaattatccgggaacagtgtttcccataattttcttcatgcaatgacatcttcaaagcttgaagatcgttagtatctaacatgtatcccaactcctataattccctatcttttagttttagttgcagaaacattttgtggtcattaagcattgggtgggtaaattcaaccactgtaaaatgaaattactacaaaatttgaaatttagcttgggtttttgttacctttatggtttctccaggtcctctacttaatgagatagtagcatacatttataatgtttgctattgacaagtcattttaactttatcacattatttgcatgttacctcctataaacttagtgcggacaagttttaatccagaattgaccttttgacttaaagcagagggactttgtatagaaggtttgggggctgtggggaaggagagtcccctgaaggtctgacacgtctgcctacccattcgtggtgatcaattaaatgtaggtatgaataagttcgaagctccgtgagtgaaccatcattataaacgtgatgatcagctgtttgtcatagggcagttggaaacggcctcctagggaaaagttcatagggtctcttcaggttcttagtgtcacttacctagatttacagcctcacttgaatgtgtcactactcacagtctctttaatcttcagttttatctttaatctcctcttttatcttggactgacatttagcgtagctaagtgaaaaggtcatagctgagattcctggttcgggtgttacgcacacgtacttaaatgaaagcatgtggcatgttcatcgtataacacaatatgaatacagggcatgcattttgcagcagtgagtctcttcagaaaacccttttctacagttagggttgagttacttcctatcaagccagtacgtgctaacaggctcaatattcctgaatgaaatatcagactagtgacaagctcctggtcttgagatgtcttctcgttaaggagatgggccttttggaggtaaaggataaaatgaatgagttctgtcatgattcactattctagaacttgcatgacctttactgtgttagctctttgaatgttcttgaaattttagactttctttgtaaacaaatgatatgtccttatcattgtataaaagctgttatgtgcaacagtgtggagattccttgtctgatttaataaaatacttaaacactgaaaaaaaaaaaaaaagcggcgcgccgcttctagtagtatctcctcgtagggagacacaaggcttacgcggtacccatgctttcnttg

SEQ ID NO: 80990 - DNA, 5492 bp, Homo sapiens
  misc_feature (5489)..(5489): n is a, c, g, or t
cagtgcgcccatcgcgcggctcctcggggcacctgctgccttggcgccttttcccttggccttcgcctcgcccgcagcgccctccgcatagggccccgcccgctgcgcgcgcatccccgccccccgggcgatctgtcagagcacctcgcgagcgtacgtgcctcaggaagtgacgcacagcccccctgggggccgggggcggggccaggctataaaccgccggttaggggccgccatcccctcagagcgtcgggatatcgggtggcggctcgggacggaggacgcgctagtgtgagtgcgggcttctagaactacaccgaccctcgtgtcctcccttcatcctgcggggctggctggagcggccgctccggtgctgtccagcagccatagggagccgcacggggagcgggaaagcggtcgcggccccaggcggggcggccgggatggagcggggccgcgagcctgtggggaaggggctgtggcggcgcctcgagcggctgcaggttcttctgtgtggcagttcagaatgatggatcaagctagatcagcattctctaacttgtttggtggagaaccattgtcatatacccggttcagcctggctcggcaagtagatggcgataacagtcatgtggagatgaaacttgctgtagatgaagaagaaaatgctgacaataacacaaaggccaatgtcacaaaaccaaaaaggtgtagtggaagtatctgctatgggactattgctgtgatcgtctttttcttgattggatttatgattggctacttgggctattgtaaaggggtagaaccaaaaactgagtgtgagagactggcaggaaccgagtctccagtgagggaggagccaggagaggacttccctgcagcacgtcgcttatattgggatgacctgaagagaaagttgtcggagaaactggacagcacagacttcaccagcaccatcaagctgctgaatgaaaattcatatgtccctcgtgaggctggatctcaaaaagatgaaaatcttgcgttgtatgttgaaaatcaatttcgtgaatttaaactcagcaaagtctggcgtgatcaacattttgttaagattcaggtcaaagacagcgctcaaaactcggtgatcatagttgataagaacggtagacttgtttacctggtggagaatcctgggggttatgtggcgtatagtaaggctgcaacagttactggtaaactggtccatgctaattttggtactaaaaaagattttgaggatttatacactcctgtgaatggatctatagtgattgtcagagcagggaaaatcacctttgcagaaaaggttgcaaatgctgaaagcttaaatgcaattggtgtgttgatatacatggaccagactaaatttcccattgttaacgcagaactttcattctttggacatgctcatctggggacaggtgacccttacacacctggattcccttccttcaatcacactcagtttccaccatctcggtcatcaggattgcctaatatacctgtccagacaatctccagagctgctgcagaaaagctgtttgggaatatggaaggagactgtccctctgactggaaaacagactctacatgtaggatggtaacctcagaaagcaagaatgtgaagctcactgtgagcaatgtgctgaaagagataaaaattcttaacatctttggagttattaaaggctttgtagaaccagatcactatgttgtagttggggcccagagagatgcatggggccctggagctgcaaaatccggtgtaggcacagctctcctattgaaacttgcccagatgttctcagatatggtcttaaaagatgggtttcagcccagcagaagcattatctttgccagttggagtgctggagactttggatcggttggtgccactgaatggctagagggatacctttcgtccctgcatttaaaggctttcacttatattaatctggataaagcggttcttggtaccagcaacttcaaggtttctgccagcccactgttgtatacgcttattgagaaaacaatgcaaaatgtgaagcatccggttactgggcaatttctatatcaggacagcaactgggccagcaaagttgagaaactcactttagacaatgctgctttccctttccttgcatattctggaatcccagcagtttctttctgtttttgcgaggacacagattatccttatttgggtaccaccatggacacctataaggaactgattgagaggattcctgagttgaacaaagtggcacgagcagctgcagaggtcgctggtcagttcgtgattaaactaacccatgatgttgaattgaacctggactatgagaggtacaacagccaactgctttcatttgtgagggatctgaaccaatacagagcagacataaaggaaatgggcctgagtttacagtggctgtattctgctcgtggagacttcttccgtgctacttccagactaacaacagatttcgggaatgctgagaaaacagacagatttgtcatgaagaaactcaatgatcgtgtcatgagagtggagtatcacttcctctctccctacgtatctccaaaagagtctcctttccgacatgtcttctggggctccggctctcacacgctgccagctttactggagaacttgaaactgcgtaaacaaaataacggtgcttttaatgaaacgctgttcagaaaccagttggctctagctacttggactattcagggagctgcaaatgccctctctggtgacgtttgggacattgacaatgagttttaaatgtgatacccatagcttccatgagaacagcagggtagtctggtttctagacttgtgctgatcgtgctaaattttcagtagggctacaaaacctgatgttaaaattccatcccatcatcttggtactactagatgtctttaggcagcagcttttaatacagggtagataacctgtacttcaagttaaagtgaataaccacttaaaaaatgtccatgatggaatattcccctatctctagaattttaagtgctttgtaatgggaactgcctctttcctgttgttgttaatgaaaatgtcagaaaccagttatgtgaatgatctctctgaatcctaagggctggtctctgctgaaggttgtaagtggtcgcttactttgagtgatcctccaacttcatttgatgctaaataggagataccaggttgaaagaccttctccaaatgagatctaagcctttccataaggaatgtagctggtttcctcattcctgaaagaaacagttaactttcagaagagatgggcttgttttcttgccaatgaggtctgaaatggaggtccttctgctggataaaatgaggttcaactgttgattgcaggaataaggccttaatatgttaacctcagtgtcatttatgaaaagaggggaccagaagccaaagacttagtatattttcttttcctctgtcccttcccccataagcctccatttagttctttgttatttttgtttcttccaaagcacattgaaagagaaccagtttcaggtgtttagttgcagactcagtttgtcagactttaaagaataatatgctgccaaattttggccaaagtgttaatcttaggggagagctttctgtccttttggcactgagatatttattgtttatttatcagtgacagagttcactataaatggtgtttttttaatagaatataattatcggaagcagtgccttccataattatgacagttatactgtcggttttttttaaataaaagcagcatctgctaataaaacccaacagatactggaagttttgcatttatggtcaacacttaagggttttagaaaacagccgtcagccaaatgtaattgaataaagttgaagctaagatttagagatgaattaaatttaattaggggttgctaagaagcgagcactgaccagataagaatgctggttttcctaaatgcagtgaattgtgaccaagttataaatcaatgtcacttaaaggctgtggtagtactcctgcaaaattttatagctcagtttatccaaggtgtaactctaattcccattttgcaaaatttccagtacctttgtcacaatcctaacacattatcgggagcagtgtcttccataatgtataaagaacaaggtagtttttacctaccacagtgtctgtatcggagacagtgatctccatatgttacactaagggtgtaagtaattatccgggaacagtgtttcccataattttcttcatgcaatgacatcttcaaagcttgaagatcgttagtatctaacatgtatcccaactcctataattccctatcttttagttttagttgcagaaacattttgtggtcattaagcattgggtgggtaaattcaaccactgtaaagtcctctacttaatgagatagtagcatacatttataatgtttgctattgacaagtcattttaactttatcacattatttgcatgttacctcctataaacttagtgcggacaagttttaatccagaattgaccttttgacttaaagcagagggactttgtatagaaggtttgggggctgtggggaaggagagtcccctgaaggtctgacacgtctgcctacccattcgtggtgatcaattaaatgtaggtatgaataagttcgaagctccgtgagtgaaccatcattataaacgtgatgatcagctgtttgtcatagggcagttggaaacggcctcctagggaaaagttcatagggtctcttcaggttcttagtgtcacttacctagatttacagcctcacttgaatgtgtcactactcacagtctctttaatcttcagttttatctttaatctcctcttttatcttggactgacatttagcgtagctaagtgaaaaggtcatagctgagattcctggttcgggtgttacgcacacgtacttaaatgaaagcatgtggcatgttcatcgtataacacaatatgaatacagggcatgcattttgcagcagtgagtctcttcagaaaacccttttctacagttagggttgagttacttcctatcaagccagtacgtgctaacaggctcaatattcctgaatgaaatatcagactagtgacaagctcctggtcttgagatgtcttctcgttaaggagatgggccttttggaggtaaaggataaaatgaatgagttctgtcatgattcactattctagaacttgcatgacctttactgtgttagctctttgaatgttcttgaaattttagactttctttgtaaacaaatgatatgtccttatcattgtataaaagctgttatgtgcaacagtgtggagattccttgtctgatttaataaaatacttaaacactgaaaaaaaaaaaaaaagcggcgcgccgcttctagtagtatctcctcgtagggagacacaaggcttacgcggtacccatgctttcnttg

SEQ ID NO: 80991 - DNA, 5507 bp, Homo sapiens
  misc_feature (5504)..(5504): n is a, c, g, or t
cagtgcgcccatcgcgcggctcctcggggcacctgctgccttggcgccttttcccttggccttcgcctcgcccgcagcgccctccgcatagggccccgcccgctgcgcgcgcatccccgccccccgggcgatctgtcagagcacctcgcgagcgtacgtgcctcaggaagtgacgcacagcccccctgggggccgggggcggggccaggctataaaccgccggttaggggccgccatcccctcagagcgtcgggatatcgggtggcggctcgggacggaggacgcgctagtgtgagtgcgggcttctagaactacaccgaccctcgtgtcctcccttcatcctgcggggctggctggagcggccgctccggtgctgtccagcagccatagggagccgcacggggagcgggaaagcggtcgcggccccaggcggggcggccgggatggagcggggccgcgagcctgtggggaaggggctgtggcggcgcctcgagcggctgcaggttcttctgtgtggcagttcagaatgatggatcaagctagatcagcattctctaacttgtttggtggagaaccattgtcatatacccggttcagcctggctcggcaagtagatggcgataacagtcatgtggagatgaaacttgctgtagatgaagaagaaaatgctgacaataacacaaaggccaatgtcacaaaaccaaaaaggtgtagtggaagtatctgctatgggactattgctgtgatcgtctttttcttgattggatttatgattggctacttgggctattgtaaaggggtagaaccaaaaactgagtgtgagagactggcaggaaccgagtctccagtgagggaggagccaggagaggacttccctgcagcacgtcgcttatattgggatgacctgaagagaaagttgtcggagaaactggacagcacagacttcaccagcaccatcaagctgctgaatgaaaattcatatgtccctcgtgaggctggatctcaaaaagatgaaaatcttgcgttgtatgttgaaaatcaatttcgtgaatttaaactcagcaaagtctggcgtgatcaacattttgttaagattcaggtcaaagacagcgctcaaaactcggtgatcatagttgataagaacggtagacttgtttacctggtggagaatcctgggggttatgtggcgtatagtaaggctgcaacagttactggtaaactggtccatgctaattttggtactaaaaaagattttgaggatttatacactcctgtgaatggatctatagtgattgtcagagcagggaaaatcacctttgcagaaaaggttgcaaatgctgaaagcttaaatgcaattggtgtgttgatatacatggaccagactaaatttcccattgttaacgcagaactttcattctttggacatgctcatctggggacaggtgacccttacacacctggattcccttccttcaatcacactcagtttccaccatctcggtcatcaggattgcctaatatacctgtccagacaatctccagagctgctgcagaaaagctgtttgggaatatggaaggagactgtccctctgactggaaaacagactctacatgtaggatggtaacctcagaaagcaagaatgtgaagctcactgtgagcaatgtgctgaaagagataaaaattcttaacatctttggagttattaaaggctttgtagaaccagatcactatgttgtagttggggcccagagagatgcatggggccctggagctgcaaaatccggtgtaggcacagctctcctattgaaacttgcccagatgttctcagatatggtcttaaaagatgggtttcagcccagcagaagcattatctttgccagttggagtgctggagactttggatcggttggtgccactgaatggctagagggatacctttcgtccctgcatttaaaggctttcacttatattaatctggataaagcggttcttggtaccagcaacttcaaggtttctgccagcccactgttgtatacgcttattgagaaaacaatgcaaaatgtgaagcatccggttactgggcaatttctatatcaggacagcaactgggccagcaaagttgagaaactcactttagacaatgctgctttccctttccttgcatattctggaatcccagcagtttctttctgtttttgcgaggacacagattatccttatttgggtaccaccatggacacctataaggaactgattgagaggattcctgagttgaacaaagtggcacgagcagctgcagaggtcgctggtcagttcgtgattaaactaacccatgatgttgaattgaacctggactatgagaggtacaacagccaactgctttcatttgtgagggatctgaaccaatacagagcagacataaaggaaatgggcctgagtttacagtggctgtattctgctcgtggagacttcttccgtgctacttccagactaacaacagatttcgggaatgctgagaaaacagacagatttgtcatgaagaaactcaatgatcgtgtcatgagagtggagtatcacttcctctctccctacgtatctccaaaagagtctcctttccgacatgtcttctggggctccggctctcacacgctgccagctttactggagaacttgaaactgcgtaaacaaaataacggtgcttttaatgaaacgctgttcagaaaccagttggctctagctacttggactattcagggagctgcaaatgccctctctggtgacgtttgggacattgacaatgagttttaaatgtgatacccatagcttccatgagaacagcagggtagtctggtttctagacttgtgctgatcgtgctaaattttcagtagggctacaaaacctgatgttaaaattccatcccatcatcttggtactactagatgtctttaggcagcagcttttaatacagggtagataacctgtacttcaagttaaagtgaataaccacttaaaaaatgtccatgatggaatattcccctatctctagaattttaagtgctttgtaatgggaactgcctctttcctgttgttgttaatgaaaatgtcagaaaccagttatgtgaatgatctctctgaatcctaagggctggtctctgctgaaggttgtaagtggtcgcttactttgagtgatcctccaacttcatttgatgctaaataggagataccaggttgaaagaccttctccaaatgagatctaagcctttccataaggaatgtagctggtttcctcattcctgaaagaaacagttaactttcagaagagatgggcttgttttcttgccaatgaggtctgaaatggaggtccttctgctggataaaatgaggttcaactgttgattgcaggaataaggccttaatatgttaacctcagtgtcatttatgaaaagaggggaccagaagccaaagacttagtatattttcttttcctctgtcccttcccccataagcctccatttagttctttgttatttttgtttcttccaaagcacattgaaagagaaccagtttcaggtgtttagttgcagactcagtttgtcagactttaaagaataatatgctgccaaattttggccaaagtgttaatcttaggggagagctttctgtccttttggcactgagatatttattgtttatttatcagtgacagagttcactataaatggtgtttttttaatagaatataattatcggaagcagtgccttccataattatgacagttatactgtcggttttttttaaataaaagcagcatctgctaataaaacccaacagatactggaagttttgcatttatggtcaacacttaagggttttagaaaacagccgtcagccaaatgtaattgaataaagttgaagctaagatttagagatgaattaaatttaattaggggttgctaagaagcgagcactgaccagataagaatgctggttttcctaaatgcagtgaattgtgaccaagttataaatcaatgtcacttaaaggctgtggtagtactcctgcaaaattttatagctcagtttatccaaggtgtaactctaattcccattttgcaaaatttccagtacctttgtcacaatcctaacacattatcgggagcagtgtcttccataatgtataaagaacaaggtagtttttacctaccacagtgtctgtatcggagacaagtgtttcccataattttcttcatgcaatgacatcttcaaagcttgaagatcgttagtatctaacatgtatcccaactcctataattccctatcttttagttttagttgcagaaacattttgtggtcattaagcattgggtgggtaaattcaaccactgtaaaatgaaattactacaaaatttgaaatttagcttgggtttttgttacctttatggtttctccaggtcctctacttaatgagatagtagcatacatttataatgtttgctattgacaagtcattttaactttatcacattatttgcatgttacctcctataaacttagtgcggacaagttttaatccagaattgaccttttgacttaaagcagagggactttgtatagaaggtttgggggctgtggggaaggagagtcccctgaaggtctgacacgtctgcctacccattcgtggtgatcaattaaatgtaggtatgaataagttcgaagctccgtgagtgaaccatcattataaacgtgatgatcagctgtttgtcatagggcagttggaaacggcctcctagggaaaagttcatagggtctcttcaggttcttagtgtcacttacctagatttacagcctcacttgaatgtgtcactactcacagtctctttaatcttcagttttatctttaatctcctcttttatcttggactgacatttagcgtagctaagtgaaaaggtcatagctgagattcctggttcgggtgttacgcacacgtacttaaatgaaagcatgtggcatgttcatcgtataacacaatatgaatacagggcatgcattttgcagcagtgagtctcttcagaaaacccttttctacagttagggttgagttacttcctatcaagccagtacgtgctaacaggctcaatattcctgaatgaaatatcagactagtgacaagctcctggtcttgagatgtcttctcgttaaggagatgggccttttggaggtaaaggataaaatgaatgagttctgtcatgattcactattctagaacttgcatgacctttactgtgttagctctttgaatgttcttgaaattttagactttctttgtaaacaaatgatatgtccttatcattgtataaaagctgttatgtgcaacagtgtggagattccttgtctgatttaataaaatacttaaacactgaaaaaaaaaaaaaaagcggcgcgccgcttctagtagtatctcctcgtagggagacacaaggcttacgcggtacccatgctttcnttg

SEQ ID NO: 80992 - DNA, 5252 bp, Homo sapiens
  misc_feature (5249)..(5249): n is a, c, g, or t
cagtgcgcccatcgcgcggctcctcggggcacctgctgccttggcgccttttcccttggccttcgcctcgcccgcagcgccctccgcatagggccccgcccgctgcgcgcgcatccccgccccccgggcgatctgtcagagcacctcgcgagcgtacgtgcctcaggaagtgacgcacagcccccctgggggccgggggcggggccaggctataaaccgccggttaggggccgccatcccctcagagcgtcgggatatcgggtggcggctcgggacggaggacgcgctagtgtgagtgcgggcttctagaactacaccgaccctcgtgtcctcccttcatcctgcggggctggctggagcggccgctccggtgctgtccagcagccatagggagccgcacggggagcgggaaagcggtcgcggccccaggcggggcggccgggatggagcggggccgcgagcctgtggggaaggggctgtggcggcgcctcgagcggctgcaggttcttctgtgtggcagttcagaatgatggatcaagctagatcagcattctctaacttgtttggtggagaaccattgtcatatacccggttcagcctggctcggcaagtagatggcgataacagtcatgtggagatgaaacttgctgtagatgaagaagaaaatgctgacaataacacaaaggccaatgtcacaaaaccaaaaaggtgtagtggaagtatctgctatgggactattgctgtgatcgtctttttcttgattggatttatgattggctacttgggctattgtaaaggggtagaaccaaaaactgagtgtgagagactggcaggaaccgagtctccagtgagggaggagccaggagaggacttccctgcagcacgtcgcttatattgggatgacctgaagagaaagttgtcggagaaactggacagcacagacttcaccagcaccatcaagctgctgaatgaaaattcatatgtccctcgtgaggctggatctcaaaaagatgaaaatcttgcgttgtatgttgaaaatcaatttcgtgaatttaaactcagcaaagtctggcgtgatcaacattttgttaagattcaggtcaaagacagcgctcaaaactcggtgatcatagttgataagaacggtagacttgtttacctggtggagaatcctgggggttatgtggcgtatagtaaggctgcaacagttactggtaaactggtccatgctaattttggtactaaaaaagattttgaggatttatacactcctgtgaatggatctatagtgattgtcagagcagggaaaatcacctttgcagaaaaggttgcaaatgctgaaagcttaaatgcaattggtgtgttgatatacatggaccagactaaatttcccattgttaacgcagaactttcattctttggacatgctcatctggggacaggtgacccttacacacctggattcccttccttcaatcacactcagtttccaccatctcggtcatcaggattgcctaatatacctgtccagacaatctccagagctgctgcagaaaagctgtttgggaatatggaaggagactgtccctctgactggaaaacagactctacatgtaggatggtaacctcagaaagcaagaatgtgaagctcactgtgagcaatgtgctgaaagagataaaaattcttaacatctttggagttattaaaggctttgtagaaccagatcactatgttgtagttggggcccagagagatgcatggggccctggagctgcaaaatccggtgtaggcacagctctcctattgaaacttgcccagatgttctcagatatggtcttaaaagatgggtttcagcccagcagaagcattatctttgccagttggagtgctggagactttggatcggttggtgccactgaatggctagagggatacctttcgtccctgcatttaaaggctttcacttatattaatctggataaagcggttcttggtaccagcaacttcaaggtttctgccagcccactgttgtatacgcttattgagaaaacaatgcaaaatgtgaagcatccggttactgggcaatttctatatcaggacagcaactgggccagcaaagttgagaaactcactttagacaatgctgctttccctttccttgcatattctggaatcccagcagtttctttctgtttttgcgaggacacagattatccttatttgggtaccaccatggacacctataaggaactgattgagaggattcctgagttgaacaaagtggcacgagcagctgcagaggtcgctggtcagttcgtgattaaactaacccatgatgttgaattgaacctggactatgagaggtacaacagccaactgctttcatttgtgagggatctgaaccaatacagagcagacataaaggaaatgggcctgagtttacagtggctgtattctgctcgtggagacttcttccgtgctacttccagactaacaacagatttcgggaatgctgagaaaacagacagatttgtcatgaagaaactcaatgatcgtgtcatgagagtggagtatcacttcctctctccctacgtatctccaaaagagtctcctttccgacatgtcttctggggctccggctctcacacgctgccagctttactggagaacttgaaactgcgtaaacaaaataacggtgcttttaatgaaacgctgttcagaaaccagttggctctagctacttggactattcagggagctgcaaatgccctctctggtgacgtttgggacattgacaatgagttttaaatgtgatacccatagcttccatgagaacagcagggtagtctggtttctagacttgtgctgatcgtgctaaattttcagtagggctacaaaacctgatgttaaaattccatcccatcatcttggtactactagatgtctttaggcagcagcttttaatacagggtagataacctgtacttcaagttaaagtgaataaccacttaaaaaatgtccatgatggaatattcccctatctctagaattttaagtgctttgtaatgggaactgcctctttcctgttgttgttaatgaaaatgtcagaaaccagttatgtgaatgatctctctgaatcctaagggctggtctctgctgaaggttgtaagtggtcgcttactttgagtgatcctccaacttcatttgatgctaaataggagataccaggttgaaagaccttctccaaatgagatctaagcctttccataaggaatgtagctggtttcctcattcctgaaagaaacagttaactttcagaagagatgggcttgttttcttgccaatgaggtctgaaatggaggtccttctgctggataaaatgaggttcaactgttgattgcaggaataaggccttaatatgttaacctcagtgtcatttatgaaaagaggggaccagaagccaaagacttagtatattttcttttcctctgtcccttcccccataagcctccatttagttctttgttatttttgtttcttccaaagcacattgaaagagaaccagtttcaggtgtttagttgcagactcagtttgtcagactttaaagaataatatgctgccaaattttggccaaagtgttaatcttaggggagagctttctgtccttttggcactgagatatttattgtttatttatcagtgacagagttcactataaatggtgtttttttaatagaatataattatcggaagcagtgccttccataattatgacatttatccaaggtgtaactctaattcccattttgcaaaatttccagtacctttgtcacaatcctaacacattatcgggagcagtgtcttccataatgtataaagaacaaggtagtttttacctaccacagtgtctgtatcggagacagtgatctccatatgttacactaagggtgtaagtaattatccgggaacagtgtttcccataattttcttcatgcaatgacatcttcaaagcttgaagatcgttagtatctaacatgtatcccaactcctataattccctatcttttagttttagttgcagaaacattttgtggtcattaagcattgggtgggtaaattcaaccactgtaaaatgaaattactacaaaatttgaaatttagcttgggtttttgttacctttatggtttctccaggtcctctacttaatgagatagtagcatacatttataatgtttgctattgacaagtcattttaactttatcacattatttgcatgttacctcctataaacttagtgcggacaagttttaatccagaattgaccttttgacttaaagcagagggactttgtatagaaggtttgggggctgtggggaaggagagtcccctgaaggtctgacacgtctgcctacccattcgtggtgatcaattaaatgtaggtatgaataagttcgaagctccgtgagtgaaccatcattataaacgtgatgatcagctgtttgtcatagggcagttggaaacggcctcctagggaaaagttcatagggtctcttcaggttcttagtgtcacttacctagatttacagcctcacttgaatgtgtcactactcacagtctctttaatcttcagttttatctttaatctcctcttttatcttggactgacatttagcgtagctaagtgaaaaggtcatagctgagattcctggttcgggtgttacgcacacgtacttaaatgaaagcatgtggcatgttcatcgtataacacaatatgaatacagggcatgcattttgcagcagtgagtctcttcagaaaacccttttctacagttagggttgagttacttcctatcaagccagtacgtgctaacaggctcaatattcctgaatgaaatatcagactagtgacaagctcctggtcttgagatgtcttctcgttaaggagatgggccttttggaggtaaaggataaaatgaatgagttctgtcatgattcactattctagaacttgcatgacctttactgtgttagctctttgaatgttcttgaaattttagactttctttgtaaacaaatgatatgtccttatcattgtataaaagctgttatgtgcaacagtgtggagattccttgtctgatttaataaaatacttaaacactgaaaaaaaaaaaaaaagcggcgcgccgcttctagtagtatctcctcgtagggagacacaaggcttacgcggtacccatgctttcnttg

SEQ ID NO: 80993 - DNA, 5147 bp, Homo sapiens
  misc_feature (5100)..(5100): n is a, c, g, or t
  misc_feature (5134)..(5134): n is a, c, g, or t
  misc_feature (5139)..(5139): n is a, c, g, or t
cagtgcgcccatcgcgcggctcctcggggcacctgctgccttggcgccttttcccttggccttcgcctcgcccgcagcgccctccgcatagggccccgcccgctgcgcgcgcatccccgccccccgggcgatctgtcagagcacctcgcgagcgtacgtgcctcaggaagtgacgcacagcccccctgggggccgggggcggggccaggctataaaccgccggttaggggccgccatcccctcagagcgtcgggatatcgggtggcggctcgggacggaggacgcgctagtgtgagtgcgggcttctagaactacaccgaccctcgtgtcctcccttcatcctgcggggctggctggagcggccgctccggtgctgtccagcagccatagggagccgcacggggagcgggaaagcggtcgcggccccaggcggggcggccgggatggagcggggccgcgagcctgtggggaaggggctgtggcggcgcctcgagcggctgcaggttcttctgtgtggcagttcagaatgatggatcaagctagatcagcattctctaacttgtttggtggagaaccattgtcatatacccggttcagcctggctcggcaagtagatggcgataacagtcatgtggagatgaaacttgctgtagatgaagaagaaaatgctgacaataacacaaaggccaatgtcacaaaaccaaaaaggtgtagtggaagtatctgctatgggactattgctgtgatcgtctttttcttgattggatttatgattggctacttgggctattgtaaaggggtagaaccaaaaactgagtgtgagagactggcaggaaccgagtctccagtgagggaggagccaggagaggacttccctgcagcacgtcgcttatattgggatgacctgaagagaaagttgtcggagaaactggacagcacagacttcaccagcaccatcaagctgctgaatgaaaattcatatgtccctcgtgaggctggatctcaaaaagatgaaaatcttgcgttgtatgttgaaaatcaatttcgtgaatttaaactcagcaaagtctggcgtgatcaacattttgttaagattcaggtcaaagacagcgctcaaaactcggtgatcatagttgataagaacggtagacttgtttacctggtggagaatcctgggggttatgtggcgtatagtaaggctgcaacagttactggtaaactggtccatgctaattttggtactaaaaaagattttgaggatttatacactcctgtgaatggatctatagtgattgtcagagcagggaaaatcacctttgcagaaaaggttgcaaatgctgaaagcttaaatgcaattggtgtgttgatatacatggaccagactaaatttcccattgttaacgcagaactttcattctttggacatgctcatctggggacaggtgacccttacacacctggattcccttccttcaatcacactcagtttccaccatctcggtcatcaggattgcctaatatacctgtccagacaatctccagagctgctgcagaaaagctgtttgggaatatggaaggagactgtccctctgactggaaaacagactctacatgtaggatggtaacctcagaaagcaagaatgtgaagctcactgtgagcaatgtgctgaaagagataaaaattcttaacatctttggagttattaaaggctttgtagaaccagatcactatgttgtagttggggcccagagagatgcatggggccctggagctgcaaaatccggtgtaggcacagctctcctattgaaacttgcccagatgttctcagatatggtcttaaaagatgggtttcagcccagcagaagcattatctttgccagttggagtgctggagactttggatcggttggtgccactgaatggctagagggatacctttcgtccctgcatttaaaggctttcacttatattaatctggataaagcggttcttggtaccagcaacttcaaggtttctgccagcccactgttgtatacgcttattgagaaaacaatgcaaaatgtgaagcatccggttactgggcaatttctatatcaggacagcaactgggccagcaaagttgagaaactcactttagacaatgctgctttccctttccttgcatattctggaatcccagcagtttctttctgtttttgcgaggacacagattatccttatttgggtaccaccatggacacctataaggaactgattgagaggattcctgagttgaacaaagtggcacgagcagctgcagaggtcgctggtcagttcgtgattaaactaacccatgatgttgaattgaacctggactatgagaggtacaacagccaactgctttcatttgtgagggatctgaaccaatacagagcagacataaaggaaatgggcctgagtttacagtggctgtattctgctcgtggagacttcttccgtgctacttccagactaacaacagatttcgggaatgctgagaaaacagacagatttgtcatgaagaaactcaatgatcgtgtcatgagagtggagtatcacttcctctctccctacgtatctccaaaagagtctcctttccgacatgtcttctggggctccggctctcacacgctgccagctttactggagaacttgaaactgcgtaaacaaaataacggtgcttttaatgaaacgctgttcagaaaccagttggctctagctacttggactattcagggagctgcaaatgccctctctggtgacgtttgggacattgacaatgagttttaaatgtgatacccatagcttccatgagaacagcagggtagtctggtttctagacttgtgctgatcgtgctaaattttcagtagggctacaaaacctgatgttaaaattccatcccatcatcttggtactactagatgtctttaggcagcagcttttaatacagggtagataacctgtacttcaagttaaagtgaataaccacttaaaaaatgtccatgatggaatattcccctatctctagaattttaagtgctttgtaatgggaactgcctctttcctgttgttgttaatgaaaatgtcagaaaccagttatgtgaatgatctctctgaatcctaagggctggtctctgctgaaggttgtaagtggtcgcttactttgagtgatcctccaacttcatttgatgctaaataggagataccaggttgaaagaccttctccaaatgagatctaagcctttccataaggaatgtagctggtttcctcattcctgaaagaaacagttaactttcagaagagatgggcttgttttcttgccaatgaggtctgaaatggaggtccttctgctggataaaatgaggttcaactgttgattgcaggaataaggccttaatatgttaacctcagtgtcatttatgaaaagaggggaccagaagccaaagacttagtatattttcttttcctctgtcccttcccccataagcctccatttagttctttgttatttttgtttcttccaaagcacattgaaagagaaccagtttcaggtgtttagttgcagactcagtttgtcagactttaaagaataatatgctgccaaattttggccaaagtgttaatcttaggggagagctttctgtccttttggcactgagatatttattgtttatttatcagtgacagagttcactataaatggtgtttttttaatagaatataattatcggaagcagtgccttccataattatgacagttatactgtcggttttttttaaataaaagcagcatctgctaataaaacccaacagatactggaagttttgcatttatggtcaacacttaagggttttagaaaacagccgtcagccaaatgtaattgaataaagttgaagctaagatttagagatgaattaaatttaattaggggttgctaagaagcgagcactgaccagataagaatgctggttttcctaaatgcagtgaattgtgaccaagttataaatcaatgtcacttaaaggctgtggtagtactcctgcaaaattttatagctcagtttatccaaggtgtaactctaattcccattttgcaaaatttccagtacctttgtcacaatcctaacacattatcgggagcagtgtcttccataatgtataaagaacaaggtagtttttacctaccacagtgtctgtatcggagacagtgatctccatatgttacactaagggtgtaagtaattatccgggaacagtgtttcccataattttcttcatgcaatgacatcttcaaagcttgaagatcgttagtatctaacatgtatcccaactcctataattccctatcttttagttttagttgcagaaacattttgtggtcattaagcattgggtgggtaaattcaaccactgtaaaatgaaattactacaaaatttgaaatttagcttgggtttttgttacctttatggtttctccaggtcctctacttaatgagatagtagcatacatttataatgtttgctattgacaagtcattttaactttatcacattatttgcatgttacctcctataaacttagtgcggacaagttttaatccagaattgaccttttgacttaaagcagagggactttgtatagaaggtttgggggctgtggggaaggagagtcccctgaaggtctgacacgtctgcctacccattcgtggtgatcaattaaatgtaggtatgaataagttcgaagctccgtgagtgaaccatcattataaacgtgatgatcagctgtttgtcatagggcagttggaaacggcctcctagggaaaagttcatagggtctcttcaggttcttagtgtcacttacctagatttacagcctcacttgaatgtgtcactactcacagtctctttaatcttcagttttatctttaatctcctcttttatcttggactgacatttagcgtagctaagtgaaaaggtcatagctgagattcctggttcgggtgttacgcacaccacgttacctttaaattgaaaaagcatgttgggcattgtttccatccgttattaaccaccaaattantgaaattaccaggggcattgccattttttgccanccaanttgaaatt

SEQ ID NO: 80994 - DNA, 937 bp, Homo sapiens
  misc_feature (934)..(934): n is a, c, g, or t
ctctaaggatctctactaaatggctgtagagggactttgtatagaaggtttgggggctgtggggaaggagagtcccctgaaggtctgacacgtctgcctacccattcgtggtgatcaattaaatgtaggtatgaataagttcgaagctccgtgagtgaaccatcattataaacgtgatgatcagctgtttgtcatagggcagttggaaacggcctcctagggaaaagttcatagggtctcttcaggttcttagtgtcacttacctagatttacagcctcacttgaatgtgtcactactcacagtctctttaatcttcagttttatctttaatctcctcttttatcttggactgacatttagcgtagctaagtgaaaaggtcatagctgagattcctggttcgggtgttacgcacacgtacttaaatgaaagcatgtggcatgttcatcgtataacacaatatgaatacagggcatgcattttgcagcagtgagtctcttcagaaaacccttttctacagttagggttgagttacttcctatcaagccagtacgtgctaacaggctcaatattcctgaatgaaatatcagactagtgacaagctcctggtcttgagatgtcttctcgttaaggagatgggccttttggaggtaaaggataaaatgaatgagttctgtcatgattcactattctagaacttgcatgacctttactgtgttagctctttgaatgttcttgaaattttagactttctttgtaaacaaatgatatgtccttatcattgtataaaagctgttatgtgcaacagtgtggagattccttgtctgatttaataaaatacttaaacactgaaaaaaaaaaaaaaagcggcgcgccgcttctagtagtatctcctcgtagggagacacaaggcttacgcggtacccatgctttcnttg

SEQ ID NO: 80995 - DNA, 1074 bp, Homo sapiens
  misc_feature (1071)..(1071): n is a, c, g, or t
caataaggttagtctgcttgttgcatgaagattattataacgttggttgaaaatgtgcgacaatttaatcgtccatactatacaataggtgccctatcttagatgatatgtcgcatgactgtggggctcgtttagtactcaaagagcaactatggaacctaccatttatgtggcaagatgtgcgtctgagctatacggtagtcaccctgaaccagtcagaacacgttctcggcttgccattactaagagatctagactatgtagagtatgaataagttcgaagctccgtgagtgaaccatcattataaacgtgatgatcagctgtttgtcatagggcagttggaaacggcctcctagggaaaagttcatagggtctcttcaggttcttagtgtcacttacctagatttacagcctcacttgaatgtgtcactactcacagtctctttaatcttcagttttatctttaatctcctcttttatcttggactgacatttagcgtagctaagtgaaaaggtcatagctgagattcctggttcgggtgttacgcacacgtacttaaatgaaagcatgtggcatgttcatcgtataacacaatatgaatacagggcatgcattttgcagcagtgagtctcttcagaaaacccttttctacagttagggttgagttacttcctatcaagccagtacgtgctaacaggctcaatattcctgaatgaaatatcagactagtgacaagctcctggtcttgagatgtcttctcgttaaggagatgggccttttggaggtaaaggataaaatgaatgagttctgtcatgattcactattctagaacttgcatgacctttactgtgttagctctttgaatgttcttgaaattttagactttctttgtaaacaaatgatatgtccttatcattgtataaaagctgttatgtgcaacagtgtggagattccttgtctgatttaataaaatacttaaacactgaaaaaaaaaaaaaaagcggcgcgccgcttctagtagtatctcctcgtagggagacacaaggcttacgcggtacccatgctttcnttg

SEQ ID NO: 80996 - DNA, 4460 bp, Homo sapiens
  misc_feature (4460)..(4460): n is a, c, g, or t
cagtgcgcccatcgcgcggctcctcggggcacctgctgccttggcgccttttcccttggccttcgcctcgcccgcagcgccctccgcatagggccccgcccgctgcgcgcgcatccccgccccccgggcgatctgtcagagcacctcgcgagcgtacgtgcctcaggaagtgacgcacagcccccctgggggccgggggcggggccaggctataaaccgccggttaggggccgccatcccctcagagcgtcgggatatcgggtggcggctcgggacggaggacgcgctagtgtgagtgcgggcttctagaactacaccgaccctcgtgtcctcccttcatcctgcggggctggctggagcggccgctccggtgctgtccagcagccatagggagccgcacggggagcgggaaagcggtcgcggccccaggcggggcggccgggatggagcggggccgcgagcctgtggggaaggggctgtggcggcgcctcgagcggctgcaggttcttctgtgtggcagttcagaatgatggatcaagctagatcagcattctctaacttgtttggtggagaaccattgtcatatacccggttcagcctggctcggcaagtagatggcgataacagtcatgtggagatgaaacttgctgtagatgaagaagaaaatgctgacaataacacaaaggccaatgtcacaaaaccaaaaaggtgtagtggaagtatctgctatgggactattgctgtgatcgtctttttcttgattggatttatgattggctacttgggctattgtaaaggggtagaaccaaaaactgagtgtgagagactggcaggaaccgagtctccagtgagggaggagccaggagaggacttccctgcagcacgtcgcttatattgggatgacctgaagagaaagttgtcggagaaactggacagcacagacttcaccagcaccatcaagctgctgaatgaaaattcatatgtccctcgtgaggctggatctcaaaaagatgaaaatcttgcgttgtatgttgaaaatcaatttcgtgaatttaaactcagcaaagtctggcgtgatcaacattttgttaagattcaggtcaaagacagcgctcaaaactcggtgatcatagttgataagaacggtagacttgtttacctggtggagaatcctgggggttatgtggcgtatagtaaggctgcaacagttactggtaaactggtccatgctaattttggtactaaaaaagattttgaggatttatacactcctgtgaatggatctatagtgattgtcagagcagggaaaatcacctttgcagaaaaggttgcaaatgctgaaagcttaaatgcaattggtgtgttgatatacatggaccagactaaatttcccattgttaacgcagaactttcattctttggacatgctcatctggggacaggtgacccttacacacctggattcccttccttcaatcacactcagtttccaccatctcggtcatcaggattgcctaatatacctgtccagacaatctccagagctgctgcagaaaagctgtttgggaatatggaaggagactgtccctctgactggaaaacagactctacatgtaggatggtaacctcagaaagcaagaatgtgaagctcactgtgagcaatgtgctgaaagagataaaaattcttaacatctttggagttattaaaggctttgtagaaccagatcactatgttgtagttggggcccagagagatgcatggggccctggagctgcaaaatccggtgtaggcacagctctcctattgaaacttgcccagatgttctcagatatggtcttaaaagatgggtttcagcccagcagaagcattatctttgccagttggagtgctggagactttggatcggttggtgccactgaatggctagagggatacctttcgtccctgcatttaaaggctttcacttatattaatctggataaagcggttcttggtaccagcaacttcaaggtttctgccagcccactgttgtatacgcttattgagaaaacaatgcaaaatgtgaagcatccggttactgggcaatttctatatcaggacagcaactgggccagcaaagttgagaaactcactttagacaatgctgctttccctttccttgcatattctggaatcccagcagtttctttctgtttttgcgaggacacagattatccttatttgggtaccaccatggacacctataaggaactgattgagaggattcctgagttgaacaaagtggcacgagcagctgcagaggtcgctggtcagttcgtgattaaactaacccatgatgttgaattgaacctggactatgagaggtacaacagccaactgctttcatttgtgagggatctgaaccaatacagagcagacataaaggaaatgggcctgagtttacagtggctgtattctgctcgtggagacttcttccgtgctacttccagactaacaacagatttcgggaatgctgagaaaacagacagatttgtcatgaagaaactcaatgatcgtgtcatgagagtggagtatcacttcctctctccctacgtatctccaaaagagtctcctttccgacatgtcttctggggctccggctctcacacgctgccagctttactggagaacttgaaactgcgtaaacaaaataacggtgcttttaatgaaacgctgttcagaaaccagttggctctagctacttggactattcagggagctgcaaatgccctctctggtgacgtttgggacattgacaatgagttttaaatgtgatacccatagcttccatgagaacagcagggtagtctggtttctagacttgtgctgatcgtgctaaattttcagtagggctacaaaacctgatgttaaaattccatcccatcatcttggtactactagatgtctttaggcagcagcttttaatacagggtagataacctgtacttcaagttaaagtgaataaccacttaaaaaatgtccatgatggaatattcccctatctctagaattttaagtgctttgtaatgggaactgcctctttcctgttgttgttaatgaaaatgtcagaaaccagttatgtgaatgatctctctgaatcctaagggctggtctctgctgaaggttgtaagtggtcgcttactttgagtgatcctccaacttcatttgatgctaaataggagataccaggttgaaagaccttctccaaatgagatctaagcctttccataaggaatgtagctggtttcctcattcctgaaagaaacagttaactttcagaagagatgggcttgttttcttgccaatgaggtctgaaatggaggtccttctgctggataaaatgaggttcaactgttgattgcaggaataaggccttaatatgttaacctcagtgtcatttatgaaaagaggggaccagaagccaaagacttagtatattttcttttcctctgtcccttcccccataagcctccatttagttctttgttatttttgtttcttccaaagcacattgaaagagaaccagtttcaggtgtttagttgcagactcagtttgtcagactttaaagaataatatgctgccaaattttggccaaagtgttaatcttaggggagagctttctgtccttttggcactgagatatttattgtttatttatcagtgacagagttcactataaatggtgtttttttaatagaatataattatcggaagcagtgccttccataattatgacagttatactgtcggttttttttaaataaaagcagcatctgctaataaaacccaacagatactggaagttttgcatttatggtcaacacttaagggttttagaaaacagccgtcagccaaatgtaattgaataaagttgaagctaagatttagagatgaattaaatttaattaggggttgctaagaagcgagcactgaccagataagaatgctggttttcctaaatgcagtgaattgtgaccaagttataaatcaatgtcacttaaaggctgtggtagtactcctgcaaaattttatagctcagtttatccaaggtgtaactctaattcccattttgcaaaatttccagtacctttgtcacaatcctaacacattatcgggagcagtgtcttccataatgtataaagaacaaggtagtttttacctaccacagtgtctgtatcggagacagtgatctccatatgttacactaagggtgtaagtaattatccgggaacagtgtttcccataattttcttcatgcaatgacatcttcaaagcttgaagatcgttagtatctaacatgtatcccaactcctataattccctatcttttagttttagttgcagaaacattttgtggtcattaagcattgggtgggtaaattcaaccactgtaaaggtttcttccagtcctctacttan

SEQ ID NO: 80997 - DNA, 2687 bp, Homo sapiens
gagctcggtaccctgtctccgtttcgggacgttaagagccgaagtatttcatccccccccccgagagagcgtctgtctccgtttcgggacggaggacgcgctagtgttcttctgtgtggcagttcagaatgatggatcaagctagatcagcattctctaacttgtttggtggagaaccattgtcatatacccggttcagcctggctcggcaagtagatggcgataacagtcatgtggagatgaaacttgctgtagatgaagaagaaaatgctgacaataacacaaaggccaatgtcacaaaaccaaaaaggtgtagtggaagtatctgctatgggactattgctgtgatcgtctttttcttgattggatttatgattggctacttgggctattgtaaaggggtagaaccaaaaactgagtgtgagagactggcaggaaccgagtctccagtgagggaggagccaggagaggacttccctgcagcacgtcgcttatattgggatgacctgaagagaaagttgtcggagaaactggacagcacagacttcaccagcaccatcaagctgctgaatgaaaattcatatgtccctcgtgaggctggatctcaaaaagatgaaaatcttgcgttgtatgttgaaaatcaatttcgtgaatttaaactcagcaaagtctggcgtgatcaacattttgttaagattcaggtcaaagacagcgctcaaaactcggtgatcatagttgataagaacggtagacttgtttacctggtggagaatcctgggggttatgtggcgtatagtaaggctgcaacagttactggtaaactggtccatgctaattttggtactaaaaaagattttgaggatttatacactcctgtgaatggatctatagtgattgtcagagcagggaaaatcacctttgcagaaaaggttgcaaatgctgaaagcttaaatgcaattggtgtgttgatatacatggaccagactaaatttcccattgttaacgcagaactttcattctttggacatgctcatctggggacaggtgacccttacacacctggattcccttccttcaatcacactcagtttccaccatctcggtcatcaggattgcctaatatacctgtccagacaatctccagagctgctgcagaaaagctgtttgggaatatggaaggagactgtccctctgactggaaaacagactctacatgtaggatggtaacctcagaaagcaagaatgtgaagctcactgtgagcaatgtgctgaaagagataaaaattcttaacatctttggagttattaaaggctttgtagaaccagatcactatgttgtagttggggcccagagagatgcatggggccctggagctgcaaaatccggtgtaggcacagctctcctattgaaacttgcccagatgttctcagatatggtcttaaaagatgggtttcagcccagcagaagcattatctttgccagttggagtgctggagactttggatcggttggtgccactgaatggctagagggatacctttcgtccctgcatttaaaggctttcacttatattaatctggataaagcggttcttggtaccagcaacttcaaggtttctgccagcccactgttgtatacgcttattgagaaaacaatgcaaaatgtgaagcatccggttactgggcaatttctatatcaggacagcaactgggccagcaaagttgagaaactcactttagacaatgctgctttccctttccttgcatattctggaatcccagcagtttctttctgtttttgcgaggacacagattatccttatttgggtaccaccatggacacctataaggaactgattgagaggattcctgagttgaacaaagtggcacgagcagctgcagaggtcgctggtcagttcgtgattaaactaacccatgatgttgaattgaacctggactatgagaggtacaacagccaactgctttcatttgtgagggatctgaaccaatacagagcagacataaaggaaatgggcctgagtttacagtggctgtattctgctcgtggagacttcttccgtgctacttccagactaacaacagatttcgggaatgctgagaaaacagacagatttgtcatgaagaaactcaatgatcgtgtcatgagagtggagtatcacttcctctctccctacgtatctccaaaagagtctcctttccgacatgtcttctggggctccggctctcacacgctgccagctttactggagaacttgaaactgcgtaaacaaaataacggtgcttttaatgaaacgctgttcagaaaccagttggctctagctacttggactattcagggagctgcaaatgccctctctggtgacgtttgggacattgacaatgagttttaaatgtgatacccatagcttccatgagaacagcagggtagtctggtttctagacttgtgctgatcgtgctaaattttcagtagggctacaaaacctgatgttaaaattccatcccatcatcttggtactactagatgtctttaggcagcagcttttaatacagggtagataacctgtacttcaagttaaagtgaataaccacttaaaaaatgtccatgatggaatattcccctatctctagaattttaagtgctttcctaggttttcccatgtcacga

SEQ ID NO: 80998 - DNA, 446 bp, Homo sapiens
  misc_feature (443)..(443): n is a, c, g, or t
tgagctcggtaccagttacacagctcagttagggttgagttacttcctatcaagccagtacgtgctaacaggctcaatattcctgaatgaaatatcagactagtgacaagctcctggtcttgagatgtcttctcgttaaggagatgggccttttggaggtaaaggataaaatgaatgagttctgtcatgattcactattctagaacttgcatgacctttactgtgttagctctttgaatgttcttgaaattttagactttctttgtaaacaaatgatatgtccttatcattgtataaaagctgttatgtgcaacagtgtggagattccttgtctgatttaataaaatacttaaacactgaaaaaaaaaaaaaaagcggcgcgccgcttctagtagtatctcctcgtagggagacacaaggcttacgcggtacccatgctttcnttg

SEQ ID NO: 80999 - DNA, 2415 bp, Homo sapiens
gagctcggtaccctgtctccgtttcgggacgttaagagccgaagtatttcatccccccccccgagagagcgtctgtctccgtttcgggacggaggacgcgctagtgttcttctgtgtggcagttcagaatgatggatcaagctagatcagcattctctaacttgtttggtggagaaccattgtcatatacccggttcagcctggctcggcaagtagatggcgataacagtcatgtggagatgaaacttgctgtagatgaagaagaaaatgctgacaataacacaaaggccaatgtcacaaaaccaaaaaggtgtagtggaagtatctgctatgggactattgctgtgatcgtctttttcttgattggatttatgattggctacttgggctattgtaaaggggtagaaccaaaaactgagtgtgagagactggcaggaaccgagtctccagtgagggaggagccaggagaggacttccctgcagcacgtcgcttatattgggatgacctgaagagaaagttgtcggagaaactggacagcacagacttcaccagcaccatcaagctgctgaatgaaaattcatatgtccctcgtgaggctggatctcaaaaagatgaaaatcttgcgttgtatgttgaaaatcaatttcgtgaatttaaactcagcaaagtctggcgtgatcaacattttgttaagattcaggtcaaagacagcgctcaaaactcggtgatcatagttgataagaacggtagacttgtttacctggtggagaatcctgggggttatgtggcgtatagtaaggctgcaacagttactggtaaactggtccatgctaattttggtactaaaaaagattttgaggatttatacactcctgtgaatggatctatagtgattgtcagagcagggaaaatcacctttgcagaaaaggttgcaaatgctgaaagcttaaatgcaattggtgtgttgatatacatggaccagactaaatttcccattgttaacgcagaactttcattctttggacatgctcatctggggacaggtgacccttacacacctggattcccttccttcaatcacactcagtttccaccatctcggtcatcaggattgcctaatatacctgtccagacaatctccagagctgctgcagaaaagctgtttgggaatatggaaggagactgtccctctgactggaaaacagactctacatgtaggatggtaacctcagaaagcaagaatgtgaagctcactgtgagcaatgtgctgaaagagataaaaattcttaacatctttggagttattaaaggctttgtagaaccagatcactatgttgtagttggggcccagagagatgcatggggccctggagctgcaaaatccggtgtaggcacagctctcctattgaaacttgcccagatgttctcagatatggtcttaaaagatgggtttcagcccagcagaagcattatctttgccagttggagtgctggagactttggatcggttggtgccactgaatggctagagggatacctttcgtccctgcatttaaaggctttcacttatattaatctggataaagcggttcttggtaccagcaacttcaaggtttctgccagcccactgttgtatacgcttattgagaaaacaatgcaaaatgtgaagcatccggttactgggcaatttctatatcaggacagcaactgggccagcaaagttgagaaactcactttagacaatgctgctttccctttccttgcatattctggaatcccagcagtttctttctgtttttgcgaggacacagattatccttatttgggtaccaccatggacacctataaggaactgattgagaggattcctgagttgaacaaagtggcacgagcagctgcagaggtcgctggtcagttcgtgattaaactaacccatgatgttgaattgaacctggactatgagaggtacaacagccaactgctttcatttgtgagggatctgaaccaatacagagcagacataaaggaaatgggcctgagtttacagtggctgtattctgctcgtggagacttcttccgtgctacttccagactaacaacagatttcgggaatgctgagaaaacagacagatttgtcatgaagaaactcaatgatcgtgtcatgagagtgggggaggggagactggagagttattgtttgatgggtatagaatttcattttgcaagatgagaagacttctggagatagatggtggtgatgatggcacaccaatatgaatacactaataccactaaattatactcttaaaagtgattaagatagtaaattttacgttgtgtgtattttaccaaaataaaacatggtggggggctgggtggggggaagcaataagagaaaaaagactggttaaagg

SEQ ID NO: 81000 - DNA, 3072 bp, Homo sapiens
cagtgcgcccatcgcgcggctcctcggggcacctgctgccttggcgccttttcccttggccttcgcctcgcccgcagcgccctccgcatagggccccgcccgctgcgcgcgcatccccgccccccgggcgatctgtcagagcacctcgcgagcgtacgtgcctcaggaagtgacgcacagcccccctgggggccgggggcggggccaggctataaaccgccggttaggggccgccatcccctcagagcgtcgggatatcgggtggcggctcgggacggaggacgcgctagtgtgagtgcgggcttctagaactacaccgaccctcgtgtcctcccttcatcctgcggggctggctggagcggccgctccggtgctgtccagcagccatagggagccgcacggggagcgggaaagcggtcgcggccccaggcggggcggccgggatggagcggggccgcgagcctgtggggaaggggctgtggcggcgcctcgagcggctgcaggttcttctgtgtggcagttcagaatgatggatcaagctagatcagcattctctaacttgtttggtggagaaccattgtcatatacccggttcagcctggctcggcaagtagatggcgataacagtcatgtggagatgaaacttgctgtagatgaagaagaaaatgctgacaataacacaaaggccaatgtcacaaaaccaaaaaggtgtagtggaagtatctgctatgggactattgctgtgatcgtctttttcttgattggatttatgattggctacttgggctattgtaaaggggtagaaccaaaaactgagtgtgagagactggcaggaaccgagtctccagtgagggaggagccaggagaggacttccctgcagcacgtcgcttatattgggatgacctgaagagaaagttgtcggagaaactggacagcacagacttcaccagcaccatcaagctgctgaatgaaaattcatatgtccctcgtgaggctggatctcaaaaagatgaaaatcttgcgttgtatgttgaaaatcaatttcgtgaatttaaactcagcaaagtctggcgtgatcaacattttgttaagattcaggtcaaagacagcgctcaaaactcggtgatcatagttgataagaacggtagacttgtttacctggtggagaatcctgggggttatgtggcgtatagtaaggctgcaacagttactggtaaactggtccatgctaattttggtactaaaaaagattttgaggatttatacactcctgtgaatggatctatagtgattgtcagagcagggaaaatcacctttgcagaaaaggttgcaaatgctgaaagcttaaatgcaattggtgtgttgatatacatggaccagactaaatttcccattgttaacgcagaactttcattctttggacatgctcatctggggacaggtgacccttacacacctggattcccttccttcaatcacactcagtttccaccatctcggtcatcaggattgcctaatatacctgtccagacaatctccagagctgctgcagaaaagctgtttgggaatatggaaggagactgtccctctgactggaaaacagactctacatgtaggatggtaacctcagaaagcaagaatgtgaagctcactgtgagcaatgtgctgaaagagataaaaattcttaacatctttggagttattaaaggctttgtagaaccagatcactatgttgtagttggggcccagagagatgcatggggccctggagctgcaaaatccggtgtaggcacagctctcctattgaaacttgcccagatgttctcagatatggtcttaaaaggtagagtacaaattttgattcttttgaatattggtgcactgcatacagttctagatgttatactgtgctttgctcactttgcctgcattcctgtggttctcatgctagactctagttcttaaatacaaggcagattgtcttttgttgtagctgccttttcctttgaaacagctttccataaagtgtcttaactgtgctagaaatcaccagtttctttgagacagtggagttactgagccctagtgcttagtgtggtggatccagagtgataaggtggatcatagtccctaagcaatctatttgaaagcagtagcatacctctctactcatgtactgaggcctaacagctattgaaattttgttctgtttattcatttattcattttttgagacagagtttcactctgttgcccaggctggagtgcagtggtgtgatctcacttagctcactgcaacctctgcctcccgacttcaagcaattctcctgcctcagcctcctgagtagctgggattacaggcacccacaaccacacccggccaatttttgtatttttactagagacagggtttcgccatgttggccaggctagtctcctgacctcaagtgattcacccgcctcagcctcccaaaatgctgctagtgagccaccgtgccctgcctcttttgtttatttttgagcctttctgtcctactttccactctttcacactcctacccacccacacattcaaaatcacgtcacattcttgaatctttgggtcttagggcaaactgcaatgcttaactttaatacagagtacattaatggagaaaaagatacagtgagggaagtgggagggatggagggcagtgtgatacatgtaacctcaaaaggtgctgtcacaaatatagtttctctgcaaactcttcttgtaacttaaatttgtgaatttttattttattttagaattatttttttaaaaatccaatgtttggatttacctctgaagatttttctcaagatgtgcatcatcatgcttacactgttttcaatgatctctgggtccagaagttaaggaactccaagaatgaaattgtgaaagggtgactactggcccctgctatgtactcaaaatcttatttgcagatctcctatcttgctctttgtaggttacttaaaaaaaaattattcctattcttttattcttttacctggggtctcaaaaaaagattttgttagtttttttt

SEQ ID NO: 81001 - DNA, 3103 bp, Homo sapiens
cagtgcgcccatcgcgcggctcctcggggcacctgctgccttggcgccttttcccttggccttcgcctcgcccgcagcgccctccgcatagggccccgcccgctgcgcgcgcatccccgccccccgggcgatctgtcagagcacctcgcgagcgtacgtgcctcaggaagtgacgcacagcccccctgggggccgggggcggggccaggctataaaccgccggttaggggccgccatcccctcagagcgtcgggatatcgggtggcggctcgggacggaggacgcgctagtgtgagtgcgggcttctagaactacaccgaccctcgtgtcctcccttcatcctgcggggctggctggagcggccgctccggtgctgtccagcagccatagggagccgcacggggagcgggaaagcggtcgcggccccaggcggggcggccgggatggagcggggccgcgagcctgtggggaaggggctgtggcggcgcctcgagcggctgcaggttcttctgtgtggcagttcagaatgatggatcaagctagatcagcattctctaacttgtttggtggagaaccattgtcatatacccggttcagcctggctcggcaagtagatggcgataacagtcatgtggagatgaaacttgctgtagatgaagaagaaaatgctgacaataacacaaaggccaatgtcacaaaaccaaaaaggtgtagtggaagtatctgctatgggactattgctgtgatcgtctttttcttgattggatttatgattggctacttgggctattgtaaaggggtagaaccaaaaactgagtgtgagagactggcaggaaccgagtctccagtgagggaggagccaggagaggacttccctgcagcacgtcgcttatattgggatgacctgaagagaaagttgtcggagaaactggacagcacagacttcaccagcaccatcaagctgctgaatgaaaattcatatgtccctcgtgaggctggatctcaaaaagatgaaaatcttgcgttgtatgttgaaaatcaatttcgtgaatttaaactcagcaaagtctggcgtgatcaacattttgttaagattcaggtcaaagacagcgctcaaaactcggtgatcatagttgataagaacggtagacttgtttacctggtggagaatcctgggggttatgtggcgtatagtaaggctgcaacagttactggtaaactggtccatgctaattttggtactaaaaaagattttgaggatttatacactcctgtgaatggatctatagtgattgtcagagcagggaaaatcacctttgcagaaaaggttgcaaatgctgaaagcttaaatgcaattggtgtgttgatatacatggaccagactaaatttcccattgttaacgcagaactttcattctttggacatgctcatctggggacaggtgacccttacacacctggattcccttccttcaatcacactcagtttccaccatctcggtcatcaggattgcctaatatacctgtccagacaatctccagagctgctgcagaaaagctgtttgggaatatggaaggagactgtccctctgactggaaaacagactctacatgtaggatggtaacctcagaaagcaagaatgtgaagctcactgtgagcaatgtgctgaaagagataaaaattcttaacatctttggagttattaaaggctttgtagaaccagatcactatgttgtagttggggcccagagagatgcatggggccctggagctgcaaaatccggtgtaggcacagctctcctattgaaacttgcccagatgttctcagatatggtcttaaaagatgggtttcagcccagcagaagcattatctttgccagttggagtgctggagactttggatcggttggtgccactgaatggctagagggatacctttcgtccctgcatttaaaggctttcacttatattaatctggataaagcggttcttggtaccagcaacttcaaggtttctgccagcccactgttgtatacgcttattgagaaaacaatgcaaaatgtgaagcatccggttactgggcaatttctatatcaggacagcaactgggccagcaaagttgagaaactcactttagacaatgctgctttccctttccttgcatattctggaatcccagcagtttctttctgtttttgcgaggtaagtctgttcatttaaatgacaaatggagagaggctctctaaaaggaagtgatctgtatttgggaatagggcattgcaatgggaatgcctgtgctatagtcaactatgtacatattcagaggagtaaaggaaaacaagtttttaaggacaaatgacgaggattacaaaattactttgaggtaattattcttggctaccaagatcaataacaaggatgacaccagtccaaggttgacaggcagttgctaggcagattttctcacgagagaagttttttggtgcaaggttgcagtggcctttgtgtaaggttgtagtttttgtaaaaaggaaaaaaaaacccttaatccttgttatcagacatacaagggtgagacccttctcttcagggttgcatttttgttaacactagtgactccattttgattttgacaacttgcacatatcttagttgttgggttttttttgtttgttttttgttttgttttttttttttttttgacaatggtgacttgctctgtcacccaggctggggtgcagtggcccgatcatggctcactgcagcctcaagcagtcctcccccttcagcctccaaactgtttggattataggcaagagctacttactacacctggccatggatcttcttgtgtcaactttgagaccaaatttactgcagtgcttaaaatgttttaagaagttatacacatgtgctggatgtggtagctcacgcctgtaatcctgtagcaggacaagccgcagacaaatcccctcagacaccgagttaaagaaggaagggctttatttggctgggagctttggcaagactcacgtctccaaaaactgagctccccgagtgagcaattcctgacctttttaagggcttacaactaagggagtc

SEQ ID NO: 81002 - DNA, 1945 bp, Homo sapiens
cagtgcgcccatcgcgcggctcctcggggcacctgctgccttggcgccttttcccttggccttcgcctcgcccgcagcgccctccgcatagggccccgcccgctgcgcgcgcatccccgccccccgggcgatctgtcagagcacctcgcgagcgtacgtgcctcaggaagtgacgcacagcccccctgggggccgggggcggggccaggctataaaccgccggttaggggccgccatcccctcagagcgtcgggatatcgggtggcggctcgggacggaggacgcgctagtgtgagtgcgggcttctagaactacaccgaccctcgtgtcctcccttcatcctgcggggctggctggagcggccgctccggtgctgtccagcagccatagggagccgcacggggagcgggaaagcggtcgcggccccaggcggggcggccgggatggagcggggccgcgagcctgtggggaaggggctgtggcggcgcctcgagcggctgcaggttcttctgtgtggcagttcagaatgatggatcaagctagatcagcattctctaacttgtttggtggagaaccattgtcatatacccggttcagcctggctcggcaagtagatggcgataacagtcatgtggagatgaaacttgctgtagatgaagaagaaaatgctgacaataacacaaaggccaatgtcacaaaaccaaaaaggtgtagtggaagtatctgctatgggactattgctgtgatcgtctttttcttgattggatttatgattggctacttgggctattgtaaaggggtagaaccaaaaactgagtgtgagagactggcaggaaccgagtctccagtgagggaggagccaggagaggacttccctgcagcacgtcgcttatattgggatgacctgaagagaaagttgtcggagaaactggacagcacagacttcaccagcaccatcaagctgctgaatgaaaattcatatgtccctcgtgaggctggatctcaaaaagatgaaaatcttgcgttgtatgttgaaaatcaatttcgtgaatttaaactcagcaaagtctggcgtgatcaacattttgttaagattcaggtcaaagacagcgctcaaaactcggtgatcatagttgataagaacggtagacttgtttacctggtggagaatcctgggggttatgtggcgtatagtaaggctgcaacagttactggtaaactggtccatgctaattttggtactaaaaaagattttgaggatttatacactcctgtgaatggatctatagtgattgtcagagcagggaaaatcacctttgcagaaaaggttgcaaatgctgaaagcttaaatgcaattggtgtgttgatatacatggaccagactaaatttcccattgttaacgcagaactttcattctttggacatgctcatctggggacaggtgacccttacacacctggattcccttccttcaatcacactcagtttccaccatctcggtcatcaggattgcctaatatacctgtccagacaatctccagagctgctgcagaaaagctgtttgggtaagtttttatttgaaagcggtcttgcatagtgaggttttatgattagggaagaacggtaatatgttgattaaaatgttaaacatgatgataattttccacatttgggaatttggaggatggttagctgttaccttggtacagatataaatgaatttttctctataaagagatcttaataatggactttggacttataaacacaggagaataaggagacttataaacccagtgaattccttgtgcaagattcctggcatagcttctgctcaagtacttctgtgctgaagcacgatgcctatagcagcccattcagttagtagagagaatctgttagaattcatattgggatggtatgattccagttaccttgtctata

SEQ ID NO: 81003 - DNA, 1113 bp, Homo sapiens
cagtgcgcccatcgcgcggctcctcggggcacctgctgccttggcgccttttcccttggccttcgcctcgcccgcagcgccctccgcatagggccccgcccgctgcgcgcgcatccccgccccccgggcgatctgtcagagcacctcgcgagcgtacgtgcctcaggaagtgacgcacagcccccctgggggccgggggcggggccaggctataaaccgccggttaggggccgccatcccctcagagcgtcgggatatcgggtggcggctcgggacggaggacgcgctagtgtgagtgcgggcttctagaactacaccgaccctcgtgtcctcccttcatcctgcggggctggctggagcggccgctccggtgctgtccagcagccatagggagccgcacggggagcgggaaagcggtcgcggccccaggcggggcggccgggatggagcggggccgcgagcctgtggggaaggggctgtggcggcgcctcgagcggctgcaggttcttctgtgtggcagttcagaatgatggatcaagctagatcagcattctctaacttgtttggtggagaaccattgtcatatacccggttcagcctggctcggcaagtagatggcgataacagtcatgtggagatgaaacttgctgtagatgaagaagaaaatgctgacaataacacaaaggccaatgtcacaaaaccaaaaaggtgtagtggaagtatctgctatgggactattgctgtgatcgtctttttcttgattggatttatgattggctacttgggctattgtaaaggggtagaaccaaaaactgagtgtgagagactggcaggaaccgagtctccagtgagggaggagccaggagaggacttccctgcagcacgtcgcttatattgggatgacctgaagagaaagttgtcggagaaactggacagcacagacttcaccagcaccatcaagtgagtgccagctgctgtgcaagtatctagacaagtaattcaagaattatgataggccacggggaaacaataatggtgacactgtggggaatggcttgttagagaagacaagacttgtcatgtttagctaaagaggggaaggggcctgtaaaa

SEQ ID NO: 81004 - DNA, 622 bp, Homo sapiens
ctcaagatgtgcatcatcatgcttacactgttttcaatgatctctgggtccagaagttaaggaactccaagaatgaaattgtgaaagggtgactactggcccctgctatgtactcaaaatcttatttgcagatctcctatcttgctctttgtaggttacttaaaaaaaaattattcctattcttttattcttttacctggggtctcaaaaaaagattttgttagtttttttttttcttttttggctcagaaaaaaaagattttggaatctgctatcttggaattagaccttctgattcatcttaagtgggataccttccatccttgtctgtgtataacctttcctcaggtaaagctaacttttttctctttcagatgggtttcagcccagcagaagcattatctttgccagttggagtgctggagactttggatcggttggtgccactgaatggctagaggtattctttatcatcccttcccatattggacacgagcttgtgggcttaggctgttgtccagaagtgatgtttttataggtttgattttaccacttttgcctttgcgtttagtctcagtagagtccagaattgaaaatgaatccctaatgctactgtatgtga

SEQ ID NO: 81005 - DNA, 405 bp, Homo sapiens
acaggagaataaggagacttataaacccagtgaattccttgtgcaagattcctggcatagcttctgctcaagtacttctgtgctgaagcacgatgcctatagcagcccattcagttagtagagagaatctgttagaattcatattgggataaaatcctattccccgaaacatccatttgtctggatttttcttctaagcaatacggtatgattccagttaccttgtctatagattgagaagccttgcttcttatgatggtttccagagaaaccatttatggttgtggctcgctcctctggatatcctccctgtaacgttagtgtctctctttaaaaacagagcccagttccattagagtacgtagcattaattttgatttggatgtggacatatttatcatttcc

SEQ ID NO: 81006 - DNA, 537 bp, Homo sapiens
tctgatacagtagtatctttttcaataattctctattctgatacctgaggttcttctgtgtggcagttcagaatgatggatcaagctagatcagcattctctaacttggtaagatatttcagttgtatttctgtgtctgcaagaatgtgaaatatacaagcatgactttaactgagtaagcatgaaataataaccccaatctattatcaggtattcatttacatttgattggtagtcttgaggcataactgatctcacaaagagttcagccttcagtagggttaattatggaaagtcttggaagaattctcagagtggttctgggtgtggtagacggggacagcttagtagataagacgaattaaagccctgatcaaaatgttttagtaggagaagtaaaaagcaaaggcttgcggggcgctgtggctcacgcctgtaatcccagcactttgggaggctgaggtgggtggatcacctgtggtcaggagttcaagaccagcctgaccaacatggtgaaactcggtctctactaaaaat

SEQ ID NO: 81007 - DNA, 5554 bp, Homo sapiens
  misc_feature (5551)..(5551): n is a, c, g, or t
cagtgcgcccatcgcgcggctcctcggggcacctgctgccttggcgccttttcccttggccttcgcctcgcccgcagcgccctccgcatagggccccgcccgctgcgcgcgcatccccgccccccgggcgatctgtcagagcacctcgcgagcgtacgtgcctcaggaagtgacgcacagcccccctgggggccgggggcggggccaggctataaaccgccggttaggggccgccatcccctcagagcgtcgggatatcgggtggcggctcgggacggaggacgcgctagtgtgagtgcgggcttctagaactacaccgaccctcgtgtcctcccttcatcctgcggggctggctggagcggccgctccggtgctgtccagcagccatagggagccgcacggggagcgggaaagcggtcgcggccccaggcggggcggccgggatggagcggggccgcgagcctgtggggaaggggctgtggcggcgcctcgagcggctgcaggttcttctgtgtggcagttcagaatgatggatcaagctagatcagcattctctaacttgtttggtggagaaccattgtcatatacccggttcagcctggctcggcaagtagatggcgataacagtcatgtggagatgaaacttgctgtagatgaagaagaaaatgctgacaataacacaaaggccaatgtcacaaaaccaaaaaggtgtagtggaagtatctgctatgggactattgctgtgatcgtctttttcttgattggatttatgattggctacttgggctattgtaaaggggtagaaccaaaaactgagtgtgagagactggcaggaaccgagtctccagtgagggaggagccaggagaggacttccctgcagcacgtcgcttatattgggatgacctgaagagaaagttgtcggagaaactggacagcacagacttcaccagcaccatcaagctgctgaatgaaaattcatatgtccctcgtgaggctggatctcaaaaagatgaaaatcttgcgttgtatgttgaaaatcaatttcgtgaatttaaactcagcaaagtctggcgtgatcaacattttgttaagattcaggtcaaagacagcgctcaaaactcggtgatcatagttgataagaacggtagacttgtttacctggtggagaatcctgggggttatgtggcgtatagtaaggctgcaacagttactggtaaactggtccatgctaattttggtactaaaaaagattttgaggatttatacactcctgtgaatggatctatagtgattgtcagagcagggaaaatcacctttgcagaaaaggttgcaaatgctgaaagcttaaatgcaattggtgtgttgatatacatggaccagactaaatttcccattgttaacgcagaactttcattctttggacatgctcatctggggacaggtgacccttacacacctggattcccttccttcaatcacactcagtttccaccatctcggtcatcaggattgcctaatatacctgtccagacaatctccagagctgctgcagaaaagctgtttgggaatatggaaggagactgtccctctgactggaaaacagactctacatgtaggatggtaacctcagaaagcaagaatgtgaagctcactgtgagcaatgtgctgaaagagataaaaattcttaacatctttggagttattaaaggctttgtagaaccagatcactatgttgtagttggggcccagagagatgcatggggccctggagctgcaaaatccggtgtaggcacagctctcctattgaaacttgcccagatgttctcagatatggtcttaaaagatgggtttcagcccagcagaagcattatctttgccagttggagtgctggagactttggatcggttggtgccactgaatggctagagggatacctttcgtccctgcatttaaaggctttcacttatattaatctggataaagcggttcttggtaccagcaacttcaaggtttctgccagcccactgttgtatacgcttattgagaaaacaatgcaaaatgtgaagcatccggttactgggcaatttctatatcaggacagcaactgggccagcaaagttgagaaactcactttagacaatgctgctttccctttccttgcatattctggaatcccagcagtttctttctgtttttgcgaggacacagattatccttatttgggtaccaccatggacacctataaggaactgattgagaggattcctgagttgaacaaagtggcacgagcagctgcagaggtcgctggtcagttcgtgattaaactaacccatgatgttgaattgaacctggactatgagaggtacaacagccaactgctttcatttgtgagggatctgaaccaatacagagcagacataaaggaaatgggcctgagtttacagtggctgtattctgctcgtggagacttcttccgtgctacttccagactaacaacagatttcgggaatgctgagaaaacagacagatttgtcatgaagaaactcaatgatcgtgtcatgagagtggagtatcacttcctctctccctacgtatctccaaaagagtctcctttccgacatgtcttctggggctccggctctcacacgctgccagctttactggagaacttgaaactgcgtaaacaaaataacggtgcttttaatgaaacgctgttcagaaaccagttggctctagctacttggactattcagggagctgcaaatgccctctctggtgacgtttgggacattgacaatgagttttaaatgtgatacccatagcttccatgagaacagcagggtagtctggtttctagacttgtgctgatcgtgctaaattttcagtagggctacaaaacctgatgttaaaattccatcccatcatcttggtactactagatgtctttaggcagcagcttttaatacagggtagataacctgtacttcaagttaaagtgaataaccacttaaaaaatgtccatgatggaatattcccctatctctagaattttaagtgctttgtaatgggaactgcctctttcctgttgttgttaatgaaaatgtcagaaaccagttatgtgaatgatctctctgaatcctaagggctggtctctgctgaaggttgtaagtggtcgcttactttgagtgatcctccaacttcatttgatgctaaataggagataccaggttgaaagaccttctccaaatgagatctaagcctttccataaggaatgtagctggtttcctcattcctgaaagaaacagttaactttcagaagagatgggcttgttttcttgccaatgaggtctgaaatggaggtccttctgctggataaaatgaggttcaactgttgattgcaggaataaggccttaatatgttaacctcagtgtcatttatgaaaagaggggaccagaagccaaagacttagtatattttcttttcctctgtcccttcccccataagcctccatttagttctttgttatttttgtttcttccaaagcacattgaaagagaaccagtttcaggtgtttagttgcagactcagtttgtcagactttaaagaataatatgctgccaaattttggccaaagtgttaatcttaggggagagctttctgtccttttggcactgagatatttattgtttatttatcagtgacagagttcactataaatggtgtttttttaatagaatataattatcggaagcagtgccttccataattatgacagttatactgtcggttttttttaaataaaagcagcatctgctaataaaacccaacagatactggaagttttgcatttatggtcaacacttaagggttttagaaaacagccgtcagccaaatgtaattgaataaagttgaagctaagatttagagatgaattaaatttaattaggggttgctaagaagcgagcactgaccagataagaatgctggttttcctaaatgcagtgaattgtgaccaagttataaatcaatgtcacttaaaggctgtggtagtactcctgcaaaattttatagctcagtttatccaaggtgtaactctaattcccattttgcaaaatttccagtacctttgtcacaatcctaacacattatcgggagcagtgtcttccataatgtataaagaacaaggtagtttttacctaccacagtgtctgtatcggagacagtgatctccatatgttacactaagggtgtaagtaattatccgggaacagtgtttcccataattttcttcatgcaatgacatcttcaaagcttgaagatcgttagtatctaacatgtatcccaactcctataattccctatcttttagttttagttgcagaaacattttgtggtcattaagcattgggtgggtaaattcaaccactgtaaaatgaaattactacaaaatttgaaatttagcttgggtttttgttacctttatggtttctccaggtcctctacttaatgagatagtagcatacatttataatgtttgctattgacaagtcattttaactttatcacattatttgcatgttacctcctataaacttagtgcggacaagttttaatccagaattgaccttttgacttaaagcagagggactttgtatagaaggtttgggggctgtggggaaggagagtcccctgaaggtctgacacgtctgcctacccattcgtggtgatcaattaaatgtaggtatgaataagttcgaagctccgtgagtgaaccatcattataaacgtgatgatcagctgtttgtcatagggcagttggaaacggcctcctagggaaaagttcatagggtctcttcaggttcttagtgtcacttacctagatttacagcctcacttgaatgtgtcactactcacagtctctttaatcttcagttttatctttaatctcctcttttatcttggactgacatttagcgtagctaagtgaaaaggtcatagctgagattcctggttcgggtgttacgcacacgtacttaaatgaaagcatgtggcatgttcatcgtataacacaatatgaatacagggcatgcattttgcagcagtgagtctcttcagaaaacccttttctacagttagggttgagttacttcctatcaagccagtacgtgctaacaggctcaatattcctgaatgaaatatcagactagtgacaagctcctggtcttgagatgtcttctcgttaaggagatgggccttttggaggtaaaggataaaatgaatgagttctgtcatgattcactattctagaacttgcatgacctttactgtgttagctctttgaatgttcttgaaattttagactttctttgtaaacaaatgatatgtccttatcattgtataaaagctgttatgtgcaacagtgtggagattccttgtctgatttaataaaatacttaaacactgaaaaaaaaaaaaaaagcggcgcgccgcttctagtagtatctcctcgtagggagacacaaggcttacgcggtacccatgctttcnttg

SEQ ID NO: 81008 - DNA, 5485 bp, Homo sapiens
cagtgcgcccatcgcgcggctcctcggggcacctgctgccttggcgccttttcccttggccttcgcctcgcccgcagcgccctccgcatagggccccgcccgctgcgcgcgcatccccgccccccgggcgatctgtcagagcacctcgcgagcgtacgtgcctcaggaagtgacgcacagcccccctgggggccgggggcggggccaggctataaaccgccggttaggggccgccatcccctcagagcgtcgggatatcgggtggcggctcgggacggaggacgcgctagtgtgagtgcgggcttctagaactacaccgaccctcgtgtcctcccttcatcctgcggggctggctggagcggccgctccggtgctgtccagcagccatagggagccgcacggggagcgggaaagcggtcgcggccccaggcggggcggccgggatggagcggggccgcgagcctgtggggaaggggctgtggcggcgcctcgagcggctgcaggttcttctgtgtggcagttcagaatgatggatcaagctagatcagcattctctaacttgtttggtggagaaccattgtcatatacccggttcagcctggctcggcaagtagatggcgataacagtcatgtggagatgaaacttgctgtagatgaagaagaaaatgctgacaataacacaaaggccaatgtcacaaaaccaaaaaggtgtagtggaagtatctgctatgggactattgctgtgatcgtctttttcttgattggatttatgattggctacttgggctattgtaaaggggtagaaccaaaaactgagtgtgagagactggcaggaaccgagtctccagtgagggaggagccaggagaggacttccctgcagcacgtcgcttatattgggatgacctgaagagaaagttgtcggagaaactggacagcacagacttcaccagcaccatcaagctgctgaatgaaaattcatatgtccctcgtgaggctggatctcaaaaagatgaaaatcttgcgttgtatgttgaaaatcaatttcgtgaatttaaactcagcaaagtctggcgtgatcaacattttgttaagattcaggtcaaagacagcgctcaaaactcggtgatcatagttgataagaacggtagacttgtttacctggtggagaatcctgggggttatgtggcgtatagtaaggctgcaacagttactggtaaactggtccatgctaattttggtactaaaaaagattttgaggatttatacactcctgtgaatggatctatagtgattgtcagagcagggaaaatcacctttgcagaaaaggttgcaaatgctgaaagcttaaatgcaattggtgtgttgatatacatggaccagactaaatttcccattgttaacgcagaactttcattctttggacatgctcatctggggacaggtgacccttacacacctggattcccttccttcaatcacactcagtttccaccatctcggtcatcaggattgcctaatatacctgtccagacaatctccagagctgctgcagaaaagctgtttgggaatatggaaggagactgtccctctgactggaaaacagactctacatgtaggatggtaacctcagaaagcaagaatgtgaagctcactgtgagcaatgtgctgaaagagataaaaattcttaacatctttggagttattaaaggctttgtagaaccagatcactatgttgtagttggggcccagagagatgcatggggccctggagctgcaaaatccggtgtaggcacagctctcctattgaaacttgcccagatgttctcagatatggtcttaaaagatgggtttcagcccagcagaagcattatctttgccagttggagtgctggagactttggatcggttggtgccactgaatggctagagggatacctttcgtccctgcatttaaaggctttcacttatattaatctggataaagcggttcttggtaccagcaacttcaaggtttctgccagcccactgttgtatacgcttattgagaaaacaatgcaaaatgtgaagcatccggttactgggcaatttctatatcaggacagcaactgggccagcaaagttgagaaactcactttagacaatgctgctttccctttccttgcatattctggaatcccagcagtttctttctgtttttgcgaggacacagattatccttatttgggtaccaccatggacacctataaggaactgattgagaggattcctgagttgaacaaagtggcacgagcagctgcagaggtcgctggtcagttcgtgattaaactaacccatgatgttgaattgaacctggactatgagaggtacaacagccaactgctttcatttgtgagggatctgaaccaatacagagcagacataaaggaaatgggcctgagtttacagtggctgtattctgctcgtggagacttcttccgtgctacttccagactaacaacagatttcgggaatgctgagaaaacagacagatttgtcatgaagaaactcaatgatcgtgtcatgagagtggagtatcacttcctctctccctacgtatctccaaaagagtctcctttccgacatgtcttctggggctccggctctcacacgctgccagctttactggagaacttgaaactgcgtaaacaaaataacggtgcttttaatgaaacgctgttcagaaaccagttggctctagctacttggactattcagggagctgcaaatgccctctctggtgacgtttgggacattgacaatgagttttaaatgtgatacccatagcttccatgagaacagcagggtagtctggtttctagacttgtgctgatcgtgctaaattttcagtagggctacaaaacctgatgttaaaattccatcccatcatcttggtactactagatgtctttaggcagcagcttttaatacagggtagataacctgtacttcaagttaaagtgaataaccacttaaaaaatgtccatgatggaatattcccctatctctagaattttaagtgctttgtaatgggaactgcctctttcctgttgttgttaatgaaaatgtcagaaaccagttatgtgaatgatctctctgaatcctaagggctggtctctgctgaaggttgtaagtggtcgcttactttgagtgatcctccaacttcatttgatgctaaataggagataccaggttgaaagaccttctccaaatgagatctaagcctttccataaggaatgtagctggtttcctcattcctgaaagaaacagttaactttcagaagagatgggcttgttttcttgccaatgaggtctgaaatggaggtccttctgctggataaaatgaggttcaactgttgattgcaggaataaggccttaatatgttaacctcagtgtcatttatgaaaagaggggaccagaagccaaagacttagtatattttcttttcctctgtcccttcccccataagcctccatttagttctttgttatttttgtttcttccaaagcacattgaaagagaaccagtttcaggtgtttagttgcagactcagtttgtcagactttaaagaataatatgctgccaaattttggccaaagtgttaatcttaggggagagctttctgtccttttggcactgagatatttattgtttatttatcagtgacagagttcactataaatggtgtttttttaatagaatataattatcggaagcagtgccttccataattatgacagttatactgtcggttttttttaaataaaagcagcatctgctaataaaacccaacagatactggaagttttgcatttatggtcaacacttaagggttttagaaaacagccgtcagccaaatgtaattgaataaagttgaagctaagatttagagatgaattaaatttaattaggggttgctaagaagcgagcactgaccagataagaatgctggttttcctaaatgcagtgaattgtgaccaagttataaatcaatgtcacttaaaggctgtggtagtactcctgcaaaattttatagctcagtttatccaaggtgtaactctaattcccattttgcaaaatttccagtacctttgtcacaatcctaacacattatcgggagcagtgtcttccataatgtataaagaacaaggtagtttttacctaccacagtgtctgtatcggagacagtgatctccatatgttacactaagggtgtaagtaattatccgggaacagtgtttcccataattttcttcatgcaatgacatcttcaaagcttgaagatcgttagtatctaacatgtatcccaactcctataattccctatcttttagttttagttgcagaaacattttgtggtcattaagcattgggtgggtaaattcaaccactgtaaaatgaaattactacaaaatttgaaatttagcttgggtttttgttacctttatggtttctccaggtcctctacttaatgagatagtagcatacatttataatgtttgctattgacaagtcattttaactttatcacattatttgcatgttacctcctataaacttagtgcggacaagttttaatccagaattgaccttttgacttaaagcagagggactttgtatagaaggtttgggggctgtggggaaggagagtcccctgaaggtctgacacgtctgcctacccattcgtggtgatcaattaaatgtaggtatgaataagttcgaagctccgtgagtgaaccatcattataaacgtgatgatcagctgtttgtcatagggcagttggaaacggcctcctagggaaaagttcatagggtctcttcaggttcttagtgtcacttacctagatttacagcctcacttgaatgtgtcactactcacagtctctttaatcttcagttttatctttaatctcctcttttatcttggactgacatttagcgtagctaagtgaaaaggtcatagctgagattcctggttcgggtgttacgcacacgtacttaaatgaaagcatgtggcatgttcatcgtataacacaatatgaatacagggcatgcattttgcagcagtgagtctcttcagaaaacccttttctacagttagggttgagttacttcctatcaagccagtacgtgctaacaggctcaatattcctgaatgaaatatcagactagtgacaagctcctggtcttgagatgtcttctcgttaaggagatgggccttttggaggtaaaggataaaatgaatgagttctgtcatgattcactattctagaacttgcatgacctttactgtgttagctctttgaatgttcttgaaattttagactttctttgtaaacaaatgatatgtccttatcattgtataaaagctgttatgtgcaacagtgtggagattccttgtctgatttaataaaatacttaaaaacggggtcctctagagtcaccg

SEQ ID NO: 81009 - DNA, 5156 bp, Homo sapiens
  misc_feature (5153)..(5153): n is a, c, g, or t
gagctcggtaccctgtctccgtttcgggacgttaagagccgaagtatttcatccccccccccgagagagcgtctgtctccgtttcgggacggaggacgcgctagtgttcttctgtgtggcagttcagaatgatggatcaagctagatcagcattctctaacttgtttggtggagaaccattgtcatatacccggttcagcctggctcggcaagtagatggcgataacagtcatgtggagatgaaacttgctgtagatgaagaagaaaatgctgacaataacacaaaggccaatgtcacaaaaccaaaaaggtgtagtggaagtatctgctatgggactattgctgtgatcgtctttttcttgattggatttatgattggctacttgggctattgtaaaggggtagaaccaaaaactgagtgtgagagactggcaggaaccgagtctccagtgagggaggagccaggagaggacttccctgcagcacgtcgcttatattgggatgacctgaagagaaagttgtcggagaaactggacagcacagacttcaccagcaccatcaagctgctgaatgaaaattcatatgtccctcgtgaggctggatctcaaaaagatgaaaatcttgcgttgtatgttgaaaatcaatttcgtgaatttaaactcagcaaagtctggcgtgatcaacattttgttaagattcaggtcaaagacagcgctcaaaactcggtgatcatagttgataagaacggtagacttgtttacctggtggagaatcctgggggttatgtggcgtatagtaaggctgcaacagttactggtaaactggtccatgctaattttggtactaaaaaagattttgaggatttatacactcctgtgaatggatctatagtgattgtcagagcagggaaaatcacctttgcagaaaaggttgcaaatgctgaaagcttaaatgcaattggtgtgttgatatacatggaccagactaaatttcccattgttaacgcagaactttcattctttggacatgctcatctggggacaggtgacccttacacacctggattcccttccttcaatcacactcagtttccaccatctcggtcatcaggattgcctaatatacctgtccagacaatctccagagctgctgcagaaaagctgtttgggaatatggaaggagactgtccctctgactggaaaacagactctacatgtaggatggtaacctcagaaagcaagaatgtgaagctcactgtgagcaatgtgctgaaagagataaaaattcttaacatctttggagttattaaaggctttgtagaaccagatcactatgttgtagttggggcccagagagatgcatggggccctggagctgcaaaatccggtgtaggcacagctctcctattgaaacttgcccagatgttctcagatatggtcttaaaagatgggtttcagcccagcagaagcattatctttgccagttggagtgctggagactttggatcggttggtgccactgaatggctagagggatacctttcgtccctgcatttaaaggctttcacttatattaatctggataaagcggttcttggtaccagcaacttcaaggtttctgccagcccactgttgtatacgcttattgagaaaacaatgcaaaatgtgaagcatccggttactgggcaatttctatatcaggacagcaactgggccagcaaagttgagaaactcactttagacaatgctgctttccctttccttgcatattctggaatcccagcagtttctttctgtttttgcgaggacacagattatccttatttgggtaccaccatggacacctataaggaactgattgagaggattcctgagttgaacaaagtggcacgagcagctgcagaggtcgctggtcagttcgtgattaaactaacccatgatgttgaattgaacctggactatgagaggtacaacagccaactgctttcatttgtgagggatctgaaccaatacagagcagacataaaggaaatgggcctgagtttacagtggctgtattctgctcgtggagacttcttccgtgctacttccagactaacaacagatttcgggaatgctgagaaaacagacagatttgtcatgaagaaactcaatgatcgtgtcatgagagtggagtatcacttcctctctccctacgtatctccaaaagagtctcctttccgacatgtcttctggggctccggctctcacacgctgccagctttactggagaacttgaaactgcgtaaacaaaataacggtgcttttaatgaaacgctgttcagaaaccagttggctctagctacttggactattcagggagctgcaaatgccctctctggtgacgtttgggacattgacaatgagttttaaatgtgatacccatagcttccatgagaacagcagggtagtctggtttctagacttgtgctgatcgtgctaaattttcagtagggctacaaaacctgatgttaaaattccatcccatcatcttggtactactagatgtctttaggcagcagcttttaatacagggtagataacctgtacttcaagttaaagtgaataaccacttaaaaaatgtccatgatggaatattcccctatctctagaattttaagtgctttgtaatgggaactgcctctttcctgttgttgttaatgaaaatgtcagaaaccagttatgtgaatgatctctctgaatcctaagggctggtctctgctgaaggttgtaagtggtcgcttactttgagtgatcctccaacttcatttgatgctaaataggagataccaggttgaaagaccttctccaaatgagatctaagcctttccataaggaatgtagctggtttcctcattcctgaaagaaacagttaactttcagaagagatgggcttgttttcttgccaatgaggtctgaaatggaggtccttctgctggataaaatgaggttcaactgttgattgcaggaataaggccttaatatgttaacctcagtgtcatttatgaaaagaggggaccagaagccaaagacttagtatattttcttttcctctgtcccttcccccataagcctccatttagttctttgttatttttgtttcttccaaagcacattgaaagagaaccagtttcaggtgtttagttgcagactcagtttgtcagactttaaagaataatatgctgccaaattttggccaaagtgttaatcttaggggagagctttctgtccttttggcactgagatatttattgtttatttatcagtgacagagttcactataaatggtgtttttttaatagaatataattatcggaagcagtgccttccataattatgacagttatactgtcggttttttttaaataaaagcagcatctgctaataaaacccaacagatactggaagttttgcatttatggtcaacacttaagggttttagaaaacagccgtcagccaaatgtaattgaataaagttgaagctaagatttagagatgaattaaatttaattaggggttgctaagaagcgagcactgaccagataagaatgctggttttcctaaatgcagtgaattgtgaccaagttataaatcaatgtcacttaaaggctgtggtagtactcctgcaaaattttatagctcagtttatccaaggtgtaactctaattcccattttgcaaaatttccagtacctttgtcacaatcctaacacattatcgggagcagtgtcttccataatgtataaagaacaaggtagtttttacctaccacagtgtctgtatcggagacagtgatctccatatgttacactaagggtgtaagtaattatccgggaacagtgtttcccataattttcttcatgcaatgacatcttcaaagcttgaagatcgttagtatctaacatgtatcccaactcctataattccctatcttttagttttagttgcagaaacattttgtggtcattaagcattgggtgggtaaattcaaccactgtaaaatgaaattactacaaaatttgaaatttagcttgggtttttgttacctttatggtttctccaggtcctctacttaatgagatagtagcatacatttataatgtttgctattgacaagtcattttaactttatcacattatttgcatgttacctcctataaacttagtgcggacaagttttaatccagaattgaccttttgacttaaagcagagggactttgtatagaaggtttgggggctgtggggaaggagagtcccctgaaggtctgacacgtctgcctacccattcgtggtgatcaattaaatgtaggtatgaataagttcgaagctccgtgagtgaaccatcattataaacgtgatgatcagctgtttgtcatagggcagttggaaacggcctcctagggaaaagttcatagggtctcttcaggttcttagtgtcacttacctagatttacagcctcacttgaatgtgtcactactcacagtctctttaatcttcagttttatctttaatctcctcttttatcttggactgacatttagcgtagctaagtgaaaaggtcatagctgagattcctggttcgggtgttacgcacacgtacttaaatgaaagcatgtggcatgttcatcgtataacacaatatgaatacagggcatgcattttgcagcagtgagtctcttcagaaaacccttttctacagttagggttgagttacttcctatcaagccagtacgtgctaacaggctcaatattcctgaatgaaatatcagactagtgacaagctcctggtcttgagatgtcttctcgttaaggagatgggccttttggaggtaaaggataaaatgaatgagttctgtcatgattcactattctagaacttgcatgacctttactgtgttagctctttgaatgttcttgaaattttagactttctttgtaaacaaatgatatgtccttatcattgtataaaagctgttatgtgcaacagtgtggagattccttgtctgatttaataaaatacttaaacactgaaaaaaaaaaaaaaagcggcgcgccgcttctagtagtatctcctcgtagggagacacaaggcttacgcggtacccatgctttcnttg

SEQ ID NO: 81010 - DNA, 4982 bp, Homo sapiens
  misc_feature (4979)..(4979): n is a, c, g, or t
ttcttgtgctggcgtgtggttcttgcctggctcggcaagtagatggcgataacagtcatgtggagatgaaacttgctgtagatgaagaagaaaatgctgacaataacacaaaggccaatgtcacaaaaccaaaaaggtgtagtggaagtatctgctatgggactattgctgtgatcgtctttttcttgattggatttatgattggctacttgggctattgtaaaggggtagaaccaaaaactgagtgtgagagactggcaggaaccgagtctccagtgagggaggagccaggagaggacttccctgcagcacgtcgcttatattgggatgacctgaagagaaagttgtcggagaaactggacagcacagacttcaccagcaccatcaagctgctgaatgaaaattcatatgtccctcgtgaggctggatctcaaaaagatgaaaatcttgcgttgtatgttgaaaatcaatttcgtgaatttaaactcagcaaagtctggcgtgatcaacattttgttaagattcaggtcaaagacagcgctcaaaactcggtgatcatagttgataagaacggtagacttgtttacctggtggagaatcctgggggttatgtggcgtatagtaaggctgcaacagttactggtaaactggtccatgctaattttggtactaaaaaagattttgaggatttatacactcctgtgaatggatctatagtgattgtcagagcagggaaaatcacctttgcagaaaaggttgcaaatgctgaaagcttaaatgcaattggtgtgttgatatacatggaccagactaaatttcccattgttaacgcagaactttcattctttggacatgctcatctggggacaggtgacccttacacacctggattcccttccttcaatcacactcagtttccaccatctcggtcatcaggattgcctaatatacctgtccagacaatctccagagctgctgcagaaaagctgtttgggaatatggaaggagactgtccctctgactggaaaacagactctacatgtaggatggtaacctcagaaagcaagaatgtgaagctcactgtgagcaatgtgctgaaagagataaaaattcttaacatctttggagttattaaaggctttgtagaaccagatcactatgttgtagttggggcccagagagatgcatggggccctggagctgcaaaatccggtgtaggcacagctctcctattgaaacttgcccagatgttctcagatatggtcttaaaagatgggtttcagcccagcagaagcattatctttgccagttggagtgctggagactttggatcggttggtgccactgaatggctagagggatacctttcgtccctgcatttaaaggctttcacttatattaatctggataaagcggttcttggtaccagcaacttcaaggtttctgccagcccactgttgtatacgcttattgagaaaacaatgcaaaatgtgaagcatccggttactgggcaatttctatatcaggacagcaactgggccagcaaagttgagaaactcactttagacaatgctgctttccctttccttgcatattctggaatcccagcagtttctttctgtttttgcgaggacacagattatccttatttgggtaccaccatggacacctataaggaactgattgagaggattcctgagttgaacaaagtggcacgagcagctgcagaggtcgctggtcagttcgtgattaaactaacccatgatgttgaattgaacctggactatgagaggtacaacagccaactgctttcatttgtgagggatctgaaccaatacagagcagacataaaggaaatgggcctgagtttacagtggctgtattctgctcgtggagacttcttccgtgctacttccagactaacaacagatttcgggaatgctgagaaaacagacagatttgtcatgaagaaactcaatgatcgtgtcatgagagtggagtatcacttcctctctccctacgtatctccaaaagagtctcctttccgacatgtcttctggggctccggctctcacacgctgccagctttactggagaacttgaaactgcgtaaacaaaataacggtgcttttaatgaaacgctgttcagaaaccagttggctctagctacttggactattcagggagctgcaaatgccctctctggtgacgtttgggacattgacaatgagttttaaatgtgatacccatagcttccatgagaacagcagggtagtctggtttctagacttgtgctgatcgtgctaaattttcagtagggctacaaaacctgatgttaaaattccatcccatcatcttggtactactagatgtctttaggcagcagcttttaatacagggtagataacctgtacttcaagttaaagtgaataaccacttaaaaaatgtccatgatggaatattcccctatctctagaattttaagtgctttgtaatgggaactgcctctttcctgttgttgttaatgaaaatgtcagaaaccagttatgtgaatgatctctctgaatcctaagggctggtctctgctgaaggttgtaagtggtcgcttactttgagtgatcctccaacttcatttgatgctaaataggagataccaggttgaaagaccttctccaaatgagatctaagcctttccataaggaatgtagctggtttcctcattcctgaaagaaacagttaactttcagaagagatgggcttgttttcttgccaatgaggtctgaaatggaggtccttctgctggataaaatgaggttcaactgttgattgcaggaataaggccttaatatgttaacctcagtgtcatttatgaaaagaggggaccagaagccaaagacttagtatattttcttttcctctgtcccttcccccataagcctccatttagttctttgttatttttgtttcttccaaagcacattgaaagagaaccagtttcaggtgtttagttgcagactcagtttgtcagactttaaagaataatatgctgccaaattttggccaaagtgttaatcttaggggagagctttctgtccttttggcactgagatatttattgtttatttatcagtgacagagttcactataaatggtgtttttttaatagaatataattatcggaagcagtgccttccataattatgacagttatactgtcggttttttttaaataaaagcagcatctgctaataaaacccaacagatactggaagttttgcatttatggtcaacacttaagggttttagaaaacagccgtcagccaaatgtaattgaataaagttgaagctaagatttagagatgaattaaatttaattaggggttgctaagaagcgagcactgaccagataagaatgctggttttcctaaatgcagtgaattgtgaccaagttataaatcaatgtcacttaaaggctgtggtagtactcctgcaaaattttatagctcagtttatccaaggtgtaactctaattcccattttgcaaaatttccagtacctttgtcacaatcctaacacattatcgggagcagtgtcttccataatgtataaagaacaaggtagtttttacctaccacagtgtctgtatcggagacagtgatctccatatgttacactaagggtgtaagtaattatccgggaacagtgtttcccataattttcttcatgcaatgacatcttcaaagcttgaagatcgttagtatctaacatgtatcccaactcctataattccctatcttttagttttagttgcagaaacattttgtggtcattaagcattgggtgggtaaattcaaccactgtaaaatgaaattactacaaaatttgaaatttagcttgggtttttgttacctttatggtttctccaggtcctctacttaatgagatagtagcatacatttataatgtttgctattgacaagtcattttaactttatcacattatttgcatgttacctcctataaacttagtgcggacaagttttaatccagaattgaccttttgacttaaagcagagggactttgtatagaaggtttgggggctgtggggaaggagagtcccctgaaggtctgacacgtctgcctacccattcgtggtgatcaattaaatgtaggtatgaataagttcgaagctccgtgagtgaaccatcattataaacgtgatgatcagctgtttgtcatagggcagttggaaacggcctcctagggaaaagttcatagggtctcttcaggttcttagtgtcacttacctagatttacagcctcacttgaatgtgtcactactcacagtctctttaatcttcagttttatctttaatctcctcttttatcttggactgacatttagcgtagctaagtgaaaaggtcatagctgagattcctggttcgggtgttacgcacacgtacttaaatgaaagcatgtggcatgttcatcgtataacacaatatgaatacagggcatgcattttgcagcagtgagtctcttcagaaaacccttttctacagttagggttgagttacttcctatcaagccagtacgtgctaacaggctcaatattcctgaatgaaatatcagactagtgacaagctcctggtcttgagatgtcttctcgttaaggagatgggccttttggaggtaaaggataaaatgaatgagttctgtcatgattcactattctagaacttgcatgacctttactgtgttagctctttgaatgttcttgaaattttagactttctttgtaaacaaatgatatgtccttatcattgtataaaagctgttatgtgcaacagtgtggagattccttgtctgatttaataaaatacttaaacactgaaaaaaaaaaaaaaagcggcgcgccgcttctagtagtatctcctcgtagggagacacaaggcttacgcggtacccatgctttcnttg

SEQ ID NO: 81011 - DNA, 3044 bp, Homo sapiens
  misc_feature (3041)..(3041): n is a, c, g, or t
ccaggactcgggatcagacagatggtcatgaagaaactcagtgatcggtcatgagagtggagtatcacttcctctctccctacgtatctccaaaagagtctcctttccgacatgtcttctggggctccggctctcacacgctgccagctttactggagaacttgaaactgcgtaaacaaaataacggtgcttttaatgaaacgctgttcagaaaccagttggctctagctacttggactattcagggagctgcaaatgccctctctggtgacgtttgggacattgacaatgagttttaaatgtgatacccatagcttccatgagaacagcagggtagtctggtttctagacttgtgctgatcgtgctaaattttcagtagggctacaaaacctgatgttaaaattccatcccatcatcttggtactactagatgtctttaggcagcagcttttaatacagggtagataacctgtacttcaagttaaagtgaataaccacttaaaaaatgtccatgatggaatattcccctatctctagaattttaagtgctttgtaatgggaactgcctctttcctgttgttgttaatgaaaatgtcagaaaccagttatgtgaatgatctctctgaatcctaagggctggtctctgctgaaggttgtaagtggtcgcttactttgagtgatcctccaacttcatttgatgctaaataggagataccaggttgaaagaccttctccaaatgagatctaagcctttccataaggaatgtagctggtttcctcattcctgaaagaaacagttaactttcagaagagatgggcttgttttcttgccaatgaggtctgaaatggaggtccttctgctggataaaatgaggttcaactgttgattgcaggaataaggccttaatatgttaacctcagtgtcatttatgaaaagaggggaccagaagccaaagacttagtatattttcttttcctctgtcccttcccccataagcctccatttagttctttgttatttttgtttcttccaaagcacattgaaagagaaccagtttcaggtgtttagttgcagactcagtttgtcagactttaaagaataatatgctgccaaattttggccaaagtgttaatcttaggggagagctttctgtccttttggcactgagatatttattgtttatttatcagtgacagagttcactataaatggtgtttttttaatagaatataattatcggaagcagtgccttccataattatgacagttatactgtcggttttttttaaataaaagcagcatctgctaataaaacccaacagatactggaagttttgcatttatggtcaacacttaagggttttagaaaacagccgtcagccaaatgtaattgaataaagttgaagctaagatttagagatgaattaaatttaattaggggttgctaagaagcgagcactgaccagataagaatgctggttttcctaaatgcagtgaattgtgaccaagttataaatcaatgtcacttaaaggctgtggtagtactcctgcaaaattttatagctcagtttatccaaggtgtaactctaattcccattttgcaaaatttccagtacctttgtcacaatcctaacacattatcgggagcagtgtcttccataatgtataaagaacaaggtagtttttacctaccacagtgtctgtatcggagacagtgatctccatatgttacactaagggtgtaagtaattatccgggaacagtgtttcccataattttcttcatgcaatgacatcttcaaagcttgaagatcgttagtatctaacatgtatcccaactcctataattccctatcttttagttttagttgcagaaacattttgtggtcattaagcattgggtgggtaaattcaaccactgtaaaatgaaattactacaaaatttgaaatttagcttgggtttttgttacctttatggtttctccaggtcctctacttaatgagatagtagcatacatttataatgtttgctattgacaagtcattttaactttatcacattatttgcatgttacctcctataaacttagtgcggacaagttttaatccagaattgaccttttgacttaaagcagagggactttgtatagaaggtttgggggctgtggggaaggagagtcccctgaaggtctgacacgtctgcctacccattcgtggtgatcaattaaatgtaggtatgaataagttcgaagctccgtgagtgaaccatcattataaacgtgatgatcagctgtttgtcatagggcagttggaaacggcctcctagggaaaagttcatagggtctcttcaggttcttagtgtcacttacctagatttacagcctcacttgaatgtgtcactactcacagtctctttaatcttcagttttatctttaatctcctcttttatcttggactgacatttagcgtagctaagtgaaaaggtcatagctgagattcctggttcgggtgttacgcacacgtacttaaatgaaagcatgtggcatgttcatcgtataacacaatatgaatacagggcatgcattttgcagcagtgagtctcttcagaaaacccttttctacagttagggttgagttacttcctatcaagccagtacgtgctaacaggctcaatattcctgaatgaaatatcagactagtgacaagctcctggtcttgagatgtcttctcgttaaggagatgggccttttggaggtaaaggataaaatgaatgagttctgtcatgattcactattctagaacttgcatgacctttactgtgttagctctttgaatgttcttgaaattttagactttctttgtaaacaaatgatatgtccttatcattgtataaaagctgttatgtgcaacagtgtggagattccttgtctgatttaataaaatacttaaacactgaaaaaaaaaaaaaaagcggcgcgccgcttctagtagtatctcctcgtagggagacacaaggcttacgcggtacccatgctttcnttg

SEQ ID NO: 81012 - DNA, 5526 bp, Homo sapiens
  misc_feature (5523)..(5523): n is a, c, g, or t
cagtgcgcccatcgcgcggctcctcggggcacctgctgccttggcgccttttcccttggccttcgcctcgcccgcagcgccctccgcatagggccccgcccgctgcgcgcgcatccccgccccccgggcgatctgtcagagcacctcgcgagcgtacgtgcctcaggaagtgacgcacagcccccctgggggccgggggcggggccaggctataaaccgccggttaggggccgccatcccctcagagcgtcgggatatcgggtggcggctcgggacggaggacgcgctagtgtgagtgcgggcttctagaactacaccgaccctcgtgtcctcccttcatcctgcggggctggctggagcggccgctccggtgctgtccagcagccatagggagccgcacggggagcgggaaagcggtcgcggccccaggcggggcggccgggatggagcggggccgcgagcctgtggggaaggggctgtggcggcgcctcgagcggctgcaggttcttctgtgtggcagttcagaatgatggatcaagctagatcagcattctctaacttgtttggtggagaaccattgtcatatacccggttcagcctggctcggcaagtagatggcgataacagtcatgtggagatgaaacttgctgtagatgaagaagaaaatgctgacaataacacaaaggccaatgtcacaaaaccaaaaaggtgtagtggaagtatctgctatgggactattgctgtgatcgtctttttcttgattggatttatgattggctacttgggctattgtaaaggggtagaaccaaaaactgagtgtgagagactggcaggaaccgagtctccagtgagggaggagccaggagaggacttccctgcagcacgtcgcttatattgggatgacctgaagagaaagttgtcggagaaactggacagcacagacttcaccagcaccatcaagctgctgaatgaaaattcatatgtccctcgtgaggctggatctcaaaaagatgaaaatcttgcgttgtatgttgaaaatcaatttcgtgaatttaaactcagcaaagtctggcgtgatcaacattttgttaagattcaggtcaaagacagcgctcaaaactcggtgatcatagttgataagaacggtagacttgtttacctggtggagaatcctgggggttatgtggcgtatagtaaggctgcaacagttactggtaaactggtccatgctaattttggtactaaaaaagattttgaggatttatacactcctgtgaatggatctatagtgattgtcagagcagggaaaatcacctttgcagaaaaggttgcaaatgctgaaagcttaaatgcaattggtgtgttgatatacatggaccagactaaatttcccattgttaacgcagaactttcattctttggacatgctcatctggggacaggtgacccttacacacctggattcccttccttcaatcacactcagtttccaccatctcggtcatcaggattgcctaatatacctgtccagacaatctccagagctgctgcagaaaagctgtttgggaatatggaaggagactgtccctctgactggaaaacagactctacatgtaggatggtaacctcagaaagcaagaatgtgaagctcactgtgagcaatgtgctgaaagagataaaaattcttaacatctttggagttattaaaggctttgtagaaccagatcactatgttgtagttggggcccagagagatgcatggggccctggagctgcaaaatccggtgtaggcacagctctcctattgaaacttgcccagatgttctcagatatggtcttaaaagatgggtttcagcccagcagaagcattatctttgccagttggagtgctggagactttggatcggttggtgccactgaatggctagagggatacctttcgtccctgcatttaaaggctttcacttatattaatctggataaagcggttcttggtaccagcaacttcaaggtttctgccagcccactgttgtatacgcttattgagaaaacaatgcaaaatgtgaagcatccggttactgggcaatttctatatcaggacagcaactgggccagcaaagttgagaaactcactttagacaatgctgctttccctttccttgcatattctggaatcccagcagtttctttctgtttttgcgaggacacagattatccttatttgggtaccaccatggacacctataaggaactgattgagaggattcctgagttgaacaaagtggcacgagcagctgcagaggtcgctggtcagttcgtgattaaactaacccatgatgttgaattgaacctggactatgagaggtacaacagccaactgctttcatttgtgagggatctgaaccaatacagagcagacataaaggaaatgggcctgagtttacagtggctgtattctgctcgtggagacttcttccgtgctacttccagactaacaacagatttcgggaatgctgagaaaacagacagatttgtcatgaagaaactcaatgatcgtgtcatgagagtggagtatcacttcctctctccctacgtatctccaaaagagtctcctttccgacatgtcttctggggctccggctctcacacgctgccagctttactggagaacttgaaactgcgtaaacaaaataacggtgcttttaatgaaacgctgttcagaaaccagttggctctagctacttggactattcagggagctgcaaatgccctctctggtgacgtttgggacattgacaatgagttttaaatgtgatacccatagcttccatgagaacagcagggtagtctggtttctagacttgtgctgatcgtgctaaattttcagtagggctacaaaacctgatgttaaaattccatcccatcatcttggtactactagatgtctttaggcagcagcttttaatacagggtagataacctgtacttcaagttaaagtgaataaccacttaaaaaatgtccatgatggaatattcccctatctctagaattttaagtgctttgtaatgggaactgcctctttcctgttgttgttaatgaaaatgtcagaaaccagttatgtgaatgatctctctgaatcctaagggctggtctctgctgaaggttgtaagtggtcgcttactttgagtgatcctccaacttcatttgatgctaaataggagataccaggttgaaagaccttctccaaatgagatctaagcctttccataaggaatgtagctggtttcctcattcctgaaagaaacagttaactttcagaagagatgggcttgttttcttgccaatgaggtctgaaatggaggtccttctgctggataaaatgaggttcaactgttgattgcaggaataaggccttaatatgttaacctcagtgtcatttatgaaaagaggggaccagaagccaaagacttagtatattttcttttcctctgtcccttcccccataagcctccatttagttctttgttatttttgtttcttccaaagcacattgaaagagaaccagtttcaggtgtttagttgcagactcagtttgtcagactttaaagaataatatgctgccaaattttggccaaagtgttaatcttaggggagagctttctgtccttttggcactgagatatttattgtttatttatcagtgacagagttcactataaatggtgtttttttaatagaatataattatcggaagcagtgccttccataattatgacagttatactgtcggttttttttaaataaaagcagcatctgctaataaaacccaacagatactggaagttttgcatttatggtcaacacttaagggttttagaaaacagccgtcagccaaatgtaattgaataaagttgaagctaagatttagagatgaattaaatttaattaggggttgctaagaagcgagcactgaccagataagaatgctggttttcctaaatgcagtgaattgtgaccaagttataaatcaatgtcacttaaaggctgtggtagtactcctgcaaaattttatagctcagtttatccaaggtgtaactctaattcccattttgcaaaatttccagtacctttgtcacaatcctaacacattatcgggagcagtgtcttccataatgtataaagaacaaggtagtttttacctaccacagtgtctgtatcggagacagtgatctccatatgttacactaagggtgtaagtaattatccgggaacagtgtttcccataattttcttcatgcaatgacatcttcaaagcttgaagatcgttagtatctaacatgtatcccaactcctataattccctatcttttagttttagttgcagaaacattttgtggtcattaagcaatgaaattactacaaaatttgaaatttagcttgggtttttgttacctttatggtttctccaggtcctctacttaatgagatagtagcatacatttataatgtttgctattgacaagtcattttaactttatcacattatttgcatgttacctcctataaacttagtgcggacaagttttaatccagaattgaccttttgacttaaagcagagggactttgtatagaaggtttgggggctgtggggaaggagagtcccctgaaggtctgacacgtctgcctacccattcgtggtgatcaattaaatgtaggtatgaataagttcgaagctccgtgagtgaaccatcattataaacgtgatgatcagctgtttgtcatagggcagttggaaacggcctcctagggaaaagttcatagggtctcttcaggttcttagtgtcacttacctagatttacagcctcacttgaatgtgtcactactcacagtctctttaatcttcagttttatctttaatctcctcttttatcttggactgacatttagcgtagctaagtgaaaaggtcatagctgagattcctggttcgggtgttacgcacacgtacttaaatgaaagcatgtggcatgttcatcgtataacacaatatgaatacagggcatgcattttgcagcagtgagtctcttcagaaaacccttttctacagttagggttgagttacttcctatcaagccagtacgtgctaacaggctcaatattcctgaatgaaatatcagactagtgacaagctcctggtcttgagatgtcttctcgttaaggagatgggccttttggaggtaaaggataaaatgaatgagttctgtcatgattcactattctagaacttgcatgacctttactgtgttagctctttgaatgttcttgaaattttagactttctttgtaaacaaatgatatgtccttatcattgtataaaagctgttatgtgcaacagtgtggagattccttgtctgatttaataaaatacttaaacactgaaaaaaaaaaaaaaagcggcgcgccgcttctagtagtatctcctcgtagggagacacaaggcttacgcggtacccatgctttcnttg

SEQ ID NO: 81013 - DNA, 5508 bp, Homo sapiens
  misc_feature (5505)..(5505): n is a, c, g, or t
cagtgcgcccatcgcgcggctcctcggggcacctgctgccttggcgccttttcccttggccttcgcctcgcccgcagcgccctccgcatagggccccgcccgctgcgcgcgcatccccgccccccgggcgatctgtcagagcacctcgcgagcgtacgtgcctcaggaagtgacgcacagcccccctgggggccgggggcggggccaggctataaaccgccggttaggggccgccatcccctcagagcgtcgggatatcgggtggcggctcgggacggaggacgcgctagtgtgagtgcgggcttctagaactacaccgaccctcgtgtcctcccttcatcctgcggggctggctggagcggccgctccggtgctgtccagcagccatagggagccgcacggggagcgggaaagcggtcgcggccccaggcggggcggccgggatggagcggggccgcgagcctgtggggaaggggctgtggcggcgcctcgagcggctgcaggttcttctgtgtggcagttcagaatgatggatcaagctagatcagcattctctaacttgtttggtggagaaccattgtcatatacccggttcagcctggctcggcaagtagatggcgataacagtcatgtggagatgaaacttgctgtagatgaagaagaaaatgctgacaataacacaaaggccaatgtcacaaaaccaaaaaggtgtagtggaagtatctgctatgggactattgctgtgatcgtctttttcttgattggatttatgattggctacttgggctattgtaaaggggtagaaccaaaaactgagtgtgagagactggcaggaaccgagtctccagtgagggaggagccaggagaggacttccctgcagcacgtcgcttatattgggatgacctgaagagaaagttgtcggagaaactggacagcacagacttcaccagcaccatcaagctgctgaatgaaaattcatatgtccctcgtgaggctggatctcaaaaagatgaaaatcttgcgttgtatgttgaaaatcaatttcgtgaatttaaactcagcaaagtctggcgtgatcaacattttgttaagattcaggtcaaagacagcgctcaaaactcggtgatcatagttgataagaacggtagacttgtttacctggtggagaatcctgggggttatgtggcgtatagtaaggctgcaacagttactggtaaactggtccatgctaattttggtactaaaaaagattttgaggatttatacactcctgtgaatggatctatagtgattgtcagagcagggaaaatcacctttgcagaaaaggttgcaaatgctgaaagcttaaatgcaattggtgtgttgatatacatggaccagactaaatttcccattgttaacgcagaactttcattctttggacatgctcatctggggacaggtgacccttacacacctggattcccttccttcaatcacactcagtttccaccatctcggtcatcaggattgcctaatatacctgtccagacaatctccagagctgctgcagaaaagctgtttgggaatatggaaggagactgtccctctgactggaaaacagactctacatgtaggatggtaacctcagaaagcaagaatgtgaagctcactgtgagcaatgtgctgaaagagataaaaattcttaacatctttggagttattaaaggctttgtagaaccagatcactatgttgtagttggggcccagagagatgcatggggccctggagctgcaaaatccggtgtaggcacagctctcctattgaaacttgcccagatgttctcagatatggtcttaaaagatgggtttcagcccagcagaagcattatctttgccagttggagtgctggagactttggatcggttggtgccactgaatggctagagggatacctttcgtccctgcatttaaaggctttcacttatattaatctggataaagcggttcttggtaccagcaacttcaaggtttctgccagcccactgttgtatacgcttattgagaaaacaatgcaaaatgtgaagcatccggttactgggcaatttctatatcaggacagcaactgggccagcaaagttgagaaactcactttagacaatgctgctttccctttccttgcatattctggaatcccagcagtttctttctgtttttgcgaggacacagattatccttatttgggtaccaccatggacacctataaggaactgattgagaggattcctgagttgaacaaagtggcacgagcagctgcagaggtcgctggtcagttcgtgattaaactaacccatgatgttgaattgaacctggactatgagaggtacaacagccaactgctttcatttgtgagggatctgaaccaatacagagcagacataaaggaaatgggcctgagtttacagtggctgtattctgctcgtggagacttcttccgtgctacttccagactaacaacagatttcgggaatgctgagaaaacagacagatttgtcatgaagaaactcaatgatcgtgtcatgagagtggagtatcacttcctctctccctacgtatctccaaaagagtctcctttccgacatgtcttctggggctccggctctcacacgctgccagctttactggagaacttgaaactgcgtaaacaaaataacggtgcttttaatgaaacgctgttcagaaaccagttggctctagctacttggactattcagggagctgcaaatgccctctctggtgacgtttgggacattgacaatgagttttaaatgtgatacccatagcttccatgagaacagcagggtagtctggtttctagacttgtgctgatcgtgctaaattttcagtagggctacaaaacctgatgttaaaattccatcccatcatcttggtactactagatgtctttaggcagcagcttttaatacagggtagataacctgtacttcaagttaaagtgaataaccacttaaaaaatgtccatgatggaatattcccctatctctagaattttaagtgctttgtaatgggaactgcctctttcctgttgttgttaatgaaaatgtcagaaaccagttatgtgaatgatctctctgaatcctaagggctggtctctgctgaaggttgtaagtggtcgcttactttgagtgatcctccaacttcatttgatgctaaataggagataccaggttgaaagaccttctccaaatgagatctaagcctttccataaggaatgtagctggtttcctcattcctgaaagaaacagttaactttcagaagagatgggcttgttttcttgccaatgaggtctgaaatggaggtccttctgctggataaaatgaggttcaactgttgattgcaggaataaggccttaatatgttaacctcagtgtcatttatgaaaagaggggaccagaagccaaagacttagtatattttcttttcctctgtcccttcccccataagcctccatttagttctttgttatttttgtttcttccaaagcacattgaaagagaaccagtttcaggtgtttagttgcagactcagtttgtcagactttaaagaataatatgctgccaaattttggccaaagtgttaatcttaggggagagctttctgtccttttggcactgagatatttattgtttatttatcagtgacagagttcactataaatggtgtttttttaatagaatataattatcggaagcagtgccttccataattatgacagttatactgtcggttttttttaaataaaagcagcatctgctaataaaacccaacagatactggaagttttgcatttatggtcaacacttaagggttttagaaaacagatgaattaaatttaattaggggttgctaagaagcgagcactgaccagataagaatgctggttttcctaaatgcagtgaattgtgaccaagttataaatcaatgtcacttaaaggctgtggtagtactcctgcaaaattttatagctcagtttatccaaggtgtaactctaattcccattttgcaaaatttccagtacctttgtcacaatcctaacacattatcgggagcagtgtcttccataatgtataaagaacaaggtagtttttacctaccacagtgtctgtatcggagacagtgatctccatatgttacactaagggtgtaagtaattatccgggaacagtgtttcccataattttcttcatgcaatgacatcttcaaagcttgaagatcgttagtatctaacatgtatcccaactcctataattccctatcttttagttttagttgcagaaacattttgtggtcattaagcattgggtgggtaaattcaaccactgtaaaatgaaattactacaaaatttgaaatttagcttgggtttttgttacctttatggtttctccaggtcctctacttaatgagatagtagcatacatttataatgtttgctattgacaagtcattttaactttatcacattatttgcatgttacctcctataaacttagtgcggacaagttttaatccagaattgaccttttgacttaaagcagagggactttgtatagaaggtttgggggctgtggggaaggagagtcccctgaaggtctgacacgtctgcctacccattcgtggtgatcaattaaatgtaggtatgaataagttcgaagctccgtgagtgaaccatcattataaacgtgatgatcagctgtttgtcatagggcagttggaaacggcctcctagggaaaagttcatagggtctcttcaggttcttagtgtcacttacctagatttacagcctcacttgaatgtgtcactactcacagtctctttaatcttcagttttatctttaatctcctcttttatcttggactgacatttagcgtagctaagtgaaaaggtcatagctgagattcctggttcgggtgttacgcacacgtacttaaatgaaagcatgtggcatgttcatcgtataacacaatatgaatacagggcatgcattttgcagcagtgagtctcttcagaaaacccttttctacagttagggttgagttacttcctatcaagccagtacgtgctaacaggctcaatattcctgaatgaaatatcagactagtgacaagctcctggtcttgagatgtcttctcgttaaggagatgggccttttggaggtaaaggataaaatgaatgagttctgtcatgattcactattctagaacttgcatgacctttactgtgttagctctttgaatgttcttgaaattttagactttctttgtaaacaaatgatatgtccttatcattgtataaaagctgttatgtgcaacagtgtggagattccttgtctgatttaataaaatacttaaacactgaaaaaaaaaaaaaaagcggcgcgccgcttctagtagtatctcctcgtagggagacacaaggcttacgcggtacccatgctttcnttg

SEQ ID NO: 81014 - DNA, 5504 bp, Homo sapiens
  misc_feature (5501)..(5501): n is a, c, g, or t
cagtgcgcccatcgcgcggctcctcggggcacctgctgccttggcgccttttcccttggccttcgcctcgcccgcagcgccctccgcatagggccccgcccgctgcgcgcgcatccccgccccccgggcgatctgtcagagcacctcgcgagcgtacgtgcctcaggaagtgacgcacagcccccctgggggccgggggcggggccaggctataaaccgccggttaggggccgccatcccctcagagcgtcgggatatcgggtggcggctcgggacggaggacgcgctagtgtgagtgcgggcttctagaactacaccgaccctcgtgtcctcccttcatcctgcggggctggctggagcggccgctccggtgctgtccagcagccatagggagccgcacggggagcgggaaagcggtcgcggccccaggcggggcggccgggatggagcggggccgcgagcctgtggggaaggggctgtggcggcgcctcgagcggctgcaggttcttctgtgtggcagttcagaatgatggatcaagctagatcagcattctctaacttgtttggtggagaaccattgtcatatacccggttcagcctggctcggcaagtagatggcgataacagtcatgtggagatgaaacttgctgtagatgaagaagaaaatgctgacaataacacaaaggccaatgtcacaaaaccaaaaaggtgtagtggaagtatctgctatgggactattgctgtgatcgtctttttcttgattggatttatgattggctacttgggctattgtaaaggggtagaaccaaaaactgagtgtgagagactggcaggaaccgagtctccagtgagggaggagccaggagaggacttccctgcagcacgtcgcttatattgggatgacctgaagagaaagttgtcggagaaactggacagcacagacttcaccagcaccatcaagctgctgaatgaaaattcatatgtccctcgtgaggctggatctcaaaaagatgaaaatcttgcgttgtatgttgaaaatcaatttcgtgaatttaaactcagcaaagtctggcgtgatcaacattttgttaagattcaggtcaaagacagcgctcaaaactcggtgatcatagttgataagaacggtagacttgtttacctggtggagaatcctgggggttatgtggcgtatagtaaggctgcaacagttactggtaaactggtccatgctaattttggtactaaaaaagattttgaggatttatacactcctgtgaatggatctatagtgattgtcagagcagggaaaatcacctttgcagaaaaggttgcaaatgctgaaagcttaaatgcaattggtgtgttgatatacatggaccagactaaatttcccattgttaacgcagaactttcattctttggacatgctcatctggggacaggtgacccttacacacctggattcccttccttcaatcacactcagtttccaccatctcggtcatcaggattgcctaatatacctgtccagacaatctccagagctgctgcagaaaagctgtttgggaatatggaaggagactgtccctctgactggaaaacagactctacatgtaggatggtaacctcagaaagcaagaatgtgaagctcactgtgagcaatgtgctgaaagagataaaaattcttaacatctttggagttattaaaggctttgtagaaccagatcactatgttgtagttggggcccagagagatgcatggggccctggagctgcaaaatccggtgtaggcacagctctcctattgaaacttgcccagatgttctcagatatggtcttaaaagatgggtttcagcccagcagaagcattatctttgccagttggagtgctggagactttggatcggttggtgccactgaatggctagagggatacctttcgtccctgcatttaaaggctttcacttatattaatctggataaagcggttcttggtaccagcaacttcaaggtttctgccagcccactgttgtatacgcttattgagaaaacaatgcaaaatgtgaagcatccggttactgggcaatttctatatcaggacagcaactgggccagcaaagttgagaaactcactttagacaatgctgctttccctttccttgcatattctggaatcccagcagtttctttctgtttttgcgaggacacagattatccttatttgggtaccaccatggacacctataaggaactgattgagaggattcctgagttgaacaaagtggcacgagcagctgcagaggtcgctggtcagttcgtgattaaactaacccatgatgttgaattgaacctggactatgagaggtacaacagccaactgctttcatttgtgagggatctgaaccaatacagagcagacataaaggaaatgggcctgagtttacagtggctgtattctgctcgtggagacttcttccgtgctacttccagactaacaacagatttcgggaatgctgagaaaacagacagatttgtcatgaagaaactcaatgatcgtgtcatgagagtggagtatcacttcctctctccctacgtatctccaaaagagtctcctttccgacatgtcttctggggctccggctctcacacgctgccagctttactggagaacttgaaactgcgtaaacaaaataacggtgcttttaatgaaacgctgttcagaaaccagttggctctagctacttggactattcagggagctgcaaatgccctctctggtgacgtttgggacattgacaatgagttttaaatgtgatacccatagcttccatgagaacagcagggtagtctggtttctagacttgtgctgatcgtgctaaattttcagtagggctacaaaacctgatgttaaaattccatcccatcatcttggtactactagatgtctttaggcagcagcttttaatacagggtagataacctgtacttcaagttaaagtgaataaccacttaaaaaatgtccatgatggaatattcccctatctctagaattttaagtgctttgtaatgggaactgcctctttcctgttgttgttaatgaaaatgtcagaaaccagttatgtgaatgatctctctgaatcctaagggctggtctctgctgaaggttgtaagtggtcgcttactttgagtgatcctccaacttcatttgatgctaaataggagataccaggttgaaagaccttctccaaatgagatctaagcctttccataaggaatgtagctggtttcctcattcctgaaagaaacagttaactttcagaagagatgggcttgttttcttgccaatgaggtctgaaatggaggtccttctgctggataaaatgaggttcaactgttgattgcaggaataaggccttaatatgttaacctcagtgtcatttatgaaaagaggggaccagaagccaaagacttagtatattttcttttcctctgtcccttcccccataagcctccatttagttctttgttatttttgtttcttccaaagcacattgaaagagaaccagtttcaggtgtttagttgcagactcagtttgtcagactttaaagaataatatgctgccaaattttggccaaagtgttaatcttaggggagagctttctgtccttttggcactgagatatttattgtttatttatcagtgacagagttcactataaatggtgtttttttaatagaatataattatcggaagcagtgccttccataattatgacagttatactgtcggttttttttaaataaaagcagcatctgctaataaaacccaacagatactggaagttttgcatttatggtcaacacttaagggttttagaaaacagccgtcagccaaatgtaattgaataaagttgaagctaagatttagagatgaattaaatttaattaggggttgctaagaagcgagcactgaccagataagaatgctggttttcctaaatgcagtgaattgtgaccaagttataaatcaatgtcacttaaaggctgtggtagtactcctgcaaaattttatagctcagtttatccaaggtgtaactctaattcccattttgcaaaatttccagtacctttgtcacaatcctaacacattatcgggagcagtgtcttccataatgtataaagaacaaggtagtttttacctaccacagtgtctgtatcggagacagtgatctccatatgttacactaagggtgtaagtaattatccgggaacagtgtttcccataattttcttcatgcaatgacatcttcaaagcttgaagatcgttagtatctaacatgtatcccaactcctataattccctatcttttagttttagttgcagaaacattttgtggtcattaagcattgggtgggtaaattcaaccactgtaaaatgaaattactacaaaatttgaaatttagcttgggtttttgttacctttatggtttctccaggtcctctacttaatgagatagtagcatacatttataatgtttgctattgacaagtcattttaactttatcacattatttgcatgttacctcctataaacttagtgcggacaagttttaatccagaattgaccttttgacttaaagcagagggactttgtatagaaggtttgggggctgtggggaaggagagtcccctgaaggtctgacacgtctgcctacccattcgtggtgatcaattaaatgtaggtatgaataagttcgaagctccgtgagtgaaccatcattataaacgtgatgatcagctgtttgtcatagggcagttggaaacggcctcctagggaaaagttcatagggtctcttcaggttcttagtgtcacttacctagatttacagcctcacttgaatgtgtcactactcacagtctctttaatcttcagttttatctttaatctcctcttttatcttggactgacatttagcgtaggtacttaaatgaaagcatgtggcatgttcatcgtataacacaatatgaatacagggcatgcattttgcagcagtgagtctcttcagaaaacccttttctacagttagggttgagttacttcctatcaagccagtacgtgctaacaggctcaatattcctgaatgaaatatcagactagtgacaagctcctggtcttgagatgtcttctcgttaaggagatgggccttttggaggtaaaggataaaatgaatgagttctgtcatgattcactattctagaacttgcatgacctttactgtgttagctctttgaatgttcttgaaattttagactttctttgtaaacaaatgatatgtccttatcattgtataaaagctgttatgtgcaacagtgtggagattccttgtctgatttaataaaatacttaaacactgaaaaaaaaaaaaaaagcggcgcgccgcttctagtagtatctcctcgtagggagacacaaggcttacgcggtacccatgctttcnttg

SEQ ID NO: 81015 - DNA, 5457 bp, Homo sapiens
  misc_feature (5454)..(5454): n is a, c, g, or t
cagtgcgcccatcgcgcggctcctcggggcacctgctgccttggcgccttttcccttggccttcgcctcgcccgcagcgccctccgcatagggccccgcccgctgcgcgcgcatccccgccccccgggcgatctgtcagagcacctcgcgagcgtacgtgcctcaggaagtgacgcacagcccccctgggggccgggggcggggccaggctataaaccgccggttaggggccgccatcccctcagagcgtcgggatatcgggtggcggctcgggacggaggacgcgctagtgtgagtgcgggcttctagaactacaccgaccctcgtgtcctcccttcatcctgcggggctggctggagcggccgctccggtgctgtccagcagccatagggagccgcacggggagcgggaaagcggtcgcggccccaggcggggcggccgggatggagcggggccgcgagcctgtggggaaggggctgtggcggcgcctcgagcggctgcaggttcttctgtgtggcagttcagaatgatggatcaagctagatcagcattctctaacttgtttggtggagaaccattgtcatatacccggttcagcctggctcggcaagtagatggcgataacagtcatgtggagatgaaacttgctgtagatgaagaagaaaatgctgacaataacacaaaggccaatgtcacaaaaccaaaaaggtgtagtggaagtatctgctatgggactattgctgtgatcgtctttttcttgattggatttatgattggctacttgggctattgtaaaggggtagaaccaaaaactgagtgtgagagactggcaggaaccgagtctccagtgagggaggagccaggagaggacttccctgcagcacgtcgcttatattgggatgacctgaagagaaagttgtcggagaaactggacagcacagacttcaccagcaccatcaagctgctgaatgaaaattcatatgtccctcgtgaggctggatctcaaaaagatgaaaatcttgcgttgtatgttgaaaatcaatttcgtgaatttaaactcagcaaagtctggcgtgatcaacattttgttaagattcaggtcaaagacagcgctcaaaactcggtgatcatagttgataagaacggtagacttgtttacctggtggagaatcctgggggttatgtggcgtatagtaaggctgcaacagttactggtaaactggtccatgctaattttggtactaaaaaagattttgaggatttatacactcctgtgaatggatctatagtgattgtcagagcagggaaaatcacctttgcagaaaaggttgcaaatgctgaaagcttaaatgcaattggtgtgttgatatacatggaccagactaaatttcccattgttaacgcagaactttcattctttggacatgctcatctggggacaggtgacccttacacacctggattcccttccttcaatcacactcagtttccaccatctcggtcatcaggattgcctaatatacctgtccagacaatctccagagctgctgcagaaaagctgtttgggaatatggaaggagactgtccctctgactggaaaacagactctacatgtaggatggtaacctcagaaagcaagaatgtgaagctcactgtgagcaatgtgctgaaagagataaaaattcttaacatctttggagttattaaaggctttgtagaaccagatcactatgttgtagttggggcccagagagatgcatggggccctggagctgcaaaatccggtgtaggcacagctctcctattgaaacttgcccagatgttctcagatatggtcttaaaagatgggtttcagcccagcagaagcattatctttgccagttggagtgctggagactttggatcggttggtgccactgaatggctagagggatacctttcgtccctgcatttaaaggctttcacttatattaatctggataaagcggttcttggtaccagcaacttcaaggtttctgccagcccactgttgtatacgcttattgagaaaacaatgcaaaatgtgaagcatccggttactgggcaatttctatatcaggacagcaactgggccagcaaagttgagaaactcactttagacaatgctgctttccctttccttgcatattctggaatcccagcagtttctttctgtttttgcgaggacacagattatccttatttgggtaccaccatggacacctataaggaactgattgagaggattcctgagttgaacaaagtggcacgagcagctgcagaggtcgctggtcagttcgtgattaaactaacccatgatgttgaattgaacctggactatgagaggtacaacagccaactgctttcatttgtgagggatctgaaccaatacagagcagacataaaggaaatgggcctgagtttacagtggctgtattctgctcgtggagacttcttccgtgctacttccagactaacaacagatttcgggaatgctgagaaaacagacagatttgtcatgaagaaactcaatgatcgtgtcatgagagtggagtatcacttcctctctccctacgtatctccaaaagagtctcctttccgacatgtcttctggggctccggctctcacacgctgccagctttactggagaacttgaaactgcgtaaacaaaataacggtgcttttaatgaaacgctgttcagaaaccagttggctctagctacttggactattcagggagctgcaaatgccctctctggtgacgtttgggacattgacaatgagttttaaatgtgatacccatagcttccatgagaacagcagggtagtctggtttctagacttgtgctgatcgtgctaaattttcagtagggctacaaaacctgatgttaaaattccatcccatcatcttggtactactagatgtctttaggcagcagcttttaatacagggtagataacctgtacttcaagttaaagtgaataaccacttaaaaaatgtccatgatggaatattcccctatctctagaattttaagtgctttgtaatgggaactgcctctttcctgttgttgttaatgaaaatgtcagaaaccagttatgtgaatgatctctctgaatcctaagggctggtctctgctgaaggttgtaagtggtcgcttactttgagtgatcctccaacttcatttgatgctaaataggagataccaggttgaaagaccttctccaaatgagatctaagcctttccataaggaatgtagctggtttcctcattcctgaaagaaacagttaactttcagaagagatgggcttgttttcttgccaatgaggtctgaaatggaggtccttctgctggataaaatgaggttcaactgttgattgcaggaataaggccttaatatgttaacctcagtgtcatttatgaaaagaggggaccagaagccaaagacttagtatattttcttttcctctgtcccttcccccataagcctccatttagttctttgttatttttgtttcttccaaagcacattgaaagagaaccagtttcaggtgtttagttgcagactcagtttgtcagactttaaagaataatatgctgccaaattttggccaaagtgttaatcttaggggagagctttctgtccttttggcactgagatatttattgtttatttatcagtgacagagttcactataaatggtgtttttttaatagaatataattatcggaagcagtgccttccataattatgacagttatactgtcggttttttttaaataaaagcagcatctgctaataaaacccaacagatactggaagttttgcatttatggtcaacacttaagggttttagaaaacagccgtcagccaaatgtaattgaataaagttgaagctaagatttagagatgaattaaatttaattaggggttgctaagaagcgagcactgaccagataagaatgctggttttcctaaatgcagtgaattgtgaccaagttataaatcaatgtcacttaaaggctgtggtagtactcctgcaaaattttatagctcagtttatccaaggtgtaactctaattcccattttgcaaaatttccagtacctttgtcacaatcctaacacattatcgggagcagtgtcttccataatgtataaagaacaaggtagtttttacctaccacagtgtctgtatcggagacaagtgtttcccataattttcttcatgcaatgacatcttcaaagcttgaagatcgttagtatctaacatgtatcccaactcctataattccctatcttttagttttagttgcagaaacattttgtggtcattaagcattgggtgggtaaattcaaccactgtaaaatgaaattactacaaaatttgaaatttagcttgggtttttgttacctttatggtttctccaggtcctctacttaatgagatagtagcatacatttataatgtttgctattgacaagtcattttaactttatcacattatttgcatgttacctcctataaacttagtgcggacaagttttaatccagaattgaccttttgacttaaagcagagggactttgtatagaaggtttgggggctgtggggaaggagagtcccctgaaggtctgacacgtctgcctacccattcgtggtgatcaattaaatgtaggtatgaataagttcgaagctccgtgagtgaaccatcattataaacgtgatgatcagctgtttgtcatagggcagttggaaacggcctcctagggaaaagttcatagggtctcttcaggttcttagtgtcacttacctagatttacagcctcacttgaatgtgtcactactcacagtctctttaatcttcagttttatctttaatctcctcttttatcttggactgacatttagcgtaggtacttaaatgaaagcatgtggcatgttcatcgtataacacaatatgaatacagggcatgcattttgcagcagtgagtctcttcagaaaacccttttctacagttagggttgagttacttcctatcaagccagtacgtgctaacaggctcaatattcctgaatgaaatatcagactagtgacaagctcctggtcttgagatgtcttctcgttaaggagatgggccttttggaggtaaaggataaaatgaatgagttctgtcatgattcactattctagaacttgcatgacctttactgtgttagctctttgaatgttcttgaaattttagactttctttgtaaacaaatgatatgtccttatcattgtataaaagctgttatgtgcaacagtgtggagattccttgtctgatttaataaaatacttaaacactgaaaaaaaaaaaaaaagcggcgcgccgcttctagtagtatctcctcgtagggagacacaaggcttacgcggtacccatgctttcnttg

SEQ ID NO: 81016 - DNA, 3946 bp, Homo sapiens
cagtgcgcccatcgcgcggctcctcggggcacctgctgccttggcgccttttcccttggccttcgcctcgcccgcagcgccctccgcatagggccccgcccgctgcgcgcgcatccccgccccccgggcgatctgtcagagcacctcgcgagcgtacgtgcctcaggaagtgacgcacagcccccctgggggccgggggcggggccaggctataaaccgccggttaggggccgccatcccctcagagcgtcgggatatcgggtggcggctcgggacggaggacgcgctagtgtgagtgcgggcttctagaactacaccgaccctcgtgtcctcccttcatcctgcggggctggctggagcggccgctccggtgctgtccagcagccatagggagccgcacggggagcgggaaagcggtcgcggccccaggcggggcggccgggatggagcggggccgcgagcctgtggggaaggggctgtggcggcgcctcgagcggctgcaggttcttctgtgtggcagttcagaatgatggatcaagctagatcagcattctctaacttgtttggtggagaaccattgtcatatacccggttcagcctggctcggcaagtagatggcgataacagtcatgtggagatgaaacttgctgtagatgaagaagaaaatgctgacaataacacaaaggccaatgtcacaaaaccaaaaaggtgtagtggaagtatctgctatgggactattgctgtgatcgtctttttcttgattggatttatgattggctacttgggctattgtaaaggggtagaaccaaaaactgagtgtgagagactggcaggaaccgagtctccagtgagggaggagccaggagaggacttccctgcagcacgtcgcttatattgggatgacctgaagagaaagttgtcggagaaactggacagcacagacttcaccagcaccatcaagctgctgaatgaaaattcatatgtccctcgtgaggctggatctcaaaaagatgaaaatcttgcgttgtatgttgaaaatcaatttcgtgaatttaaactcagcaaagtctggcgtgatcaacattttgttaagattcaggtcaaagacagcgctcaaaactcggtgatcatagttgataagaacggtagacttgtttacctggtggagaatcctgggggttatgtggcgtatagtaaggctgcaacagttactggtaaactggtccatgctaattttggtactaaaaaagattttgaggatttatacactcctgtgaatggatctatagtgattgtcagagcagggaaaatcacctttgcagaaaaggttgcaaatgctgaaagcttaaatgcaattggtgtgttgatatacatggaccagactaaatttcccattgttaacgcagaactttcattctttggacatgctcatctggggacaggtgacccttacacacctggattcccttccttcaatcacactcagtttccaccatctcggtcatcaggattgcctaatatacctgtccagacaatctccagagctgctgcagaaaagctgtttgggaatatggaaggagactgtccctctgactggaaaacagactctacatgtaggatggtaacctcagaaagcaagaatgtgaagctcactgtgagcaatgtgctgaaagagataaaaattcttaacatctttggagttattaaaggctttgtagaaccagatcactatgttgtagttggggcccagagagatgcatggggccctggagctgcaaaatccggtgtaggcacagctctcctattgaaacttgcccagatgttctcagatatggtcttaaaagatgggtttcagcccagcagaagcattatctttgccagttggagtgctggagactttggatcggttggtgccactgaatggctagagggatacctttcgtccctgcatttaaaggctttcacttatattaatctggataaagcggttcttggtaccagcaacttcaaggtttctgccagcccactgttgtatacgcttattgagaaaacaatgcaaaatgtgaagcatccggttactgggcaatttctatatcaggacagcaactgggccagcaaagttgagaaactcactttagacaatgctgctttccctttccttgcatattctggaatcccagcagtttctttctgtttttgcgaggacacagattatccttatttgggtaccaccatggacacctataaggaactgattgagaggattcctgagttgaacaaagtggcacgagcagctgcagaggtcgctggtcagttcgtgattaaactaacccatgatgttgaattgaacctggactatgagaggtacaacagccaactgctttcatttgtgagggatctgaaccaatacagagcagacataaaggaaatgggcctgagtttacagtggctgtattctgctcgtggagacttcttccgtgctacttccagactaacaacagatttcgggaatgctgagaaaacagacagatttgtcatgaagaaactcaatgatcgtgtcatgagagtggagtatcacttcctctctccctacgtatctccaaaagagtctcctttccgacatgtcttctggggctccggctctcacacgctgccagctttactggagaacttgaaactgcgtaaacaaaataacggtgcttttaatgaaacgctgttcagaaaccagttggctctagctacttggactattcagggagctgcaaatgccctctctggtgacgtttgggacattgacaatgagttttaaatgtgatacccatagcttccatgagaacagcagggtagtctggtttctagacttgtgctgatcgtgctaaattttcagtagggctacaaaacctgatgttaaaattccatcccatcatcttggtactactagatgtctttaggcagcagcttttaatacagggtagataacctgtacttcaagttaaagtgaataaccacttaaaaaatgtccatgatggaatattcccctatctctagaattttaagtgctttgtaatgggaactgcctctttcctgttgttgttaatgaaaatgtcagaaaccagttatgtgaatgatctctctgaatcctaagggctggtctctgctgaaggttgtaagtggtcgcttactttgagtgatcctccaacttcatttgatgctaaataggagataccaggttgaaagaccttctccaaatgagatctaagcctttccataaggaatgtagctggtttcctcattcctgaaagaaacagttaactttcagaagagatgggcttgttttcttgccaatgaggtctgaaatggaggtccttctgctggataaaatgaggttcaactgttgattgcaggaataaggccttaatatgttaacctcagtgtcatttatgaaaagaggggaccagaagccaaagacttagtatattttcttttcctctgtcccttcccccataagcctccatttagttctttgttatttttgtttcttccaaagcacattgaaagagaaccagtttcaggtgtttagttgcagactcagtttgtcagactttaaagaataatatgctgccaaattttggccaaagtgttaatcttaggggagagctttctgtccttttggcactgagatatttattgtttatttatcagtgacagagttcactataaatggtgtttttttaatagaatataattatcggaagcagtgccttccataattatgacagttatactgtcggttttttttaaataaaagcagcatctgctaataaaacccaacagatactggaagttttgcatttatggtcaacacttaagggttttagaaaacccggcggtagcaatggtattgatgtgagctagattagagatgattttcatagggtggtagagg

SEQ ID NO: 81017 - DNA, 2245 bp, Homo sapiens
gagctcggtaccctgtctccgtttcgggacgttaagagccgaagtatttcatccccccccccgagagagcgtctgtctccgtttcgggacggaggacgcgctagtgttcttctgtgtggcagttcagaatgatggatcaagctagatcagcattctctaacttgtttggtggagaaccattgtcatatacccggttcagcctggctcggcaagtagatggcgataacagtcatgtggagatgaaacttgctgtagatgaagaagaaaatgctgacaataacacaaaggccaatgtcacaaaaccaaaaaggtgtagtggaagtatctgctatgggactattgctgtgatcgtctttttcttgattggatttatgattggctacttgggctattgtaaaggggtagaaccaaaaactgagtgtgagagactggcaggaaccgagtctccagtgagggaggagccaggagaggacttccctgcagcacgtcgcttatattgggatgacctgaagagaaagttgtcggagaaactggacagcacagacttcaccagcaccatcaagctgctgaatgaaaattcatatgtccctcgtgaggctggatctcaaaaagatgaaaatcttgcgttgtatgttgaaaatcaatttcgtgaatttaaactcagcaaagtctggcgtgatcaacattttgttaagattcaggtcaaagacagcgctcaaaactcggtgatcatagttgataagaacggtagacttgtttacctggtggagaatcctgggggttatgtggcgtatagtaaggctgcaacagttactggtaaactggtccatgctaattttggtactaaaaaagattttgaggatttatacactcctgtgaatggatctatagtgattgtcagagcagggaaaatcacctttgcagaaaaggttgcaaatgctgaaagcttaaatgcaattggtgtgttgatatacatggaccagactaaatttcccattgttaacgcagaactttcattctttggacatgctcatctggggacaggtgacccttacacacctggattcccttccttcaatcacactcagtttccaccatctcggtcatcaggattgcctaatatacctgtccagacaatctccagagctgctgcagaaaagctgtttgggaatatggaaggagactgtccctctgactggaaaacagactctacatgtaggatggtaacctcagaaagcaagaatgtgaagctcactgtgagcaatgtgctgaaagagataaaaattcttaacatctttggagttattaaaggctttgtagaaccagatcactatgttgtagttggggcccagagagatgcatggggccctggagctgcaaaatccggtgtaggcacagctctcctattgaaacttgcccagatgttctcagatatggtcttaaaagatgggtttcagcccagcagaagcattatctttgccagttggagtgctggagactttggatcggttggtgccactgaatggctagagggatacctttcgtccctgcatttaaaggctttcacttatattaatctggataaagcggttcttggtaccagcaacttcaaggtttctgccagcccactgttgtatacgcttattgagaaaacaatgcaaaatgtgaagcatccggttactgggcaatttctatatcaggacagcaactgggccagcaaagttgagaaactcactttagacaatgctgctttccctttccttgcatattctggaatcccagcagtttctttctgtttttgcgaggacacagattatccttatttgggtaccaccatggacacctataaggaactgattgagaggattcctgagttgaacaaagtggcacgagcagctgcagaggtcgctggtcagttcgtgattaaactaacccatgatgttgaattgaacctggactatgagaggtacaacagccaactgctttcatttgtgagggatctgaaccaatacagagcagacataaaggaaatgggcctgagtttacagtggctgtattctgctcgtggagacttcttccgtgctacttccagactaacaacagatttcgggaatgctgagaaaacagacagatttgtcatgaagaaactcaatgatcgtgtcatgagagaaggccacagatgatgctccttctcacggatgcgaggccatcaaatcactttttgtctccgctgctctctctccat

SEQ ID NO: 81018 - DNA, 2953 bp, Homo sapiens
cagtgcgcccatcgcgcggctcctcggggcacctgctgccttggcgccttttcccttggccttcgcctcgcccgcagcgccctccgcatagggccccgcccgctgcgcgcgcatccccgccccccgggcgatctgtcagagcacctcgcgagcgtacgtgcctcaggaagtgacgcacagcccccctgggggccgggggcggggccaggctataaaccgccggttaggggccgccatcccctcagagcgtcgggatatcgggtggcggctcgggacggaggacgcgctagtgtgagtgcgggcttctagaactacaccgaccctcgtgtcctcccttcatcctgcggggctggctggagcggccgctccggtgctgtccagcagccatagggagccgcacggggagcgggaaagcggtcgcggccccaggcggggcggccgggatggagcggggccgcgagcctgtggggaaggggctgtggcggcgcctcgagcggctgcaggttcttctgtgtggcagttcagaatgatggatcaagctagatcagcattctctaacttgtttggtggagaaccattgtcatatacccggttcagcctggctcggcaagtagatggcgataacagtcatgtggagatgaaacttgctgtagatgaagaagaaaatgctgacaataacacaaaggccaatgtcacaaaaccaaaaaggtgtagtggaagtatctgctatgggactattgctgtgatcgtctttttcttgattggatttatgattggctacttgggctattgtaaaggggtagaaccaaaaactgagtgtgagagactggcaggaaccgagtctccagtgagggaggagccaggagaggacttccctgcagcacgtcgcttatattgggatgacctgaagagaaagttgtcggagaaactggacagcacagacttcaccagcaccatcaagctgctgaatgaaaattcatatgtccctcgtgaggctggatctcaaaaagatgaaaatcttgcgttgtatgttgaaaatcaatttcgtgaatttaaactcagcaaagtctggcgtgatcaacattttgttaagattcaggtcaaagacagcgctcaaaactcggtgatcatagttgataagaacggtagacttgtttacctggtggagaatcctgggggttatgtggcgtatagtaaggctgcaacagttactggtaaactggtccatgctaattttggtactaaaaaagattttgaggatttatacactcctgtgaatggatctatagtgattgtcagagcagggaaaatcacctttgcagaaaaggttgcaaatgctgaaagcttaaatgcaattggtgtgttgatatacatggaccagactaaatttcccattgttaacgcagaactttcattctttggacatgctcatctggggacaggtgacccttacacacctggattcccttccttcaatcacactcagtttccaccatctcggtcatcaggattgcctaatatacctgtccagacaatctccagagctgctgcagaaaagctgtttgggaatatggaaggagactgtccctctgactggaaaacagactctacatgtaggatggtaacctcagaaagcaagaatgtgaagctcactgtgagcaatgtgctgaaagagataaaaattcttaacatctttggagttattaaaggctttgtagaaccagatcactatgttgtagttggggcccagagagatgcatggggccctggagctgcaaaatccggtgtaggcacagctctcctattgaaacttgcccagatgttctcagatatggtcttaaaagatgggtttcagcccagcagaagcattatctttgccagttggagtgctggagactttggatcggttggtgccactgaatggctagagggatacctttcgtccctgcatttaaaggctttcacttatattaatctggataaagcggttcttggtaccagcaacttcaaggtttctgccagcccactgttgtatacgcttattgagaaaacaatgcaaaatgtgaagcatccggttactgggcaatttctatatcaggacagcaactgggccagcaaagttgagaaactcactttagacaatgctgctttccctttccttgcatattctggaatcccagcagtttctttctgtttttgcgaggacacagattatccttatttgggtaccaccatggacacctataaggaactgattgagaggattcctgagttgaacaaagtggcacgagcagctgcagaggtcgctggtcagttcgtgattaaactaacccatgatgttgaattgaacctggactatgagaggtacaacagccaactgctttcatttgtgagggatctgaaccaatacagagcagacataaaggtgagcactgattccaattacgtttttattttgctgaatgtcaagtattttgaaatgtgatgtgttcctgtgtgttcctgttggaagggtgattgtagccatagtacattttaaagtgaactgaggtataattgtatgtagaattggtaacttgtttgagagaagtcgggaggctgtggattagagacctaggacagagctcagcaggtgtttcagaatccagagcagtgtcaggttttctgtcactcatgtctcccaggcagcccgtcagtaggacacggaatatgaagatctcagcaaggagttgggctgtgtgcctctcgggcgtgacccggatggaaagacagcacagctagcaggattccatctcgtagtgatctgcgcatctaaaagtcaaatattctattaaacgaaactgataagcagggtgaggtggtgcatacccgtagccccagctacttctgctgaggcaggaggattgctggagtccagcccaggcaacatagcaaaatcccatctctaaataaa

SEQ ID NO: 81019 - DNA, 1727 bp, Homo sapiens
gagctcggtaccctgtctccgtttcgggacgttaagagccgaagtatttcatccccccccccgagagagcgtctgtctccgtttcgggacggaggacgcgctagtgttcttctgtgtggcagttcagaatgatggatcaagctagatcagcattctctaacttgtttggtggagaaccattgtcatatacccggttcagcctggctcggcaagtagatggcgataacagtcatgtggagatgaaacttgctgtagatgaagaagaaaatgctgacaataacacaaaggccaatgtcacaaaaccaaaaaggtgtagtggaagtatctgctatgggactattgctgtgatcgtctttttcttgattggatttatgattggctacttgggctattgtaaaggggtagaaccaaaaactgagtgtgagagactggcaggaaccgagtctccagtgagggaggagccaggagaggacttccctgcagcacgtcgcttatattgggatgacctgaagagaaagttgtcggagaaactggacagcacagacttcaccagcaccatcaagctgctgaatgaaaattcatatgtccctcgtgaggctggatctcaaaaagatgaaaatcttgcgttgtatgttgaaaatcaatttcgtgaatttaaactcagcaaagtctggcgtgatcaacattttgttaagattcaggtcaaagacagcgctcaaaactcggtgatcatagttgataagaacggtagacttgtttacctggtggagaatcctgggggttatgtggcgtatagtaaggctgcaacagttactggtaaactggtccatgctaattttggtactaaaaaagattttgaggatttatacactcctgtgaatggatctatagtgattgtcagagcagggaaaatcacctttgcagaaaaggttgcaaatgctgaaagcttaaatgcaattggtgtgttgatatacatggaccagactaaatttcccattgttaacgcagaactttcattctttggacatgctcatctggggacaggtgacccttacacacctggattcccttccttcaatcacactcagtttccaccatctcggtcatcaggattgcctaatatacctgtccagacaatctccagagctgctgcagaaaagctgtttgggaatatggaaggagactgtccctctgactggaaaacagactctacatgtaggatggtaacctcagaaagcaagaatgtgaagctcactgtgagcaatgtgctgaaagagataaaaattcttaacatctttggagttattaaaggctttgtagaaccagatcactatgttgtagttggggcccagagagatgcatggggccctggagctgcaaaatccggtgtaggcacagctctcctattgaaacttgcccagatgttctcagatatggtcttaaaagatgggtttcagcccagcagaagcattatctttgccagttggagtgctggagactttggatcggttggtgccactgaatggctagagggatacctttcgtccctgcatttaaaggctttcacttatattaatctggataaagcggttcttggtaccagcaacttcaaggtttctgccagcccactgttgtatacgcttattgagaaaacaatgcaaaatgtgaagcatccggttactgggcgtcgacgcggccgcgaatttagtagtagtagtaggcgccgc

SEQ ID NO: 81020 - DNA, 890 bp, Homo sapiens
cagtgcgcccatcgcgcggctcctcggggcacctgctgccttggcgccttttcccttggccttcgcctcgcccgcagcgccctccgcatagggccccgcccgctgcgcgcgcatccccgccccccgggcgatctgtcagagcacctcgcgagcgtacgtgcctcaggaagtgacgcacagcccccctgggggccgggggcggggccaggctataaaccgccggttaggggccgccatcccctcagagcgtcgggatatcgggtggcggctcgggacggaggacgcgctagtgtgagtgcgggcttctagaactacaccgaccctcgtgtcctcccttcatcctgcggggctggctggagcggccgctccggtgctgtccagcagccatagggagccgcacggggagcgggaaagcggtcgcggccccaggcggggcggccgggatggagcggggccgcgagcctgtggggaaggggctgtggcggcgcctcgagcggctgcaggtacacggggtcggcggctgtgcgcagaggcgtccctgcgcctctcgtcccttcgcctctcgtcccttcccttctctctgccttcttgcccgcctcctcggtcacagagcgacgaatgacgagaccaggtgtacccccactgtcgctctcagccccggggacttcgggtcctcgcccttgaaggccgcaggccctagtgcgccggctccgggctgcgggtccgggagcgcgggcgcagccaaggtgcagctgcgcggcgtgcggcgccgggggaacacgtggctgctccaggaagtcgccccagggaacggctgggattcgtgggtgaccttgggctcctaaaccttcggttccccgggctccgggcgggccccgttctcactgcgg

SEQ ID NO: 81021 - DNA, 632 bp, Homo sapiens
caagaaattaaaaaattaactgggtgtggtagcccatgcctgtagtcccagctacttgggaggctgagacgggagaacctcttaagcccaggaggtaaagattgcagtgaggggtgatcgcgccactacattccagcctgggcaacattgtgagaccctgtctcaaaaacaaacaaacaaaaaaaatcatgtattgatttgattttcttatcttaaaatgtaggcaataaaacctctcttctagctttccaggtttccaaatgctttaaggtcagttaaaatttaatagtcataattggcttttgtggaaaacttcatgacctcagacttttattgtttaccttttaatgtgtttcatatgatacaggtttccttatgaatattcaaaaagatatccaaagttggcagttccagtgattttaagagtggatatagtatataaaaatggattgagaaagtgctacaaattagaaaaccctttggaatgctatagctgtgggacaattttcttaaaaataaaaaaaaagcaaaaaccccctttctcacaaatgattataaaaataggcaatattctagtgctattagtagttccatgctttcgtaaatgattgtgcatgtttttgctaactgca

SEQ ID NO: 81022 - DNA, 342 bp, Homo sapiens
gtgcccaccatgcccaattaattagaattgaccttttaattgttataaattgttcctccatattttgagtaactttttgttttaaagtctgttttgtcttaggttagaatagacacttcagctcttatggttgctgtttgtatggtttatcttttaaaatccctctactttcaacctatttgtattatcaaaaatgatgtatctgctgtaaagagcatatagttaaatcttgagtttttaattttaaaattctatctgtttttgccttgtgatgtgattatttaatctgtttgcatttaatgtcattattgatgtgattggattcacattttctggcttacg

SEQ ID NO: 81023 - DNA, 549 bp, Homo sapiens
caggctggagtgcagtggcacgatcttggctcattgcagcctcagtctcctgggcacaagcaatcctccctcctcagcctcccaagtagctggaaccataggtgtacactactacacccagctaatttttgtattttttcatagagatgaggtcttactgtgtttcccatggtagtctcaaacccctgggcttatgggacccttccacctcggccgctgggattatgagcataagccaccatgcccggcccagaatgcacttagctaaacccccaatccagtgctaatttcataagcctattgctacctaaagatcctacttcagcttagaactttagtccgccttgcttggcagaaatccagtgtaataaatcattactcactgatcattcactgggtttatcacattgcagtaagtacttggagaatcaagatatactcatatgcctcagtttgggggagaagcatggttatgctcgggaagacagattttcatgggaaccaagaatgccatgttgaaaacagatctgttactttgtcacatgcctc

SEQ ID NO: 81024 - DNA, 402 bp, Homo sapiens
ggtcatgtttccacaacatcgtgaatgagtttagtgccacagcattaaatgtattcatggtgtacttgtgtacttatgaatggctaagatgataaatattatgtacattttaccacaataaaaaagtaatgaattctggccaggtacagtggctcacccctgtaatcccagcactttgggaggctaaggcaggctgatcacttgaggtcaggaattcaagaccagcccagccaacatggcaaaaccccatctctactaaaaatatagccaggcgtggtggcgcatacctgtaatctctgctatttgggagactgaggcaggagaatcgcatgaacccgggaggtgcaggttgcagtgagccaagattgtaccactgcactccaacctgggttacagcatctc

SEQ ID NO: 81025 - DNA, 448 bp, Homo sapiens
agagcccgccccaccctgcagctccgtgtgaccccggctgtgacctcccgggtgggtggccctgccgcaggagagccactttcagagatgccctgagtgatcgtcaccagctgcatcctgcaaacttcatcttgctgtccctgtggcttggagagcccagtcagctttgcttgtaaacatacatgttacttacagttgtatttggtcatgccagatgaaattactgtttttagaggtcaaagtgagcaagtagcaactttatatggttccagctaatatttatgttacatttatgttctgatgaaacacttttgtgctactgacccatttttgtggatgactgcagaaaatatactgaaacttaatgatgacaatgaaaacctcaaacctaaatgtaaaataaaaaacatgaaaaaatggtggcagagctcaccatcttaaatgcttt

SEQ ID NO: 81026 - DNA, 348 bp, Homo sapiens
aatgatcctcccacctcagtttttgatttttttttgtagagacagggtctcgctgtgttgcccaggctggtcttgaactcctggcctcaagcagtcctcttgccttggtgtcccaaagtgctgtgattacaggtgtgagccacagtgcctggcctaaagaatttgataacgtgaaactttcccctttttaaaaaatgtaggataaattgaagtatgtgtatatatgaataatagacagaattatacgtggatagctgttccccagttgtttgcctttttcatggggaaccagtgttccaatgttactggtgtcctatgtatccttccaggaagacaatacgcttatac

SEQ ID NO: 81027 - DNA, 411 bp, Homo sapiens
agcatgtgtataaagaatgtacttttagtggacatgcttcactttgcaaatatagtgcataattttcaaatacatctttgactcttcctcaaacctgctcagaagctgtgtttttcctctcttcattaaaatgttccaacctggaaattttctctttacaattcagatatttttcacttcttgggaagggaataactaaataatttcaatactttaaactacaaggatgatgtatttttgttctacacagcattgatatggtggagctgtattctttttctaataatacaaataatatagggctgtaagggtttgtatccattgcatgtatatgttaaggaggataagaggtatgtattaaaagtaaattttgagaaattataagtataaaccaaaaagtcttataccttt

SEQ ID NO: 81028 - DNA, 6173 bp, Homo sapiens
tcaggccggcagcggggagccgagtggaggctaattttacttgctgggagcgaggagagtaatcctcctgccccccactcctgccccgccccctggctggctcagcagggcagctcagccgacagcctcagccagcctagtccccaaggcgggggcattggggacacagggaagggaaagcactggggtgggggagcaggagaaagccagattcccagggaagccatggagccatcctcaccccaggatgaaggcctgaggaagaaacagcccaagaagccagttcctgagattctgccaaggccaccccgggctttgttctgcctgaccctggagaaccccctgaggaaggcctgcatcagcattgtagaatggaagcccttcgagacgatcatcttgctcaccatctttgccaattgtgtggccctggccgtgtacctgcccatgccggaagatgacaacaactctctgaacctcggcctggagaagctggagtatttcttcctcattgtcttctcgattgaagccgccatgaagatcattgcctacggcttcttattccaccaggacgcttacctgcgcagtggctggaatgtgctggacttcaccattgtcttcctgggggtcttcaccgtgattctggaacaggttaacgtcatccaaagccacacagccccaatgagcagcaaaggagccggcttggatgtcaaggccctcagagccttccgagtgctcagacccctccggctggtgtcgggggtgcctagcctgcaggtggtcctgaactccatcttcaaggccatgctccccctctttcacatcgccctgctggtcctctttatggtcatcatctatgccatcatcgggctggagctcttcaagggcaagatgcacaagacctgctacttcattggtacagatatcgtggccacggtggagaatgaagagccatcgccctgcgccaggacgggctcagggcgccggtgcaccatcaatggcagtgagtgccggggcggctgcccagggcccaaccatggcatcacccacttcgacaacttcggcttctccatgctcaccgtgtaccagtgcattaccatggagggatggactgacgtcctttactgggtcaatgatgccatcgggaatgagtggccctggatctattttgtcaccctcattttgctgggatccttcttcatcctcaacctggtgctgggtgtcctgagtggggaattcaccaaggagcgggagaaggccaagtccaggggaaccttccagaagctccgggagaagcagcaactagatgaggaccttcggggctacatgagctggatcacgcagggcgaggtcatggatgttgaggacttcagagaaggaaaactgtctttggatgaaggtggctctgacacagagagcctgtatgaaattgcaggcttgaacaaaatcatccagttcatccgacattggaggcagtggaaccgcatctttcgctggaagtgccatgacatcgtgaagtccaaggtcttctattggctggtgattctcatcgttgccctcaacaccctgtctatcgcctcagagcaccacaaccagccgcactggctgacccgtttgcaagacattgccaaccgggtgctgctgtccctcttcaccactgagatgctgatgaagatgtacgggctgggcctgcgccagtacttcatgtctatcttcaaccgcttcgactgcttcgtggtgtgcagcggtatcctggagatcctgctggtggagtcgggcgccatgacacccctgggcatctccgtgctccgctgcatccgcctcctgaggatcttcaagatcaccaaatattggacgtcgctgagcaacctggtggcatccctgctcaactccatccgctccatcgcctccctgctgctgctgctcttcctcttcatcgtcatcttccgcctcctgggcatgcagctctttggggggaggtatgactttgaagacacagaagtacggcgcagcaactttgacaactttccccaagccctcatcagcgtcttccaggtactgacaggggaagactggacctcaatgatgtacaatgggatcatggcctcgagcgggccgtcctaccctggcatgcttgtgtgcatttacttcatcatccttttcgtctgtggcaactacatcctgctcaatgtcttcctggccattgccgtggacaacctggccgaggcggagagcctgacttctgcccagaaggccaaggctgaggagaaaaaacgcaggaagatgtccaagggtctcccagacaagtcagaagaggagaagtcaacgatggccaagaagctggagcagaaacccaagggtgagggcatccccaccactgccaagctgaaaatcgatgagtttgaatctaatgtcaatgaggtgaaggatccctacccctcagccgacttcccaggggatgacgaggaagatgagcctgagatcccgctgagcccccgaccacgtcccctggctgagctgcagctgaaagagaaggccgtgcccattccagaagccagctccttcttcatcttcagccccaccaataagatccgtgtcctgtgtcaccgcatcgtcaatgccacctggttcaccaacttcatcctgctcttcatcctgctcagcagcgctgcactggctgcggaagaccccatccgggctgattccatgagaaatcagatccttaaacactttgacatcgggttcacctctgtcttcactgtggagattgtcctcaagatgacgacctacggagccttcctgcacaagggttccttctgccgcaattacttcaacatgctggacctgctggtggtggccgtgtccctcatctccatgggacttgagtccagtgccatctccgtggtgaagatcctgagggtgctgagggtgctccgaccactcagagccatcaacagagccaaggggttgaagcacgtggctaggtgcatgttcgtggccatcagcaccatcgggaacatcgtgctggtcactaccctcctacagttcatgtttgcctgcatcggcgtccagctcttcaaggggaagttcttcaggtgcaccgacttgtccaagatgacagaggaggagtgcaggggctactactacgtgtacaaggacggggaccccatgcagatagagctgcgtcaccgcgagtgggtacacagcgacttccacttcgacaatgtgctctcagccatgatgtccctcttcacggtctccaccttcgagggatggcctcagctgctgtacaaggccatagactccaatgcggaggacgtgggtcccatctacaacaaccgtgtggagatggccatcttcttcatcatctacatcatcctcattgccttcttcatgatgaacatctttgtgggcttcgtcattgtcaccttccaggagcagggagagactgagtacaagaactgtgagctggacaagaaccagcgccaatgtgtacagtatgccctgaaggcccgcccactgaggtgctacattcccaaaaacccataccagtaccaggtgtggtacattgtcacctcctcctactttgaatacctgatgtttgccctcatcatgctcaacaccatctgcctcggcatgcagcactacaaccagtcggagcagatgaaccacatctcagacatcctcaatgtggccttcactatcatcttcaccctggagatgatcctcaagctcatggccttcaaggccaggggctactttggaaacccctggaatgtgtttgacttcctgattgtcattggcagcatcattgatgtcatcctcagtgagatcgacactttcctggcctccagcgggggactgtattgcctgggtggaggctgcgggaacgttgacccagatgagagtgcccgcatctccagcgccttcttccgcctgttccgtgtcatgaggctgatcaagctgctgagccgggcagaaggagtgcgaaccctcctgtggacgttcatcaagtccttccaggccctaccctacgtggctctgctcatcgtcatgctcttcttcatctacgctgtcatcggcatgcagatgtttgggaagatcgccttggtggatgggacccaaataaaccggaacaacaacttccagaccttcccacaagctgtgctactgctcttcaggtgtgcaacaggtgaggcctggcaggagatcctactggcctgcagctatgggaagctgtgtgacccagagtcggactatgccccaggggaggagtacacatgtggcaccaactttgcatactactacttcatcagcttctacatgctctgtgccttcctggtcatcaacctctttgtggctgtcatcatggacaattttgactacctcacccgggactggtccatcctgggccctcatcacctggatgagttcaaggccatctgggcagagtatgacccagaggctaaggggaggatcaaacacctggacgtggtgaccctgctgagaaggattcagccccctctgggctttgggaagttctgcccacatcgggtagcttgtaagcggctggtgggcatgaacatgcccctgaacagcgacggcacagtcaccttcaatgccacactctttgccctggtccgcacggcactcaagatcaagacggaaggtaactttgagcaggccaacgaggagctgagggccatcatcaagaagatctggaagagaaccagcatgaagctcttggaccaggtcatccctccaataggagatgatgaggtgacagtggggaagttctacgccacattcctcatccaggagcacttccggaagttcatgaaacgccaagaggagtattatggctatcggcccaagaaggacattgtacagatccaggcagggctgcggaccattgaggaagaggcagcccccgagatctgtcgcacggtctcaggagacctggctgctgaggaggagctggagagagccatggtggaggctgcgatggaggaggggatattccggaggactggaggcctgtttggccaggtggacaacttcctggaaaggaccaactccctgccccctgtcatggccaatcagagacccctccagtttgctgagatagagatggaagagatggagtcacctgtcttcttggaggacttcccacaagatccacgcaccaaccccctggctcgtgccaataccaacaatgccaacgccaatgtcgcctatgcgaacagcaaccatagcaacagccatgtgttttccagtgtccactatgaaagggagttcccagaagagacagagacgcctgctaccagaggacgagcccttggccaaccctgcaggtccctgggaccccacagcaaaccctgtgtggagatgctgaagggactgctgacccagagggcaatgcccagaggccaggcacctcctgccccctgccagtgccccagggtggagtcctccatgcctgaggacagaaagagctccacaccagggtctcttcatgaggagacaccccacagcaggagcaccagggagaatacttccaggtgctcagcaccagctacagccctgctgatccaaaaggctctggttcgagggggcctgggcaccttggcagctgatgcaaacttcatcatggcaacaggccaggccctggcagatgcctgccaaatggaaccagaggaagtggagatcatggcaacagagctactgaaaggacgagaggccccagagggcatggccagctccctgggatgcctgaacctcgggtcctccctgggcagcctcgaccaacaccagggctcccaggagacccttattcctccaaggctgtgatgcccacacagcatcagcatgggcttagagctggcatgaccaatgggggtggggaagttgctggggtggagaagggctagcccaccgcagcagcctccctccctctcagcagctagatgcatggcctgaggcagggtggtcaggaaccacctcaaaaagtgcggaggaagtagctggacaggccctgcccctcaccagcaagaggcatgattggatggagcttctaatgtcattcaaaaaggcctggtcagtgcctgtctggcctagggccactcccacctgcaggacattaaaatctccaggcctgtgacactggcaaaaaacct

SEQ ID NO: 81029 - DNA, 3049 bp, Homo sapiens
gctgctgctactactaccagccttgctccagcccccaccccatgcagatagagctgcgtcaccgcgagtgggtacacagcgacttccacttcgacaatgtgctctcagccatgatgtccctcttcacggtctccaccttcgagggatggcctcagctgctgtacaaggccatagactccaatgcggaggacgtgggtcccatctacaacaaccgtgtggagatggccatcttcttcatcatctacatcatcctcattgccttcttcatgatgaacatctttgtgggcttcgtcattgtcaccttccaggagcagggagagactgagtacaagaactgtgagctggacaagaaccagcgccaatgtgtacagtatgccctgaaggcccgcccactgaggtgctacattcccaaaaacccataccagtaccaggtgtggtacattgtcacctcctcctactttgaatacctgatgtttgccctcatcatgctcaacaccatctgcctcggcatgcagcactacaaccagtcggagcagatgaaccacatctcagacatcctcaatgtggccttcactatcatcttcaccctggagatgatcctcaagctcatggccttcaaggccaggggctactttggaaacccctggaatgtgtttgacttcctgattgtcattggcagcatcattgatgtcatcctcagtgagatcgacactttcctggcctccagcgggggactgtattgcctgggtggaggctgcgggaacgttgacccagatgagagtgcccgcatctccagcgccttcttccgcctgttccgtgtcatgaggctgatcaagctgctgagccgggcagaaggagtgcgaaccctcctgtggacgttcatcaagtccttccaggccctaccctacgtggctctgctcatcgtcatgctcttcttcatctacgctgtcatcggcatgcagatgtttgggaagatcgccttggtggatgggacccaaataaaccggaacaacaacttccagaccttcccacaagctgtgctactgctcttcaggtgtgcaacaggtgaggcctggcaggagatcctactggcctgcagctatgggaagctgtgtgacccagagtcggactatgccccaggggaggagtacacatgtggcaccaactttgcatactactacttcatcagcttctacatgctctgtgccttcctggtcatcaacctctttgtggctgtcatcatggacaattttgactacctcacccgggactggtccatcctgggccctcatcacctggatgagttcaaggccatctgggcagagtatgacccagaggctaaggggaggatcaaacacctggacgtggtgaccctgctgagaaggattcagccccctctgggctttgggaagttctgcccacatcgggtagcttgtaagcggctggtgggcatgaacatgcccctgaacagcgacggcacagtcaccttcaatgccacactctttgccctggtccgcacggcactcaagatcaagacggaaggtaactttgagcaggccaacgaggagctgagggccatcatcaagaagatctggaagagaaccagcatgaagctcttggaccaggtcatccctccaataggagatgatgaggtgacagtggggaagttctacgccacattcctcatccaggagcacttccggaagttcatgaaacgccaagaggagtattatggctatcggcccaagaaggacattgtacagatccaggcagggctgcggaccattgaggaagaggcagcccccgagatctgtcgcacggtctcaggagacctggctgctgaggaggagctggagagagccatggtggaggctgcgatggaggaggggatattccggaggactggaggcctgtttggccaggtggacaacttcctggaaaggaccaactccctgccccctgtcatggccaatcagagacccctccagtttgctgagatagagatggaagagatggagtcacctgtcttcttggaggacttcccacaagatccacgcaccaaccccctggctcgtgccaataccaacaatgccaacgccaatgtcgcctatgcgaacagcaaccatagcaacagccatgtgttttccagtgtccactatgaaagggagttcccagaagagacagagacgcctgctaccagaggacgagcccttggccaaccctgcaggtccctgggaccccacagcaaaccctgtgtggagatgctgaagggactgctgacccagagggcaatgcccagaggccaggcacctcctgccccctgccagtgccccagggtggagtcctccatgcctgaggacagaaagagctccacaccagggtctcttcatgaggagacaccccacagcaggagcaccagggagaatacttccaggtgctcagcaccagctacagccctgctgatccaaaaggctctggttcgagggggcctgggcaccttggcagctgatgcaaacttcatcatggcaacaggccaggccctggcagatgcctgccaaatggaaccagaggaagtggagatcatggcaacagagctactgaaaggacgagaggccccagagggcatggccagctccctgggatgcctgaacctcgggtcctccctgggcagcctcgaccaacaccagggctcccaggagacccttattcctccaaggctgtgatgcccacacagcatcagcatgggcttagagctggcatgaccaatgggggtggggaagttgctggggtggagaagggctagcccaccgcagcagcctccctccctctcagcagctagatgcatggcctgaggcagggtggtcaggaaccacctcaaaaagtgcggaggaagtagctggacaggccctgcccctcaccagcaagaggcatgattggatggagcttctaatgtcattcaaaaaggcctggtcagtgcctgtctggcctagggccactcccacctgcaggacattaaaatctccaggcctgtgacactggcaaaaaacct

SEQ ID NO: 81030 - DNA, 311 bp, Homo sapiens
aaaaacacattaccatttacatttacattagcatccaaaaatgtgaaacaggtataaatctaacaaaatatgtaaagatctatatgaggaaaactacaaaatgcaggaaaaatataaaagaagaactaaataaaaggatagatatttcatgttgatgaacaggaacactcaatattgtaaaggtatcagtttttccaaatttgacctacgaagtcagtgctatcccaaacaaaatcccagtaagttattttgtagggattgacaaactgattttaaagtttacatagagaggcaaaaatcccagaataatc

SEQ ID NO: 81031 - DNA, 695 bp, Homo sapiens
agaccgtggctccctgaatggcagagaagagtttgtagtgctgcgccggcagaacttgctggaaacctcctctccagaatttgccagatatcctctttctaagacagcagggggcgcttttcaaggggcaggtcgagggaagttgctggccccgcggctgctgctgtgcatggcagggaacctggttcccgggctgccgctcacactgttcaagtcgagcactgggagctgcatgcactgctaagagaagacgctagaaccgacaaagacccttcttcctgcactgtctccccagtacactccattgacaagccagctaccaaaggaaaaagaaaagcgggtacctttcaaaatagctagaaaaaaataattcgaatgttcctagcataaagaaaagatgaatatttaaggtgatggatatctcaattactctgatttgatttttacacatcacatgaatgtatcaaattaacacatgtacccccaaaatatgcacatctattatgtatcaacaaaaaaaatcaacaaaaaagaaagcagggaatgaagagtaaatttggagaggagaggcaacacctttgtaactggaacagagagtatcctgcaagcagttctaaatggatgcggccagctgcttccgggtgatggtgagcataagaagaacccttttctgcactcctctctcagtggaatgt

SEQ ID NO: 81032 - DNA, 376 bp, Homo sapiens
cgcctgtagaatgagggaacttcactttaatactgggagagaagcgatcacaacgaggaaacgaggtttgcaaaaataagtaatttcagaagagaaggaaaccagcagattagttttgtctgcgtccgtcacgtctgagtaaactaagaaatctgaaggtagatgtgggagtggtgtttataatttcccttacgtaagcacggctagaacggaggcgacgggcactggaatttagaactcagcatttgaaaacactttgtttccgtgccataaaagagcgccaaaatggggctacaacggctaaagaatttccaaaaagttccttgtgcaaaataaaggagtcgggggcgcagtgatcggaggctttccgtccttt

SEQ ID NO: 81033 - DNA, 403 bp, Homo sapiens
agttactaaatattgacatttaatgtttggcaggagcttgcacaaacatgagaagaaagatggtataattaatacataggatttgtttcctgatgagcttctgcatcagttgtgttggaagggaaaggaatttatgtcaggaaatagccttaaaggttttgctatcctgaaaacactgagattttcttgtcttcacttgtttctttgtttttattgatatgagacttcaggactttgaagtacttagcatcaacactaagaatcatcatttcttagtgataaatgctaattattagaaattggcctttgataaattgctgaacaaacaacttttaagtattctacttcaaaggctatactaattgcctaattttggccattcttaggcaatcattactgtatg

SEQ ID NO: 81034 - DNA, 568 bp, Homo sapiens
ctcttgggtaaagatgatgcccaattcaacattctgaattgcatctagcaattgttattgctcaataaatatcgtagttgtaatgcttggagggctgggatgctgtggcttagacaaaacttttgccaatgtgtggaaatcagctcacactgccattatatttctagctgactcgcaagtgttgagcctgggttgggctgctcatcatgtgatactttcatagcttcacttctcaggacagttcagctaacatgggtctcagagccctgtttcagctgcagcttcttctttgtggtttatatgcagtttttgtaatctgcagtaatgagctaaggatctgaatgctaggaaacaaaggagtagtataagaaaactattagacttaagaaaaccatattagagttctcaaacttccacatcctgttttccatttattcattaaagaatatgggccgggcgcggtggctcacacctgtaatcccagcgctttgggaggccgaggcgggcggatcatgaggtcacgagatcgagaccatcctggctaacacggtgaaaccccgtctctact

SEQ ID NO: 81035 - DNA, 126 bp, Homo sapiens
tgcattttgctcttttgtcattgtttcaaagtcaagttgatggccacaaaattccagaggctaagcaatgcagaagtttcatctactggcagctagttttatttcttaaaaatacattaaattaga

SEQ ID NO: 81036 - DNA, 484 bp, Homo sapiens
tatgttgcccagggtcacacactaagtggcacagccaggattcaggtccagttggagctcctataagctggactagacagtcttataatgaacaatggtgacgataacaatagctaacattgacaagcgtttaatgcgttccagacaccggactgagacagaaaagccattatctcttgctcagtgatgatccttagaggcaggcactattattattttatccccatttcacagacaagcaaacggaggcccaggaagataaggtctacgcagccagtcaggagtgagcctcccagatccgtctggtacagttctgcacaagagacactacagatgctctatcagggaggggtgtgtgtgtgtgtgtgtgtgtgtgtgtgtgtgtgtgtgtttcccctctggggagactctagatgtgagtgaagtgcagccagtctagatgtcagctcagaaggccctgaatgaagccccaaccgtgagggga

SEQ ID NO: 81037 - DNA, 780 bp, Homo sapiens
ctttttcattcttgttacttgtgatgcaattaagtgaagataagaaaaaaaaaaaaaagcagagatttaccatgtatcagtgcctggctttttgttattaagctttgtttgtctagtgctcttttgctataaaatagactgtagtacaccctagtaggaaaaaaaaaaaactaaatttaaaaataaaaaatatatttggcttatttttcgcaggagcaatccttttataccatgaatattacaaaaaaattgtcagattctgaatatttcttctttgtagatttttggaatcattatgagtaaaagtttgttactttattttactatttaaaagatgttattttaccatgtgttaccaagatgaaactgtatgggtagcttttttgtttgttttttgttttgtttttgtttttgtttttgtttttagttgtaggtcgcagcggggaaattttttgcgactgtacacatagctgcagcattaaaaacttaaaaaaattgttaaaaaaagaaaaaaagggaaaacatttcaaaaaaaaaaaaagataaacagttacaccttgttttcaatgtgtggctgagtgcctcgattttttcatgtttttggtgtatttctgatttgtagaagtgtccaaacaggttgtgtgctggagttccttcaagacaaaaacaaacccagcttggtcaaggccattacctgtttcccatctgtagttattcgatgaagtcatgtacatgaccgttctgtagcaataaatgtgccatttttataaactgaaaaaa

SEQ ID NO: 81038 - DNA, 334 bp, Homo sapiens
ttagacctggcccgtgcactcgtttgccacagtctccaccatgccctgttactccccgacactgcacctaggggccaggtccgtttagcacagcacttccatctgtgttcctcacaccctgctgcttcccctcaccgacttcacacctgtcctgccccagaggaagttaatttggtgatggcctatgtgaagacagtcagtaggtggttcccgcctggaatcccagcactttgggaggccaagacgggaggatcacttgagcccacgggtttaagaccagcctgggcaacatggcaaaaccctgtctctataaaaaatacaaaacattagccag

SEQ ID NO: 81039 - DNA, 406 bp, Homo sapiens
gtggtaatggtggtggaggtggtggtggtgatggtggtggtggtggttattgtggtggagatggtggtggtgatggtggaggaggtggtggtggtgatggtggcagtggcagtggtgatagtgatggaggtgacaatggtcattgtggtggtggttgttgtggtaatggtggtggaggtggtgatggtgatggtagtggtggagtggtgatggtgatggtagtggtggcagtggtgatagtgatagaggtggtgatggtgatggtggcagtggcagtggtgatagtgatggaggtggcaatagtcattgtgatgatggtggtggtggtaatggtggtggaggtggtgatggtgatggtagtggtggcagtggtgatagtgatggaggtgatgatggtcatggtggt

SEQ ID NO: 81040 - DNA, 805 bp, Homo sapiens
tcctgaagagcacaaaatgcaggtcaggccatgtcctgcagccctggctaagctcaggggtcaatcagttccagaagccaacagctaccccaggccttggaagagagaaaggaaagttctaattcaatacatcccaaacccatctctggatgtgccgcttcatatctagacctcctctggggtcccctaactcagagaaaaggctctgtcacccaccactcatgctgtcaggaccccgggcaccaacaccacccgccccacagcccacctggcgccaggtgccgctgcctcctcggctgcacatccccgccgtacacttgtctccccatcggctcctcccgcccatgggaccttcgaagacactgctgcctctgcctgaagtactttaccttccccccttacctgacattcaataactgcttagtgcccttaaaagagctgcactctcaggagcagagttttgtgagcatagcaggcttccaactgacccctggttcctccctcatcctccgtaacccacccgccacctgcagtcagagtgaccacctaaaacccactgcttgcacctgccgtggcgtccagggccctcaaagtcctgcctcatgcctgcagcccacaacaccctaccctacccactggctggacagcccatgccagaccgcttccctctccacaccagactccaaccgcccaccccaccctacctcctcttctagaaaacaccaggctcacatcccgctcagaacctcagccacggccactggggagggtccagccagtgccttccccgggtaggggcagctcc

SEQ ID NO: 81041 - DNA, 1563 bp, Homo sapiens
aacggtaacttgctttttatgtttgtgtttttaatttatgcccaatacatgctttactgactcagaggaacaattcctggacatataattgggtaatgcaaatttttatccactggtcatgatttgtcttaaaatgtttacttgcctccctaaaatattttggctgtgtaggtttggtgtttgtcctagaggattcttcaacagaaagtgatttattctttactgttttgtgaggtaatatggtttagaacatatgtataagctaaaaacagtattttactcagatcagtagttatcgtgtctatcagctataaaaaaaatcaactgccagccaagaactttaaaactttaagctgtgtattatagaaccgttttgtgtagcattggaatattgtccattttgtaagtcattgtgaatgttcttaattatcagcttgaaggtatttttgtattaaaagttgacattgaagaacctaagtggatgatgggatttggggccagtagtgaaagtatgtttcctctaaaatatttccctaaacagtggtatacatggttattttattatgagatttgtatatgttctgtgtttctctgtgaacaatgtttcagtctctctgtcaccatatgtaaggggaagtccacaaatatagactacattgcacaaaactaaaattgttaattacaagaaaatataggtgcttaccttttgaaggtttattaatacatatggttgtcacaatacgtatatatgataaatggtgtacatatacagatgtttatggtgtataaatttttctatacccaattagaattatcttcctgattctttattcaataacatgctaattcctcttctatgttctatagtgacagaatgctaacttttcttataccctggcagaggacagaggagtctggtctaggatggggaactgaatttttgaacgaaaaggaaagagaaaggatgaaaaaacaaacaaacaaaaaaacacacgataatgtttcttagtcattttgattggccatttgaacagtctacaagtttaacgttatttccagtgaagtaggatggctgacctagcaatacatgtttcttcaaaagggtaaacatgctttagtgacctaaagctaaattttgtacatttgacatcagggatgttataagtactgcacttaatacaaagctatttctcaattgtgttatttttgagacaaatttttcttcaccattaacttcttgttggtagctttttgttttgtaaaaattgagagatggcaatgcttatctcaaccagattatccatctgcagaattaaggtatgcaactggtaaataaaagacaaatgctccagtttgtctttctcaacctttgagttcttaacctttgagttaaaacctagtctaaatagtgggaatgtcttggtttacagtaaggttttcttgggaaggatcttggttttgtgatctatttgtgaattaaggagtagatgttaaccattattttatagataagtgatttgtacatggttagttataaataaaactggtactagaacccaggtt

SEQ ID NO: 81042 - DNA, 804 bp, Homo sapiens
aacggtaacttgctttttatgtttgtgtttttaatttatgcccaatacatgctttactgactcagaggaacaattcctggacatataattgggtaatgcaaatttttatccactggtcatgatttgtcttaaaatgtttacttgcctccctaaaatattttggctgtgtaggtttggtgtttgtcctagaggattcttcaacagaaagtgatttattctttactgttttgtgaggtaatatggtttagaacatatgtataagctaaaaacagtattttactcagatcagtagttatcgtgtctatcagctataaaaaaaatcaactgccagccaagaactttaaaactttaagctgtgtattatagaaccgttttgtgtagcattggaatattgtccattttgtaagtcattgtgaatgttcttaattatcagcttgaaggtatttttgtattaaaagttgacattgaagaacctaagtggatgatgggatttggggccagtagtgaaagtatgtttcctctaaaatatttccctaaacagtggtatacatggttattttattatgagatttgtatatgttctgtgtttctctgtgaacaatgtttcagtctctctgtcaccatatgtaaggggaagtccacaaatatagactacattgcacaaaactaaaattgttaattacaagaaaatataggtgcttaccttttgaaggtttattaatacatatggttgtcacaatacgtatatatgataaatggtgtacatatacagatgtttatggtgtataaatttttctataccca

SEQ ID NO: 81043 - DNA, 426 bp, Homo sapiens
aatttctttttattattccgtactttttaaatttacttcattatcacgtcttcctttattctttttaaatagtttttgcttttgttattttgttttcccttttttactcttggtttgtaatacctctttccttatttgctcctttctcatttgatctcaatgttaatccaactgttttccacatctgattcactaaaattttagcccttaaaaaaaaaattcctgtttttcctatctccttttgcccattctcttctccttgcctcacttcttttatctttttccattttactttcattttttgtttctctagatgttgttttgacatatgagttaatgtactggtacaattttgcatctgtaaattagagcttcagaatcaactgagtgtatttattctttatttttaggcctcaatttatctta

SEQ ID NO: 81044 - DNA, 805 bp, Homo sapiens
gcacacaggatgttacactatattcatttgagtttcttgatgtttcacttaacaaaagccagattaatttagctttagtagaaaagaaaaacgttgttgtaacggtactaccgggttcttcataacctcaaccagcatcgaaagttaagggaaacaagaactagaaagacattgagaactccagcagtacctccattcagtctctgatttctgctttcttcagggcttctgctttattcttctttcccatgagttgctttctttaatgctctatttccttgttacagtttgtctgactagtgttgctaagttttctttatcatagttctagccacaagtagagatctctctctctgtcctacctccaagttctgtggagagataatctagttggttccacttagatcaaagggtccaaccctgatgtcatcagtggtggctagaaggaggtggtgcagggtgatgacaatgaaggtggctgtggctgtgggtgatagggtggagtcatccaggacacctctgcctccccagggctcactcctttggatgggggttaggtaggtaggtgtgtgggcgggtgatggtatttcccagagaatggagggtaccaccagagcttggataaactggtaccttataagatacataggattaaaaaagactaatacatattgagggtgtaagaaaaataaggtcaattaaataatgatgtaaaagataagcatacagcccatgatccagcttggtttaatgtttcctaatatttaaagcaaaagttgaagtattacttattctgtgatcctgt

SEQ ID NO: 81045 - DNA, 500 bp, Homo sapiens
aagctgtcatcagttggaggtaagcggaagacagtagagagtacagagccctggactgtgactcagaggatgagcaccagatccagtttgctgtgccacagtgctcagcatgatgtaaactccactgcggacagatgcagccaagaagacaggtcaccttctaccaactcccaccagaggaaactcttccccaggacccagtacgttggccctctgaccctgcacacagcacatgatgctgaggttcagtgctgaacaagagctactgagagccagagactcacttcttccatggagccccactcatggatggaggctctgtcccgggtccagtgccactgggaacactgggtctctggtttctagctctgtcctatggcagaggttccaccccacaataaccgaagtgctgagaaggtgggaagctcctgcccgaccctccactgagagctcagctcctaggctgaggaataaaacagctcaactttgtctacacctgc

SEQ ID NO: 81046 - DNA, 440 bp, Homo sapiens
aagctgtcatcagttggaggtaagcggaagacagtagagagtacagagccctggactgtgactcagaggatgagcaccagatccagtttgctgtgccacagtgtgctccctttatggcagtacaattgaagagggacccacagtcttgctgaaggaacatgaccttcctactgaagttgggattacggaatagagggagaagaggaaagatggatgtttatctgaatggtcggatcttgttttccagaggacacaggccaatgggaaacttttgggaaggaagtcaaaaaatcaaagccagaactgggttttggtaatttaatctcccaaagagagaaaagtccccatactctaattcatattttgtttgacttgactgaagcccttttgaatattttttctgcttctgttctgttcttgcaataacaatgacataagtt

SEQ ID NO: 81047 - DNA, 107 bp, Homo sapiens
cccccgacttcccgccccgccccgccccggagccgggtccggagtgcctggtgggctgattccggagcgtggaagggagcacggagcacggaagcgagagggaggcg

SEQ ID NO: 81048 - DNA, 600 bp, Homo sapiens
aggatccccccccaaatgatccacttgagattataacatgcgttcttgacttatcaatgtctaatgtaaattagtattttttcctcttcccagacaatgctaaaacagtttattggatattttagttatttctgtatttaaaacttcacaagacacagtactgttgatgttcattttgatggcccacatatatgccactatcattgtgttttatccttctgtgactttctagggtcatttcccttccacctgaagtacccctactattatttcctttagaggaggtctgctgatcatctcagttgtgtttgtctgaaaatatttgtatttaatttttattcttaaaaaatattttttctgagtatggaattctaggttgtcagctcgtttctttcaacacattaatgatgtaactccactgttatgtgcatccatattttctgctgttttttgaaataaatattttcctctgactgcgtttaagtgtttctctgtcttcaattttcttcaattttactatagtttatctggatgtatatgcctttttattcgtcttattgggaattgattagacttactgagtgtctggattgttgtatg

SEQ ID NO: 81049 - DNA, 948 bp, Homo sapiens
gggaggccagggtgggtgggttgcttgagctcaggagttcatgaccagcctgggcgacatggcaaaaccccatctctatcaaaaatacaaaaaaacggccaggtatggtgacgtgtgtctgtggtcccagctactcaggaggctgaggggagaggatcacttgagcctgggaggttgctgtgagctgagattgtatcactgaactccagcctgggtgacagagtgagactgtctcaaaaaagctttatatatatttttatatatatgagtattttatatatacactatattacatatatttatgtataaagctatgtatatttgcatatatatagctgatttatacatattaaatagcttttagtggtacacttgagattataacatgcgttcttgacttatcaatgtctaatgtaaattagtattttttcctcttcccagacaatgctaaaacagtttattggatattttagttatttctgtatttaaaacttcacaagacacagtactgttgatgttcattttgatggcccacatatatgccactatcattgtgttttatccttctgtgactttctagggtcatttcccttccacctgaagtacccctactattatttcctttagaggaggtctgctgatcatctcagttgtgtttgtctgaaaatatttgtatttaatttttattcttaaaaaatattttttctgagtatggaattctaggttgtcagctcgtttctttcaacacattaatgatgtaactccactgttatgtgcatccatattttctgctgttttttgaaataaatattttcctctgactgcgtttaagtgtttctctgtcttcaattttcttcaattttactatagtttatctggatgtatatgcctttttattcgtcttattgggaattgattagacttactgagtgtctggattgttgtatg

SEQ ID NO: 81050 - DNA, 588 bp, Homo sapiens
acgacaatttcagaatctatcgtcactatctggacctagtcattagacataatgtaaattagtattttttcctcttcccagacaatgctaaaacagtttattggatattttagttatttctgtatttaaaacttcacaagacacagtactgttgatgttcattttgatggcccacatatatgccactatcattgtgttttatccttctgtgactttctagggtcatttcccttccacctgaagtacccctactattatttcctttagaggaggtctgctgatcatctcagttgtgtttgtctgaaaatatttgtatttaatttttattcttaaaaaatattttttctgagtatggaattctaggttgtcagctcgtttctttcaacacattaatgatgtaactccactgttatgtgcatccatattttctgctgttttttgaaataaatattttcctctgactgcgtttaagtgtttctctgtcttcaattttcttcaattttactatagtttatctggatgtatatgcctttttattcgtcttattgggaattgattagacttactgagtgtctggattgttgtatg

SEQ ID NO: 81051 - DNA, 319 bp, Homo sapiens
gaatttggatccaaagtttggacattgcatttcattaatacgtcccttaagtttattttaatctgtattttcctcctcccttttgtgttctttgtaatctctttttgctgttgttttcggttaaagaaaccatgtttttttcgtcctgtgagtggctcctgttcagaattttactgatttcatctgctggtatcatttagcatgttgctctgtccgccgtagtactttaaactagacgttagatctagagatgtgatctacttcggtaggactttgtcaagaatacttgtaagtagtatttaggtaccaggagacacat

SEQ ID NO: 81052 - DNA, 470 bp, Homo sapiens
  misc_feature (3)..(5): n is a, c, g, or t
ggnnngagggaaaggtcatagtcctgtttggcggccatttctcttgaaactgcggctcgggacctgcggtacctgctgtagtcacgagggacgggcggcggcctggtcggcagagagtagcctgcaacattcggccgtggttacgatgagtttacccctcaatcccaaacctttcctcaatggactaacaggaaagccagtgatggtgaaacttaagtggggaatggagtacaagggctatctggtatctgtagatggctacatgaacatgcagcttgcaaatacagaagaatacatagatggagctttgtctggacatctgggtgaagttttaataaggtgtaataatgtcctttatatcagaggtgtggaagaagaggaagaagatggggaaatgagagaatagcatcttttgtgggggattttttttatatatatttctagacaataaagatttgtttgtttttcaa

SEQ ID NO: 81053 - DNA, 414 bp, Homo sapiens
cttccgaggtcttgcgttgcttctcctgctcatccaacgctgagatctgatccggaagctgctgatcaccagtttcagctgttttctatctgagtttacccctcaatcccaaacctttcctcaatggactaacaggaaagccagtgatggtgaaacttaagtggggaatggagtacaagggctatctggtatctgtagatggctacatgaacatgcagcttgcaaatacagaagaatacatagatggagctttgtctggacatctgggtgaagttttaataaggtgtaataatgtcctttatatcagaggtgtggaagaagaggaagaagatggggaaatgagagaatagcatcttttgtgggggattttttttatatatatttctagacaataaagatttgtttgtttttcaa

SEQ ID NO: 81054 - DNA, 632 bp, Homo sapiens
aatactttacagttagacttcagaagtctttgaaattgttaaacttgtcaaaggtaagttttcaaatgttttggaactggccaaaagatttttctagtgttgatgtttaattttctagctcttagctataatcttttgcagtggcaaccttttgcagtggcctttgttgcgggaacttagttttgaattttagttgggtctggctgttttgttatattgattttctgtactagcttcaaagctccaaattctggtaattatttcctttggaaaatcataaagatgtcattttataacaaccatatggtggaaaataagtgccatgtgcttttcaacaaatctatgtgaaacttttttttaaaatgaatatatttaaaaaatttttttaaagacaagaatattataaatatagtattcagtattttcataataaaaatatagtaattcatatcatacatggtttctggttggaacaacaaaatcgactttttctatttacaggtgtaataatgtcctttatatcagaggtgtggaagaagaggaagaagatggggaaatgagagaatagcatcttttgtgggggattttttttatatatatttctagacaataaagatttgtttgtttttcaa

SEQ ID NO: 81055 - DNA, 459 bp, Homo sapiens
ttaaaaaaaaaacaaaaaaaaaaattgttctcttgaaactgcggctcgggacctgcggtacctgctgtagtcacgagggacgggcggcggcctggtcggcagagagtagcctgcaacattcggccgtggttacgatgagtttacccctcaatcccaaacctttcctcaatggactaacaggaaagccagtgatggtgaaacttaagtggggaatggagtacaagggctatctggtatctgtagatggctacatgaacatgcagcttgcaaatacagaagaatacatagatggagctttgtctggacatctgggtgaagttttaataaggtgtaataatgtcctttatatcagaggtgtggaagaagaggaagaagatggggaaatgagagaatagcatcttttgtgggggattttttttatatatatttctagacaataaagatttgtttgtttttcaa

SEQ ID NO: 81056 - DNA, 638 bp, Homo sapiens
ttaaaaaaaaaacaaaaaaaaaaattgttctcttgaaactgcggctcgggacctgcggtacctgctgtagtcacgagggacgggcggcggcctggtcggcagagagtagcctgcaacattcggccgtggttacgatgagtttacccctcaatcccaaacctttcctcaatggactaacaggaaagccagtgatggtgaaacttaagtggggaatggagtacaagggctatctggtatctgtagatggctacatgaacatgcagcttgcaaatacagaagaatacatagatggagctttgtctggacatctgggtgaagttttaataaggtgtaataatgtcctttatatcagaggtgtggaagaagaggaagaagatggggaaatgagagaatagcatcttttgtgggggattttttttatatatatttctagacaataaagatttgtttgtttttcaaaaaaaaaaaaaaaaaaaaaaactcgagtttttttttttttttttttttttcatcttcattatcctctcacaggaccaacttttattttatttattcatttaaggacaaatttttaaaagtaaagtgaatgaaaccatttgtgattaagatacatagacagaacttcaatgtagaaaaaa

SEQ ID NO: 81057 - DNA, 456 bp, Homo sapiens
  misc_feature (440)..(440): n is a, c, g, or t
ttaaaaaaaaaacaaaaaaaaaaattgttctcttgaaactgcggctcgggacctgcggtacctgctgtagtcacgagggacgggcggcggcctggtcggcagagagtagcctgcaacattcggccgtggttacgatgagtttacccctcaatcccaaacctttcctcaatggactaacaggaaagccagtgatggtgaaacttaagtggggaatggagtacaagggctatctggtatctgtagatggctacatgaacatgcagcttgcaaatacagaagaatacatagatggagctttgtctggacatctgggtgaagttttaataaggtgtaataatgtcctttatatcagaggtgtggaagaagaggaagaagatggggaaatgagagaatagcatcttttgtgggggattttttttaaaaaaaacaaatctttattntctagaaatatatata

SEQ ID NO: 81058 - DNA, 569 bp, Homo sapiens
ttaaaaaaaaaacaaaaaaaaaaattgttctcttgaaactgcggctcgggacctgcggtacctgctgtagtcacgagggacgggcggcggcctggtcggcagagagtagcctgcaacattcggccgtggttacgatgagtttacccctcaatcccaaacctttcctcaatggactaacaggaaagccagtgatggtgaaacttaagtggggaatggagtacaagggctatctggtatctgtagatggctacatgaacatgcagattttcatctacatcttgggaatattgaaacaaagtaagattctgctcttccagctctctgaggacttgaagtaactcctctggttccttgaaataaagtgctggctcctaattaatcaataatgaagaatataatttacttaaaaatatgctacctatgcacatgtgacttatctagaaaatacagtggggtaaaggaagacagttctaaggatgagggagacacaggtaggaacttgtatgggaaactcgcctatttccaagtgagagctggctttcagaaagagcacatttgcagtgttgtgg

SEQ ID NO: 81059 - DNA, 908 bp, Homo sapiens
  misc_feature (3)..(5): n is a, c, g, or t
  misc_feature (848)..(848): n is a, c, g, or t
ggnnngagggaaaggtcatagtcctgtttggcggccatttctcttgaaactgcggctcgggacctgcggtacctgctgtagtcacgagggacgggcggcggcctggtcggcagagagtagcctgcaacattcggccgtggttacgatgagtttacccctcaatcccaaacctttcctcaatggactaacaggaaagccagtgatggtgaaacttaagtggggaatggagtacaagggctatctggtatctgtagatggctacatgaacatgcagcttgcaaatacagaagaatacatagatggagctttgtctggacatctgggtgaagttttaataaggtgtaataatgtcctttatatcagaggtgtggaagaagaggaagaagatggggaaatgagagaatagcatcttttgtgggggattttttttatatatatttctagacaataaagatttgtttgtttttcaacttgacttgtgaactatttgtattcagatatttacaagcaaagctgaaatgatgaaccaattgggaaagattactcactgaactaatgctttaaaagccactgaatttcatttaagttgcttttcttttgtaagcccaatattcttttttttcccataaaggataattatttatatgctttagatatttttatgaaggtgaatttcagaccttttcttgtaaaattatctattagctgagaccttttaaatgcaactttttcttttaaagttatttttgagctacttttaacgtataaaattaaacattttcttggtattaataatatactgtcttattttacttagtagtcaataaattacatgttacttctgtggncacaaacaaaaacaccactaaaaaaaaaaactaaacacaaacacaacaacacaaaccaca

SEQ ID NO: 81060 - DNA, 334 bp, Homo sapiens
ggctaggtacgaggccgggtggtgccaacccaaactttcctcaatggactaacaggaaagccagtgatggtgaaacttaagtggggaatggagtacaagggctatctggtatctgtagatggctacatgaacatgcagcttgcaaatacagaagaatacatagatggagctttgtctggacatctgggtgaagttttaataaggtgtaataatgtcctttatatcagaggtgtggaagaagaggaagaagatggggaaatgagagaatagcatcttttgtgggggattttttttatatatatttctagacaataaagatttgtttgtttttcaa

SEQ ID NO: 81061 - DNA, 756 bp, Homo sapiens
ttaaaaaaaaaacaaaaaaaaaaattgttctcttgaaactgcggctcgggacctgcggtacctgctgtagtcacgagggacgggcggcggcctggtcggcagagagtagcctgcaacattcggccgtggttacgatgagtttacccctcaatcccaaacctttcctcaatggactaacaggaaagccagtgatggtgaaacttaagtggggaatggagtacaagggctatctggtatctgtagatggctacatgaacatgcagcttgcaaatacagaagaatacatagatggagctttgtctggacatctgggtgaagttttaataaggtgtaataatgtcctttatatcagaggtgtggaagaagaggaagaagatggggaaatgagagaatagcatcttttgtgggggattttttttatatatatttctagacaataaagatttgtttgtttttcaaaaaaaaaaaaaaaaaaaaaaacaaaaaaacctaaatcactaaactttatttacataactctttatatactacactttatatcacaataaaaatattccttattttctcctcataacaaaatactcttggggggggcgcctttccaaattcccctttagggtggcctcttacataatggggccttcttttaaaccccctttatgtgaatacccggcgttccccaatttaaaccctgtggaaaaaatctcctttccaacggtgcatttattcaaaaggcccccaaccttagggttttaa

SEQ ID NO: 81062 - DNA, 496 bp, Homo sapiens
  misc_feature (480)..(480): n is a, c, g, or t
ttaaaaaaaaaacaaaaaaaaaaattgttctcttgaaactgcggctcgggacctgcggtacctgctgtagtcacgagggacgggcggcggcctggtcggcagagagtagcctgcaacattcggccgtggttacgatgagtttacccctcaatcccaaacctttcctcaatggactaacaggaaagccagtgatggtgaaacttaagtggggaatggagtacaagggctatctggtatctgtagatggctacatgaacatgcagcttgcaaatacagaagaatacatagatggagctttgtctggacatctgggtgaagttttaataaggtgtaataatgtcctttatatcagaggtgtggaagaagaggaagaagatggggaaatgagagaatagcatcttttgtgggggattttttttatatatatttctagacaataaagatttgtttgtttttcaaaaaaaaaacaaatctttattntctagaaatatatata

SEQ ID NO: 81063 - DNA, 844 bp, Homo sapiens
ttaaaaaaaaaacaaaaaaaaaaattgttctcttgaaactgcggctcgggacctgcggtacctgctgtagtcacgagggacgggcggcggcctggtcggcagagagtagcctgcaacattcggccgtggttacgatgagtttacccctcaatcccaaacctttcctcaatggactaacaggaaagccagtgatggtgaaacttaagtggggaatggagtacaagggctatctggtatctgtagatggctacatgaacatgcagattttcatctacatcttgggaatattgaaacaaaatggagtttcactctcgtcgcccaggctggagtgcaatggcatgatctcggctcattgcaacctctgtctcccaggttcaagcgattctcctgcctcagcctcccgagtagctgggattacagctaggacctccagaacactgacaaaaagaagtggtgcagtggaaatccttgccttgttcctaatcttagggggaaagcattcagtcttttaccattagatatgtaatgttagtgataagtttctagtagatgtccttttataaagttgaggaacttctcttctgttcctactttgctgagagtctccatcaagaatgaattttggatattgttgagtggtttttctgcatcaattgggataatcatatgggttttcatttttaatttgttaatgtgtattacattgatttatttttaaatgttaaattacttttgtattcttagattaaaccctaatttgtcataatgtattatctttttagtattattggatttggtttgttacattttgttcagaatgtttgcatatttgcttacgagagat

SEQ ID NO: 81064 - DNA, 3282 bp, Homo sapiens
tcgattacgtacggactccttggttattcgtgccgaggatttgtggcccgctatggcggcggtgttgaggttgggtccgggatgcggggtctttgactgaaggggtaggccaagtggaggtatcagggacgtcgcgcggcacagaagaggaccagcctggacgccggggacgctgtcatgtacggcgcgagcgggggccgcgccaaacccgagaggaaaagcggcgcgaaggaggaggccgggccaggcggtgccggcggtgggggcagccgagtggagctcttggttttcggctatgcctgcaagctgttccgggacgacgagcgggccctggctcaggaacagggacagcacctcatcccctggatgggggaccacaagatcctcatcgacagatatgatggacgtggtcacctgcatgacctttctgagtacgatgctgagtattccacgtggaacagagattatcagctgtctgaagaggaggcgcgaatagaggccctgtgtgatgaagagaggtatttagccttgcatacggacttgcttgaggaggaggcaaggcaagaggaagaatacaagcgattgagtgaagcactagcagaggatgggagctacaatgccgtggggttcacttacggtagcgactattacgacccgtcagagccgacggaggaggaggagccttccaaacagagagaaaaaaatgaggccgaaaatttagaggaaaatgaagagcccttcgttgcccccttaggattgagcgtcccgtctgacgtggagttgccaccaaccgctaaaatgcacgccatcatcgagcgcacggccagcttcgtgtgcaggcagggagcacagtttgagatcatgctgaaggccaagcaggcccggaactcccagtttgactttctgcgcttcgaccactacctcaacccctactataagttcatccagaaagccatgaaagagggacgctacactgtcctggcagaaaacaaaagtgacgagaaaaaaaaatcaggagtcagctctgacaatgaagatgatgatgatgaagaagatgggaattaccttcatccctctctctttgcctccaagaagtgtaaccgccttgaagagctgatgaagcccttgaaggtagtggacccagatcatcccctcgcagcacttgttcgtaaggcacaggctgacagttccactcccaccccacacaacgcagacggtgcgcctgtgcagccctcccaggtggagtacacggcagactcgaccgtggcagccatgtattacagctactacatgctaccggacggcacttactgcctggcgccgccccctcccggaatcgacgtgactacttactacagcacccttcctgctggcgtgaccgtgtctaactcccctggagtgacgaccaccgccccaccacctcctgggaccacaccaccaccgcccccaaccacagcagagactagcagcggggccacctccacaaccaccaccacaagtgcacttgcccccgtggccgccatcatccccccgccccccgacgtccagcccgtgattgacaagctggccgagtatgtcgccaggaacggcctgaagttcgagaccagtgttcgtgccaagaatgatcaaagatttgagttcctgcagccgtggcaccagtataatgcttattatgagtttaagaagcagttcttcctccagaaagaagggggcgatagcatgcaggctgtgtctgcaccagaagaggctcccacagactctgctcccgagaagccaagtgatgctggggaggatggcgcgcctgaagacgcagccgaggtgggagcacgggcaggctcaggcgggaagaaggaggcatcgtccagtaagaccgtcccggacgggaagctggtgaaagcttcctttgctccaataagctttgcaatcaaggccaaagaaaatgatctgcttcccctggaaaaaaatcgtgttaagctagatgatgacagtgatgatgatgaagaaagcaaagaaggccaagaaagttctagtagtgctgcaaacactaacccagcagttgccccaccctgtgtagttgttgaggagaagaagcctcaacttacccaggaggagctagaagcaaagcaagcaaagcaaaagctggaagatcgcctcgcagctgctgcccgggaaaagctggcccaggcgtctaaggagtcaaaagagaaacagcttcaagcagaacgtaaaaggaaagcggcgttatttttacagaccctcaaaaatcctctgccggaagcagaagctgggaaaattgaggagagtcctttcagtgtcgaggaatccagcactacgccctgccctctactgactggaggcaggcctctgcctactttagaagttaaaccacccgataggccttcgagcaaaagcaaagatccaccgagagaagaagagaaagaaaagaaaaagaaaaagcacaaaaaaagatctcgaacaagatcacgttctcccaagtaccattcgtcatccaagtccaggtctagatcacactcaaaagcaaagcattctcttcccagtgcctatcggacagtgcggcggtcgaggtcccgctcccggtcccctcggaggagagcccactcccctgagagacggagggaagagaggagtgtgcccactgcctaccgcgtgagccgcagccctggggccagcaggaagcggacccgctccagaagtccccacgagaagaagaagaagaggcggtcccggtcgcggaccaagtccaaggccaggtctcagtcggtgtcacccagcaagcaggcagcgccccggcccgcggcccccgcggcccactcggcgcactcagccagcgtctcccctgtggagagtcggggctccagccaggagcgctccaggggagtctctcaggaaaaagaagcccagatctcttcagcaatcgtttcttccgtgcagagcaaaatcactcaggatctcatggccaaagtcagagcgatgcttgcagcttccaaaaacctgcaaaccagcgcttcctgagacggggccagcggaggcagagccgggaggctgcgtgggcttctgggcaggctcacgcagacgccggccacaccatccacctggccgcctccatggacccttggtggcttttgtaaattaatttttgatgacattttgagttttaagatttctgaccagcagtctcttacctgtatatttgtaaatatatcatgtttctgtgaaaatgtattatgaaataaaatgggaggaaacaccttttctagctag

SEQ ID NO: 81065 - DNA, 3324 bp, Homo sapiens
cacacacacaacaacaacaacaaacaaacaagcacataacgtactacgtacagagaccggcctgttaattccgcacgcaggtttgtggcccgctatggcggcggtgttgaggttgggtccgggatgcggggtctttgactgaaggggtaggccaagtggaggtatcagggacgtcgcgcggcacagaagaggaccagcctggacgccggggacgctgtcatgtacggcgcgagcgggggccgcgccaaacccgagaggaaaagcggcgcgaaggaggaggccgggccaggcggtgccggcggtgggggcagccgagtggagctcttggttttcggctatgcctgcaagctgttccgggacgacgagcgggccctggctcaggaacagggacagcacctcatcccctggatgggggaccacaagatcctcatcgacagatatgatggacgtggtcacctgcatgacctttctgagtacgatgctgagtattccacgtggaacagagattatcagctgtctgaagaggaggcgcgaatagaggccctgtgtgatgaagagaggtatttagccttgcatacggacttgcttgaggaggaggcaaggcaagaggaagaatacaagcgattgagtgaagcactagcagaggatgggagctacaatgccgtggggttcacttacggtagcgactattacgacccgtcagagccgacggaggaggaggagccttccaaacagagagaaaaaaatgaggccgaaaatttagaggaaaatgaagagcccttcgttgcccccttaggattgagcgtcccgtctgacgtggagttgccaccaaccgctaaaatgcacgccatcatcgagcgcacggccagcttcgtgtgcaggcagggagcacagtttgagatcatgctgaaggccaagcaggcccggaactcccagtttgactttctgcgcttcgaccactacctcaacccctactataagttcatccagaaagccatgaaagagggacgctacactgtcctggcagaaaacaaaagtgacgagaaaaaaaaatcaggagtcagctctgacaatgaagatgatgatgatgaagaagatgggaattaccttcatccctctctctttgcctccaagaagtgtaaccgccttgaagagctgatgaagcccttgaaggtagtggacccagatcatcccctcgcagcacttgttcgtaaggcacaggctgacagttccactcccaccccacacaacgcagacggtgcgcctgtgcagccctcccaggtggagtacacggcagactcgaccgtggcagccatgtattacagctactacatgctaccggacggcacttactgcctggcgccgccccctcccggaatcgacgtgactacttactacagcacccttcctgctggcgtgaccgtgtctaactcccctggagtgacgaccaccgccccaccacctcctgggaccacaccaccaccgcccccaaccacagcagagactagcagcggggccacctccacaaccaccaccacaagtgcacttgcccccgtggccgccatcatccccccgccccccgacgtccagcccgtgattgacaagctggccgagtatgtcgccaggaacggcctgaagttcgagaccagtgttcgtgccaagaatgatcaaagatttgagttcctgcagccgtggcaccagtataatgcttattatgagtttaagaagcagttcttcctccagaaagaagggggcgatagcatgcaggctgtgtctgcaccagaagaggctcccacagactctgctcccgagaagccaagtgatgctggggaggatggcgcgcctgaagacgcagccgaggtgggagcacgggcaggctcaggcgggaagaaggaggcatcgtccagtaagaccgtcccggacgggaagctggtgaaagcttcctttgctccaataagctttgcaatcaaggccaaagaaaatgatctgcttcccctggaaaaaaatcgtgttaagctagatgatgacagtgatgatgatgaagaaagcaaagaaggccaagaaagttctagtagtgctgcaaacactaacccagcagttgccccaccctgtgtagttgttgaggagaagaagcctcaacttacccaggaggagctagaagcaaagcaagcaaagcaaaagctggaagatcgcctcgcagctgctgcccgggaaaagctggcccaggcgtctaaggagtcaaaagagaaacagcttcaagcagaacgtaaaaggaaagcggcgttatttttacagaccctcaaaaatcctctgccggaagcagaagctgggaaaattgaggagagtcctttcagtgtcgaggaatccagcactacgccctgccctctactgactggaggcaggcctctgcctactttagaagttaaaccacccgataggccttcgagcaaaagcaaagatccaccgagagaagaagagaaagaaaagaaaaagaaaaagcacaaaaaaagatctcgaacaagatcacgttctcccaagtaccattcgtcatccaagtccaggtctagatcacactcaaaagcaaagcattctcttcccagtgcctatcggacagtgcggcggtcgaggtcccgctcccggtcccctcggaggagagcccactcccctgagagacggagggaagagaggagtgtgcccactgcctaccgcgtgagccgcagccctggggccagcaggaagcggacccgctccagaagtccccacgagaagaagaagaagaggcggtcccggtcgcggaccaagtccaaggccaggtctcagtcggtgtcacccagcaagcaggcagcgccccggcccgcggcccccgcggcccactcggcgcactcagccagcgtctcccctgtggagagtcggggctccagccaggagcgctccaggggagtctctcaggaaaaagaagcccagatctcttcagcaatcgtttcttccgtgcagagcaaaatcactcaggatctcatggccaaagtcagagcgatgcttgcagcttccaaaaacctgcaaaccagcgcttcctgagacggggccagcggaggcagagccgggaggctgcgtgggcttctgggcaggctcacgcagacgccggccacaccatccacctggccgcctccatggacccttggtggcttttgtaaattaatttttgatgacattttgagttttaagatttctgaccagcagtctcttacctgtatatttgtaaatatatcatgtttctgtgaaaatgtattatgaaataaaatgggaggaaacaccttttctagctag

SEQ ID NO: 81066 - DNA, 3440 bp, Homo sapiens
tcgattacgtacggactccttggttattcgtgccgaggatttgtggcccgctatggcggcggtgttgaggttgggtccgggatgcggggtctttgactgaaggggtaggccaagtggaggtatcagggacgtcgcgcggcacagaagaggaccagcctggacgccggggacgctgtcatgtacggcgcgagcgggggccgcgccaaacccgagaggaaaagcggcgcgaaggaggaggccgggccaggcggtgccggcggtgggggcagccgagtggagctcttggttttcggctatgcctgcaagctgttccgggacgacgagcgggccctggctcaggaacagggacagcacctcatcccctggatgggggaccacaagatcctcatcgacagatatgatggacgtggtcacctgcatgacctttctgagtacgatgctgagtattccacgtggaacagagattatcagctgtctgaagaggaggcgcgaatagaggccctgtgtgatgaagagaggtatttagccttgcatacggacttgcttgaggaggaggcaaggcaagaggaagaatacaagcgattgagtgaagcactagcagaggatgggagctacaatgccgtggggttcacttacggtagcgactattacgacccgtcagagccgacggaggaggaggagccttccaaacagagagaaaaaaatgaggccgaaaatttagaggaaaatgaagagcccttcgttgcccccttaggattgagcgtcccgtctgacgtggagttgccaccaaccgctaaaatgcacgccatcatcgagcgcacggccagcttcgtgtgcaggcagggagcacagtttgagatcatgctgaaggccaagcaggcccggaactcccagtttgactttctgcgcttcgaccactacctcaacccctactataagttcatccagaaagccatgaaagagggacgctacactgtcctggcagaaaacaaaagtgacgagaaaaaaaaatcaggagtcagctctgacaatgaagatgatgatgatgaagaagatgggaattaccttcatccctctctctttgcctccaagaagtgtaaccgccttgaagagctgatgaagcccttgaaggtagtggacccagatcatcccctcgcagcacttgttcgtaaggcacaggctgacagttccactcccaccccacacaacgcagacggtgcgcctgtgcagccctcccaggtggagtacacggcagactcgaccgtggcagccatgtattacagctactacatgctaccggacggcacttactgcctggcgccgccccctcccggaatcgacgtgactacttactacagcacccttcctgctggcgtgaccgtgtctaactcccctggagtgacgaccaccgccccaccacctcctgggaccacaccaccaccgcccccaaccacagcagagactagcagcggggccacctccacaaccaccaccacaagtgcacttgcccccgtggccgccatcatccccccgccccccgacgtccagcccgtgattgacaagctggccgagtatgtcgccaggaacggcctgaagttcgagaccagtgttcgtgccaagaatgatcaaagatttgagttcctgcagccgtggcaccagtataatgcttattatgagtttaagaagcagttcttcctccagaaagaagggggcgatagcatgcaggctgtgtctgcaccagaagaggctcccacagactctgctcccgagaagccaagtgatgctggggaggatggcgcgcctgaagacgcagccgaggtgggagcacgggcaggctcaggcgggaagaaggaggcatcgtccagtaagaccgtcccggacgggaagctggtgaaagcttcctttgctccaataagctttgcaatcaaggccaaagaaaatgatctgcttcccctggaaaaaaatcgtgttaagctagatgatgacagtgatgatgatgaagaaagcaaagaaggccaagaaagttctagtagtgctgcaaacactaacccagcagttgccccaccctgtgtagttgttgaggagaagaagcctcaacttacccaggaggagctagaagcaaagcaagcaaagcaaaagctggaagatcgcctcgcagctgctgcccgggaaaagctggcccaggcgtctaaggagtcaaaagagaaacagcttcaagcagaacgtaaaaggaaagcggcgttatttttacagaccctcaaaaatcctctgccggaagcagaagctgggaaaattgaggagagtcctttcagtgtcgaggaatccagcactacgccctgccctctactgactggaggcaggcctctgcctactttagaagttaaaccacccgataggccttcgagcaaaagcaaagatccaccgagagaagaagagaaagaaaagaaaaagaaaaagcacaaaaaaagatctcgaacaagatcacgttctcccaagtaccattcgtcatccaagtccaggtctagatcacactcaaaagcaaagcattctcttcccagtgcctatcggacagtgcggcggtcgaggtagtcacagcctccccagggacgctgcgcgcggagccctgtcagagcagcgcgtcagtgacagcggcagccgagccaggaagttatcaggcagcctcgaccaccaccagatttgactccgcgagctcttttgagggaaaacctggtaaaacgtcaaggtcccgctcccggtcccctcggaggagagcccactcccctgagagacggagggaagagaggagtgtgcccactgcctaccgcgtgagccgcagccctggggccagcaggaagcggacccgctccagaagtccccacgagaagaagaagaagaggcggtcccggtcgcggaccaagtccaaggccaggtctcagtcggtgtcacccagcaagcaggcagcgccccggcccgcggcccccgcggcccactcggcgcactcagccagcgtctcccctgtggagagtcggggctccagccaggagcgctccaggggagtctctcaggaaaaagaagcccagatctcttcagcaatcgtttcttccgtgcagagcaaaatcactcaggatctcatggccaaagtcagagcgatgcttgcagcttccaaaaacctgcaaaccagcgcttcctgagacggggccagcggaggcagagccgggaggctgcgtgggcttctgggcaggctcacgcagacgccggccacaccatccacctggccgcctccatggacccttggtggcttttgtaaattaatttttgatgacattttgagttttaagatttctgaccagcagtctcttacctgtatatttgtaaatatatcatgtttctgtgaaaatgtattatgaaataaaatgggaggaaacaccttttctagctag

SEQ ID NO: 81067 - DNA, 2527 bp, Homo sapiens
tcgattacgtacggactccttggttattcgtgccgaggatttgtggcccgctatggcggcggtgttgaggttgggtccgggatgcggggtctttgactgaaggggtaggccaagtggaggtatcagggacgtcgcgcggcacagaagaggaccagcctggacgccggggacgctgtcatgtacggcgcgagcgggggccgcgccaaacccgagaggaaaagcggcgcgaaggaggaggccgggccaggcggtgccggcggtgggggcagccgagtggagctcttggttttcggctatgcctgcaagctgttccgggacgacgagcgggccctggctcaggaacagggacagcacctcatcccctggatgggggaccacaagatcctcatcgacagatatgatggacgtggtcacctgcatgacctttctgagtacgatgctgagtattccacgtggaacagagattatcagctgtctgaagaggaggcgcgaatagaggccctgtgtgatgaagagaggtatttagccttgcatacggacttgcttgaggaggaggcaaggcaagaggaagaatacaagcgattgagtgaagcactagcagaggatgggagctacaatgccgtggggttcacttacggtagcgactattacgacccgtcagagccgacggaggaggaggagccttccaaacagagagaaaaaaatgaggccgaaaatttagaggaaaatgaagagcccttcgttgcccccttaggattgagcgtcccgtctgacgtggagttgccaccaaccgctaaaatgcacgccatcatcgagcgcacggccagcttcgtgtgcaggcagggagcacagtttgagatcatgctgaaggccaagcaggcccggaactcccagtttgactttctgcgcttcgaccactacctcaacccctactataagttcatccagaaagccatgaaagagggacgctacactgtcctggcagaaaacaaaagtgacgagaaaaaaaaatcaggagtcagctctgacaatgaagatgatgatgatgaagaagatgggaattaccttcatccctctctctttgcctccaagaagtgtaaccgccttgaagagctgatgaagcccttgaaggtagtggacccagatcatcccctcgcagcacttgttcgtaaggcacaggctgacagttccactcccaccccacacaacgcagacggtgcgcctgtgcagccctcccaggtggagtacacggcagactcgaccgtggcagccatgtattacagctactacatgctaccggacggcacttactgcctggcgccgccccctcccggaatcgacgtgactacttactacagcacccttcctgctggcgtgaccgtgtctaactcccctggagtgacgaccaccgccccaccacctcctgggaccacaccaccaccgcccccaaccacagcagagactagcagcggggccacctccacaaccaccaccacaagtgcacttgcccccgtggccgccatcatccccccgccccccgacgtccagcccgtgattgacaagctggccgagtatgtcgccaggaacggcctgaagttcgagaccagtgttcgtgccaagaatgatcaaagatttgagttcctgcagccgtggcaccagtataatgcttattatgagtttaagaagcagttcttcctccagaaagaagggggcgatagcatgcaggctgtgtctgcaccagaagaggctcccacagactctgctcccgagaagccaagtgatgctggggaggatggcgcgcctgaagacgcagccgaggtgggagcacgggcaggctcaggcgggaagaaggaggcatcgtccagtaagaccgtcccggacgggaagctggtgaaagcttcctttgctccaataagctttgcaatcaaggccaaagaaaatgatctgcttcccctggaaaaaaatcgtgttaagctagatgatgacagtgatgatgatgaagaaagcaaagaaggccaagaaagttctagtagtgctgcaaacactaacccagcagttgccccaccctgtgtagttgttgaggagaagaagcctcaacttacccaggaggagctagaagcaaagcaagcaaagcaaaagctggaagatcgcctcgcagctgctgcccgggaaaagctggcccaggcgtctaaggagtcaaaagagaaacagcttcaagcagaacgtaaaaggaaagcggcgttatttttacagaccctcaaaaatcctctgccggaagcagaagctgggaaaattgaggagagtcctttcagtgtcgaggaatccagcactacgccctgccctctactgactggaggcaggcctctgcctactttagaagttaaaccacccgataggccttcgagcaaaagcaaagatccaccgagagaagaagagaaagaaaagaaaaagaaacccgggctcctttgtcggggggggacaggggtcttgcatggccctggcctagtgttccggccgttctgtccag

SEQ ID NO: 81068 - DNA, 3244 bp, Homo sapiens
gtacccgggagtatgtcgacccgcgacgtcggttgggtccgggatgcggggtctttgactgaaggggtaggccaagtggaggtatcagggacgtcgcgcggcacagaagaggaccagcctggacgccggggacgctgtcatgtacggcgcgagcgggggccgcgccaaacccgagaggaaaagcggcgcgaaggaggaggccgggccaggcggtgccggcggtgggggcagccgagtggagctcttggttttcggctatgcctgcaagctgttccgggacgacgagcgggccctggctcaggaacagggacagcacctcatcccctggatgggggaccacaagatcctcatcgacagatatgatggacgtggtcacctgcatgacctttctgagtacgatgctgagtattccacgtggaacagagattatcagctgtctgaagaggaggcgcgaatagaggccctgtgtgatgaagagaggtatttagccttgcatacggacttgcttgaggaggaggcaaggcaagaggaagaatacaagcgattgagtgaagcactagcagaggatgggagctacaatgccgtggggttcacttacggtagcgactattacgacccgtcagagccgacggaggaggaggagccttccaaacagagagaaaaaaatgaggccgaaaatttagaggaaaatgaagagcccttcgttgcccccttaggattgagcgtcccgtctgacgtggagttgccaccaaccgctaaaatgcacgccatcatcgagcgcacggccagcttcgtgtgcaggcagggagcacagtttgagatcatgctgaaggccaagcaggcccggaactcccagtttgactttctgcgcttcgaccactacctcaacccctactataagttcatccagaaagccatgaaagagggacgctacactgtcctggcagaaaacaaaagtgacgagaaaaaaaaatcaggagtcagctctgacaatgaagatgatgatgatgaagaagatgggaattaccttcatccctctctctttgcctccaagaagtgtaaccgccttgaagagctgatgaagcccttgaaggtagtggacccagatcatcccctcgcagcacttgttcgtaaggcacaggctgacagttccactcccaccccacacaacgcagacggtgcgcctgtgcagccctcccaggtggagtacacggcagactcgaccgtggcagccatgtattacagctactacatgctaccggacggcacttactgcctggcgccgccccctcccggaatcgacgtgactacttactacagcacccttcctgctggcgtgaccgtgtctaactcccctggagtgacgaccaccgccccaccacctcctgggaccacaccaccaccgcccccaaccacagcagagactagcagcggggccacctccacaaccaccaccacaagtgcacttgcccccgtggccgccatcatccccccgccccccgacgtccagcccgtgattgacaagctggccgagtatgtcgccaggaacggcctgaagttcgagaccagtgttcgtgccaagaatgatcaaagatttgagttcctgcagccgtggcaccagtataatgcttattatgagtttaagaagcagttcttcctccagaaagaagggggcgatagcatgcaggctgtgtctgcaccagaagaggctcccacagactctgctcccgagaagccaagtgatgctggggaggatggcgcgcctgaagacgcagccgaggtgggagcacgggcaggctcaggcgggaagaaggaggcatcgtccagtaagaccgtcccggacgggaagctggtgaaagcttcctttgctccaataagctttgcaatcaaggccaaagaaaatgatctgcttcccctggaaaaaaatcgtgttaagctagatgatgacagtgatgatgatgaagaaagcaaagaaggccaagaaagttctagtagtgctgcaaacactaacccagcagttgccccaccctgtgtagttgttgaggagaagaagcctcaacttacccaggaggagctagaagcaaagcaagcaaagcaaaagctggaagatcgcctcgcagctgctgcccgggaaaagctggcccaggcgtctaaggagtcaaaagagaaacagcttcaagcagaacgtaaaaggaaagcggcgttatttttacagaccctcaaaaatcctctgccggaagcagaagctgggaaaattgaggagagtcctttcagtgtcgaggaatccagcactacgccctgccctctactgactggaggcaggcctctgcctactttagaagttaaaccacccgataggccttcgagcaaaagcaaagatccaccgagagaagaagagaaagaaaagaaaaagaaaaagcacaaaaaaagatctcgaacaagatcacgttctcccaagtaccattcgtcatccaagtccaggtctagatcacactcaaaagcaaagcattctcttcccagtgcctatcggacagtgcggcggtcgaggtcccgctcccggtcccctcggaggagagcccactcccctgagagacggagggaagagaggagtgtgcccactgcctaccgcgtgagccgcagccctggggccagcaggaagcggacccgctccagaagtccccacgagaagaagaagaagaggcggtcccggtcgcggaccaagtccaaggccaggtctcagtcggtgtcacccagcaagcaggcagcgccccggcccgcggcccccgcggcccactcggcgcactcagccagcgtctcccctgtggagagtcggggctccagccaggagcgctccaggggagtctctcaggaaaaagaagcccagatctcttcagcaatcgtttcttccgtgcagagcaaaatcactcaggatctcatggccaaagtcagagcgatgcttgcagcttccaaaaacctgcaaaccagcgcttcctgagacggggccagcggaggcagagccgggaggctgcgtgggcttctgggcaggctcacgcagacgccggccacaccatccacctggccgcctccatggacccttggtggcttttgtaaattaatttttgatgacattttgagttttaagatttctgaccagcagtctcttacctgtatatttgtaaatatatcatgtttctgtgaaaatgtattatgaaataaaatgggaggaaacaccttttctagctag

SEQ ID NO: 81069 - DNA, 4876 bp, Homo sapiens
gagaactggtgaagggagggccgcggaatcagatcatgtctggatctgatggctccgtgctgtgctcaagcgtgctgtgccttcacaccatggtttatattgaatgtgtcgcctgagttgtcaggcttgcttttccaaagtgtcacttgtgttatttatcattaaagtttggtaagcaatgaagtctgagctctttgtacagttttcctatcattctgtacatgatttgagttaggtcttccaaaactggtggggagcaaacgccgcacatgtacatgtataatatttttaataataatctacatttgtaagttaaggaggtttacatcaaaatccaattaattttgaaatttaatgaaatgcagtaacttgactaccttggaattttgggcctttttcctgtaaatgtcttttttggtctacattaatatttttggttcccattacaaaagtcagcattaaaaaaataagcagacttttgtttgtttctctacatttgtttttgaaaccctaaacctgagtgttttaagtaaagttcactaactcattcatttattatctgacagttacacgttgacagcatcctcattgaatcctttatgttaaaagcatagcagaaagtgctcccattacttatttggccaaactactgtttggtccatgcaagagaaacatggaagtgtcttcatgtatgttatttccttgagggtataaagttcagaaggaaatattgataccatatcttctaatagttttgctctgttcccagtgaacctccttaaactgcatgtatatgtcactgttccaatgtatgtgtgtctctctatcacgtaacccagcacttatttcctcagccaagtggctagggggcgagcctagccaagattttacctccaatggacgcaagtttctttggtgaagatctctcctgagagttcgggactagcagaaagaagcgaggaaatttcgaccgtttggttcttacggataggtatttatgtatttggtttgtgtgaatgtaagctatgatatttaacttttcagaaaaaaataataattttttgcaagtggcattgaatggttgaccaaaccataatggtaagaactgccagtgaagtgggtaccatttttgctattaatggattgtttgcctttagttataaatgttatcttactgtggaaaggaatttagagtttgttaagataacttgagtttaaaagtaggtgagatatgactatccaaattaaatataaatctgggaagagtttttatacttgttttaatatttttgtttattttaatcggtaagtatgtgtgtgtatatatatatacatatataaaacatcacacacgcacaccagtctagacgttaatttccttttattgaccagcttgttcacattacagatatgatggacgtggtcacctgcatgacctttctgagtacgatgctgagtattccacgtggaacagagattatcagctgtctgaagaggaggcgcgaatagaggccctgtgtgatgaagagaggtatttagccttgcatacggacttgcttgaggaggaggcaaggcaaggtactgctcaagacaaacttacttcagcaacaaactttttaaaatttttaagtatttaaaaatttactcccattcatttttttatactcactctttctgatattatcttgacagtacccagtggattggaaaaacaggagtctttgcgttctgagaggacctcaggatagtttatatatagagccacaaagaattttcccagcttttgagggcagactgggatttgaaaaaaacaaaaaccaaactctttaactgttcttctttaacagtatcgtataaataaaattgatgttcttgtctttgccgtaacagtctttaatacagttcttaatcccaaaattttctcagcaggaagaaattttccacaaaagacgtgtattcagctgtctgtgggtaaacatgtactgacaaaagtacataatgatagatataaagtgtgaatttttaaaactattttacctcaaaagtaggttgaaaaaagtatgttgtatgctttactgatagctacaactttagaaatatataaagtttttctcagtaattttctatttttgttgataaaattctcatttttattcaagaggaagaatacaagcgattgagtgaagcactagcagaggatgggagctacaatgccgtggggttcacttacggtagcgactattacgacccgtcagagccgacggaggaggaggagccttccaaacagagagaaaaaaatgaggccgaaaatttagaggaaaatgaagagcccttcgttgcccccttaggattgagcgtcccgtctgacgtggagttgccaccaaccgctaaaatgcacgccatcatcgagcgcacggccagcttcgtgtgcaggcagggagcacagtttgagatcatgctgaaggccaagcaggcccggaactcccagtttgactttctgcgcttcgaccactacctcaacccctactataagttcatccagaaagccatgaaagagggacgctacactgtcctggcagaaaacaaaagtgacgagaaaaaaaaatcaggagtcagctctgacaatgaagatgatgatgatgaagaagatgggaattaccttcatccctctctctttgcctccaagaagtgtaaccgccttgaagagctgatgaagcccttgaaggtagtggacccagatcatcccctcgcagcacttgttcgtaaggcacaggctgacagttccactcccaccccacacaacgcagacggtgcgcctgtgcagccctcccaggtggagtacacggcagactcgaccgtggcagccatgtattacagctactacatgctaccggacggcacttactgcctggcgccgccccctcccggaatcgacgtgactacttactacagcacccttcctgctggcgtgaccgtgtctaactcccctggagtgacgaccaccgccccaccacctcctgggaccacaccaccaccgcccccaaccacagcagagactagcagcggggccacctccacaaccaccaccacaagtgcacttgcccccgtggccgccatcatccccccgccccccgacgtccagcccgtgattgacaagctggccgagtatgtcgccaggaacggcctgaagttcgagaccagtgttcgtgccaagaatgatcaaagatttgagttcctgcagccgtggcaccagtataatgcttattatgagtttaagaagcagttcttcctccagaaagaagggggcgatagcatgcaggctgtgtctgcaccagaagaggctcccacagactctgctcccgagaagccaagtgatgctggggaggatggcgcgcctgaagacgcagccgaggtgggagcacgggcaggctcaggcgggaagaaggaggcatcgtccagtaagaccgtcccggacgggaagctggtgaaagcttcctttgctccaataagctttgcaatcaaggccaaagaaaatgatctgcttcccctggaaaaaaatcgtgttaagctagatgatgacagtgatgatgatgaagaaagcaaagaaggccaagaaagttctagtagtgctgcaaacactaacccagcagttgccccaccctgtgtagttgttgaggagaagaagcctcaacttacccaggaggagctagaagcaaagcaagcaaagcaaaagctggaagatcgcctcgcagctgctgcccgggaaaagctggcccaggcgtctaaggagtcaaaagagaaacagcttcaagcagaacgtaaaaggaaagcggcgttatttttacagaccctcaaaaatcctctgccggaagcagaagctgggaaaattgaggagagtcctttcagtgtcgaggaatccagcactacgccctgccctctactgactggaggcaggcctctgcctactttagaagttaaaccacccgataggccttcgagcaaaagcaaagatccaccgagagaagaagagaaagaaaagaaaaagaaaaagcacaaaaaaagatctcgaacaagatcacgttctcccaagtaccattcgtcatccaagtccaggtctagatcacactcaaaagcaaagcattctcttcccagtgcctatcggacagtgcggcggtcgaggtcccgctcccggtcccctcggaggagagcccactcccctgagagacggagggaagagaggagtgtgcccactgcctaccgcgtgagccgcagccctggggccagcaggaagcggacccgctccagaagtccccacgagaagaagaagaagaggcggtcccggtcgcggaccaagtccaaggccaggtctcagtcggtgtcacccagcaagcaggcagcgccccggcccgcggcccccgcggcccactcggcgcactcagccagcgtctcccctgtggagagtcggggctccagccaggagcgctccaggggagtctctcaggaaaaagaagcccagatctcttcagcaatcgtttcttccgtgcagagcaaaatcactcaggatctcatggccaaagtcagagcgatgcttgcagcttccaaaaacctgcaaaccagcgcttcctgagacggggccagcggaggcagagccgggaggctgcgtgggcttctgggcaggctcacgcagacgccggccacaccatccacctggccgcctccatggacccttggtggcttttgtaaattaatttttgatgacattttgagttttaagatttctgaccagcagtctcttacctgtatatttgtaaatatatcatgtttctgtgaaaatgtattatgaaataaaatgggaggaaacaccttttctagctag

SEQ ID NO: 81070 - DNA, 4463 bp, Homo sapiens
gcagaggacctttttgcgggccttcccccattacaaaagtcagcattaaaaaaataagcagacttttgtttgtttctctacatttgtttttgaaaccctaaacctgagtgttttaagtaaagttcactaactcattcatttattatctgacagttacacgttgacagcatcctcattgaatcctttatgttaaaagcatagcagaaagtgctcccattacttatttggccaaactactgtttggtccatgcaagagaaacatggaagtgtcttcatgtatgttatttccttgagggtataaagttcagaaggaaatattgataccatatcttctaatagttttgctctgttcccagtgaacctccttaaactgcatgtatatgtcactgttccaatgtatgtgtgtctctctatcacgtaacccagcacttatttcctcagccaagtggctagggggcgagcctagccaagattttacctccaatggacgcaagtttctttggtgaagatctctcctgagagttcgggactagcagaaagaagcgaggaaatttcgaccgtttggttcttacggataggtatttatgtatttggtttgtgtgaatgtaagctatgatatttaacttttcagaaaaaaataataattttttgcaagtggcattgaatggttgaccaaaccataatggtaagaactgccagtgaagtgggtaccatttttgctattaatggattgtttgcctttagttataaatgttatcttactgtggaaaggaatttagagtttgttaagataacttgagtttaaaagtaggtgagatatgactatccaaattaaatataaatctgggaagagtttttatacttgttttaatatttttgtttattttaatcggtaagtatgtgtgtgtatatatatatacatatataaaacatcacacacgcacaccagtctagacgttaatttccttttattgaccagcttgttcacattacagatatgatggacgtggtcacctgcatgacctttctgagtacgatgctgagtattccacgtggaacagagattatcagctgtctgaagaggaggcgcgaatagaggccctgtgtgatgaagagaggtatttagccttgcatacggacttgcttgaggaggaggcaaggcaaggtactgctcaagacaaacttacttcagcaacaaactttttaaaatttttaagtatttaaaaatttactcccattcatttttttatactcactctttctgatattatcttgacagtacccagtggattggaaaaacaggagtctttgcgttctgagaggacctcaggatagtttatatatagagccacaaagaattttcccagcttttgagggcagactgggatttgaaaaaaacaaaaaccaaactctttaactgttcttctttaacagtatcgtataaataaaattgatgttcttgtctttgccgtaacagtctttaatacagttcttaatcccaaaattttctcagcaggaagaaattttccacaaaagacgtgtattcagctgtctgtgggtaaacatgtactgacaaaagtacataatgatagatataaagtgtgaatttttaaaactattttacctcaaaagtaggttgaaaaaagtatgttgtatgctttactgatagctacaactttagaaatatataaagtttttctcagtaattttctatttttgttgataaaattctcatttttattcaagaggaagaatacaagcgattgagtgaagcactagcagaggatgggagctacaatgccgtggggttcacttacggtagcgactattacgacccgtcagagccgacggaggaggaggagccttccaaacagagagaaaaaaatgaggccgaaaatttagaggaaaatgaagagcccttcgttgcccccttaggattgagcgtcccgtctgacgtggagttgccaccaaccgctaaaatgcacgccatcatcgagcgcacggccagcttcgtgtgcaggcagggagcacagtttgagatcatgctgaaggccaagcaggcccggaactcccagtttgactttctgcgcttcgaccactacctcaacccctactataagttcatccagaaagccatgaaagagggacgctacactgtcctggcagaaaacaaaagtgacgagaaaaaaaaatcaggagtcagctctgacaatgaagatgatgatgatgaagaagatgggaattaccttcatccctctctctttgcctccaagaagtgtaaccgccttgaagagctgatgaagcccttgaaggtagtggacccagatcatcccctcgcagcacttgttcgtaaggcacaggctgacagttccactcccaccccacacaacgcagacggtgcgcctgtgcagccctcccaggtggagtacacggcagactcgaccgtggcagccatgtattacagctactacatgctaccggacggcacttactgcctggcgccgccccctcccggaatcgacgtgactacttactacagcacccttcctgctggcgtgaccgtgtctaactcccctggagtgacgaccaccgccccaccacctcctgggaccacaccaccaccgcccccaaccacagcagagactagcagcggggccacctccacaaccaccaccacaagtgcacttgcccccgtggccgccatcatccccccgccccccgacgtccagcccgtgattgacaagctggccgagtatgtcgccaggaacggcctgaagttcgagaccagtgttcgtgccaagaatgatcaaagatttgagttcctgcagccgtggcaccagtataatgcttattatgagtttaagaagcagttcttcctccagaaagaagggggcgatagcatgcaggctgtgtctgcaccagaagaggctcccacagactctgctcccgagaagccaagtgatgctggggaggatggcgcgcctgaagacgcagccgaggtgggagcacgggcaggctcaggcgggaagaaggaggcatcgtccagtaagaccgtcccggacgggaagctggtgaaagcttcctttgctccaataagctttgcaatcaaggccaaagaaaatgatctgcttcccctggaaaaaaatcgtgttaagctagatgatgacagtgatgatgatgaagaaagcaaagaaggccaagaaagttctagtagtgctgcaaacactaacccagcagttgccccaccctgtgtagttgttgaggagaagaagcctcaacttacccaggaggagctagaagcaaagcaagcaaagcaaaagctggaagatcgcctcgcagctgctgcccgggaaaagctggcccaggcgtctaaggagtcaaaagagaaacagcttcaagcagaacgtaaaaggaaagcggcgttatttttacagaccctcaaaaatcctctgccggaagcagaagctgggaaaattgaggagagtcctttcagtgtcgaggaatccagcactacgccctgccctctactgactggaggcaggcctctgcctactttagaagttaaaccacccgataggccttcgagcaaaagcaaagatccaccgagagaagaagagaaagaaaagaaaaagaaaaagcacaaaaaaagatctcgaacaagatcacgttctcccaagtaccattcgtcatccaagtccaggtctagatcacactcaaaagcaaagcattctcttcccagtgcctatcggacagtgcggcggtcgaggtcccgctcccggtcccctcggaggagagcccactcccctgagagacggagggaagagaggagtgtgcccactgcctaccgcgtgagccgcagccctggggccagcaggaagcggacccgctccagaagtccccacgagaagaagaagaagaggcggtcccggtcgcggaccaagtccaaggccaggtctcagtcggtgtcacccagcaagcaggcagcgccccggcccgcggcccccgcggcccactcggcgcactcagccagcgtctcccctgtggagagtcggggctccagccaggagcgctccaggggagtctctcaggaaaaagaagcccagatctcttcagcaatcgtttcttccgtgcagagcaaaatcactcaggatctcatggccaaagtcagagcgatgcttgcagcttccaaaaacctgcaaaccagcgcttcctgagacggggccagcggaggcagagccgggaggctgcgtgggcttctgggcaggctcacgcagacgccggccacaccatccacctggccgcctccatggacccttggtggcttttgtaaattaatttttgatgacattttgagttttaagatttctgaccagcagtctcttacctgtatatttgtaaatatatcatgtttctgtgaaaatgtattatgaaataaaatgggaggaaacaccttttctagctag

SEQ ID NO: 81071 - DNA, 3553 bp, Homo sapiens
cagctcggtacccttccaccagcaaagactgcacaccagtctagacgttaatttccttttattgaccagcttgttcacattacagatatgatggacgtggtcacctgcatgacctttctgagtacgatgctgagtattccacgtggaacagagattatcagctgtctgaagaggaggcgcgaatagaggccctgtgtgatgaagagaggtatttagccttgcatacggacttgcttgaggaggaggcaaggcaaggtactgctcaagacaaacttacttcagcaacaaactttttaaaatttttaagtatttaaaaatttactcccattcatttttttatactcactctttctgatattatcttgacagtacccagtggattggaaaaacaggagtctttgcgttctgagaggacctcaggatagtttatatatagagccacaaagaattttcccagcttttgagggcagactgggatttgaaaaaaacaaaaaccaaactctttaactgttcttctttaacagtatcgtataaataaaattgatgttcttgtctttgccgtaacagtctttaatacagttcttaatcccaaaattttctcagcaggaagaaattttccacaaaagacgtgtattcagctgtctgtgggtaaacatgtactgacaaaagtacataatgatagatataaagtgtgaatttttaaaactattttacctcaaaagtaggttgaaaaaagtatgttgtatgctttactgatagctacaactttagaaatatataaagtttttctcagtaattttctatttttgttgataaaattctcatttttattcaagaggaagaatacaagcgattgagtgaagcactagcagaggatgggagctacaatgccgtggggttcacttacggtagcgactattacgacccgtcagagccgacggaggaggaggagccttccaaacagagagaaaaaaatgaggccgaaaatttagaggaaaatgaagagcccttcgttgcccccttaggattgagcgtcccgtctgacgtggagttgccaccaaccgctaaaatgcacgccatcatcgagcgcacggccagcttcgtgtgcaggcagggagcacagtttgagatcatgctgaaggccaagcaggcccggaactcccagtttgactttctgcgcttcgaccactacctcaacccctactataagttcatccagaaagccatgaaagagggacgctacactgtcctggcagaaaacaaaagtgacgagaaaaaaaaatcaggagtcagctctgacaatgaagatgatgatgatgaagaagatgggaattaccttcatccctctctctttgcctccaagaagtgtaaccgccttgaagagctgatgaagcccttgaaggtagtggacccagatcatcccctcgcagcacttgttcgtaaggcacaggctgacagttccactcccaccccacacaacgcagacggtgcgcctgtgcagccctcccaggtggagtacacggcagactcgaccgtggcagccatgtattacagctactacatgctaccggacggcacttactgcctggcgccgccccctcccggaatcgacgtgactacttactacagcacccttcctgctggcgtgaccgtgtctaactcccctggagtgacgaccaccgccccaccacctcctgggaccacaccaccaccgcccccaaccacagcagagactagcagcggggccacctccacaaccaccaccacaagtgcacttgcccccgtggccgccatcatccccccgccccccgacgtccagcccgtgattgacaagctggccgagtatgtcgccaggaacggcctgaagttcgagaccagtgttcgtgccaagaatgatcaaagatttgagttcctgcagccgtggcaccagtataatgcttattatgagtttaagaagcagttcttcctccagaaagaagggggcgatagcatgcaggctgtgtctgcaccagaagaggctcccacagactctgctcccgagaagccaagtgatgctggggaggatggcgcgcctgaagacgcagccgaggtgggagcacgggcaggctcaggcgggaagaaggaggcatcgtccagtaagaccgtcccggacgggaagctggtgaaagcttcctttgctccaataagctttgcaatcaaggccaaagaaaatgatctgcttcccctggaaaaaaatcgtgttaagctagatgatgacagtgatgatgatgaagaaagcaaagaaggccaagaaagttctagtagtgctgcaaacactaacccagcagttgccccaccctgtgtagttgttgaggagaagaagcctcaacttacccaggaggagctagaagcaaagcaagcaaagcaaaagctggaagatcgcctcgcagctgctgcccgggaaaagctggcccaggcgtctaaggagtcaaaagagaaacagcttcaagcagaacgtaaaaggaaagcggcgttatttttacagaccctcaaaaatcctctgccggaagcagaagctgggaaaattgaggagagtcctttcagtgtcgaggaatccagcactacgccctgccctctactgactggaggcaggcctctgcctactttagaagttaaaccacccgataggccttcgagcaaaagcaaagatccaccgagagaagaagagaaagaaaagaaaaagaaaaagcacaaaaaaagatctcgaacaagatcacgttctcccaagtaccattcgtcatccaagtccaggtctagatcacactcaaaagcaaagcattctcttcccagtgcctatcggacagtgcggcggtcgaggtcccgctcccggtcccctcggaggagagcccactcccctgagagacggagggaagagaggagtgtgcccactgcctaccgcgtgagccgcagccctggggccagcaggaagcggacccgctccagaagtccccacgagaagaagaagaagaggcggtcccggtcgcggaccaagtccaaggccaggtctcagtcggtgtcacccagcaagcaggcagcgccccggcccgcggcccccgcggcccactcggcgcactcagccagcgtctcccctgtggagagtcggggctccagccaggagcgctccaggggagtctctcaggaaaaagaagcccagatctcttcagcaatcgtttcttccgtgcagagcaaaatcactcaggatctcatggccaaagtcagagcgatgcttgcagcttccaaaaacctgcaaaccagcgcttcctgagacggggccagcggaggcagagccgggaggctgcgtgggcttctgggcaggctcacgcagacgccggccacaccatccacctggccgcctccatggacccttggtggcttttgtaaattaatttttgatgacattttgagttttaagatttctgaccagcagtctcttacctgtatatttgtaaatatatcatgtttctgtgaaaatgtattatgaaataaaatgggaggaaacaccttttctagctag

SEQ ID NO: 81072 - DNA, 4248 bp, Homo sapiens
gagaactggtgaagggagggccgcggaatcagatcatgtctggatctgatggctccgtgctgtgctcaagcgtgctgtgccttcacaccatggtttatattgaatgtgtcgcctgagttgtcaggcttgcttttccaaagtgtcacttgtgttatttatcattaaagtttggtaagcaatgaagtctgagctctttgtacagttttcctatcattctgtacatgatttgagttaggtcttccaaaactggtggggagcaaacgccgcacatgtacatgtataatatttttaataataatctacatttgtaagttaaggaggtttacatcaaaatccaattaattttgaaatttaatgaaatgcagtaacttgactaccttggaattttgggcctttttcctgtaaatgtcttttttggtctacattaatatttttggttcccattacaaaagtcagcattaaaaaaataagcagacttttgtttgtttctctacatttgtttttgaaaccctaaacctgagtgttttaagtaaagttcactaactcattcatttattatctgacagttacacgttgacagcatcctcattgaatcctttatgttaaaagcatagcagaaagtgctcccattacttatttggccaaactactgtttggtccatgcaagagaaacatggaagtgtcttcatgtatgttatttccttgagggtataaagttcagaaggaaatattgataccatatcttctaatagttttgctctgttcccagtgaacctccttaaactgcatgtatatgtcactgttccaatgtatgtgtgtctctctatcacgtaacccagcacttatttcctcagccaagtggctagggggcgagcctagccaagattttacctccaatggacgcaagtttctttggtgaagatctctcctgagagttcgggactagcagaaagaagcgaggaaatttcgaccgtttggttcttacggataggtatttatgtatttggtttgtgtgaatgtaagctatgatatttaacttttcagaaaaaaataataattttttgcaagtggcattgaatggttgaccaaaccataatggtaagaactgccagtgaagtgggtaccatttttgctattaatggattgtttgcctttagttataaatgttatcttactgtggaaaggaatttagagtttgttaagataacttgagtttaaaagtaggtgagatatgactatccaaattaaatataaatctgggaagagtttttatacttgttttaatatttttgtttattttaatcggtaagtatgtgtgtgtatatatatatacatatataaaacatcacacacgcacaccagtctagacgttaatttccttttattgaccagcttgttcacattacagatatgatggacgtggtcacctgcatgacctttctgagtacgatgctgagtattccacgtggaacagagattatcagctgtctgaagaggaggcgcgaatagaggccctgtgtgatgaagagagaggaagaatacaagcgattgagtgaagcactagcagaggatgggagctacaatgccgtggggttcacttacggtagcgactattacgacccgtcagagccgacggaggaggaggagccttccaaacagagagaaaaaaatgaggccgaaaatttagaggaaaatgaagagcccttcgttgcccccttaggattgagcgtcccgtctgacgtggagttgccaccaaccgctaaaatgcacgccatcatcgagcgcacggccagcttcgtgtgcaggcagggagcacagtttgagatcatgctgaaggccaagcaggcccggaactcccagtttgactttctgcgcttcgaccactacctcaacccctactataagttcatccagaaagccatgaaagagggacgctacactgtcctggcagaaaacaaaagtgacgagaaaaaaaaatcaggagtcagctctgacaatgaagatgatgatgatgaagaagatgggaattaccttcatccctctctctttgcctccaagaagtgtaaccgccttgaagagctgatgaagcccttgaaggtagtggacccagatcatcccctcgcagcacttgttcgtaaggcacaggctgacagttccactcccaccccacacaacgcagacggtgcgcctgtgcagccctcccaggtggagtacacggcagactcgaccgtggcagccatgtattacagctactacatgctaccggacggcacttactgcctggcgccgccccctcccggaatcgacgtgactacttactacagcacccttcctgctggcgtgaccgtgtctaactcccctggagtgacgaccaccgccccaccacctcctgggaccacaccaccaccgcccccaaccacagcagagactagcagcggggccacctccacaaccaccaccacaagtgcacttgcccccgtggccgccatcatccccccgccccccgacgtccagcccgtgattgacaagctggccgagtatgtcgccaggaacggcctgaagttcgagaccagtgttcgtgccaagaatgatcaaagatttgagttcctgcagccgtggcaccagtataatgcttattatgagtttaagaagcagttcttcctccagaaagaagggggcgatagcatgcaggctgtgtctgcaccagaagaggctcccacagactctgctcccgagaagccaagtgatgctggggaggatggcgcgcctgaagacgcagccgaggtgggagcacgggcaggctcaggcgggaagaaggaggcatcgtccagtaagaccgtcccggacgggaagctggtgaaagcttcctttgctccaataagctttgcaatcaaggccaaagaaaatgatctgcttcccctggaaaaaaatcgtgttaagctagatgatgacagtgatgatgatgaagaaagcaaagaaggccaagaaagttctagtagtgctgcaaacactaacccagcagttgccccaccctgtgtagttgttgaggagaagaagcctcaacttacccaggaggagctagaagcaaagcaagcaaagcaaaagctggaagatcgcctcgcagctgctgcccgggaaaagctggcccaggcgtctaaggagtcaaaagagaaacagcttcaagcagaacgtaaaaggaaagcggcgttatttttacagaccctcaaaaatcctctgccggaagcagaagctgggaaaattgaggagagtcctttcagtgtcgaggaatccagcactacgccctgccctctactgactggaggcaggcctctgcctactttagaagttaaaccacccgataggccttcgagcaaaagcaaagatccaccgagagaagaagagaaagaaaagaaaaagaaaaagcacaaaaaaagatctcgaacaagatcacgttctcccaagtaccattcgtcatccaagtccaggtctagatcacactcaaaagcaaagcattctcttcccagtgcctatcggacagtgcggcggtcgaggtcccgctcccggtcccctcggaggagagcccactcccctgagagacggagggaagagaggagtgtgcccactgcctaccgcgtgagccgcagccctggggccagcaggaagcggacccgctccagaagtccccacgagaagaagaagaagaggcggtcccggtcgcggaccaagtccaaggccaggtctcagtcggtgtcacccagcaagcaggcagcgccccggcccgcggcccccgcggcccactcggcgcactcagccagcgtctcccctgtggagagtcggggctccagccaggagcgctccaggggagtctctcaggaaaaagaagcccagatctcttcagcaatcgtttcttccgtgcagagcaaaatcactcaggatctcatggccaaagtcagagcgatgcttgcagcttccaaaaacctgcaaaccagcgcttcctgagacggggccagcggaggcagagccgggaggctgcgtgggcttctgggcaggctcacgcagacgccggccacaccatccacctggccgcctccatggacccttggtggcttttgtaaattaatttttgatgacattttgagttttaagatttctgaccagcagtctcttacctgtatatttgtaaatatatcatgtttctgtgaaaatgtattatgaaataaaatgggaggaaacaccttttctagctag

SEQ ID NO: 81073 - DNA, 3225 bp, Homo sapiens
tggtcactagctgactctagagggtacaacgatgattagagatcccagtggattggaaaaacaggagtctttgcgttctgagaggacctcaggatagtttatatatagagccacaaagaattttcccagcttttgagggcagactgggatttgaaaaaaacaaaaaccaaactctttaactgttcttctttaacagtatcgtataaataaaattgatgttcttgtctttgccgtaacagtctttaatacagttcttaatcccaaaattttctcagcaggaagaaattttccacaaaagacgtgtattcagctgtctgtgggtaaacatgtactgacaaaagtacataatgatagatataaagtgtgaatttttaaaactattttacctcaaaagtaggttgaaaaaagtatgttgtatgctttactgatagctacaactttagaaatatataaagtttttctcagtaattttctatttttgttgataaaattctcatttttattcaagaggaagaatacaagcgattgagtgaagcactagcagaggatgggagctacaatgccgtggggttcacttacggtagcgactattacgacccgtcagagccgacggaggaggaggagccttccaaacagagagaaaaaaatgaggccgaaaatttagaggaaaatgaagagcccttcgttgcccccttaggattgagcgtcccgtctgacgtggagttgccaccaaccgctaaaatgcacgccatcatcgagcgcacggccagcttcgtgtgcaggcagggagcacagtttgagatcatgctgaaggccaagcaggcccggaactcccagtttgactttctgcgcttcgaccactacctcaacccctactataagttcatccagaaagccatgaaagagggacgctacactgtcctggcagaaaacaaaagtgacgagaaaaaaaaatcaggagtcagctctgacaatgaagatgatgatgatgaagaagatgggaattaccttcatccctctctctttgcctccaagaagtgtaaccgccttgaagagctgatgaagcccttgaaggtagtggacccagatcatcccctcgcagcacttgttcgtaaggcacaggctgacagttccactcccaccccacacaacgcagacggtgcgcctgtgcagccctcccaggtggagtacacggcagactcgaccgtggcagccatgtattacagctactacatgctaccggacggcacttactgcctggcgccgccccctcccggaatcgacgtgactacttactacagcacccttcctgctggcgtgaccgtgtctaactcccctggagtgacgaccaccgccccaccacctcctgggaccacaccaccaccgcccccaaccacagcagagactagcagcggggccacctccacaaccaccaccacaagtgcacttgcccccgtggccgccatcatccccccgccccccgacgtccagcccgtgattgacaagctggccgagtatgtcgccaggaacggcctgaagttcgagaccagtgttcgtgccaagaatgatcaaagatttgagttcctgcagccgtggcaccagtataatgcttattatgagtttaagaagcagttcttcctccagaaagaagggggcgatagcatgcaggctgtgtctgcaccagaagaggctcccacagactctgctcccgagaagccaagtgatgctggggaggatggcgcgcctgaagacgcagccgaggtgggagcacgggcaggctcaggcgggaagaaggaggcatcgtccagtaagaccgtcccggacgggaagctggtgaaagcttcctttgctccaataagctttgcaatcaaggccaaagaaaatgatctgcttcccctggaaaaaaatcgtgttaagctagatgatgacagtgatgatgatgaagaaagcaaagaaggccaagaaagttctagtagtgctgcaaacactaacccagcagttgccccaccctgtgtagttgttgaggagaagaagcctcaacttacccaggaggagctagaagcaaagcaagcaaagcaaaagctggaagatcgcctcgcagctgctgcccgggaaaagctggcccaggcgtctaaggagtcaaaagagaaacagcttcaagcagaacgtaaaaggaaagcggcgttatttttacagaccctcaaaaatcctctgccggaagcagaagctgggaaaattgaggagagtcctttcagtgtcgaggaatccagcactacgccctgccctctactgactggaggcaggcctctgcctactttagaagttaaaccacccgataggccttcgagcaaaagcaaagatccaccgagagaagaagagaaagaaaagaaaaagaaaaagcacaaaaaaagatctcgaacaagatcacgttctcccaagtaccattcgtcatccaagtccaggtctagatcacactcaaaagcaaagcattctcttcccagtgcctatcggacagtgcggcggtcgaggtcccgctcccggtcccctcggaggagagcccactcccctgagagacggagggaagagaggagtgtgcccactgcctaccgcgtgagccgcagccctggggccagcaggaagcggacccgctccagaagtccccacgagaagaagaagaagaggcggtcccggtcgcggaccaagtccaaggccaggtctcagtcggtgtcacccagcaagcaggcagcgccccggcccgcggcccccgcggcccactcggcgcactcagccagcgtctcccctgtggagagtcggggctccagccaggagcgctccaggggagtctctcaggaaaaagaagcccagatctcttcagcaatcgtttcttccgtgcagagcaaaatcactcaggatctcatggccaaagtcagagcgatgcttgcagcttccaaaaacctgcaaaccagcgcttcctgagacggggccagcggaggcagagccgggaggctgcgtgggcttctgggcaggctcacgcagacgccggccacaccatccacctggccgcctccatggacccttggtggcttttgtaaattaatttttgatgacattttgagttttaagatttctgaccagcagtctcttacctgtatatttgtaaatatatcatgtttctgtgaaaatgtattatgaaataaaatgggaggaaacaccttttctagctag

SEQ ID NO: 81074 - DNA, 3277 bp, Homo sapiens
cacacacacaacaacaacaacaaacaaacaagcacataacgtactacgtacagagaccggcctgttaattccgcacgcaggtttgtggcccgctatggcggcggtgttgaggttgggtccgggatgcggggtctttgactgaaggggtaggccaagtggaggtatcagggacgtcgcgcggcacagaagaggaccagcctggacgccggggacgctgtcatgtacggcgcgagcgggggccgcgccaaacccgagaggaaaagcggcgcgaaggaggaggccgggccaggcggtgccggcggtgggggcagccgagtggagctcttggttttcggctatgcctgcaagctgttccgggacgacgagcgggccctggctcaggaacagggacagcacctcatcccctggatgggggaccacaagatcctcatcgacagatatgatggacgtggtcacctgcatgacctttctgagtacgatgctgagtattccacgtggaacagagattatcagctgtctgaagaggaggcgcgaatagaggccctgtgtgatgaagagagaggaagaatacaagcgattgagtgaagcactagcagaggatgggagctacaatgccgtggggttcacttacggtagcgactattacgacccgtcagagccgacggaggaggaggagccttccaaacagagagaaaaaaatgaggccgaaaatttagaggaaaatgaagagcccttcgttgcccccttaggattgagcgtcccgtctgacgtggagttgccaccaaccgctaaaatgcacgccatcatcgagcgcacggccagcttcgtgtgcaggcagggagcacagtttgagatcatgctgaaggccaagcaggcccggaactcccagtttgactttctgcgcttcgaccactacctcaacccctactataagttcatccagaaagccatgaaagagggacgctacactgtcctggcagaaaacaaaagtgacgagaaaaaaaaatcaggagtcagctctgacaatgaagatgatgatgatgaagaagatgggaattaccttcatccctctctctttgcctccaagaagtgtaaccgccttgaagagctgatgaagcccttgaaggtagtggacccagatcatcccctcgcagcacttgttcgtaaggcacaggctgacagttccactcccaccccacacaacgcagacggtgcgcctgtgcagccctcccaggtggagtacacggcagactcgaccgtggcagccatgtattacagctactacatgctaccggacggcacttactgcctggcgccgccccctcccggaatcgacgtgactacttactacagcacccttcctgctggcgtgaccgtgtctaactcccctggagtgacgaccaccgccccaccacctcctgggaccacaccaccaccgcccccaaccacagcagagactagcagcggggccacctccacaaccaccaccacaagtgcacttgcccccgtggccgccatcatccccccgccccccgacgtccagcccgtgattgacaagctggccgagtatgtcgccaggaacggcctgaagttcgagaccagtgttcgtgccaagaatgatcaaagatttgagttcctgcagccgtggcaccagtataatgcttattatgagtttaagaagcagttcttcctccagaaagaagggggcgatagcatgcaggctgtgtctgcaccagaagaggctcccacagactctgctcccgagaagccaagtgatgctggggaggatggcgcgcctgaagacgcagccgaggtgggagcacgggcaggctcaggcgggaagaaggaggcatcgtccagtaagaccgtcccggacgggaagctggtgaaagcttcctttgctccaataagctttgcaatcaaggccaaagaaaatgatctgcttcccctggaaaaaaatcgtgttaagctagatgatgacagtgatgatgatgaagaaagcaaagaaggccaagaaagttctagtagtgctgcaaacactaacccagcagttgccccaccctgtgtagttgttgaggagaagaagcctcaacttacccaggaggagctagaagcaaagcaagcaaagcaaaagctggaagatcgcctcgcagctgctgcccgggaaaagctggcccaggcgtctaaggagtcaaaagagaaacagcttcaagcagaacgtaaaaggaaagcggcgttatttttacagaccctcaaaaatcctctgccggaagcagaagctgggaaaattgaggagagtcctttcagtgtcgaggaatccagcactacgccctgccctctactgactggaggcaggcctctgcctactttagaagttaaaccacccgataggccttcgagcaaaagcaaagatccaccgagagaagaagagaaagaaaagaaaaagaaaaagcacaaaaaaagatctcgaacaagatcacgttctcccaagtaccattcgtcatccaagtccaggtctagatcacactcaaaagcaaagcattctcttcccagtgcctatcggacagtgcggcggtcgaggtcccgctcccggtcccctcggaggagagcccactcccctgagagacggagggaagagaggagtgtgcccactgcctaccgcgtgagccgcagccctggggccagcaggaagcggacccgctccagaagtccccacgagaagaagaagaagaggcggtcccggtcgcggaccaagtccaaggccaggtctcagtcggtgtcacccagcaagcaggcagcgccccggcccgcggcccccgcggcccactcggcgcactcagccagcgtctcccctgtggagagtcggggctccagccaggagcgctccaggggagtctctcaggaaaaagaagcccagatctcttcagcaatcgtttcttccgtgcagagcaaaatcactcaggatctcatggccaaagtcagagcgatgcttgcagcttccaaaaacctgcaaaccagcgcttcctgagacggggccagcggaggcagagccgggaggctgcgtgggcttctgggcaggctcacgcagacgccggccacaccatccacctggccgcctccatggacccttggtggcttttgtaaattaatttttgatgacattttgagttttaagatttctgaccagcagtctcttacctgtatatttgtaaatatatcatgtttctgtgaaaatgtattatgaaataaaatgggaggaaacaccttttctagctag

SEQ ID NO: 81075 - DNA, 3013 bp, Homo sapiens
gtacccgggagtatgtcgacccgcgacgtcggttgggtccgggatgcggggtctttgactgaaggggtaggccaagtggaggtatcagggacgtcgcgcggcacagaagaggaccagcctggacgccggggacgctgtcatgtacggcgcgagcgggggccgcgccaaacccgagaggaaaagcggcgcgaaggaggaggccgggccaggcggtgccggcggtgggggcagccgagtggagctcttggttttcggctatgcctgcaagctgttccgggacgacgagcgggccctggctcaggaacagggacagcacctcatcccctggatgggggaccacaagatcctcatcgacagatatgatggacgtggtcacctgcatgacctttctgagtacgatgctgagtattccacgtggaacagagattatcagctgtctgaagaggaggcgcgaatagaggccctgtgtgatgaagagaggtatttagccttgcatacggacttgcttgaggaggaggcaaggcaagaggaagaatacaagcgattgagtgaagcactagcagaggatgggagctacaatgccgtggggttcacttacggtagcgactattacgacccgtcagagccgacggaggaggaggagccttccaaacagagagaaaaaaatgaggccgaaaatttagaggaaaatgaagagcccttcgttgcccccttaggattgagcgtcccgtctgacgtggagttgccaccaaccgctaaaatgcacgccatcatcgagcgcacggccagcttcgtgtgcaggcagggagcacagtttgagatcatgctgaaggccaagcaggcccggaactcccagtttgactttctgcgcttcgaccactacctcaacccctactataagttcatccagaaagccatgaaagagggacgctacactgtcctggcagaaaacaaaagtgacgagaaaaaaaaatcaggagtcagctctgacaatgaagatgatgatgatgaagaagatgggaattaccttcatccctctctctttgcctccaagaagtgtaaccgccttgaagagctgatgaagcccttgaaggtagtggacccagatcatcccctcgcagcacttgttcgtaaggcacaggctgacagttccactcccaccccacacaacgcagacggtgcgcctgtgcagccctcccaggtggagtacacggcagactcgaccgtggcagccatgtattacagctactacatgctaccggacggcacttactgcctggcgccgccccctcccggaatcgacgtgactacttactacagcacccttcctgctggcgtgaccgtgtctaactcccctggagtgacgaccaccgccccaccacctcctgggaccacaccaccaccgcccccaaccacagcagagactagcagcggggccacctccacaaccaccaccacaagtgcacttgcccccgtggccgccatcatccccccgccccccgacgtccagcccgtgattgacaagctggccgagtatgtcgccaggaacggcctgaagttcgagaccagtgttcgtgccaagaatgatcaaagatttgagttcctgcagccgtggcaccagtataatgcttattatgagtttaagaagcagttcttcctccagaaagaagggggcgatagcatgcaggctgtgtctgcaccagaagaggctcccacagactctgctcccgagaagccaagtgatgctggggaggatggcgcgcctgaagacgcagccgaggtgggagcacgggcaggctcaggcgggaagaaggaggcatcgtccagtaagaccgtcccggacgggaagctggtgaaagcaaagcaaaagctggaagatcgcctcgcagctgctgcccgggaaaagctggcccaggcgtctaaggagtcaaaagagaaacagcttcaagcagaacgtaaaaggaaagcggcgttatttttacagaccctcaaaaatcctctgccggaagcagaagctgggaaaattgaggagagtcctttcagtgtcgaggaatccagcactacgccctgccctctactgactggaggcaggcctctgcctactttagaagttaaaccacccgataggccttcgagcaaaagcaaagatccaccgagagaagaagagaaagaaaagaaaaagaaaaagcacaaaaaaagatctcgaacaagatcacgttctcccaagtaccattcgtcatccaagtccaggtctagatcacactcaaaagcaaagcattctcttcccagtgcctatcggacagtgcggcggtcgaggtcccgctcccggtcccctcggaggagagcccactcccctgagagacggagggaagagaggagtgtgcccactgcctaccgcgtgagccgcagccctggggccagcaggaagcggacccgctccagaagtccccacgagaagaagaagaagaggcggtcccggtcgcggaccaagtccaaggccaggtctcagtcggtgtcacccagcaagcaggcagcgccccggcccgcggcccccgcggcccactcggcgcactcagccagcgtctcccctgtggagagtcggggctccagccaggagcgctccaggggagtctctcaggaaaaagaagcccagatctcttcagcaatcgtttcttccgtgcagagcaaaatcactcaggatctcatggccaaagtcagagcgatgcttgcagcttccaaaaacctgcaaaccagcgcttcctgagacggggccagcggaggcagagccgggaggctgcgtgggcttctgggcaggctcacgcagacgccggccacaccatccacctggccgcctccatggacccttggtggcttttgtaaattaatttttgatgacattttgagttttaagatttctgaccagcagtctcttacctgtatatttgtaaatatatcatgtttctgtgaaaatgtattatgaaataaaatgggaggaaacaccttttctagctag

SEQ ID NO: 81076 - DNA, 3191 bp, Homo sapiens
aggtattgggatattgtcgacccaggctgtcgagtggacgtcgcgcggcacagaagaggaccagcctggacgccggggacgctgtcatgtacggcgcgagcgggggccgcgccaaacccgagaggaaaagcggcgcgaaggaggaggccgggccaggcggtgccggcggtgggggcagccgagtggagctcttggttttcggctatgcctgcaagctgttccgggacgacgagcgggccctggctcaggaacagggacagcacctcatcccctggatgggggaccacaagatcctcatcgacagatatgatggacgtggtcacctgcatgacctttctgagtacgatgctgagtattccacgtggaacagagattatcagctgtctgaagaggaggcgcgaatagaggccctgtgtgatgaagagaggtatttagccttgcatacggacttgcttgaggaggaggcaaggcaagaggaagaatacaagcgattgagtgaagcactagcagaggatgggagctacaatgccgtggggttcacttacggtagcgactattacgacccgtcagagccgacggaggaggaggagccttccaaacagagagaaaaaaatgaggccgaaaatttagaggaaaatgaagagcccttcgttgcccccttaggattgagcgtcccgtctgacgtggagttgccaccaaccgctaaaatgcacgccatcatcgagcgcacggccagcttcgtgtgcaggcagggagcacagtttgagatcatgctgaaggccaagcaggcccggaactcccagtttgactttctgcgcttcgaccactacctcaacccctactataagttcatccagaaagccatgaaagagggacgctacactgtcctggcagaaaacaaaagtgacgagaaaaaaaaatcaggagtcagctctgacaatgaagatgatgatgatgaagaagatgggaattaccttcatccctctctctttgcctccaagaagtgtaaccgccttgaagagctgatgaagcccttgaaggtagtggacccagatcatcccctcgcagcacttgttcgtaaggcacaggctgacagttccactcccaccccacacaacgcagacggtgcgcctgtgcagccctcccaggtggagtacacggcagactcgaccgtggcagccatgtattacagctactacatgctaccggacggcacttactgcctggcgccgccccctcccggaatcgacgtgactacttactacagcacccttcctgctggcgtgaccgtgtctaactcccctggagtgacgaccaccgccccaccacctcctgggaccacaccaccaccgcccccaaccacagcagagactagcagcggggccacctccacaaccaccaccacaagtgcacttgcccccgtggccgccatcatccccccgccccccgacgtccagcccgtgattgacaagctggccgagtatgtcgccaggaacggcctgaagttcgagaccagtgttcgtgccaagaatgatcaaagatttgagttcctgcagccgtggcaccagtataatgcttattatgagtttaagaagcagttcttcctccagaaagaagggggcgatagcatgcaggctgtgtctgcaccagaagaggctcccacagactctgctcccgagaagccaagtgatgctggggaggatggcgcgcctgaagacgcagccgaggtgggagcacgggcaggctcaggcgggaagaaggaggcatcgtccagtaagaccgtcccggacgggaagctggtgaaagcttcctttgctccaataagctttgcaatcaaggccaaagaaaatgatctgcttcccctggaaaaaaatcgtgttaagctagatgatgacagtgatgatgatgaagaaagcaaagaaggccaagaaagttctagtagtgctgcaaacactaacccagcagttgccccaccctgtgtagttgttgaggagaagaagcctcaacttacccaggaggagctagaagcaaagcaagcaaagcaaaagctggaagatcgcctcgcagctgctgcccgggaaaagctggcccaggcgtctaaggagtcaaaagagaaacagcttcaagcagaacgtaaaaggaaagcggcgttatttttacagaccctcaaaaatcctctgccggaagcagaagctgggaaaattgaggagagtcctttcagtgtcgaggaatccagcactacgccctgccctctactgactggaggcaggcctctgcctactttagaagttaaaccacccgataggccttcgagcaaaagcaaagatccaccgagagaagaagagaaagaaaagaaaaagaaaaagcacaaaaaaagatctcgaacaagatcacgttctcccaagtaccattcgtcatccaagtccaggtctagatcacactcaaaagcaaagcattctcttcccagtgcctatcggacagtgcggcggtcgaggtcccgctcccggtcccctcggaggagagcccactcccctgagagacggagggaagagaggagtgtgcccactgcctaccgcgtgagccgcagccctggggccagcaggaagcggacccgctccagaagtccccacgagaagaagaagaagaggcggtcccggtcgcggaccaagtccaaggccaggtctcagtcggtgtcacccagcaagcaggcagcgccccggcccgcggcccccgcggcccactcggcgcactcagccagcgtctcccctgtggagagtcggggctccagccaggagcgctccaggggagtctctcaggaaaaagaagcccagatctcttcagcaatcgtttcttccgtgcagagcaaaatcactcaggatctcatggccaaagtcagagcgatgcttgcagcttccaaaaacctgcaaaccagcgcttcctgagacggggccagcggaggcagagccgggaggctgcgtgggcttctgggcaggctcacgcagacgccggccacaccatccacctggccgcctccatggacccttggtggcttttgtaaattaatttttgatgacattttgagttttaagatttctgaccagcagtctcttacctgtatatttgtaaatatatcatgtttctgtgaaaatgtattatgaaataaaatgggaggaaacaccttttctagctag

SEQ ID NO: 81077 - DNA, 2391 bp, Homo sapiens
gtacccgggagtatgtcgacccgcgacgtcggttgggtccgggatgcggggtctttgactgaaggggtaggccaagtggaggtatcagggacgtcgcgcggcacagaagaggaccagcctggacgccggggacgctgtcatgtacggcgcgagcgggggccgcgccaaacccgagaggaaaagcggcgcgaaggaggaggccgggccaggcggtgccggcggtgggggcagccgagtggagctcttggttttcggctatgcctgcaagctgttccgggacgacgagcgggccctggctcaggaacagggacagcacctcatcccctggatgggggaccacaagatcctcatcgacagatatgatggacgtggtcacctgcatgacctttctgagtacgatgctgagtattccacgtggaacagagattatcagctgtctgaagaggaggcgcgaatagaggccctgtgtgatgaagagaggtatttagccttgcatacggacttgcttgaggaggaggcaaggcaagaggaagaatacaagcgattgagtgaagcactagcagaggatgggagctacaatgccgtggggttcacttacggtagcgactattacgacccgtcagagccgacggaggaggaggagccttccaaacagagagaaaaaaatgaggccgaaaatttagaggaaaatgaagagcccttcgttgcccccttaggattgagcgtcccgtctgacgtggagttgccaccaaccgctaaaatgcacgccatcatcgagcgcacggccagcttcgtgtgcaggcagggagcacagtttgagatcatgctgaaggccaagcaggcccggaactcccagtttgactttctgcgcttcgaccactacctcaacccctactataagttcatccagaaagccatgaaagagggacgctacactgtcctggcagaaaacaaaagtgacgagaaaaaaaaatcaggagtcagctctgacaatgaagatgatgatgatgaagaagatgggaattaccttcatccctctctctttgcctccaagaagtgtaaccgccttgaagagctgatgaagcccttgaaggtagtggacccagatcatcccctcgcagcacttgttcgtaaggcacaggctgacagttccactcccaccccacacaacgcagacggtgcgcctgtgcagccctcccaggtggagtacacggcagactcgaccgtggcagccatgtattacagctactacatgctaccggacggcacttactgcctggcgccgccccctcccggaatcgacgtgactacttactacagcacccttcctgctggcgtgaccgtgtctaactcccctggagtgacgaccaccgccccaccacctcctgggaccacaccaccaccgcccccaaccacagcagagactagcagcggggccacctccacaaccaccaccacaagtgcacttgcccccgtggccgccatcatccccccgccccccgacgtccagcccgtgattgacaagctggccgagtatgtcgccaggaacggcctgaagttcgagaccagtgttcgtgccaagaatgatcaaagatttgagttcctgcagccgtggcaccagtataatgcttattatgagtttaagaagcagttcttcctccagaaagaagggggcgatagcatgcaggctgtgtctgcaccagaagaggctcccacagactctgctcccgagaagccaagtgatgctggggaggatggcgcgcctgaagacgcagccgaggtgggagcacgggcaggctcaggcgggaagaaggaggcatcgtccagtaagaccgtcccggacgggaagctggtgaaagcaaagcaaaagctggaagatcgcctcgcagctgctgcccgggaaaagctggcccaggcgtctaaggagtcaaaagagaaacagcttcaagcagaacgtaaaaggaaagcggcgttatttttacagaccctcaaaaatcctctgccggaagcagaagctgggaaaattgaggagagtcctttcagtgtcgaggaatccagcactacgccctgccctctactgactggaggcaggcctctgcctactttagaagttaaaccacccgataggccttcgagcaaaagcaaagatccaccgagagaagaagagaaagaaaagaaaaagaaattgggggcaatttatgcggggggggggaaaaaggggttaagaaagtgggccaatgggcgcaataggcgggttcccgggagccacaagtctctctggtgtgcaaacaaggggggagaacatctgcgcgggggtcccgccaataaagggagaggccggaaataacttcgcgagaaaagcccaggggtaacccggggattaaaggacgg

SEQ ID NO: 81078 - DNA, 2551 bp, Homo sapiens
gactcttgacgtctaatgagccttaactcttggtccccaatgtgtcttgcagccaccaaccgctaaaatgcacgccatcatcgagcgcacggccagcttcgtgtgcaggcagggagcacagtttgagatcatgctgaaggccaagcaggcccggaactcccagtttgactttctgcgcttcgaccactacctcaacccctactataagttcatccagaaagccatgaaagagggacgctacactgtcctggcagaaaacaaaagtgacgagaaaaaaaaatcaggagtcagctctgacaatgaagatgatgatgatgaagaagatgggaattaccttcatccctctctctttgcctccaagaagtgtaaccgccttgaagagctgatgaagcccttgaaggtagtggacccagatcatcccctcgcagcacttgttcgtaaggcacaggctgacagttccactcccaccccacacaacgcagacggtgcgcctgtgcagccctcccaggtggagtacacggcagactcgaccgtggcagccatgtattacagctactacatgctaccggacggcacttactgcctggcgccgccccctcccggaatcgacgtgactacttactacagcacccttcctgctggcgtgaccgtgtctaactcccctggagtgacgaccaccgccccaccacctcctgggaccacaccaccaccgcccccaaccacagcagagactagcagcggggccacctccacaaccaccaccacaagtgcacttgcccccgtggccgccatcatccccccgccccccgacgtccagcccgtgattgacaagctggccgagtatgtcgccaggaacggcctgaagttcgagaccagtgttcgtgccaagaatgatcaaagatttgagttcctgcagccgtggcaccagtataatgcttattatgagtttaagaagcagttcttcctccagaaagaagggggcgatagcatgcaggctgtgtctgcaccagaagaggctcccacagactctgctcccgagaagccaagtgatgctggggaggatggcgcgcctgaagacgcagccgaggtgggagcacgggcaggctcaggcgggaagaaggaggcatcgtccagtaagaccgtcccggacgggaagctggtgaaagcttcctttgctccaataagctttgcaatcaaggccaaagaaaatgatctgcttcccctggaaaaaaatcgtgttaagctagatgatgacagtgatgatgatgaagaaagcaaagaaggccaagaaagttctagtagtgctgcaaacactaacccagcagttgccccaccctgtgtagttgttgaggagaagaagcctcaacttacccaggaggagctagaagcaaagcaagcaaagcaaaagctggaagatcgcctcgcagctgctgcccgggaaaagctggcccaggcgtctaaggagtcaaaagagaaacagcttcaagcagaacgtaaaaggaaagcggcgttatttttacagaccctcaaaaatcctctgccggaagcagaagctgggaaaattgaggagagtcctttcagtgtcgaggaatccagcactacgccctgccctctactgactggaggcaggcctctgcctactttagaagttaaaccacccgataggccttcgagcaaaagcaaagatccaccgagagaagaagagaaagaaaagaaaaagaaaaagcacaaaaaaagatctcgaacaagatcacgttctcccaagtaccattcgtcatccaagtccaggtctagatcacactcaaaagcaaagcattctcttcccagtgcctatcggacagtgcggcggtcgaggtcccgctcccggtcccctcggaggagagcccactcccctgagagacggagggaagagaggagtgtgcccactgcctaccgcgtgagccgcagccctggggccagcaggaagcggacccgctccagaagtccccacgagaagaagaagaagaggcggtcccggtcgcggaccaagtccaaggccaggtctcagtcggtgtcacccagcaagcaggcagcgccccggcccgcggcccccgcggcccactcggcgcactcagccagcgtctcccctgtggagagtcggggctccagccaggagcgctccaggggagtctctcaggaaaaagaagcccagatctcttcagcaatcgtttcttccgtgcagagcaaaatcactcaggatctcatggccaaagtcagagcgatgcttgcagcttccaaaaacctgcaaaccagcgcttcctgagacggggccagcggaggcagagccgggaggctgcgtgggcttctgggcaggctcacgcagacgccggccacaccatccacctggccgcctccatggacccttggtggcttttgtaaattaatttttgatgacattttgagttttaagatttctgaccagcagtctcttacctgtatatttgtaaatatatcatgtttctgtgaaaatgtattatgaaataaaatgggaggaaacaccttttctagctag

SEQ ID NO: 81079 - DNA, 2483 bp, Homo sapiens
gtacccgggagtatgtcgacccgcgacgtcggttgggtccgggatgcggggtctttgactgaaggggtaggccaagtggaggtatcagggacgtcgcgcggcacagaagaggaccagcctggacgccggggacgctgtcatgtacggcgcgagcgggggccgcgccaaacccgagaggaaaagcggcgcgaaggaggaggccgggccaggcggtgccggcggtgggggcagccgagtggagctcttggttttcggctatgcctgcaagctgttccgggacgacgagcgggccctggctcaggaacagggacagcacctcatcccctggatgggggaccacaagatcctcatcgacagatatgatggacgtggtcacctgcatgacctttctgagtacgatgctgagtattccacgtggaacagagattatcagctgtctgaagaggaggcgcgaatagaggccctgtgtgatgaagagaggtatttagccttgcatacggacttgcttgaggaggaggcaaggcaagaggaagaatacaagcgattgagtgaagcactagcagaggatgggagctacaatgccgtggggttcacttacggtagcgactattacgacccgtcagagccgacggaggaggaggagccttccaaacagagagaaaaaaatgaggccgaaaatttagaggaaaatgaagagcccttcgttgcccccttaggattgagcgtcccgtctgacgtggagttgccaccaaccgctaaaatgcacgccatcatcgagcgcacggccagcttcgtgtgcaggcagggagcacagtttgagatcatgctgaaggccaagcaggcccggaactcccagtttgactttctgcgcttcgaccactacctcaacccctactataagttcatccagaaagccatgaaagagggacgctacactgtcctggcagaaaacaaaagtgacgagaaaaaaaaatcaggagtcagctctgacaatgaagatgatgatgatgaagaagatgggaattaccttcatccctctctctttgcctccaagaagtgtaaccgccttgaagagctgatgaagcccttgaaggtagtggacccagatcatcccctcgcagcacttgttcgtaaggcacaggctgacagttccactcccaccccacacaacgcagacggtgcgcctgtgcagccctcccaggtggagtacacggcagactcgaccgtggcagccatgtattacagctactacatgctaccggacggcacttactgcctggcgccgccccctcccggaatcgacgtgactacttactacagcacccttcctgctggcgtgaccgtgtctaactcccctggagtgacgaccaccgccccaccacctcctgggaccacaccaccaccgcccccaaccacagcagagactagcagcggggccacctccacaaccaccaccacaagtgcacttgcccccgtggccgccatcatccccccgccccccgacgtccagcccgtgattgacaagctggccgagtatgtcgccaggaacggcctgaagttcgagaccagtgttcgtgccaagaatgatcaaagatttgagttcctgcagccgtggcaccagtataatgcttattatgagtttaagaagcagttcttcctccagaaagaagggggcgatagcatgcaggctgtgtctgcaccagaagaggctcccacagactctgctcccgagaagccaagtgatgctggggaggatggcgcgcctgaagacgcagccgaggtgggagcacgggcaggctcaggcgggaagaaggaggcatcgtccagtaagaccgtcccggacgggaagctggtgaaagcttcctttgctccaataagctttgcaatcaaggccaaagaaaatgatctgcttcccctggaaaaaaatcgtgttaagctagatgatgacagtgatgatgatgaagaaagcaaagaaggccaagaaagttctagtagtgctgcaaacactaacccagcagttgccccaccctgtgtagttgttgaggagaagaagcctcaacttacccaggaggagctagaagcaaagcaaggtttgttgatagcttttaaacttcttgaaagaaaggaaatacacaaatataagatttatctgctaagccaaaaaatctcgaggctgccaactagaatctgaagcctttggaaatcgacctatttgggagttgtgtaacatgtctgaggttttgaaacgttctcttttagaggaatgagctctgctcttcactgagcctcaaatgcagtgccgctggcagtttgttttcgaagaaactgagttggccgtcttagctctaatgcgccacagtggaatgcattaatggcagctcactttgcacttggctggcagccccagggtaaaaggctcagctgtcttcccagctcaggaaccaaactaggagatgccctcttgtgaggctgcctacccacag

SEQ ID NO: 81080 - DNA, 1861 bp, Homo sapiens
gtacccgggagtatgtcgacccgcgacgtcggttgggtccgggatgcggggtctttgactgaaggggtaggccaagtggaggtatcagggacgtcgcgcggcacagaagaggaccagcctggacgccggggacgctgtcatgtacggcgcgagcgggggccgcgccaaacccgagaggaaaagcggcgcgaaggaggaggccgggccaggcggtgccggcggtgggggcagccgagtggagctcttggttttcggctatgcctgcaagctgttccgggacgacgagcgggccctggctcaggaacagggacagcacctcatcccctggatgggggaccacaagatcctcatcgacagatatgatggacgtggtcacctgcatgacctttctgagtacgatgctgagtattccacgtggaacagagattatcagctgtctgaagaggaggcgcgaatagaggccctgtgtgatgaagagaggtatttagccttgcatacggacttgcttgaggaggaggcaaggcaagaggaagaatacaagcgattgagtgaagcactagcagaggatgggagctacaatgccgtggggttcacttacggtagcgactattacgacccgtcagagccgacggaggaggaggagccttccaaacagagagaaaaaaatgaggccgaaaatttagaggaaaatgaagagcccttcgttgcccccttaggattgagcgtcccgtctgacgtggagttgccaccaaccgctaaaatgcacgccatcatcgagcgcacggccagcttcgtgtgcaggcagggagcacagtttgagatcatgctgaaggccaagcaggcccggaactcccagtttgactttctgcgcttcgaccactacctcaacccctactataagttcatccagaaagccatgaaagagggacgctacactgtcctggcagaaaacaaaagtgacgagaaaaaaaaatcaggagtcagctctgacaatgaagatgatgatgatgaagaagatgggaattaccttcatccctctctctttgcctccaagaagtgtaaccgccttgaagagctgatgaagcccttgaaggtagtggacccagatcatcccctcgcagcacttgttcgtaaggcacaggctgacagttccactcccaccccacacaacgcagacggtgcgcctgtgcagccctcccaggtggagtacacggcagactcgaccgtggcagccatgtattacagctactacatgctaccggacggcacttactgcctggcgccgccccctcccggaatcgacgtgactacttactacagcacccttcctgctggcgtgaccgtgtctaactcccctggagtgacgaccaccgccccaccacctcctgggaccacaccaccaccgcccccaaccacagcagagactagcagcggggccacctccacaaccaccaccacaagtgcacttgcccccgtggccgccatcatccccccgccccccgacgtccagcccgtgattgacaagctggccgagtatgtcgccaggaacggcctgaagttcgagaccagtgttcgtgccaagaatgatcaaagatttgagttcctgcagccgtggcaccagtataatgcttattatgagttcaaacacgtcccccacagaagacgggcgagccgcagtgggtcgaccaagaggcccagaactgtacagagcacggagcggcagagccactaaaccaccggggaaatcgcagcaagggaaaggaccacataaccagcggggagaccgcccacgtaagcaaaagtacgaccgcaacgataaaggcgagacactctaactcagagcccgaaccgcaccaacaca

SEQ ID NO: 81081 - DNA, 1139 bp, Homo sapiens
  misc_feature (1094)..(1094): n is a, c, g, or t
gtacccgggagtatgtcgacccgcgacgtcggttgggtccgggatgcggggtctttgactgaaggggtaggccaagtggaggtatcagggacgtcgcgcggcacagaagaggaccagcctggacgccggggacgctgtcatgtacggcgcgagcgggggccgcgccaaacccgagaggaaaagcggcgcgaaggaggaggccgggccaggcggtgccggcggtgggggcagccgagtggagctcttggttttcggctatgcctgcaagctgttccgggacgacgagcgggccctggctcaggaacagggacagcacctcatcccctggatgggggaccacaagatcctcatcgacagatatgatggacgtggtcacctgcatgacctttctgagtacgatgctgagtattccacgtggaacagagattatcagctgtctgaagaggaggcgcgaatagaggccctgtgtgatgaagagaggtatttagccttgcatacggacttgcttgaggaggaggcaaggcaagaggaagaatacaagcgattgagtgaagcactagcagaggatgggagctacaatgccgtggggttcacttacggtagcgactattacgacccgtcagagccgacggaggaggaggagccttccaaacagagagaaaaaaatgaggccgaaaatttagaggaaaatgaagagcccttcgttgcccccttaggattgagcgtcccgtctgacgtggagttgccaccaaccgctaaaatgcacgccatcatcgagcgcacggccagcttcgtgtgcaggcagggagcacagtttgagatcatgctgaaggccaagcaggcccggaactcccagtttgactttctgcgcttcgaccactacctcaacccctactataagttcatccagaaagccatgaaagagggacgctacactgtcctggcagaaaacaaaagtgacgagaaaaaaaaatcaggagtcagctctgacaatgaagatgatgatgatgaagaagatgggaattaccttcatccctctctctttgcctccaagaagtgtaaccgccttgaagagctgatgaagcccttgaagntagtggaccccgatcatccccacgcagttttatccagcaaccaga

SEQ ID NO: 81082 - DNA, 1237 bp, Homo sapiens
tcctgagctttcccgggcagcagctgcgaggcgatcttccagcttttgctttgctatcaccagcttcccgtccgcgacggtcttactggacgatgcctccttcttcccgcctgagcctgcccgtgctcccacctcggctgcgtctaaggagtcaaaagagaaacagcttcaagcagaacgtaaaaggaaagcggcgttatttttacagaccctcaaaaatcctctgccggaagcagaagctgggaaaattgaggagagtcctttcagtgtcgaggaatccagcactacgccctgccctctactgactggaggcaggcctctgcctactttagaagttaaaccacccgataggccttcgagcaaaagcaaagatccaccgagagaagaagagaaagaaaagaaaaagaaaaagcacaaaaaaagatctcgaacaagatcacgttctcccaagtaccattcgtcatccaagtccaggtctagatcacactcaaaagcaaagcattctcttcccagtgcctatcggacagtgcggcggtcgaggtcccgctcccggtcccctcggaggagagcccactcccctgagagacggagggaagagaggagtgtgcccactgcctaccgcgtgagccgcagccctggggccagcaggaagcggacccgctccagaagtccccacgagaagaagaagaagaggcggtcccggtcgcggaccaagtccaaggccaggtctcagtcggtgtcacccagcaagcaggcagcgccccggcccgcggcccccgcggcccactcggcgcactcagccagcgtctcccctgtggagagtcggggctccagccaggagcgctccaggggagtctctcaggaaaaagaagcccagatctcttcagcaatcgtttcttccgtgcagagcaaaatcactcaggatctcatggccaaagtcagagcgatgcttgcagcttccaaaaacctgcaaaccagcgcttcctgagacggggccagcggaggcagagccgggaggctgcgtgggcttctgggcaggctcacgcagacgccggccacaccatccacctggccgcctccatggacccttggtggcttttgtaaattaatttttgatgacattttgagttttaagatttctgaccagcagtctcttacctgtatatttgtaaatatatcatgtttctgtgaaaatgtattatgaaataaaatgggaggaaacaccttttctagctag

SEQ ID NO: 81083 - DNA, 584 bp, Homo sapiens
cacacacacaacaacaacaacaaacaaacaagcacataacgtactacgtacagagaccggcctgttaattccgcacgcaggtttgtggcccgctatggcggcggtgttgaggttgggtccgggatgcggggtctttgactgaaggggtaggccaagtggaggtatcagggacgtcgcgcggcacagaagaggaccagcctggacgccggggacgctgtcatgtacggcgcgagcgggggccgcgccaaacccgagaggaaaagcggcgcgaaggaggaggccgggccaggcggtgccggcggtgggggcagccgagtggagctcttggttttcggctatgcctgcaagctgttccgggacgacgagcgggccctggctcaggaacagggacagcacctcatcccctggatgggggaccacaagatcctcatcgacaggtcggttcctctccccacccgtcgatccttcccttccctcacccgcttgatctcgtctgatgttgacttgactgcaaggactgcagagagttttctggagccagcggggatctgggggacaccccctcccctgtccccacctcctcc

SEQ ID NO: 81084 - DNA, 2204 bp, Homo sapiens
gtacccgggagtatgtcgacccgcgacgtcggttgggtccgggatgcggggtctttgactgaaggggtaggccaagtggaggtatcagggacgtcgcgcggcacagaagaggaccagcctggacgccggggacgctgtcatgtacggcgcgagcgggggccgcgccaaacccgagaggaaaagcggcgcgaaggaggaggccgggccaggcggtgccggcggtgggggcagccgagtggagctcttggttttcggctatgcctgcaagctgttccgggacgacgagcgggccctggctcaggaacagggacagcacctcatcccctggatgggggaccacaagatcctcatcgacagatatgatggacgtggtcacctgcatgacctttctgagtacgatgctgagtattccacgtggaacagagattatcagctgtctgaagaggaggcgcgaatagaggccctgtgtgatgaagagaggtatttagccttgcatacggacttgcttgaggaggaggcaaggcaagaggaagaatacaagcgattgagtgaagcactagcagaggatgggagctacaatgccgtggggttcacttacggtagcgactattacgacccgtcagagccgacggaggaggaggagccttccaaacagagagaaaaaaatgaggccgaaaatttagaggaaaatgaagagcccttcgttgcccccttaggattgagcgtcccgtctgacgtggagttgccaccaaccgctaaaatgcacgccatcatcgagcgcacggccagcttcgtgtgcaggcagggagcacagtttgagatcatgctgaaggccaagcaggcccggaactcccagtttgactttctgcgcttcgaccactacctcaacccctactataagttcatccagaaagccatgaaagagggacgctacactgtcctggcagaaaacaaaagtgacgagaaaaaaaaatcaggagtcagctctgacaatgaagatgatgatgatgaagaagatgggaattaccttcatccctctctctttgcctccaagaagtgtaaccgccttgaagagctgatgaagcccttgaaggtagtggacccagatcatcccctcgcagcacttgttcgtaaggcacaggctgacagttccactcccaccccacacaacgcagacggtgcgcctgtgcagccctcccaggtggagtacacggcagactcgaccgtggcagccatgtattacagctactacatgctaccggacggcacttactgcctggcgccgccccctcccggaatcgacgtgactacttactacagcacccttcctgctggcgtgaccgtgtctaactcccctggagtgacgaccaccgccccaccacctcctgggaccacaccaccaccgcccccaaccacagcagagactagcagcggggccacctccacaaccaccaccacaagtgcacttgcccccgtggccgccatcatccccccgccccccgacgtccagcccgtgattgacaagctggccgagtatgtcgccaggaacggcctgaagttcgagaccagtgttcgtgccaagaatgatcaaagatttgagttcctgcagccgtggcaccagtataatgcttattatgagtttaagaagcagttcttcctccagaaagaagggggcgatagcatgcaggctgtgtctgcaccagaagaggctcccacagactctgctcccgagaagccaagtgatgctggggaggatggcgcgcctgaagacgcagccgaggtgggagcacgggcaggctcaggcgggaagaaggaggcatcgtccagtaagaccgtcccggacgggaagctggtgaaagcttcctttgctccaataagctttgcaatcaaggccaaagaaaatgatctgcttcccctggaaaaaaatcgtgttaagctagatgatgacagtgatgatgatgaagaaagcaaagaaggccaagaaagttctagtagtgctgcaaacactaacccagcagttgccccaccctgtgtagttgttgaggagaagaagcctcaacttacccaggaggagctagaagcaaagcaaggtttgttgatagcttttaaacttcttgaaagaaaggaaatacacaaatataagatttatctgctaagccaaaaaatctcgcaacttgggatcctctagaacactcagcgcacct

SEQ ID NO: 81085 - DNA, 2644 bp, Homo sapiens
cacacacacaacaacaacaacaaacaaacaagcacataacgtactacgtacagagaccggcctgttaattccgcacgcaggtttgtggcccgctatggcggcggtgttgaggttgggtccgggatgcggggtctttgactgaaggggtaggccaagtggaggtatcagggacgtcgcgcggcacagaagaggaccagcctggacgccggggacgctgtcatgtacggcgcgagcgggggccgcgccaaacccgagaggaaaagcggcgcgaaggaggaggccgggccaggcggtgccggcggtgggggcagccgagtggagctcttggttttcggctatgcctgcaaaaaacaaaagtgacgagaaaaaaaaatcaggagtcagctctgacaatgaagatgatgatgatgaagaagatgggaattaccttcatccctctctctttgcctccaagaagtgtaaccgccttgaagagctgatgaagcccttgaaggtagtggacccagatcatcccctcgcagcacttgttcgtaaggcacaggctgacagttccactcccaccccacacaacgcagacggtgcgcctgtgcagccctcccaggtggagtacacggcagactcgaccgtggcagccatgtattacagctactacatgctaccggacggcacttactgcctggcgccgccccctcccggaatcgacgtgactacttactacagcacccttcctgctggcgtgaccgtgtctaactcccctggagtgacgaccaccgccccaccacctcctgggaccacaccaccaccgcccccaaccacagcagagactagcagcggggccacctccacaaccaccaccacaagtgcacttgcccccgtggccgccatcatccccccgccccccgacgtccagcccgtgattgacaagctggccgagtatgtcgccaggaacggcctgaagttcgagaccagtgttcgtgccaagaatgatcaaagatttgagttcctgcagccgtggcaccagtataatgcttattatgagtttaagaagcagttcttcctccagaaagaagggggcgatagcatgcaggctgtgtctgcaccagaagaggctcccacagactctgctcccgagaagccaagtgatgctggggaggatggcgcgcctgaagacgcagccgaggtgggagcacgggcaggctcaggcgggaagaaggaggcatcgtccagtaagaccgtcccggacgggaagctggtgaaagcttcctttgctccaataagctttgcaatcaaggccaaagaaaatgatctgcttcccctggaaaaaaatcgtgttaagctagatgatgacagtgatgatgatgaagaaagcaaagaaggccaagaaagttctagtagtgctgcaaacactaacccagcagttgccccaccctgtgtagttgttgaggagaagaagcctcaacttacccaggaggagctagaagcaaagcaagcaaagcaaaagctggaagatcgcctcgcagctgctgcccgggaaaagctggcccaggcgtctaaggagtcaaaagagaaacagcttcaagcagaacgtaaaaggaaagcggcgttatttttacagaccctcaaaaatcctctgccggaagcagaagctgggaaaattgaggagagtcctttcagtgtcgaggaatccagcactacgccctgccctctactgactggaggcaggcctctgcctactttagaagttaaaccacccgataggccttcgagcaaaagcaaagatccaccgagagaagaagagaaagaaaagaaaaagaaaaagcacaaaaaaagatctcgaacaagatcacgttctcccaagtaccattcgtcatccaagtccaggtctagatcacactcaaaagcaaagcattctcttcccagtgcctatcggacagtgcggcggtcgaggtcccgctcccggtcccctcggaggagagcccactcccctgagagacggagggaagagaggagtgtgcccactgcctaccgcgtgagccgcagccctggggccagcaggaagcggacccgctccagaagtccccacgagaagaagaagaagaggcggtcccggtcgcggaccaagtccaaggccaggtctcagtcggtgtcacccagcaagcaggcagcgccccggcccgcggcccccgcggcccactcggcgcactcagccagcgtctcccctgtggagagtcggggctccagccaggagcgctccaggggagtctctcaggaaaaagaagcccagatctcttcagcaatcgtttcttccgtgcagagcaaaatcactcaggatctcatggccaaagtcagagcgatgcttgcagcttccaaaaacctgcaaaccagcgcttcctgagacggggccagcggaggcagagccgggaggctgcgtgggcttctgggcaggctcacgcagacgccggccacaccatccacctggccgcctccatggacccttggtggcttttgtaaattaatttttgatgacattttgagttttaagatttctgaccagcagtctcttacctgtatatttgtaaatatatcatgtttctgtgaaaatgtattatgaaataaaatgggaggaaacaccttttctagctag

SEQ ID NO: 81086 - DNA, 1206 bp, Homo sapiens
ccaaaaaagggcacgttataaactaattctctcaaaatttgatttgtccaatcaaagcaaaagctggaagatcgcctcgcagctgctgcccgggaaaagctggcccaggcgtctaaggagtcaaaagagaaacagcttcaagcagaacgtaaaaggaaagcggcgttatttttacagaccctcaaaaatcctctgccggaagcagaagctgggaaaattgaggagagtcctttcagtgtcgaggaatccagcactacgccctgccctctactgactggaggcaggcctctgcctactttagaagttaaaccacccgataggccttcgagcaaaagcaaagatccaccgagagaagaagagaaagaaaagaaaaagaaaaagcacaaaaaaagatctcgaacaagatcacgttctcccaagtaccattcgtcatccaagtccaggtctagatcacactcaaaagcaaagcattctcttcccagtgcctatcggacagtgcggcggtcgaggtcccgctcccggtcccctcggaggagagcccactcccctgagagacggagggaagagaggagtgtgcccactgcctaccgcgtgagccgcagccctggggccagcaggaagcggacccgctccagaagtccccacgagaagaagaagaagaggcggtcccggtcgcggaccaagtccaaggccaggtctcagtcggtgtcacccagcaagcaggcagcgccccggcccgcggcccccgcggcccactcggcgcactcagccagcgtctcccctgtggagagtcggggctccagccaggagcgctccaggggagtctctcaggaaaaagaagcccagatctcttcagcaatcgtttcttccgtgcagagcaaaatcactcaggatctcatggccaaagtcagagcgatgcttgcagcttccaaaaacctgcaaaccagcgcttcctgagacggggccagcggaggcagagccgggaggctgcgtgggcttctgggcaggctcacgcagacgccggccacaccatccacctggccgcctccatggacccttggtggcttttgtaaattaatttttgatgacattttgagttttaagatttctgaccagcagtctcttacctgtatatttgtaaatatatcatgtttctgtgaaaatgtattatgaaataaaatgggaggaaacaccttttctagctag

SEQ ID NO: 81087 - DNA, 604 bp, Homo sapiens
gggcggggcatacgctgggcgcgtcccgggggtcacgtggtgcagagcacgcagagtccttctgtcggttggtcctggagcggcgcagccggagtggggccgtgaggagaataaaggcagccccgttgatgactgaaaatgacaaagcatccacctaacagacgaggaatcagctttgaagtgggagcccagttggaagcccgggaccgtttaaaaaactgaatacagttgagttttgccaaatttgacagttcacgcaagccccaccacaatcaagatatgggccgggaatggtgactcatgcctataatcccagcaccttgggaggacaacgtgggaggattgcttgagcccaggagttcaagacaagcctaagcaacataatgggacttcgtctctcaaaaaaaaaaaaaaaaaagccataataaaagtaataataatagctgggtgtggtggtgtgtgtctatagttttagctactcaggaggctggggtgggaggaagactgcttgagcccaggaggtcaaggctgcagcaagctgtgattgtaccgctgcactccaactccagcctgtgtgatagagcgagaccctgtctcaaaaaaa

SEQ ID NO: 81088 - DNA, 445 bp, Homo sapiens
tgagggatctgctaccatgacccaaacacctctcataggccccattttcaacactgctgcactgaaaacgtttacttttggtgaggacaaatgacaccgaaattatagcaactcctagtgttgaacaacagaaatatcttcctccatctcaacagctactttcccttcacactttcttatcaatcccagcttcttttatgagatctggtatgtcctgtatgtcctgtgaaattaggttggtaacaggatcttttttttttttttatgttttttaggaatttcaaataaatgagcaggtccttgcttgctggtctgattgtcgtttttacccggccaaagtcactgctgttaacaaggatggtaaggcatttgagttgtagttgtttttactcatgacttaggtggtggggggggatgtttgtaatatcagagcttgatagtatat

SEQ ID NO: 81089 - DNA, 5881 bp, Homo sapiens
gggcggggcatacgctgggcgcgtcccgggggtcacgtggtgcagagcacgcagagtccttctgtcggttggtcctggagcggcgcagccggagtggggccgtgaggagaataaaggcagccccgttgatgactgaaaatgacaaagcatccacctaacagacgaggaatcagctttgaagtgggagcccagttggaagcccgggaccgtttaaaaaactggtatccagctcacatagaagacattgactacgaggaaggaaaagtactcatccatttcaagcgttggaaccatcgttatgatgagtggttctgctgggacagtccttatttacgccctttagagaaaatacagctgaggaaagagggcttgcatgaagaggatggatcttctgaatttcaaataaatgagcaggtccttgcttgctggtctgattgtcgtttttacccggccaaagtcactgctgttaacaaggatggtacttacactgtgaaattttatgatggagtagttcagactgtcaaacatattcatgtcaaagctttttccaaagatcagaatattgtgggtaatgctaggcctaaagaaacagatcacaaaagtctttcatcatctcctgataaacgagagaagtttaaagaacagagaaaagcaacagtgaatgtgaagaaagacaaagaagataaacccttaaagacagaaaagcgacccaagcagcctgataaagaaggaaagttaatctgttctgaaaaggggaaagtgtcagagaaaagtcttcccaagaacgagaaggaagacaaggaaaacatttccgaaaatgacagagagtattctggagatgcccaagtggataagaaacctgaaaatgacattgtgaagagtccacaagaaaacttgagggaacccaaaagaaaacgaggcagacccccttccatagctcctactgctgtggattcaaactctcaaactttgcaaccaataacattggaactgagaagaaggaaaatatcaaaaggatgtgaagtcccattaaaacgtcctcggcttgacaaaaattcatcccaggaaaagtcaaaaaactactcggaaaacactgacaaagacttatcgaggagacgttcctccaggctgtccactaatgggacccatgagatcctagatcctgacttggttgtatcagatttggttgatacggatcctttgcaagacacgttgtctagtaccaaggaatctgaagaaggtcagttgaagtctgctttggaagctggccaggtctcatctgcactgacttgccactcctttggggatggatccggggctgcaggcttggagttgaactgcccatcaatgggagaaaacacgatgaaaacagaaccgacttctccccttgtggaattacaagagatttcgactgtggaagtaacaaatacttttaagaaaacagatgattttgggtcatctaatgcaccagctgtcgacctagaccataagtttagatgcaaagttgtggactgtttaaaatttttccgcaaagccaaactgttgcactatcacatgaagtatttccatggaatggagaagtcactggagccagaagagagcccgggaaagaggcatgtccaaaccaggggcccttcagcttcagacaagcccagccaggagaccctgaccaggaagcgggtctctgccagttccccaactacaaaagacaaggaaaagaataaagagaagaaattcaaggagtttgtgagagtgaagccaaagaagaaaaagaaaaagaaaaagaaaaccaaacctgaatgcccctgcagtgaggagatcagtgacacctcccaggaaccttctccacccaaggcatttgctgttaccaggtgtgggtcctcacacaagccaggggtccatatgagcccgcagcttcatggcccagaatctggacaccacaaagggaaagtgaaagcattggaggaggataatttgagtgagtcctcttctgagagctttctctggagtgatgatgagtatggccaagatgtggatgtgaccaccaacccagatgaggaacttgatggggatgaccgctatgacttcgaggtggtccgctgcatctgtgaggtccaggaggaaaatgacttcatgattcagtgtgaagagtgccagtgctggcagcatggggtctgcatgggattactggaagaaaatgtgcccgagaaatacacctgttatgtttgccaagaccctccaggtcagaggcctggcttcaagtactggtatgacaaggagtggctgagcaggggacatatgcatggcctggcatttctagaagagaactactcccatcagaatgccaagaagatcgtggccacccaccagcttcttggtgatgtgcagagagtgattgaggttctgcatggcctgcagctcaagatgagcatcttgcaaagccgggagcatcctgatctgccgctgtggtgccagccttggaaacagcactcaggggaggggagatctcatttcagaaacatccctgtcactgacaccaggagcaaggaggaagctccaagctatagaactttgaacggggcagtggagaagcccaggcccctggccctgcccctgccgcgttctgtggaggaatcctatatcaccagtgagcattgctaccagaagccccgcgcctattaccctgccgtggagcagaagctggtggtggagacgaggggctctgccctcgacgatgcggtcaaccccctccatgagaacggcgatgattccctttccccgcgcctgggctggcctctagaccaagacaggagcaagggggacagtgaccccaaacccggctccccaaaggtgaaggaatatgtctccaaaaaggccctaccagaagaagcccctgctcggaagctgctggacagaggtggagaggggctgctgagctcccagcaccagtggcagtttaacctgctgacccatgtggaatctcttcaggatgaagttacgcacaggatggactccattgagaaggagttggatgtgttggagagctggctggactacactggggaactggagccccctgagccgctggccaggcttccgcagctcaagcattgtatcaagcagctgctgatggacctgggcaaggtgcagcagatcgccctctgctgctcaacatgaaactgggcacccaaaactcatgggggcacaatcctggggcacctgcaggaggagcttcgcatatttaaataaataaacctagcatgctgaatgcacgtgacaccgactgacttcagggatctgggccaggagtgtggtggacattggacaaagaggccattttggctgcgggaggacactctgatctcgaagcctgccataaaggtagcaaatagactcttgggattcccctcttctgtgcacatcgttgaatgaagagagtctttttgcacaaacttcacttgaaattgtgccactgatgataaacggaatgagagccaaaaaagtttagttggagacagttgtaaattcaatttggagtttatttaattgacttttctatcacgttggggcacatgccaactccctggtttcttcctggcatggtgtttgggcagcaggcatcattttccttttctagcttcataggaatattgtgagctcaccatgctgtggaggttgggaaagagcagagtcttggctgccctgctttctccttaggactcttcacttttctcaccacatctcttgcatgacttcatggtactggggacaagtttgtatgccttcaccccagagctggctgggttatggcttttgtagcagagcccatacagcctatggaagaactagaatctcactcacagtaataagaatctaggaggaattccaaaccgaagcaggcagggtctggaacccaaaggacagcattttctacccacttcttaatattgacagcttccccgttctatttaatgtccaaaaatgtttcccaaaatttcaaactctttcactgtaaagatttgttacaaagaatgtggtttggggaattaccttattttatattgttgtaaacaaacttcaaattctacatgtgcgacttttctccttcctgaagggtgtttagtagtcagcgttttcagaattgttttgttactatactttaacattttacatttcctgtttgtattattttgtgagagcaaggtgatcatgctgcttaaggtccaggtacaacctatttgtaccttttgagacaatatttgtgttacttttgcaggttacggttccacatgtaattgctatattttgttttgtttttccttactaggcaaagttaaaatgttccatgctttgaggagtgacccatttcactactttgttttcttatcactaaaggcaaaaatcaaagcacagttgtccattaacacttataagttaattatgggtttatgagtctgtaatgttatatgctgcaaacatttactatgtaaacgtgaagtagccaataatatctcaatagtagtaacagtatctttagcgacctttggaatagttaagcacaggtcattgtggacatgaattcaggcctctgtactaaaatctatttcagggaatgttctgtctagtgatttgctcaccatttgatatataatgaattataggacaagtataagctgatctgctatagctgtccatcagagagaatacacgtggctataacatctataacaaaacgacgattcctctacaagaggctgtttctcactgctaacgttggtgtttctggcgtgggaagaaatgcacaggcgtgcatggcatgcacgttcagacagctgcattgtaagagttctgtcatgcagtctgaaaagggaagaaacaggatggctttctgtagccacacctgtgaggcgtgatgattgttgtattattagattactgatttttcttttctgaaaatacatttgagttttaatcacatctgtggaagctgtaacttttaaggtagtcaatttcatgtcttgttcaacgatgtaagcagaaactgaattgccctaattttgccaactggccattattgggattattgtttaaatttttggtaaaggaagtaatctcctttcattcattgtgacttttgttcttagggaagcagagaagactccccaagttcttataacctcattgtgcttccctaatttaaagccatgttgaggggctccattcccaattcctgggtcaaggtgaattaaccctatgttggagcactggaaaccgttatttgcaaacattgctgttaccatttagaaatatgtgcactatcagctgggtgcagtggctcacgtctgtaatcccagcactttgggaggccgaggcaggtggatcacctgaggtcaggagttcgagaccagcctggccaacagggtgaaaccccgtctctactaaaagtacagaagcaggagaggtgctggaacctgggaggcggaggttgaagtgagccgagattgcgctattgcactccagctcgggcgacaactgcaagactccatctcaaaaaaataaaaataaaagaaaagaaagaaatatgtgcactacctaagttttgtctttagaaaaactatccacctataaaaaattaccttgacaaaaatagttccggtttgactaatcattttgtttctttaagtggtaagtgtatgcaaggtggatccttgatgagccaacattgcactgtggatacatatctatgtttacgcgctattagaacagaaggcgctgtatatagaaatgttgctttgaagcaatatttgcaaaacacgcagacttctgtatctgtatttggaaaaaataaaacaggttcttgttgctatgtttcagttacgta

SEQ ID NO: 81090 - DNA, 4410 bp, Homo sapiens
gggcggggcatacgctgggcgcgtcccgggggtcacgtggtgcagagcacgcagagtccttctgtcggttggtcctggagcggcgcagccggagtggggccgtgaggagaataaaggcagccccgttgatgactgaaaatgacaaagcatccacctaacagacgaggaatcagctttgaagtgggagcccagttggaagcccgggaccgtttaaaaaactggtatccagctcacatagaagacattgactacgaggaaggaaaagtactcatccatttcaagcgttggaaccatcgttatgatgagtggttctgctgggacagtccttatttacgccctttagagaaaatacagctgaggaaagagggcttgcatgaagaggatggatcttctgaatttcaaataaatgagcaggtccttgcttgctggtctgattgtcgtttttacccggccaaagtcactgctgttaacaaggatggtacttacactgtgaaattttatgatggagtagttcagactgtcaaacatattcatgtcaaagctttttccaaagatcagaatattgtgggtaatgctaggcctaaagaaacagatcacaaaagtctttcatcatctcctgataaacgagagaagtttaaagaacagagaaaagcaacagtgaatgtgaagaaagacaaagaagataaacccttaaagacagaaaagcgacccaagcagcctgataaagaaggaaagttaatctgttctgaaaaggggaaagtgtcagagaaaagtcttcccaagaacgagaaggaagacaaggaaaacatttccgaaaatgacagagagtattctggagatgcccaagtggataagaaacctgaaaatgacattgtgaagagtccacaagaaaacttgagggaacccaaaagaaaacgaggcagacccccttccatagctcctactgctgtggattcaaactctcaaactttgcaaccaataacattggaactgagaagaaggaaaatatcaaaaggatgtgaagtcccattaaaacgtcctcggcttgacaaaaattcatcccaggaaaagtcaaaaaactactcggaaaacactgacaaagacttatcgaggagacgttcctccaggctgtccactaatgggacccatgagatcctagatcctgacttggttgtatcagatttggttgatacggatcctttgcaagacacgttgtctagtaccaaggaatctgaagaaggtcagttgaagtctgctttggaagctggccaggtctcatctgcactgacttgccactcctttggggatggatccggggctgcaggcttggagttgaactgcccatcaatgggagaaaacacgatgaaaacagaaccgacttctccccttgtggaattacaagagatttcgactgtggaagtaacaaatacttttaagaaaacagatgattttgggtcatctaatgcaccagctgtcgacctagaccataagtttagatgcaaagttgtggactgtttaaaatttttccgcaaagccaaactgttgcactatcacatgaagtatttccatggaatggagaagtcactggagccagaagagagcccgggaaagaggcatgtccaaaccaggggcccttcagcttcagacaagcccagccaggagaccctgaccaggaagcgggtctctgccagttccccaactacaaaagacaaggaaaagaataaagagaagaaattcaaggagtttgtgagagtgaagccaaagaagaaaaagaaaaagaaaaagaaaaccaaacctgaatgcccctgcagtgaggagatcagtgacacctcccaggaaccttctccacccaaggcatttgctgttaccaggtgtgggtcctcacacaagccaggggtccatatgagcccgcagcttcatggcccagaatctggacaccacaaagggaaagtgaaagcattggaggaggataatttgagtgagtcctcttctgagagctttctctggagtgatgatgagtatggccaagatgtggatgtgaccaccaacccagatgaggaacttgatggggatgaccgctatgacttcgaggtggtccgctgcatctgtgaggtccaggaggaaaatgacttcatgattcagtgtgaagagtgccagtgctggcagcatggggtctgcatgggattactggaagaaaatgtgcccgagaaatacacctgttatgtttgccaagaccctccaggtcagaggcctggcttcaagtactggtatgacaaggagtggctgagcaggggacatatgcatggcctggcatttctagaagagaactactcccatcagaatgccaagaagatcgtggccacccaccagcttcttggtgatgtgcagagagtgattgaggttctgcatggcctgcagctcaagatgagcatcttgcaaagccgggagcatcctgatctgccgctgtggtgccagccttggaaacagcactcaggggaggggagatctcatttcagaaacatccctgtcactgacaccaggagcaaggaggaagctccaagctatagaactttgaacggggcagtggagaagcccaggcccctggccctgcccctgccgcgttctgtggaggaatcctatatcaccagtgagcattgctaccagaagccccgcgcctattaccctgccgtggagcagaagctggtggtggagacgaggggctctgccctcgacgatgcggtcaaccccctccatgagaacggcgatgattccctttccccgcgcctgggctggcctctagaccaagacaggagcaagggggacagtgaccccaaacccggctccccaaaggtgaaggaatatgtctccaaaaaggccctaccagaagaagcccctgctcggaagctgctggacagaggtggagaggggctgctgagctcccagcaccagtggcagtttaacctgctgacccatgtggaatctcttcaggatgaagttacgcacaggatggactccattgagaaggagttggatgtgttggagagctggctggactacactggggaactggagccccctgagccgctggccaggcttccgcagctcaagcattgtatcaagcagctgctgatggacctgggcaaggtgcagcagatcgccctctgctgctcaacatgaaactgggcacccaaaactcatgggggcacaatcctggggcacctgcaggaggagcttcgcatatttaaataaataaacctagcatgctgaatgcacgtgacaccgactgacttcagggatctgggccaggagtgtggtggacattggacaaagaggccattttggctgcgggaggacactctgatctcgaagcctgccataaaggtagcaaatagactcttgggattcccctcttctgtgcacatcgttgaatgaagagagtctttttgcacaaacttcacttgaaattgtgccactgatgataaacggaatgagagccaaaaaagtttagttggagacagttgtaaattcaatttggagtttatttaattgacttttctatcacgttggggcacatgccaactccctggtttcttcctggcatggtgtttgggcagcaggcatcattttccttttctagcttcataggaatattgtgagctcaccatgctgtggaggttgggaaagagcagagtcttggctgccctgctttctccttaggactcttcacttttctcaccacatctcttgcatgacttcatggtactggggacaagtttgtatgccttcaccccagagctggctgggttatggcttttgtagcagagcccatacagcctatggaagaactagaatctcactcacagtaataagaatctaggaggaattccaaaccgaagcaggcagggtctggaacccaaaggacagcattttctacccacttcttaatattgacagcttccccgttctatttaatgtccaaaaatgtttcccaaaatttcaaactctttcactgtaaagatttgttacaaagaatgtggtttggggaattaccttattttatattgttgtaaacaaacttcaaattctacatgtgcgacttttctccttcctgaagggtgtttagtagtcagcgttttcagaattgttttgttactatactttaacattttacatttcctgtttgtattattttgtgagagcaaggtgatcatgctgcttaaggtccaggtacaacctatttgtaccttttgagacaatatttgtgttacttttgcaggttacggttccacatgtaattgctatattttgttttgtttttccttactaggcaaagttaaaatgttccatgctttgaggagtgacccatttcactactttgttttcttatcactaaaggcaaaaatcaaagca

SEQ ID NO: 81091 - DNA, 5855 bp, Homo sapiens
gggcggggcatacgctgggcgcgtcccgggggtcacgtggtgcagagcacgcagagtccttctgtcggttggtcctggagcggcgcagccggagtggggccgtgaggagaataaaggcagccccgttgatgactgaaaatgacaaagcatccacctaacagacgaggaatcagctttgaagtgggagcccagttggaagcccgggaccgtttaaaaaactggtatccagctcacatagaagacattgactacgaggaaggaaaagtactcatccatttcaagcgttggaaccatcgttatgatgagtggttctgctgggacagtccttatttacgccctttagagaaaatacagctgaggaaagagggcttgcatgaagaggatggatcttctgaatttcaaataaatgagcaggtccttgcttgctggtctgattgtcgtttttacccggccaaagtcactgctgttaacaaggatgaatattgtgggtaatgctaggcctaaagaaacagatcacaaaagtctttcatcatctcctgataaacgagagaagtttaaagaacagagaaaagcaacagtgaatgtgaagaaagacaaagaagataaacccttaaagacagaaaagcgacccaagcagcctgataaagaaggaaagttaatctgttctgaaaaggggaaagtgtcagagaaaagtcttcccaagaacgagaaggaagacaaggaaaacatttccgaaaatgacagagagtattctggagatgcccaagtggataagaaacctgaaaatgacattgtgaagagtccacaagaaaacttgagggaacccaaaagaaaacgaggcagacccccttccatagctcctactgctgtggattcaaactctcaaactttgcaaccaataacattggaactgagaagaaggaaaatatcaaaaggatgtgaagtcccattaaaacgtcctcggcttgacaaaaattcatcccaggaaaagtcaaaaaactactcggaaaacactgacaaagacttatcgaggagacgttcctccaggctgtccactaatgggacccatgagatcctagatcctgacttggttgtatcagatttggttgatacggatcctttgcaagacacgttgtctagtaccaaggaatctgaagaaggtcagttgaagtctgctttggaagctggccaggtctcatctgcactgacttgccactcctttggggatggatccggggctgcaggcttggagttgaactgcccatcaatgggagaaaacacgatgaaaacagaaccgacttctccccttgtggaattacaagagatttcgactgtggaagtaacaaatacttttaagaaaacagatgattttgggtcatctaatgcaccagctgtcgacctagaccataagtttagatgcaaagttgtggactgtttaaaatttttccgcaaagccaaactgttgcactatcacatgaagtatttccatggaatggagaagtcactggagccagaagagagcccgggaaagaggcatgtccaaaccaggggcccttcagcttcagacaagcccagccaggagaccctgaccaggaagcgggtctctgccagttccccaactacaaaagacaaggaaaagaataaagagaagaaattcaaggagtttgtgagagtgaagccaaagaagaaaaagaaaaagaaaaagaaaaccaaacctgaatgcccctgcagtgaggagatcagtgacacctcccaggaaccttctccacccaaggcatttgctgttaccaggtgtgggtcctcacacaagccaggggtccatatgagcccgcagcttcatggcccagaatctggacaccacaaagggaaagtgaaagcattggaggaggataatttgagtgagtcctcttctgagagctttctctggagtgatgatgagtatggccaagatgtggatgtgaccaccaacccagatgaggaacttgatggggatgaccgctatgacttcgaggtggtccgctgcatctgtgaggtccaggaggaaaatgacttcatgattcagtgtgaagagtgccagtgctggcagcatggggtctgcatgggattactggaagaaaatgtgcccgagaaatacacctgttatgtttgccaagaccctccaggtcagaggcctggcttcaagtactggtatgacaaggagtggctgagcaggggacatatgcatggcctggcatttctagaagagaactactcccatcagaatgccaagaagatcgtggccacccaccagcttcttggtgatgtgcagagagtgattgaggttctgcatggcctgcagctcaagatgagcatcttgcaaagccgggagcatcctgatctgccgctgtggtgccagccttggaaacagcactcaggggaggggagatctcatttcagaaacatccctgtcactgacaccaggagcaaggaggaagctccaagctatagaactttgaacggggcagtggagaagcccaggcccctggccctgcccctgccgcgttctgtggaggaatcctatatcaccagtgagcattgctaccagaagccccgcgcctattaccctgccgtggagcagaagctggtggtggagacgaggggctctgccctcgacgatgcggtcaaccccctccatgagaacggcgatgattccctttccccgcgcctgggctggcctctagaccaagacaggagcaagggggacagtgaccccaaacccggctccccaaaggtgaaggaatatgtctccaaaaaggccctaccagaagaagcccctgctcggaagctgctggacagaggtggagaggggctgctgagctcccagcaccagtggcagtttaacctgctgacccatgtggaatctcttcaggatgaagttacgcacaggatggactccattgagaaggagttggatgtgttggagagctggctggactacactggggaactggagccccctgagccgctggccaggcttccgcagctcaagcattgtatcaagcagctgctgatggacctgggcaaggtgcagcagatcgccctctgctgctcaacatgaaactgggcacccaaaactcatgggggcacaatcctggggcacctgcaggaggagcttcgcatatttaaataaataaacctagcatgctgaatgcacgtgacaccgactgacttcagggatctgggccaggagtgtggtggacattggacaaagaggccattttggctgcgggaggacactctgatctcgaagcctgccataaaggtagcaaatagactcttgggattcccctcttctgtgcacatcgttgaatgaagagagtctttttgcacaaacttcacttgaaattgtgccactgatgataaacggaatgagagccaaaaaagtttagttggagacagttgtaaattcaatttggagtttatttaattgacttttctatcacgttggggcacatgccaactccctggtttcttcctggcatggtgtttgggcagcaggcatcattttccttttctagcttcataggaatattgtgagctcaccatgctgtggaggttgggaaagagcagagtcttggctgccctgctttctccttaggactcttcacttttctcaccacatctcttgcatgacttcatggtactggggacaagtttgtatgccttcaccccagagctggctgggttatggcttttgtagcagagcccatacagcctatggaagaactagaatctcactcacagtaataagaatctaggaggaattccaaaccgaagcaggcagggtctggaacccaaaggacagcattttctacccacttcttaatattgacagcttccccgttctatttaatgtccaaaaatgtttcccaaaatttcaaactctttcactgtaaagatttgttacaaagaatgtggtttggggaattaccttattttatattgttgtaaacaaacttcaaattctacatgtgcgacttttctccttcctgaagggtgtttagtagtcagcgttttcagaattgttttgttactatactttaacattttacatttcctgtttgtattattttgtgagagcaaggtgatcatgctgcttaaggtccaggtacaacctatttgtaccttttgagacaatatttgtgttacttttgcaggttacggttccacatgtaattgctatattttgttttgtttttccttactaggcaaagttaaaatgttccatgctttgaggagtgacccatttcactactttgttttcttatcactaaaggcaaaaatcaaagcacagttgtccattaacacttataagttaattatgggtttatgagtctgtaatgttatatgctgcaaacatttactatgtaaacgtgaagtagccaataatatctcaatagtagtaacagtatctttagcgacctttggaatagttaagcacaggtcattgtggacatgaattcaggcctctgtactaaaatctatttcagggaatgttctgtctagtgatttgctcaccatttgatatataatgaattataggacaagtataagctgatctgctatagctgtccatcagagagaatacacgtggctataacatctataacaaaacgacgattcctctacaagaggctgtttctcactgctaacgttggtgtttctggcgtgggaagaaatgcacaggcgtgcatggcatgcacgttcagacagctgcattgtaagagttctgtcatgcagtctgaaaagggaagaaacaggatggctttctgtagccacacctgtgaggcgtgatgattgttgtattattagattactgatttttcttttctgaaaatacatttgagttttaatcacatctgtggaagctgtaacttttaaggtagtcaatttcatgtcttgttcaacgatgtaagcagaaactgaattgccctaattttgccaactggccattattgggattattgtttaaatttttggtaaaggaagtaatctcctttcattcattgtgacttttgttcttagggaagcagagaagactccccaagttcttataacctcattgtgcttccctaatttaaagccatgttgaggggctccattcccaattcctgggtcaaggtgaattaaccctatgttggagcactggaaaccgttatttgcaaacattgctgttaccatttagaaatatgtgcactatcagctgggtgcagtggctcacgtctgtaatcccagcactttgggaggccgaggcaggtggatcacctgaggtcaggagttcgagaccagcctggccaacagggtgaaaccccgtctctactaaaagtacaaaaattagctgggcgtggtggcggacgcctgtaatctcagctacttgggaggctgaagcaggagaggtgctggaacctgggaggcggaggttgaagtgagccgagattgcgctattgcactccagctcgggcgacaactgcaagactccatctcaaaaaaataaaaataaaagaaaagaaagaaatatgtgcactacctaagttttgtctttagaaaaactatccacctataaaaaattaccttgacaaaaatagttccggtttgactaatcattttgtttctttaagtggtaagtgtatgcaaggtggatccttgatgagccaacattgcactgtggatacatatctatgtttacgcgctattagaacagaaggcgctgtatatagaaatgttgctttgaagcaatatttgcaaaacacgcagacttctgtatctgtatttggaaaaaataaaacaggttcttgttgctatgtttcagttacgta

SEQ ID NO: 81092 - DNA, 6032 bp, Homo sapiens
gggcggggcatacgctgggcgcgtcccgggggtcacgtggtgcagagcacgcagagtccttctgtcggttggtcctggagcggcgcagccggagtggggccgtgaggagaataaaggcagccccgttgatgactgaaaatgacaaagcatccacctaacagacgaggaatcagctttgaagtgggagcccagttggaagcccgggaccgtttaaaaaactgagtgtttcagtggtaatgccgtgtgtttcatattgcatcacatcgggggacacataaagctaggtcgtcccactgttccgtgtatcacttggataaggtatccagctcacatagaagacattgactacgaggaaggaaaagtactcatccatttcaagcgttggaaccatcgttatgatgagtggttctgctgggacagtccttatttacgccctttagagaaaatacagctgaggaaagagggcttgcatgaagaggatggatcttctgaatttcaaataaatgagcaggtccttgcttgctggtctgattgtcgtttttacccggccaaagtcactgctgttaacaaggatggtacttacactgtgaaattttatgatggagtagttcagactgtcaaacatattcatgtcaaagctttttccaaagatcagaatattgtgggtaatgctaggcctaaagaaacagatcacaaaagtctttcatcatctcctgataaacgagagaagtttaaagaacagagaaaagcaacagtgaatgtgaagaaagacaaagaagataaacccttaaagacagaaaagcgacccaagcagcctgataaagaaggaaagttaatctgttctgaaaaggggaaagtgtcagagaaaagtcttcccaagaacgagaaggaagacaaggaaaacatttccgaaaatgacagagagtattctggagatgcccaagtggataagaaacctgaaaatgacattgtgaagagtccacaagaaaacttgagggaacccaaaagaaaacgaggcagacccccttccatagctcctactgctgtggattcaaactctcaaactttgcaaccaataacattggaactgagaagaaggaaaatatcaaaaggatgtgaagtcccattaaaacgtcctcggcttgacaaaaattcatcccaggaaaagtcaaaaaactactcggaaaacactgacaaagacttatcgaggagacgttcctccaggctgtccactaatgggacccatgagatcctagatcctgacttggttgtatcagatttggttgatacggatcctttgcaagacacgttgtctagtaccaaggaatctgaagaaggtcagttgaagtctgctttggaagctggccaggtctcatctgcactgacttgccactcctttggggatggatccggggctgcaggcttggagttgaactgcccatcaatgggagaaaacacgatgaaaacagaaccgacttctccccttgtggaattacaagagatttcgactgtggaagtaacaaatacttttaagaaaacagatgattttgggtcatctaatgcaccagctgtcgacctagaccataagtttagatgcaaagttgtggactgtttaaaatttttccgcaaagccaaactgttgcactatcacatgaagtatttccatggaatggagaagtcactggagccagaagagagcccgggaaagaggcatgtccaaaccaggggcccttcagcttcagacaagcccagccaggagaccctgaccaggaagcgggtctctgccagttccccaactacaaaagacaaggaaaagaataaagagaagaaattcaaggagtttgtgagagtgaagccaaagaagaaaaagaaaaagaaaaagaaaaccaaacctgaatgcccctgcagtgaggagatcagtgacacctcccaggaaccttctccacccaaggcatttgctgttaccaggtgtgggtcctcacacaagccaggggtccatatgagcccgcagcttcatggcccagaatctggacaccacaaagggaaagtgaaagcattggaggaggataatttgagtgagtcctcttctgagagctttctctggagtgatgatgagtatggccaagatgtggatgtgaccaccaacccagatgaggaacttgatggggatgaccgctatgacttcgaggtggtccgctgcatctgtgaggtccaggaggaaaatgacttcatgattcagtgtgaagagtgccagtgctggcagcatggggtctgcatgggattactggaagaaaatgtgcccgagaaatacacctgttatgtttgccaagaccctccaggtcagaggcctggcttcaagtactggtatgacaaggagtggctgagcaggggacatatgcatggcctggcatttctagaagagaactactcccatcagaatgccaagaagatcgtggccacccaccagcttcttggtgatgtgcagagagtgattgaggttctgcatggcctgcagctcaagatgagcatcttgcaaagccgggagcatcctgatctgccgctgtggtgccagccttggaaacagcactcaggggaggggagatctcatttcagaaacatccctgtcactgacaccaggagcaaggaggaagctccaagctatagaactttgaacggggcagtggagaagcccaggcccctggccctgcccctgccgcgttctgtggaggaatcctatatcaccagtgagcattgctaccagaagccccgcgcctattaccctgccgtggagcagaagctggtggtggagacgaggggctctgccctcgacgatgcggtcaaccccctccatgagaacggcgatgattccctttccccgcgcctgggctggcctctagaccaagacaggagcaagggggacagtgaccccaaacccggctccccaaaggtgaaggaatatgtctccaaaaaggccctaccagaagaagcccctgctcggaagctgctggacagaggtggagaggggctgctgagctcccagcaccagtggcagtttaacctgctgacccatgtggaatctcttcaggatgaagttacgcacaggatggactccattgagaaggagttggatgtgttggagagctggctggactacactggggaactggagccccctgagccgctggccaggcttccgcagctcaagcattgtatcaagcagctgctgatggacctgggcaaggtgcagcagatcgccctctgctgctcaacatgaaactgggcacccaaaactcatgggggcacaatcctggggcacctgcaggaggagcttcgcatatttaaataaataaacctagcatgctgaatgcacgtgacaccgactgacttcagggatctgggccaggagtgtggtggacattggacaaagaggccattttggctgcgggaggacactctgatctcgaagcctgccataaaggtagcaaatagactcttgggattcccctcttctgtgcacatcgttgaatgaagagagtctttttgcacaaacttcacttgaaattgtgccactgatgataaacggaatgagagccaaaaaagtttagttggagacagttgtaaattcaatttggagtttatttaattgacttttctatcacgttggggcacatgccaactccctggtttcttcctggcatggtgtttgggcagcaggcatcattttccttttctagcttcataggaatattgtgagctcaccatgctgtggaggttgggaaagagcagagtcttggctgccctgctttctccttaggactcttcacttttctcaccacatctcttgcatgacttcatggtactggggacaagtttgtatgccttcaccccagagctggctgggttatggcttttgtagcagagcccatacagcctatggaagaactagaatctcactcacagtaataagaatctaggaggaattccaaaccgaagcaggcagggtctggaacccaaaggacagcattttctacccacttcttaatattgacagcttccccgttctatttaatgtccaaaaatgtttcccaaaatttcaaactctttcactgtaaagatttgttacaaagaatgtggtttggggaattaccttattttatattgttgtaaacaaacttcaaattctacatgtgcgacttttctccttcctgaagggtgtttagtagtcagcgttttcagaattgttttgttactatactttaacattttacatttcctgtttgtattattttgtgagagcaaggtgatcatgctgcttaaggtccaggtacaacctatttgtaccttttgagacaatatttgtgttacttttgcaggttacggttccacatgtaattgctatattttgttttgtttttccttactaggcaaagttaaaatgttccatgctttgaggagtgacccatttcactactttgttttcttatcactaaaggcaaaaatcaaagcacagttgtccattaacacttataagttaattatgggtttatgagtctgtaatgttatatgctgcaaacatttactatgtaaacgtgaagtagccaataatatctcaatagtagtaacagtatctttagcgacctttggaatagttaagcacaggtcattgtggacatgaattcaggcctctgtactaaaatctatttcagggaatgttctgtctagtgatttgctcaccatttgatatataatgaattataggacaagtataagctgatctgctatagctgtccatcagagagaatacacgtggctataacatctataacaaaacgacgattcctctacaagaggctgtttctcactgctaacgttggtgtttctggcgtgggaagaaatgcacaggcgtgcatggcatgcacgttcagacagctgcattgtaagagttctgtcatgcagtctgaaaagggaagaaacaggatggctttctgtagccacacctgtgaggcgtgatgattgttgtattattagattactgatttttcttttctgaaaatacatttgagttttaatcacatctgtggaagctgtaacttttaaggtagtcaatttcatgtcttgttcaacgatgtaagcagaaactgaattgccctaattttgccaactggccattattgggattattgtttaaatttttggtaaaggaagtaatctcctttcattcattgtgacttttgttcttagggaagcagagaagactccccaagttcttataacctcattgtgcttccctaatttaaagccatgttgaggggctccattcccaattcctgggtcaaggtgaattaaccctatgttggagcactggaaaccgttatttgcaaacattgctgttaccatttagaaatatgtgcactatcagctgggtgcagtggctcacgtctgtaatcccagcactttgggaggccgaggcaggtggatcacctgaggtcaggagttcgagaccagcctggccaacagggtgaaaccccgtctctactaaaagtacaaaaattagctgggcgtggtggcggacgcctgtaatctcagctacttgggaggctgaagcaggagaggtgctggaacctgggaggcggaggttgaagtgagccgagattgcgctattgcactccagctcgggcgacaactgcaagactccatctcaaaaaaataaaaataaaagaaaagaaagaaatatgtgcactacctaagttttgtctttagaaaaactatccacctataaaaaattaccttgacaaaaatagttccggtttgactaatcattttgtttctttaagtggtaagtgtatgcaaggtggatccttgatgagccaacattgcactgtggatacatatctatgtttacgcgctattagaacagaaggcgctgtatatagaaatgttgctttgaagcaatatttgcaaaacacgcagacttctgtatctgtatttggaaaaaataaaacaggttcttgttgctatgtttcagttacgta

SEQ ID NO: 81093 - DNA, 5632 bp, Homo sapiens
cagaatcacctggaggagttgttaaaaatgcacattcctgtgccctgttcccagttgctgtttcagtgtatctgaggtgggactggtaacttgcatttctaatgagttcccaggagttgctcatgctgctgctgtgggaccacactttgagaagcactggtttactctgaggcaggtacttacactgtgaaattttatgatggagtagttcagactgtcaaacatattcatgtcaaagctttttccaaagatcagaatattgtgggtaatgctaggcctaaagaaacagatcacaaaagtctttcatcatctcctgataaacgagagaagtttaaagaacagagaaaagcaacagtgaatgtgaagaaagacaaagaagataaacccttaaagacagaaaagcgacccaagcagcctgataaagaaggaaagttaatctgttctgaaaaggggaaagtgtcagagaaaagtcttcccaagaacgagaaggaagacaaggaaaacatttccgaaaatgacagagagtattctggagatgcccaagtggataagaaacctgaaaatgacattgtgaagagtccacaagaaaacttgagggaacccaaaagaaaacgaggcagacccccttccatagctcctactgctgtggattcaaactctcaaactttgcaaccaataacattggaactgagaagaaggaaaatatcaaaaggatgtgaagtcccattaaaacgtcctcggcttgacaaaaattcatcccaggaaaagtcaaaaaactactcggaaaacactgacaaagacttatcgaggagacgttcctccaggctgtccactaatgggacccatgagatcctagatcctgacttggttgtatcagatttggttgatacggatcctttgcaagacacgttgtctagtaccaaggaatctgaagaaggtcagttgaagtctgctttggaagctggccaggtctcatctgcactgacttgccactcctttggggatggatccggggctgcaggcttggagttgaactgcccatcaatgggagaaaacacgatgaaaacagaaccgacttctccccttgtggaattacaagagatttcgactgtggaagtaacaaatacttttaagaaaacagatgattttgggtcatctaatgcaccagctgtcgacctagaccataagtttagatgcaaagttgtggactgtttaaaatttttccgcaaagccaaactgttgcactatcacatgaagtatttccatggaatggagaagtcactggagccagaagagagcccgggaaagaggcatgtccaaaccaggggcccttcagcttcagacaagcccagccaggagaccctgaccaggaagcgggtctctgccagttccccaactacaaaagacaaggaaaagaataaagagaagaaattcaaggagtttgtgagagtgaagccaaagaagaaaaagaaaaagaaaaagaaaaccaaacctgaatgcccctgcagtgaggagatcagtgacacctcccaggaaccttctccacccaaggcatttgctgttaccaggtgtgggtcctcacacaagccaggggtccatatgagcccgcagcttcatggcccagaatctggacaccacaaagggaaagtgaaagcattggaggaggataatttgagtgagtcctcttctgagagctttctctggagtgatgatgagtatggccaagatgtggatgtgaccaccaacccagatgaggaacttgatggggatgaccgctatgacttcgaggtggtccgctgcatctgtgaggtccaggaggaaaatgacttcatgattcagtgtgaagagtgccagtgctggcagcatggggtctgcatgggattactggaagaaaatgtgcccgagaaatacacctgttatgtttgccaagaccctccaggtcagaggcctggcttcaagtactggtatgacaaggagtggctgagcaggggacatatgcatggcctggcatttctagaagagaactactcccatcagaatgccaagaagatcgtggccacccaccagcttcttggtgatgtgcagagagtgattgaggttctgcatggcctgcagctcaagatgagcatcttgcaaagccgggagcatcctgatctgccgctgtggtgccagccttggaaacagcactcaggggaggggagatctcatttcagaaacatccctgtcactgacaccaggagcaaggaggaagctccaagctatagaactttgaacggggcagtggagaagcccaggcccctggccctgcccctgccgcgttctgtggaggaatcctatatcaccagtgagcattgctaccagaagccccgcgcctattaccctgccgtggagcagaagctggtggtggagacgaggggctctgccctcgacgatgcggtcaaccccctccatgagaacggcgatgattccctttccccgcgcctgggctggcctctagaccaagacaggagcaagggggacagtgaccccaaacccggctccccaaaggtgaaggaatatgtctccaaaaaggccctaccagaagaagcccctgctcggaagctgctggacagaggtggagaggggctgctgagctcccagcaccagtggcagtttaacctgctgacccatgtggaatctcttcaggatgaagttacgcacaggatggactccattgagaaggagttggatgtgttggagagctggctggactacactggggaactggagccccctgagccgctggccaggcttccgcagctcaagcattgtatcaagcagctgctgatggacctgggcaaggtgcagcagatcgccctctgctgctcaacatgaaactgggcacccaaaactcatgggggcacaatcctggggcacctgcaggaggagcttcgcatatttaaataaataaacctagcatgctgaatgcacgtgacaccgactgacttcagggatctgggccaggagtgtggtggacattggacaaagaggccattttggctgcgggaggacactctgatctcgaagcctgccataaaggtagcaaatagactcttgggattcccctcttctgtgcacatcgttgaatgaagagagtctttttgcacaaacttcacttgaaattgtgccactgatgataaacggaatgagagccaaaaaagtttagttggagacagttgtaaattcaatttggagtttatttaattgacttttctatcacgttggggcacatgccaactccctggtttcttcctggcatggtgtttgggcagcaggcatcattttccttttctagcttcataggaatattgtgagctcaccatgctgtggaggttgggaaagagcagagtcttggctgccctgctttctccttaggactcttcacttttctcaccacatctcttgcatgacttcatggtactggggacaagtttgtatgccttcaccccagagctggctgggttatggcttttgtagcagagcccatacagcctatggaagaactagaatctcactcacagtaataagaatctaggaggaattccaaaccgaagcaggcagggtctggaacccaaaggacagcattttctacccacttcttaatattgacagcttccccgttctatttaatgtccaaaaatgtttcccaaaatttcaaactctttcactgtaaagatttgttacaaagaatgtggtttggggaattaccttattttatattgttgtaaacaaacttcaaattctacatgtgcgacttttctccttcctgaagggtgtttagtagtcagcgttttcagaattgttttgttactatactttaacattttacatttcctgtttgtattattttgtgagagcaaggtgatcatgctgcttaaggtccaggtacaacctatttgtaccttttgagacaatatttgtgttacttttgcaggttacggttccacatgtaattgctatattttgttttgtttttccttactaggcaaagttaaaatgttccatgctttgaggagtgacccatttcactactttgttttcttatcactaaaggcaaaaatcaaagcacagttgtccattaacacttataagttaattatgggtttatgagtctgtaatgttatatgctgcaaacatttactatgtaaacgtgaagtagccaataatatctcaatagtagtaacagtatctttagcgacctttggaatagttaagcacaggtcattgtggacatgaattcaggcctctgtactaaaatctatttcagggaatgttctgtctagtgatttgctcaccatttgatatataatgaattataggacaagtataagctgatctgctatagctgtccatcagagagaatacacgtggctataacatctataacaaaacgacgattcctctacaagaggctgtttctcactgctaacgttggtgtttctggcgtgggaagaaatgcacaggcgtgcatggcatgcacgttcagacagctgcattgtaagagttctgtcatgcagtctgaaaagggaagaaacaggatggctttctgtagccacacctgtgaggcgtgatgattgttgtattattagattactgatttttcttttctgaaaatacatttgagttttaatcacatctgtggaagctgtaacttttaaggtagtcaatttcatgtcttgttcaacgatgtaagcagaaactgaattgccctaattttgccaactggccattattgggattattgtttaaatttttggtaaaggaagtaatctcctttcattcattgtgacttttgttcttagggaagcagagaagactccccaagttcttataacctcattgtgcttccctaatttaaagccatgttgaggggctccattcccaattcctgggtcaaggtgaattaaccctatgttggagcactggaaaccgttatttgcaaacattgctgttaccatttagaaatatgtgcactatcagctgggtgcagtggctcacgtctgtaatcccagcactttgggaggccgaggcaggtggatcacctgaggtcaggagttcgagaccagcctggccaacagggtgaaaccccgtctctactaaaagtacaaaaattagctgggcgtggtggcggacgcctgtaatctcagctacttgggaggctgaagcaggagaggtgctggaacctgggaggcggaggttgaagtgagccgagattgcgctattgcactccagctcgggcgacaactgcaagactccatctcaaaaaaataaaaataaaagaaaagaaagaaatatgtgcactacctaagttttgtctttagaaaaactatccacctataaaaaattaccttgacaaaaatagttccggtttgactaatcattttgtttctttaagtggtaagtgtatgcaaggtggatccttgatgagccaacattgcactgtggatacatatctatgtttacgcgctattagaacagaaggcgctgtatatagaaatgttgctttgaagcaatatttgcaaaacacgcagacttctgtatctgtatttggaaaaaataaaacaggttcttgttgctatgtttcagttacgta

SEQ ID NO: 81094 - DNA, 5236 bp, Homo sapiens
  misc_feature (302)..(302): n is a, c, g, or t
cctctcgaaccttactagcagcagaacgatgaggacgctgcggagcacccggagagataagctagacacgatgagatcgtgaacgtagttgacctaagaagatcctgccttttgagtcaggtagctatgcgatcctacaccaaattgataacgcaccgaaggttaaatccgtagtctgcttgagaagcgggatcgcgtgattcggagtatctagatcgttccttaactaggcatacaatcgaacagcgaggtcacaacctgtatgcctgcagaatatgcacagtatgaacgtcactcctggnatgatgcccaagtggataagaaacctgaaaatgacattgtgaagagtccacaagaaaacttgagggaacccaaaagaaaacgaggcagacccccttccatagctcctactgctgtggattcaaactctcaaactttgcaaccaataacattggaactgagaagaaggaaaatatcaaaaggatgtgaagtcccattaaaacgtcctcggcttgacaaaaattcatcccaggaaaagtcaaaaaactactcggaaaacactgacaaagacttatcgaggagacgttcctccaggctgtccactaatgggacccatgagatcctagatcctgacttggttgtatcagatttggttgatacggatcctttgcaagacacgttgtctagtaccaaggaatctgaagaaggtcagttgaagtctgctttggaagctggccaggtctcatctgcactgacttgccactcctttggggatggatccggggctgcaggcttggagttgaactgcccatcaatttaaaatttttccgcaaagccaaactgttgcactatcacatgaagtatttccatggaatggagaagtcactggagccagaagagagcccgggaaagaggcatgtccaaaccaggggcccttcagcttcagacaagcccagccaggagaccctgaccaggaagcgggtctctgccagttccccaactacaaaagacaaggaaaagaataaagagaagaaattcaaggagtttgtgagagtgaagccaaagaagaaaaagaaaaagaaaaagaaaaccaaacctgaatgcccctgcagtgaggagatcagtgacacctcccaggaaccttctccacccaaggcatttgctgttaccaggtgtgggtcctcacacaagccaggggtccatatgagcccgcagcttcatggcccagaatctggacaccacaaagggaaagtgaaagcattggaggaggataatttgagtgagtcctcttctgagagctttctctggagtgatgatgagtatggccaagatgtggatgtgaccaccaacccagatgaggaacttgatggggatgaccgctatgacttcgaggtggtccgctgcatctgtgaggtccaggaggaaaatgacttcatgattcagtgtgaagagtgccagtgctggcagcatggggtctgcatgggattactggaagaaaatgtgcccgagaaatacacctgttatgtttgccaagaccctccaggtcagaggcctggcttcaagtactggtatgacaaggagtggctgagcaggggacatatgcatggcctggcatttctagaagagaactactcccatcagaatgccaagaagatcgtggccacccaccagcttcttggtgatgtgcagagagtgattgaggttctgcatggcctgcagctcaagatgagcatcttgcaaagccgggagcatcctgatctgccgctgtggtgccagccttggaaacagcactcaggggaggggagatctcatttcagaaacatccctgtcactgacaccaggagcaaggaggaagctccaagctatagaactttgaacggggcagtggagaagcccaggcccctggccctgcccctgccgcgttctgtggaggaatcctatatcaccagtgagcattgctaccagaagccccgcgcctattaccctgccgtggagcagaagctggtggtggagacgaggggctctgccctcgacgatgcggtcaaccccctccatgagaacggcgatgattccctttccccgcgcctgggctggcctctagaccaagacaggagcaagggggacagtgaccccaaacccggctccccaaaggtgaaggaatatgtctccaaaaaggccctaccagaagaagcccctgctcggaagctgctggacagaggtggagaggggctgctgagctcccagcaccagtggcagtttaacctgctgacccatgtggaatctcttcaggatgaagttacgcacaggatggactccattgagaaggagttggatgtgttggagagctggctggactacactggggaactggagccccctgagccgctggccaggcttccgcagctcaagcattgtatcaagcagctgctgatggacctgggcaaggtgcagcagatcgccctctgctgctcaacatgaaactgggcacccaaaactcatgggggcacaatcctggggcacctgcaggaggagcttcgcatatttaaataaataaacctagcatgctgaatgcacgtgacaccgactgacttcagggatctgggccaggagtgtggtggacattggacaaagaggccattttggctgcgggaggacactctgatctcgaagcctgccataaaggtagcaaatagactcttgggattcccctcttctgtgcacatcgttgaatgaagagagtctttttgcacaaacttcacttgaaattgtgccactgatgataaacggaatgagagccaaaaaagtttagttggagacagttgtaaattcaatttggagtttatttaattgacttttctatcacgttggggcacatgccaactccctggtttcttcctggcatggtgtttgggcagcaggcatcattttccttttctagcttcataggaatattgtgagctcaccatgctgtggaggttgggaaagagcagagtcttggctgccctgctttctccttaggactcttcacttttctcaccacatctcttgcatgacttcatggtactggggacaagtttgtatgccttcaccccagagctggctgggttatggcttttgtagcagagcccatacagcctatggaagaactagaatctcactcacagtaataagaatctaggaggaattccaaaccgaagcaggcagggtctggaacccaaaggacagcattttctacccacttcttaatattgacagcttccccgttctatttaatgtccaaaaatgtttcccaaaatttcaaactctttcactgtaaagatttgttacaaagaatgtggtttggggaattaccttattttatattgttgtaaacaaacttcaaattctacatgtgcgacttttctccttcctgaagggtgtttagtagtcagcgttttcagaattgttttgttactatactttaacattttacatttcctgtttgtattattttgtgagagcaaggtgatcatgctgcttaaggtccaggtacaacctatttgtaccttttgagacaatatttgtgttacttttgcaggttacggttccacatgtaattgctatattttgttttgtttttccttactaggcaaagttaaaatgttccatgctttgaggagtgacccatttcactactttgttttcttatcactaaaggcaaaaatcaaagcacagttgtccattaacacttataagttaattatgggtttatgagtctgtaatgttatatgctgcaaacatttactatgtaaacgtgaagtagccaataatatctcaatagtagtaacagtatctttagcgacctttggaatagttaagcacaggtcattgtggacatgaattcaggcctctgtactaaaatctatttcagggaatgttctgtctagtgatttgctcaccatttgatatataatgaattataggacaagtataagctgatctgctatagctgtccatcagagagaatacacgtggctataacatctataacaaaacgacgattcctctacaagaggctgtttctcactgctaacgttggtgtttctggcgtgggaagaaatgcacaggcgtgcatggcatgcacgttcagacagctgcattgtaagagttctgtcatgcagtctgaaaagggaagaaacaggatggctttctgtagccacacctgtgaggcgtgatgattgttgtattattagattactgatttttcttttctgaaaatacatttgagttttaatcacatctgtggaagctgtaacttttaaggtagtcaatttcatgtcttgttcaacgatgtaagcagaaactgaattgccctaattttgccaactggccattattgggattattgtttaaatttttggtaaaggaagtaatctcctttcattcattgtgacttttgttcttagggaagcagagaagactccccaagttcttataacctcattgtgcttccctaatttaaagccatgttgaggggctccattcccaattcctgggtcaaggtgaattaaccctatgttggagcactggaaaccgttatttgcaaacattgctgttaccatttagaaatatgtgcactatcagctgggtgcagtggctcacgtctgtaatcccagcactttgggaggccgaggcaggtggatcacctgaggtcaggagttcgagaccagcctggccaacagggtgaaaccccgtctctactaaaagtacaaaaattagctgggcgtggtggcggacgcctgtaatctcagctacttgggaggctgaagcaggagaggtgctggaacctgggaggcggaggttgaagtgagccgagattgcgctattgcactccagctcgggcgacaactgcaagactccatctcaaaaaaataaaaataaaagaaaagaaagaaatatgtgcactacctaagttttgtctttagaaaaactatccacctataaaaaattaccttgacaaaaatagttccggtttgactaatcattttgtttctttaagtggtaagtgtatgcaaggtggatccttgatgagccaacattgcactgtggatacatatctatgtttacgcgctattagaacagaaggcgctgtatatagaaatgttgctttgaagcaatatttgcaaaacacgcagacttctgtatctgtatttggaaaaaataaaacaggttcttgttgctatgtttcagttacgta

SEQ ID NO: 81095 - DNA, 1852 bp, Homo sapiens
  misc_feature (1675)..(1675): n is a, c, g, or t
  misc_feature (1694)..(1694): n is a, c, g, or t
  misc_feature (1751)..(1751): n is a, c, g, or t
  misc_feature (1834)..(1834): n is a, c, g, or t
gggcggggcatacgctgggcgcgtcccgggggtcacgtggtgcagagcacgcagagtccttctgtcggttggtcctggagcggcgcagccggagtggggccgtgaggagaataaaggcagccccgttgatgactgaaaatgacaaagcatccacctaacagacgaggaatcagctttgaagtgggagcccagttggaagcccgggaccgtttaaaaaactggtatccagctcacatagaagacattgactacgaggaaggaaaagtactcatccatttcaagcgttggaaccatcgttatgatgagtggttctgctgggacagtccttatttacgccctttagagaaaatacagctgaggaaagagggcttgcatgaagaggatggatcttctgaatttcaaataaatgagcaggtccttgcttgctggtctgattgtcgtttttacccggccaaagtcactgctgttaacaaggatggtacttacactgtgaaattttatgatggagtagttcagactgtcaaacatattcatgtcaaagctttttccaaagatcagaatattgtgggtaatgctaggcctaaagaaacagatcacaaaagtctttcatcatctcctgataaacgagagaagtttaaagaacagagaaaagcaacagtgaatgtgaagaaagacaaagaagataaacccttaaagacagaaaagcgacccaagcagcctgataaagaaggaaagttaatctgttctgaaaaggggaaagtgtcagagaaaagtcttcccaagaacgagaaggaagacaaggaaaacatttccgaaaatgacagagagtattctggagatgcccaagtggataagaaacctgaaaatgacattgtgaagagtccacaagaaaacttgagggaacccaaaagaaaacgaggcagacccccttccatagctcctactgctgtggattcaaactctcaaactttgcaaccaataacattggaactgagaagaaggaaaatatcaaaaggatgtgaagtcccattaaaacgtcctcggcttgacaaaaattcatcccaggaaaagtcaaaaaactactcggaaaacactgacaaagacttatcgaggagacgttcctccaggctgtccactaatgggacccatgagatcctagatcctgacttggttgtatcagatttggttgatacggatcctttgcaagacacgttgtctagtaccaaggaatctgaagaaggtcagttgaagtctgctttggaagctggccaggtctcatctgcactgacttgccactcctttggggatggatccggggctgcaggcttggagttgaactgcccatcaatttaaaatttttccgcaaagccaaactgttgcactatcacatgaagtatttccatggaatggagaagtcactggagccagaagagagcccgggaaagaggcatgtccaaaccaggggcccttcagcttcagacaagcccagccaggagaccctgaccaggaagcgggtctctgccagttccccaactacaaaagacgagcactccctgggagtgctcgtctttggtggagtccgaatcaggctgtgaacaggaagagggcagggtgagcacccgctgcctagcctggggaggcacgcctgcccagctggatgcaaatgtttgctcanggacaactgtcgcaactgntcttctccctttatggtatgaaaacccacacgctttacaccagcgaatcgtgggggnccttaagccgtgctggtgaaaatcccaaaatggaggctaatccccttcaaaataacctggaattttcattccaaagacgaccntcctggggacctttaaag

SEQ ID NO: 81096 - DNA, 1429 bp, Homo sapiens
  misc_feature (772)..(772): n is a, c, g, or t
gggcggggcatacgctgggcgcgtcccgggggtcacgtggtgcagagcacgcagagtccttctgtcggttggtcctggagcggcgcagccggagtggggccgtgagatcttattcagggcttctcagcctgaacccccaaccagattaatttctccacagctggaattccaagtgcttggggataatgatacctctgacctttcttccttttgggaagtacttgagtgtgcagctgcatgaggcctcagcaggagagagattttaggtccaagaagctataccagtaggacaaggcaggaaaatactacactttcaggatcaagcccctctgactctcatttggaaactggatgtttgctaagcacctgcttcttaaggatgccgagggatttaatgatactcccagaaacctggagagattaatggggcctatggagaagtgctctgaactcagtgttgggacttgaataaaattaaccattgtcatgttttcagaacaactaagctgttttatatttcatgtgcatgaaagccctagaactaagttgtgttatttccagaaatgaaatagatcccacagttagatgatgtggccattaggaagtaccaaatttataaaaatcactggaggtctgtctgagcagtacctaataaaatatagtatactgaaagtgaaaaaaaaaaaaaaaaaaagatgtcccgttccatttctggtctctcagctcccctttcacctcggccagatggtcattattcattgatgacatattncacagtgcacaaggggcccatagtttgcattaaggtttgctgctggtgttgtattgtttatggattttgacaaatgtataatgtatatgtgtatgttacacatttatcaaaatccatatgtgtacattatacatttgtcaaaatccataaaagttacaaaagtacaaaaaaagtacaatattcataaaaagacaacttgatgctcaaaaagtttcggattttggatgtttggatttgagatgctcaacccatagtaaaattcgctctttttcagaatacagttgagttttgccaaatttgacagttcacgcaagccccaccacaatcaagatatgggccgggaatggtgactcatgcctataatcccagcaccttgggaggacaacgtgggaggattgcttgagcccaggagttcaagacaagcctaagcaacataatgggacttcgtctctcaaaaaaaaaaaaaaaaaagccataataaaagtaataataatagctgggtgtggtggtgtgtgtctatagttttagctactcaggaggctggggtgggaggaagactgcttgagcccaggaggtcaaggctgcagcaagctgtgattgtaccgctgcactccaactccagcctgtgtgatagagcgagaccctgtctcaaaaaaa

SEQ ID NO: 81097 - DNA, 654 bp, Homo sapiens
gggcggggcatacgctgggcgcgtcccgggggtcacgtggtgcagagcacgcagagtccttctgtcggttggtcctggagcggcgcagccggagtggggccgtgaggagaataaaggcagccccgttgatgactgaaaatgacaaagcatccacctaacagacgaggaatcagctttgaagtgggagcccagttggaagcccgggaccgtttaaaaaactggtatccagctcacatagaagacattgactacgaggaaggaaaagtactcatccatttcaagcgttggaaccatcgttatgatgagtggttctgctgggacagtccttatttacgccctttagagaaaatacagctgaggaaagagggcttgcatgaagaggatggatcttctgaatttcaaataaatgagcaggtccttgcttgctggtctgattgtcgtttttacccggccaaagtcactgctgttaacaaggatggtacttacactgtgaaattttatgatggagtagttcagactgtcaaacatattcatgtcaaagctttttccaaagatcaggtgagaaatgtggttttgtgctttgtgttatgaataatgctaacattgtagttttgtttcctcaaataaagacattacatttgtttatgatagcaa

SEQ ID NO: 81098 - DNA, 513 bp, Homo sapiens
gggcggggcatacgctgggcgcgtcccgggggtcacgtggtgcagagcacgcagagtccttctgtcggttggtcctggagcggcgcagccggagtggggccgtgaggagaataaaggcagccccgttgatgactgaaaatgacaaagcatccacctaacagacgaggaatcagctttgaagtgggagcccagttggaagcccgggaccgtttaaaaaactggtatccagctcacatagaagacattgactacgaggaaggaaaagtactcatccatttcaagcgttggaaccatcgttatgatgagtggttctgctgggacagtccttatttacgccctttagagaaaatacagctgaggaaagagggcttgcatgaagaggatggatcttctgtgagtaacaaatctgggaagttctgtagtatgcaaggtcagccattgggctgtttgtgtttcaatctttgatgttagtagcagctggagaccagttcttatttaggcctatagttgtaa

SEQ ID NO: 81099 - DNA, 272 bp, Homo sapiens
gagaactactcccatcagaatgccaagaagatcgtggccacccaccagcttcttggtgatgtgcagagagtgattgaggttctgcatggcctgcagctcaagatgagcatcttgcagtaagtgtggcacctgcagtgctgggagcagtctgtttggcatggtctgggggctgagtaaatctgagaaattggaaagctaccaaagcaatcaaatcataaaactgagtttgagacctttactaaaaattatcagtttcaggataaacattcttt

SEQ ID NO: 81100 - DNA, 5935 bp, Homo sapiens
gggcggggcatacgctgggcgcgtcccgggggtcacgtggtgcagagcacgcagagtccttctgtcggttggtcctggagcggcgcagccggagtggggccgtgaggagaataaaggcagccccgttgatgactgaaaatgacaaagcatccacctaacagacgaggaatcagctttgaagtgggagcccagttggaagcccgggaccgtttaaaaaactggtatccagctcacatagaagacattgactacgaggaaggaaaagtactcatccatttcaagcgttggaaccatcgttatgatgagtggttctgctgggacagtccttatttacgccctttagagaaaatacagctgaggaaagagggcttgcatgaagaggatggatcttctgaatttcaaataaatgagcaggtccttgcttgctggtctgattgtcgtttttacccggccaaagtcactgctgttaacaaggatggtacttacactgtgaaattttatgatggagtagttcagactgtcaaacatattcatgtcaaagctttttccaaagatcagaatattgtgggtaatgctaggcctaaagaaacagatcacaaaagtctttcatcatctcctgataaacgagagaagtttaaagaacagagaaaagcaacagtgaatgtgaagaaagacaaagaagataaacccttaaagacagaaaagcgacccaagcagcctgataaagaaggaaagttaatctgttctgaaaaggggaaagtgtcagagaaaagtcttcccaagaacgagaaggaagacaaggaaaacatttccgaaaatgacagagagtattctggagatgcccaagtggataagaaacctgaaaatgacattgtgaagagtccacaagaaaacttgagggaacccaaaagaaaacgaggcagacccccttccatagctcctactgctgtggattcaaactctcaaactttgcaaccaataacattggaactgagaagaaggaaaatatcaaaaggatgtgaagtcccattaaaacgtcctcggcttgacaaaaattcatcccaggaaaagtcaaaaaactactcggaaaacactgacaaagacttatcgaggagacgttcctccaggctgtccactaatgggacccatgagatcctagatcctgacttggttgtatcagatttggttgatacggatcctttgcaagacacgttgtctagtaccaaggaatctgaagaaggtcagttgaagtctgctttggaagctggccaggtctcatctgcactgacttgccactcctttggggatggatccggggctgcaggcttggagttgaactgcccatcaatgggagaaaacacgatgaaaacagaaccgacttctccccttgtggaattacaagagatttcgactgtggaagtaacaaatacttttaagaaaacagatgattttgggtcatctaatgcaccagctgtcgacctagaccataagtttagatgcaaagttgtggactgtttaaaatttttccgcaaagccaaactgttgcactatcacatgaagtatttccatggaatggagaagtcactggagccagaagagagcccgggaaagaggcatgtccaaaccaggggcccttcagcttcagacaagcccagccaggagaccctgaccaggaagcgggtctctgccagttccccaactacaaaagacaaggaaaagaataaagagaagaaattcaaggagtttgtgagagtgaagccaaagaagaaaaagaaaaagaaaaagaaaaccaaacctgaatgcccctgcagtgaggagatcagtgacacctcccaggaaccttctccacccaaggcatttgctgttaccaggtgtgggtcctcacacaagccaggggtccatatgagcccgcagcttcatggcccagaatctggacaccacaaagggaaagtgaaagcattggaggaggataatttgagtgagtcctcttctgagagctttctctggagtgatgatgagtatggccaagatgtggatgtgaccaccaacccagatgaggaacttgatggggatgaccgctatgacttcgaggtggtccgctgcatctgtgaggtccaggaggaaaatgacttcatgattcagtgtgaagagtgccagtgctggcagcatggggtctgcatgggattactggaagaaaatgtgcccgagaaatacacctgttatgtttgccaagaccctccaggtcagaggcctggcttcaagtactggtatgacaaggagtggctgagcaggggacatatgcatggcctggcatttctagaagagaactactcccatcagaatgccaagaagatcgtggccacccaccagcttcttggtgatgtgcagagagtgattgaggttctgcatggcctgcagctcaagatgagcatcttgcaaagccgggagcatcctgatctgccgctgtggtgccagccttggaaacagcactcaggggaggggagatctcatttcagaaacatccctgtcactgacaccaggagcaaggaggaagctccaagctatagaactttgaacggggcagtggagaagcccaggcccctggccctgcccctgccgcgttctgtggaggaatcctatatcaccagtgagcattgctaccagaagccccgcgcctattaccctgccgtggagcagaagctggtggtggagacgaggggctctgccctcgacgatgcggtcaaccccctccatgagaacggcgatgattccctttccccgcgcctgggctggcctctagaccaagacaggagcaagggggacagtgaccccaaacccggctccccaaaggtgaaggaatatgtctccaaaaaggccctaccagaagaagcccctgctcggaagctgctggacagaggtggagaggggctgctgagctcccagcaccagtggcagtttaacctgctgacccatgtggaatctcttcaggatgaagttacgcacaggatggactccattgagaaggagttggatgtgttggagagctggctggactacactggggaactggagccccctgagccgctggccaggcttccgcagctcaagcattgtatcaagcagctgctgatggacctgggcaaggtgcagcagatcgccctctgctgctcaacatgaaactgggcacccaaaactcatgggggcacaatcctggggcacctgcaggaggagcttcgcatatttaaataaataaacctagcatgctgaatgcacgtgacaccgactgacttcagggatctgggccaggagtgtggtggacattggacaaagaggccattttggctgcgggaggacactctgatctcgaagcctgccataaaggtagcaaatagactcttgggattcccctcttctgtgcacatcgttgaatgaagagagtctttttgcacaaacttcacttgaaattgtgccactgatgataaacggaatgagagccaaaaaagtttagttggagacagttgtaaattcaatttggagtttatttaattgacttttctatcacgttggggcacatgccaactccctggtttcttcctggcatggtgtttgggcagcaggcatcattttccttttctagcttcataggaatattgtgagctcaccatgctgtggaggttgggaaagagcagagtcttggctgccctgctttctccttaggactcttcacttttctcaccacatctcttgcatgacttcatggtactggggacaagtttgtatgccttcaccccagagctggctgggttatggcttttgtagcagagcccatacagcctatggaagaactagaatctcactcacagtaataagaatctaggaggaattccaaaccgaagcaggcagggtctggaacccaaaggacagcattttctacccacttcttaatattgacagcttccccgttctatttaatgtccaaaaatgtttcccaaaatttcaaactctttcactgtaaagatttgttacaaagaatgtggtttggggaattaccttattttatattgttgtaaacaaacttcaaattctacatgtgcgacttttctccttcctgaagggtgtttagtagtcagcgttttcagaattgttttgttactatactttaacattttacatttcctgtttgtattattttgtgagagcaaggtgatcatgctgcttaaggtccaggtacaacctatttgtaccttttgagacaatatttgtgttacttttgcaggttacggttccacatgtaattgctatattttgttttgtttttccttactaggcaaagttaaaatgttccatgctttgaggagtgacccatttcactactttgttttcttatcactaaaggcaaaaatcaaagcacagttgtccattaacacttataagttaattatgggtttatgagtctgtaatgttatatgctgcaaacatttactatgtaaacgtgaagtagccaataatatctcaatagtagtaacagtatctttagcgacctttggaatagttaagcacaggtcattgtggacatgaattcaggcctctgtactaaaatctatttcagggaatgttctgtctagtgatttgctcaccatttgatatataatgaattataggacaagtataagctgatctgctatagctgtccatcagagagaatacacgtggctataacatctataacaaaacgacgattcctctacaagaggctgtttctcactgctaacgttggtgtttctggcgtgggaagaaatgcacaggcgtgcatggcatgcacgttcagacagctgcattgtaagagttctgtcatgcagtctgaaaagggaagaaacaggatggctttctgtagccacacctgtgaggcgtgatgattgttgtattattagattactgatttttcttttctgaaaatacatttgagttttaatcacatctgtggaagctgtaacttttaaggtagtcaatttcatgtcttgttcaacgatgtaagcagaaactgaattgccctaattttgccaactggccattattgggattattgtttaaatttttggtaaaggaagtaatctcctttcattcattgtgacttttgttcttagggaagcagagaagactccccaagttcttataacctcattgtgcttccctaatttaaagccatgttgaggggctccattcccaattcctgggtcaaggtgaattaaccctatgttggagcactggaaaccgttatttgcaaacattgctgttaccatttagaaatatgtgcactatcagctgggtgcagtggctcacgtctgtaatcccagcactttgggaggccgaggcaggtggatcacctgaggtcaggagttcgagaccagcctggccaacagggtgaaaccccgtctctactaaaagtacaaaaattagctgggcgtggtggcggacgcctgtaatctcagctacttgggaggctgaagcaggagaggtgctggaacctgggaggcggaggttgaagtgagccgagattgcgctattgcactccagctcgggcgacaactgcaagactccatctcaaaaaaataaaaataaaagaaaagaaagaaatatgtgcactacctaagttttgtctttagaaaaactatccacctataaaaaattaccttgacaaaaatagttccggtttgactaatcattttgtttctttaagtggtaagtgtatgcaaggtggatccttgatgagccaacattgcactgtggatacatatctatgtttacgcgctattagaacagaaggcgctgtatatagaaatgttgctttgaagcaatatttgcaaaacacgcagacttctgtatctgtatttggaaaaaataaaacaggttcttgttgctatgtttcagttacgta

SEQ ID NO: 81101 - DNA, 5873 bp, Homo sapiens
gggcggggcatacgctgggcgcgtcccgggggtcacgtggtgcagagcacgcagagtccttctgtcggttggtcctggagcggcgcagccggagtggggccgtgaggagaataaaggcagccccgttgatgactgaaaatgacaaagcatccacctaacagacgaggaatcagctttgaagtgggagcccagttggaagcccgggaccgtttaaaaaactggtatccagctcacatagaagacattgactacgaggaaggaaaagtactcatccatttcaagcgttggaaccatcgttatgatgagtggttctgctgggacagtccttatttacgccctttagagaaaatacagctgaggaaagagggcttgcatgaagaggatggatcttctgaatttcaaataaatgagcaggtccttgcttgctggtctgattgtcgtttttacccggccaaagtcactgctgttaacaaggatggtacttacactgtgaaattttatgatggagtagttcagactgtcaaacatattcatgtcaaagctttttccaaagatcagaatattgtgggtaatgctaggcctaaagaaacagatcacaaaagtctttcatcatctcctgataaacgagagaagtttaaagaacagagaaaagcaacagtgaatgtgaagaaagacaaagaagataaacccttaaagacagaaaagcgacccaagcagcctgataaagaaggaaagttaatctgttctgaaaaggggaaagtgtcagagaaaagtcttcccaagaacgagaaggaagacaaggaaaacatttccgaaaatgacagagagtattctggagatgcccaaaagaaaacgaggcagacccccttccatagctcctactgctgtggattcaaactctcaaactttgcaaccaataacattggaactgagaagaaggaaaatatcaaaaggatgtgaagtcccattaaaacgtcctcggcttgacaaaaattcatcccaggaaaagtcaaaaaactactcggaaaacactgacaaagacttatcgaggagacgttcctccaggctgtccactaatgggacccatgagatcctagatcctgacttggttgtatcagatttggttgatacggatcctttgcaagacacgttgtctagtaccaaggaatctgaagaaggtcagttgaagtctgctttggaagctggccaggtctcatctgcactgacttgccactcctttggggatggatccggggctgcaggcttggagttgaactgcccatcaatgggagaaaacacgatgaaaacagaaccgacttctccccttgtggaattacaagagatttcgactgtggaagtaacaaatacttttaagaaaacagatgattttgggtcatctaatgcaccagctgtcgacctagaccataagtttagatgcaaagttgtggactgtttaaaatttttccgcaaagccaaactgttgcactatcacatgaagtatttccatggaatggagaagtcactggagccagaagagagcccgggaaagaggcatgtccaaaccaggggcccttcagcttcagacaagcccagccaggagaccctgaccaggaagcgggtctctgccagttccccaactacaaaagacaaggaaaagaataaagagaagaaattcaaggagtttgtgagagtgaagccaaagaagaaaaagaaaaagaaaaagaaaaccaaacctgaatgcccctgcagtgaggagatcagtgacacctcccaggaaccttctccacccaaggcatttgctgttaccaggtgtgggtcctcacacaagccaggggtccatatgagcccgcagcttcatggcccagaatctggacaccacaaagggaaagtgaaagcattggaggaggataatttgagtgagtcctcttctgagagctttctctggagtgatgatgagtatggccaagatgtggatgtgaccaccaacccagatgaggaacttgatggggatgaccgctatgacttcgaggtggtccgctgcatctgtgaggtccaggaggaaaatgacttcatgattcagtgtgaagagtgccagtgctggcagcatggggtctgcatgggattactggaagaaaatgtgcccgagaaatacacctgttatgtttgccaagaccctccaggtcagaggcctggcttcaagtactggtatgacaaggagtggctgagcaggggacatatgcatggcctggcatttctagaagagaactactcccatcagaatgccaagaagatcgtggccacccaccagcttcttggtgatgtgcagagagtgattgaggttctgcatggcctgcagctcaagatgagcatcttgcaaagccgggagcatcctgatctgccgctgtggtgccagccttggaaacagcactcaggggaggggagatctcatttcagaaacatccctgtcactgacaccaggagcaaggaggaagctccaagctatagaactttgaacggggcagtggagaagcccaggcccctggccctgcccctgccgcgttctgtggaggaatcctatatcaccagtgagcattgctaccagaagccccgcgcctattaccctgccgtggagcagaagctggtggtggagacgaggggctctgccctcgacgatgcggtcaaccccctccatgagaacggcgatgattccctttccccgcgcctgggctggcctctagaccaagacaggagcaagggggacagtgaccccaaacccggctccccaaaggtgaaggaatatgtctccaaaaaggccctaccagaagaagcccctgctcggaagctgctggacagaggtggagaggggctgctgagctcccagcaccagtggcagtttaacctgctgacccatgtggaatctcttcaggatgaagttacgcacaggatggactccattgagaaggagttggatgtgttggagagctggctggactacactggggaactggagccccctgagccgctggccaggcttccgcagctcaagcattgtatcaagcagctgctgatggacctgggcaaggtgcagcagatcgccctctgctgctcaacatgaaactgggcacccaaaactcatgggggcacaatcctggggcacctgcaggaggagcttcgcatatttaaataaataaacctagcatgctgaatgcacgtgacaccgactgacttcagggatctgggccaggagtgtggtggacattggacaaagaggccattttggctgcgggaggacactctgatctcgaagcctgccataaaggtagcaaatagactcttgggattcccctcttctgtgcacatcgttgaatgaagagagtctttttgcacaaacttcacttgaaattgtgccactgatgataaacggaatgagagccaaaaaagtttagttggagacagttgtaaattcaatttggagtttatttaattgacttttctatcacgttggggcacatgccaactccctggtttcttcctggcatggtgtttgggcagcaggcatcattttccttttctagcttcataggaatattgtgagctcaccatgctgtggaggttgggaaagagcagagtcttggctgccctgctttctccttaggactcttcacttttctcaccacatctcttgcatgacttcatggtactggggacaagtttgtatgccttcaccccagagctggctgggttatggcttttgtagcagagcccatacagcctatggaagaactagaatctcactcacagtaataagaatctaggaggaattccaaaccgaagcaggcagggtctggaacccaaaggacagcattttctacccacttcttaatattgacagcttccccgttctatttaatgtccaaaaatgtttcccaaaatttcaaactctttcactgtaaagatttgttacaaagaatgtggtttggggaattaccttattttatattgttgtaaacaaacttcaaattctacatgtgcgacttttctccttcctgaagggtgtttagtagtcagcgttttcagaattgttttgttactatactttaacattttacatttcctgtttgtattattttgtgagagcaaggtgatcatgctgcttaaggtccaggtacaacctatttgtaccttttgagacaatatttgtgttacttttgcaggttacggttccacatgtaattgctatattttgttttgtttttccttactaggcaaagttaaaatgttccatgctttgaggagtgacccatttcactactttgttttcttatcactaaaggcaaaaatcaaagcacagttgtccattaacacttataagttaattatgggtttatgagtctgtaatgttatatgctgcaaacatttactatgtaaacgtgaagtagccaataatatctcaatagtagtaacagtatctttagcgacctttggaatagttaagcacaggtcattgtggacatgaattcaggcctctgtactaaaatctatttcagggaatgttctgtctagtgatttgctcaccatttgatatataatgaattataggacaagtataagctgatctgctatagctgtccatcagagagaatacacgtggctataacatctataacaaaacgacgattcctctacaagaggctgtttctcactgctaacgttggtgtttctggcgtgggaagaaatgcacaggcgtgcatggcatgcacgttcagacagctgcattgtaagagttctgtcatgcagtctgaaaagggaagaaacaggatggctttctgtagccacacctgtgaggcgtgatgattgttgtattattagattactgatttttcttttctgaaaatacatttgagttttaatcacatctgtggaagctgtaacttttaaggtagtcaatttcatgtcttgttcaacgatgtaagcagaaactgaattgccctaattttgccaactggccattattgggattattgtttaaatttttggtaaaggaagtaatctcctttcattcattgtgacttttgttcttagggaagcagagaagactccccaagttcttataacctcattgtgcttccctaatttaaagccatgttgaggggctccattcccaattcctgggtcaaggtgaattaaccctatgttggagcactggaaaccgttatttgcaaacattgctgttaccatttagaaatatgtgcactatcagctgggtgcagtggctcacgtctgtaatcccagcactttgggaggccgaggcaggtggatcacctgaggtcaggagttcgagaccagcctggccaacagggtgaaaccccgtctctactaaaagtacaaaaattagctgggcgtggtggcggacgcctgtaatctcagctacttgggaggctgaagcaggagaggtgctggaacctgggaggcggaggttgaagtgagccgagattgcgctattgcactccagctcgggcgacaactgcaagactccatctcaaaaaaataaaaataaaagaaaagaaagaaatatgtgcactacctaagttttgtctttagaaaaactatccacctataaaaaattaccttgacaaaaatagttccggtttgactaatcattttgtttctttaagtggtaagtgtatgcaaggtggatccttgatgagccaacattgcactgtggatacatatctatgtttacgcgctattagaacagaaggcgctgtatatagaaatgttgctttgaagcaatatttgcaaaacacgcagacttctgtatctgtatttggaaaaaataaaacaggttcttgttgctatgtttcagttacgta

SEQ ID NO: 81102 - DNA, 5908 bp, Homo sapiens
gggcggggcatacgctgggcgcgtcccgggggtcacgtggtgcagagcacgcagagtccttctgtcggttggtcctggagcggcgcagccggagtggggccgtgagttgcttaaaactatccagttccccttccgggaggcaaaccgggttacttgatcctccttcccgaggtagcccacgcatttaaaaacaggtatccagctcacatagaagacattgactacgaggaaggaaaagtactcatccatttcaagcgttggaaccatcgttatgatgagtggttctgctgggacagtccttatttacgccctttagagaaaatacagctgaggaaagagggcttgcatgaagaggatggatcttctgaatttcaaataaatgagcaggtccttgcttgctggtctgattgtcgtttttacccggccaaagtcactgctgttaacaaggatggtacttacactgtgaaattttatgatggagtagttcagactgtcaaacatattcatgtcaaagctttttccaaagatcagaatattgtgggtaatgctaggcctaaagaaacagatcacaaaagtctttcatcatctcctgataaacgagagaagtttaaagaacagagaaaagcaacagtgaatgtgaagaaagacaaagaagataaacccttaaagacagaaaagcgacccaagcagcctgataaagaaggaaagttaatctgttctgaaaaggggaaagtgtcagagaaaagtcttcccaagaacgagaaggaagacaaggaaaacatttccgaaaatgacagagagtattctggagatgcccaagtggataagaaacctgaaaatgacattgtgaagagtccacaagaaaacttgagggaacccaaaagaaaacgaggcagacccccttccatagctcctactgctgtggattcaaactctcaaactttgcaaccaataacattggaactgagaagaaggaaaatatcaaaaggatgtgaagtcccattaaaacgtcctcggcttgacaaaaattcatcccaggaaaagtcaaaaaactactcggaaaacactgacaaagacttatcgaggagacgttcctccaggctgtccactaatgggacccatgagatcctagatcctgacttggttgtatcagatttggttgatacggatcctttgcaagacacgttgtctagtaccaaggaatctgaagaaggtcagttgaagtctgctttggaagctggccaggtctcatctgcactgacttgccactcctttggggatggatccggggctgcaggcttggagttgaactgcccatcaatgggagaaaacacgatgaaaacagaaccgacttctccccttgtggaattacaagagatttcgactgtggaagtaacaaatacttttaagaaaacagatgattttgggtcatctaatgcaccagctgtcgacctagaccataagtttagatgcaaagttgtggactgtttaaaatttttccgcaaagccaaactgttgcactatcacatgaagtatttccatggaatggagaagtcactggagccagaagagagcccgggaaagaggcatgtccaaaccaggggcccttcagcttcagacaagcccagccaggagaccctgaccaggaagcgggtctctgccagttccccaactacaaaagacaaggaaaagaataaagagaagaaattcaaggagtttgtgagagtgaagccaaagaagaaaaagaaaaagaaaaagaaaaccaaacctgaatgcccctgcagtgaggagatcagtgacacctcccaggaaccttctccacccaaggcatttgctgttaccaggtgtgggtcctcacacaagccaggggtccatatgagcccgcagcttcatggcccagaatctggacaccacaaagggaaagtgaaagcattggaggaggataatttgagtgagtcctcttctgagagctttctctggagtgatgatgagtatggccaagatgtggatgtgaccaccaacccagatgaggaacttgatggggatgaccgctatgacttcgaggtggtccgctgcatctgtgaggtccaggaggaaaatgacttcatgattcagtgtgaagagtgccagtgctggcagcatggggtctgcatgggattactggaagaaaatgtgcccgagaaatacacctgttatgtttgccaagaccctccaggtcagaggcctggcttcaagtactggtatgacaaggagtggctgagcaggggacatatgcatggcctggcatttctagaagagaactactcccatcagaatgccaagaagatcgtggccacccaccagcttcttggtgatgtgcagagagtgattgaggttctgcatggcctgcagctcaagatgagcatcttgcaaagccgggagcatcctgatctgccgctgtggtgccagccttggaaacagcactcaggggaggggagatctcatttcagaaacatccctgtcactgacaccaggagcaaggaggaagctccaagctatagaactttgaacggggcagtggagaagcccaggcccctggccctgcccctgccgcgttctgtggaggaatcctatatcaccagtgagcattgctaccagaagccccgcgcctattaccctgccgtggagcagaagctggtggtggagacgaggggctctgccctcgacgatgcggtcaaccccctccatgagaacggcgatgattccctttccccgcgcctgggctggcctctagaccaagacaggagcaagggggacagtgaccccaaacccggctccccaaaggtgaaggaatatgtctccaaaaaggccctaccagaagaagcccctgctcggaagctgctggacagaggtggagaggggctgctgagctcccagcaccagtggcagtttaacctgctgacccatgtggaatctcttcaggatgaagttacgcacaggatggactccattgagaaggagttggatgtgttggagagctggctggactacactggggaactggagccccctgagccgctggccaggcttccgcagctcaagcattgtatcaagcagctgctgatggacctgggcaaggtgcagcagatcgccctctgctgctcaacatgaaactgggcacccaaaactcatgggggcacaatcctggggcacctgcaggaggagcttcgcatatttaaataaataaacctagcatgctgaatgcacgtgacaccgactgacttcagggatctgggccaggagtgtggtggacattggacaaagaggccattttggctgcgggaggacactctgatctcgaagcctgccataaaggtagcaaatagactcttgggattcccctcttctgtgcacatcgttgaatgaagagagtctttttgcacaaacttcacttgaaattgtgccactgatgataaacggaatgagagccaaaaaagtttagttggagacagttgtaaattcaatttggagtttatttaattgacttttctatcacgttggggcacatgccaactccctggtttcttcctggcatggtgtttgggcagcaggcatcattttccttttctagcttcataggaatattgtgagctcaccatgctgtggaggttgggaaagagcagagtcttggctgccctgctttctccttaggactcttcacttttctcaccacatctcttgcatgacttcatggtactggggacaagtttgtatgccttcaccccagagctggctgggttatggcttttgtagcagagcccatacagcctatggaagaactagaatctcactcacagtaataagaatctaggaggaattccaaaccgaagcaggcagggtctggaacccaaaggacagcattttctacccacttcttaatattgacagcttccccgttctatttaatgtccaaaaatgtttcccaaaatttcaaactctttcactgtaaagatttgttacaaagaatgtggtttggggaattaccttattttatattgttgtaaacaaacttcaaattctacatgtgcgacttttctccttcctgaagggtgtttagtagtcagcgttttcagaattgttttgttactatactttaacattttacatttcctgtttgtattattttgtgagagcaaggtgatcatgctgcttaaggtccaggtacaacctatttgtaccttttgagacaatatttgtgttacttttgcaggttacggttccacatgtaattgctatattttgttttgtttttccttactaggcaaagttaaaatgttccatgctttgaggagtgacccatttcactactttgttttcttatcactaaaggcaaaaatcaaagcacagttgtccattaacacttataagttaattatgggtttatgagtctgtaatgttatatgctgcaaacatttactatgtaaacgtgaagtagccaataatatctcaatagtagtaacagtatctttagcgacctttggaatagttaagcacaggtcattgtggacatgaattcaggcctctgtactaaaatctatttcagggaatgttctgtctagtgatttgctcaccatttgatatataatgaattataggacaagtataagctgatctgctatagctgtccatcagagagaatacacgtggctataacatctataacaaaacgacgattcctctacaagaggctgtttctcactgctaacgttggtgtttctggcgtgggaagaaatgcacaggcgtgcatggcatgcacgttcagacagctgcattgtaagagttctgtcatgcagtctgaaaagggaagaaacaggatggctttctgtagccacacctgtgaggcgtgatgattgttgtattattagattactgatttttcttttctgaaaatacatttgagttttaatcacatctgtggaagctgtaacttttaaggtagtcaatttcatgtcttgttcaacgatgtaagcagaaactgaattgccctaattttgccaactggccattattgggattattgtttaaatttttggtaaaggaagtaatctcctttcattcattgtgacttttgttcttagggaagcagagaagactccccaagttcttataacctcattgtgcttccctaatttaaagccatgttgaggggctccattcccaattcctgggtcaaggtgaattaaccctatgttggagcactggaaaccgttatttgcaaacattgctgttaccatttagaaatatgtgcactatcagctgggtgcagtggctcacgtctgtaatcccagcactttgggaggccgaggcaggtggatcacctgaggtcaggagttcgagaccagcctggccaacagggtgaaaccccgtctctactaaaagtacaaaaattagctgggcgtggtggcggacgcctgtaatctcagctacttgggaggctgaagcaggagaggtgctggaacctgggaggcggaggttgaagtgagccgagattgcgctattgcactccagctcgggcgacaactgcaagactccatctcaaaaaaataaaaataaaagaaaagaaagaaatatgtgcactacctaagttttgtctttagaaaaactatccacctataaaaaattaccttgacaaaaatagttccggtttgactaatcattttgtttctttaagtggtaagtgtatgcaaggtggatccttgatgagccaacattgcactgtggatacatatctatgtttacgcgctattagaacagaaggcgctgtatatagaaatgttgctttgaagcaatatttgcaaaacacgcagacttctgtatctgtatttggaaaaaataaaacaggttcttgttgctatgtttcagttacgta

SEQ ID NO: 81103 - DNA, 5480 bp, Homo sapiens
aaacaggaacccagacctttgttgtacttacactgtgaaattttatgatggagtagttcagactgtcaaacatattcatgtcaaagctttttccaaagatcagaatattgtgggtaatgctaggcctaaagaaacagatcacaaaagtctttcatcatctcctgataaacgagagaagtttaaagaacagagaaaagcaacagtgaatgtgaagaaagacaaagaagataaacccttaaagacagaaaagcgacccaagcagcctgataaagaaggaaagttaatctgttctgaaaaggggaaagtgtcagagaaaagtcttcccaagaacgagaaggaagacaaggaaaacatttccgaaaatgacagagagtattctggagatgcccaagtggataagaaacctgaaaatgacattgtgaagagtccacaagaaaacttgagggaacccaaaagaaaacgaggcagacccccttccatagctcctactgctgtggattcaaactctcaaactttgcaaccaataacattggaactgagaagaaggaaaatatcaaaaggatgtgaagtcccattaaaacgtcctcggcttgacaaaaattcatcccaggaaaagtcaaaaaactactcggaaaacactgacaaagacttatcgaggagacgttcctccaggctgtccactaatgggacccatgagatcctagatcctgacttggttgtatcagatttggttgatacggatcctttgcaagacacgttgtctagtaccaaggaatctgaagaaggtcagttgaagtctgctttggaagctggccaggtctcatctgcactgacttgccactcctttggggatggatccggggctgcaggcttggagttgaactgcccatcaatgggagaaaacacgatgaaaacagaaccgacttctccccttgtggaattacaagagatttcgactgtggaagtaacaaatacttttaagaaaacagatgattttgggtcatctaatgcaccagctgtcgacctagaccataagtttagatgcaaagttgtggactgtttaaaatttttccgcaaagccaaactgttgcactatcacatgaagtatttccatggaatggagaagtcactggagccagaagagagcccgggaaagaggcatgtccaaaccaggggcccttcagcttcagacaagcccagccaggagaccctgaccaggaagcgggtctctgccagttccccaactacaaaagacaaggaaaagaataaagagaagaaattcaaggagtttgtgagagtgaagccaaagaagaaaaagaaaaagaaaaagaaaaccaaacctgaatgcccctgcagtgaggagatcagtgacacctcccaggaaccttctccacccaaggcatttgctgttaccaggtgtgggtcctcacacaagccaggggtccatatgagcccgcagcttcatggcccagaatctggacaccacaaagggaaagtgaaagcattggaggaggataatttgagtgagtcctcttctgagagctttctctggagtgatgatgagtatggccaagatgtggatgtgaccaccaacccagatgaggaacttgatggggatgaccgctatgacttcgaggtggtccgctgcatctgtgaggtccaggaggaaaatgacttcatgattcagtgtgaagagtgccagtgctggcagcatggggtctgcatgggattactggaagaaaatgtgcccgagaaatacacctgttatgtttgccaagaccctccaggtcagaggcctggcttcaagtactggtatgacaaggagtggctgagcaggggacatatgcatggcctggcatttctagaagagaactactcccatcagaatgccaagaagatcgtggccacccaccagcttcttggtgatgtgcagagagtgattgaggttctgcatggcctgcagctcaagatgagcatcttgcaaagccgggagcatcctgatctgccgctgtggtgccagccttggaaacagcactcaggggaggggagatctcatttcagaaacatccctgtcactgacaccaggagcaaggaggaagctccaagctatagaactttgaacggggcagtggagaagcccaggcccctggccctgcccctgccgcgttctgtggaggaatcctatatcaccagtgagcattgctaccagaagccccgcgcctattaccctgccgtggagcagaagctggtggtggagacgaggggctctgccctcgacgatgcggtcaaccccctccatgagaacggcgatgattccctttccccgcgcctgggctggcctctagaccaagacaggagcaagggggacagtgaccccaaacccggctccccaaaggtgaaggaatatgtctccaaaaaggccctaccagaagaagcccctgctcggaagctgctggacagaggtggagaggggctgctgagctcccagcaccagtggcagtttaacctgctgacccatgtggaatctcttcaggatgaagttacgcacaggatggactccattgagaaggagttggatgtgttggagagctggctggactacactggggaactggagccccctgagccgctggccaggcttccgcagctcaagcattgtatcaagcagctgctgatggacctgggcaaggtgcagcagatcgccctctgctgctcaacatgaaactgggcacccaaaactcatgggggcacaatcctggggcacctgcaggaggagcttcgcatatttaaataaataaacctagcatgctgaatgcacgtgacaccgactgacttcagggatctgggccaggagtgtggtggacattggacaaagaggccattttggctgcgggaggacactctgatctcgaagcctgccataaaggtagcaaatagactcttgggattcccctcttctgtgcacatcgttgaatgaagagagtctttttgcacaaacttcacttgaaattgtgccactgatgataaacggaatgagagccaaaaaagtttagttggagacagttgtaaattcaatttggagtttatttaattgacttttctatcacgttggggcacatgccaactccctggtttcttcctggcatggtgtttgggcagcaggcatcattttccttttctagcttcataggaatattgtgagctcaccatgctgtggaggttgggaaagagcagagtcttggctgccctgctttctccttaggactcttcacttttctcaccacatctcttgcatgacttcatggtactggggacaagtttgtatgccttcaccccagagctggctgggttatggcttttgtagcagagcccatacagcctatggaagaactagaatctcactcacagtaataagaatctaggaggaattccaaaccgaagcaggcagggtctggaacccaaaggacagcattttctacccacttcttaatattgacagcttccccgttctatttaatgtccaaaaatgtttcccaaaatttcaaactctttcactgtaaagatttgttacaaagaatgtggtttggggaattaccttattttatattgttgtaaacaaacttcaaattctacatgtgcgacttttctccttcctgaagggtgtttagtagtcagcgttttcagaattgttttgttactatactttaacattttacatttcctgtttgtattattttgtgagagcaaggtgatcatgctgcttaaggtccaggtacaacctatttgtaccttttgagacaatatttgtgttacttttgcaggttacggttccacatgtaattgctatattttgttttgtttttccttactaggcaaagttaaaatgttccatgctttgaggagtgacccatttcactactttgttttcttatcactaaaggcaaaaatcaaagcacagttgtccattaacacttataagttaattatgggtttatgagtctgtaatgttatatgctgcaaacatttactatgtaaacgtgaagtagccaataatatctcaatagtagtaacagtatctttagcgacctttggaatagttaagcacaggtcattgtggacatgaattcaggcctctgtactaaaatctatttcagggaatgttctgtctagtgatttgctcaccatttgatatataatgaattataggacaagtataagctgatctgctatagctgtccatcagagagaatacacgtggctataacatctataacaaaacgacgattcctctacaagaggctgtttctcactgctaacgttggtgtttctggcgtgggaagaaatgcacaggcgtgcatggcatgcacgttcagacagctgcattgtaagagttctgtcatgcagtctgaaaagggaagaaacaggatggctttctgtagccacacctgtgaggcgtgatgattgttgtattattagattactgatttttcttttctgaaaatacatttgagttttaatcacatctgtggaagctgtaacttttaaggtagtcaatttcatgtcttgttcaacgatgtaagcagaaactgaattgccctaattttgccaactggccattattgggattattgtttaaatttttggtaaaggaagtaatctcctttcattcattgtgacttttgttcttagggaagcagagaagactccccaagttcttataacctcattgtgcttccctaatttaaagccatgttgaggggctccattcccaattcctgggtcaaggtgaattaaccctatgttggagcactggaaaccgttatttgcaaacattgctgttaccatttagaaatatgtgcactatcagctgggtgcagtggctcacgtctgtaatcccagcactttgggaggccgaggcaggtggatcacctgaggtcaggagttcgagaccagcctggccaacagggtgaaaccccgtctctactaaaagtacaaaaattagctgggcgtggtggcggacgcctgtaatctcagctacttgggaggctgaagcaggagaggtgctggaacctgggaggcggaggttgaagtgagccgagattgcgctattgcactccagctcgggcgacaactgcaagactccatctcaaaaaaataaaaataaaagaaaagaaagaaatatgtgcactacctaagttttgtctttagaaaaactatccacctataaaaaattaccttgacaaaaatagttccggtttgactaatcattttgtttctttaagtggtaagtgtatgcaaggtggatccttgatgagccaacattgcactgtggatacatatctatgtttacgcgctattagaacagaaggcgctgtatatagaaatgttgctttgaagcaatatttgcaaaacacgcagacttctgtatctgtatttggaaaaaataaaacaggttcttgttgctatgtttcagttacgta

SEQ ID NO: 81104 - DNA, 1484 bp, Homo sapiens
gggcggggcatacgctgggcgcgtcccgggggtcacgtggtgcagagcacgcagagtccttctgtcggttggtcctggagcggcgcagccggagtggggccgtgaggagaataaaggcagccccgttgatgactgaaaatgacaaagcatccacctaacagacgaggaatcagctttgaagtgggagcccagttggaagcccgggaccgtttaaaaaactggtatccagctcacatagaagacattgactacgaggaaggaaaagtactcatccatttcaagcgttggaaccatcgttatgatgagtggttctgctgggacagtccttatttacgccctttagagaaaatacagctgaggaaagagggcttgcatgaagaggatggatcttctgaatttcaaataaatgagcaggtccttgcttgctggtctgattgtcgtttttacccggccaaagtcactgctgttaacaaggatggtacttacactgtgaaattttatgatggagtagttcagactgtcaaacatattcatgtcaaagctttttccaaagatcagaatattgtgggtaatgctaggcctaaagaaacagatcacaaaagtctttcatcatctcctgataaacgagagaagtttaaagaacagagaaaagcaacagtgaatgtgaagaaagacaaagaagataaacccttaaagacagaaaagcgacccaagcagcctgataaagaaggaaagttaatctgttctgaaaaggggaaagtgtcagagaaaagtcttcccaagaacgagaaggaagacaaggaaaacatttccgaaaatgacagagagtattctggagatgcccaagtggataagaaacctgaaaatgacattgtgaagagtccacaagaaaacttgagggaacccaaaagaaaacgaggcagacccccttccatagctcctactgctgtggattcaaactctcaaactttgcaaccaataacattggaactgagaagaaggaaaatatcaaaaggatgtgaagtcccattaaaacgtcctcggcttgacaaaaattcatcccaggaaaagtcaaaaaactactcggaaaacactgacaaagacttatcgaggagacgttcctccaggctgtccactaatgggacccatgagatcctagatcctgacttggttgtatcagatttggttgatacggatcctttgcaagacacgttgtctagtaccaaggaatctgaagaaggtcagttgaagtctgctttggaagctggccaggtctcatctgcactgacttgccactcctttggggatggatccggggctgcaggcttggagttgaactgcccatcaatgggagaaaacacgatgaaaacagaaccgacttctccccttgtggaattacaagagatttcgactgtggaaggttcatatttagagttaaattaatcctctttttatatacacttttgcttatgctttgtgaacta

SEQ ID NO: 81105 - DNA, 1498 bp, Homo sapiens
gggcggggcatacgctgggcgcgtcccgggggtcacgtggtgcagagcacgcagagtccttctgtcggttggtcctggagcggcgcagccggagtggggccgtgaggagaataaaggcagccccgttgatgactgaaaatgacaaagcatccacctaacagacgaggaatcagctttgaagtgggagcccagttggaagcccgggaccgtttaaaaaactgcatccagctcaccatcagcacagcaccattgcactcacgcaggcaaggcaaaagtcactcatcccatttcaagcgatggacacccatcggttcatgcatgcagtcggttctgcctgggcaccagtaccttcattttcacgcccgtttcagcagcacaacatcaccagcatgcagagcacacagcaggggcttgcaatgcaaagcaggcatggcatcgtatcctgcacatattccgacacatacacacatagccaggcaagagtcccatatggcctttgcattggttctagcaatagtcagatatataaatcaccccagaggagccaaacaggtccacttgctaggtaaccaacccaagggcatcggatcaccatttcaccaactatggtggcacaaatctgtagtcatggccatggggcaagttcactttcccaaggcacgatgggtccgaacacaccaaatctaatatccaatggttcacacaacagacgttctgtataccacaacagcatcgcaagcaacataatttaggtagcgagactcacattgcatcaggagcgcctataaaaagcaaagacgaaggcaaatccaagcacacaacaggttccttacccaattccaatcgttcaccgtggcaattaacagacggcaagccagccaacagttcttccacacaagcacccgagcgagcaaacacggcccaaacgaggtggcaaaatgttgccacagccacaaggcacccaaagcaacagccatcaacaccacacccgtagtaaaccagcaagccaggaagaaacaggacggagccacaacagggccaggcacctggcattccaacgccaaccggcgcacacggtgacaacatacagggtacctggcaccacaggcggggaacaacggtggcacacgcacagacacacaggacttcgcacccacagacaacagacagcacagggcacgggacaacacggggacacacaaacaatgttcagccagggcaaacaatggacaacaggaaaaagaacaatacagtgagaagacaaattgcaacccaaacaagtcgacgtccacgaccaaacccatgacacacacgtgaacactatgcggacagaacggtcccaaccacagcagacaccatgcaagggagacacacacaaaaagacaacacgagagcgagaacaaccacacatgcaccaacagcacaccaaacagagaggggcatccacaccagcaccacacaacaagcaaacaccacacaagtgcacacgaggaaccac

SEQ ID NO: 81106 - DNA, 1186 bp, Homo sapiens
attggacggctgggcccaagtgggcggaaaacggacggtgcagggggtgggccacgtgtccagccctaacgaaacggtaaccagccctgggaagcccgcaagaggcctcagcggtggccgtccgagcgccgagaggtgagggtgcccccgcctcacctgcagaggggccgttccgggctcgaacccggcaccttccggaaaatggcggctgccaggcccagcctgggccgagtcctcccaggatcctctgtcctgttcctgtgtgacatgcaggagaagttccgccacaacatcgcctacttcccacagatcgtctcagtggctgcccgcatgctcaaggtggcccggctgcttgaggtgccagtcatgctgacggagcagtacccacaaggcctgggccccacggtgcccgagctggggactgagggccttcggccgctggccaagacctgcttcagcatggtgcctgccctgcagcaggagctggacagtcggccccagctgcgctctgtgctgctctgtggcattgaggcacaggcctgcatcttggacccccgttcttatccggggttggccctgacctctctctacccacagaacacgaccctggacctcctagaccgggggctgcaggtccatgtggtggtggacgcctgctcctcacgcagccaggtggaccggctggtggctctggcccgcatgagacagagtggtgccttcctctccaccagcgaagggctcattctgcagcttgtgggcgatgccgtccacccccagttcaaggagatccagaaactcatcaaggagcccgccccagacagcggactgctgggcctcttccaaggccagaactccctcctccactgaactccaaccctgccttgagggaagaccaccctcctgtcacccggacctcagtggaagcccgttccccccatccctggatcccaagagtggtgcgatccaccaggagtgccgccccttgtgggggggggcagggtgctgccttcccattggacagctgctcccggaaatgcaaatgagactcctggaaactgggtgggaattggctgagccaagatggaggcggggctcggccccgggccacttcacggggcgggaaggggaggggaagaagagtctcagactgtgggacacggactcgcagaataaacatatatgtggc

SEQ ID NO: 81107 - DNA, 928 bp, Homo sapiens
attggacggctgggcccaagtgggcggaaaacggacggtgcagggggtgggccacgtgtccagccctaacgaaacggtaaccagccctgggaagcccgcaagaggcctcagcggtggccgtccgagcgccgagaggtgagggtgcccccgcctcacctgcagaggggccgttccgggctcgaacccggcaccttccggaaaatggcggctgccaggcccagcctgggccgagtcctcccaggatcctctgtcctgttcctgtgtgacatgcaggagaagttccgccacaacatcgcctacttcccacagatcgtctcagtggctgcccgcatgctcaagaacacgaccctggacctcctagaccgggggctgcaggtccatgtggtggtggacgcctgctcctcacgcagccaggtggaccggctggtggctctggcccgcatgagacagagtggtgccttcctctccaccagcgaagggctcattctgcagcttgtgggcgatgccgtccacccccagttcaaggagatccagaaactcatcaaggagcccgccccagacagcggactgctgggcctcttccaaggccagaactccctcctccactgaactccaaccctgccttgagggaagaccaccctcctgtcacccggacctcagtggaagcccgttccccccatccctggatcccaagagtggtgcgatccaccaggagtgccgccccttgtgggggggggcagggtgctgccttcccattggacagctgctcccggaaatgcaaatgagactcctggaaactgggtgggaattggctgagccaagatggaggcggggctcggccccgggccacttcacggggcgggaaggggaggggaagaagagtctcagactgtgggacacggactcgcagaataaacatatatgtggc

SEQ ID NO: 81108 - DNA, 405 bp, Homo sapiens
aggcccagcagactgctgggccttggaagaggcccagcagtccgctgctgggcctcttccaaggccagaactccctcctccactgaactccaaccctgccttgagggaagaccaccctcctgtcacccggacctcagtggaagcccgttccccccatccctggatcccaagagtggtgcgatccaccaggagtgccgccccttgtgggggggggcagggtgctgccttcccattggacagctgctcccggaaatgcaaatgagactcctggaaactgggtgggaattggctgagccaagatggaggcggggctcggccccgggccacttcacggggcgggaaggggaggggaagaagagtctcagactgtgggacacggactcgcagaataaacatatatgtggc

SEQ ID NO: 81109 - DNA, 554 bp, Homo sapiens
aggcccagcagactgctgggccttggaagaggcccagcagtccgctgctgggcctcttccaaggccagaactccctcctccactgaactccaaccctgccttgagggaagaccaccctcctgtcacccggacctcagtggaagcccgttccccccatccctggatcccaagagtggtgcgatccaccaggagtgccgccccttgtgggggggggcagggtgctgccttcccattggacagctgctcccggaaatgcaaatgagactcctggaaactgggtgggaattggctgagccaagatggaggcggggctcggccccgggccacttcacggggcgggaaggggaggggaagaagagtctcagactgtgggacacggactcgcagaataaacatatatgtggcaaaaaaaaaaaaaacaacaacacacaaaaaaaacaccgagggcccacaaagccggggtgggcggaaaaagcgggctccgaaaggtgcacggtgggcaaaacgggccccgggcaccaacacatcctggcacaagggggcacaacccggcg

SEQ ID NO: 81110 - DNA, 1138 bp, Homo sapiens
attggacggctgggcccaagtgggcggaaaacggacggtgcagggggtgggccacgtgtccagccctaacgaaacggtaaccagccctgggaagcccgcaagaggcctcagcggtggccgtccgagcgccgagaggtgagggtgcccccgcctcacctgcagaggggccgttccgggctcgaacccggcaccttccggaaaatggcggctgccaggcccagcctgggccgagtcctcccaggatcctctgtcctgttcctgtgtgacatgcaggagaagttccgccacaacatcgcctacttcccacagatcgtctcagtggctgcccgcatgctcaaggtggcccggctgcttgaggtgccagtcatgctgacggagcagtacccacaaggcctgggccccacggtgcccgagctggggactgagggccttcggccgctggccaagacctgcttcagcatggtgcctgccctgcagcaggagctggacagtcggccccagctgcgctctgtgctgctctgtggcattgaggcacaggcctgcatcttgaacacgaccctggacctcctagaccgggggctgcaggtccatgtggtggtggacgcctgctcctcacgcagccaggtggaccggctggtggctctggcccgcatgagacagagtggtgccttcctctccaccagcgaagggctcattctgcagcttgtgggcgatgccgtccacccccagttcaaggagatccagaaactcatcaaggagcccgccccagacagcggactgctgggcctcttccaaggccagaactccctcctccactgaactccaaccctgccttgagggaagaccaccctcctgtcacccggacctcagtggaagcccgttccccccatccctggatcccaagagtggtgcgatccaccaggagtgccgccccttgtgggggggggcagggtgctgccttcccattggacagctgctcccggaaatgcaaatgagactcctggaaactgggtgggaattggctgagccaagatggaggcggggctcggccccgggccacttcacggggcgggaaggggaggggaagaagagtctcagactgtgggacacggactcgcagaataaacatatatgtggc

SEQ ID NO: 81111 - DNA, 1259 bp, Homo sapiens
attggacggctgggcccaagtgggcggaaaacggacggtgcagggggtgggccacgtgtccagccctaacgaaacggtaaccagccctgggaagcccgcaagaggcctcagcggtggccgtccgagcgccgagaggtgagggtgcccccgcctcacctgcagaggggccgttccgggctcgaacccggcaccttccgggaaaacgggatcgcacgctccgtggtctttgtgttgagatctatccaggttgtggcctgtgcagggtcccccttctttcctatggctgaagaatatggcctcagtttcctcttggagcaggaaaatggcggctgccaggcccagcctgggccgagtcctcccaggatcctctgtcctgttcctgtgtgacatgcaggagaagttccgccacaacatcgcctacttcccacagatcgtctcagtggctgcccgcatgctcaaggtggcccggctgcttgaggtgccagtcatgctgacggagcagtacccacaaggcctgggccccacggtgcccgagctggggactgagggccttcggccgctggccaagacctgcttcagcatggtgcctgccctgcagcaggagctggacagtcggccccagctgcgctctgtgctgctctgtggcattgaggcacaggcctgcatcttgaacacgaccctggacctcctagaccgggggctgcaggtccatgtggtggtggacgcctgctcctcacgcagccaggtggaccggctggtggctctggcccgcatgagacagagtggtgccttcctctccaccagcgaagggctcattctgcagcttgtgggcgatgccgtccacccccagttcaaggagatccagaaactcatcaaggagcccgccccagacagcggactgctgggcctcttccaaggccagaactccctcctccactgaactccaaccctgccttgagggaagaccaccctcctgtcacccggacctcagtggaagcccgttccccccatccctggatcccaagagtggtgcgatccaccaggagtgccgccccttgtgggggggggcagggtgctgccttcccattggacagctgctcccggaaatgcaaatgagactcctggaaactgggtgggaattggctgagccaagatggaggcggggctcggccccgggccacttcacggggcgggaaggggaggggaagaagagtctcagactgtgggacacggactcgcagaataaacatatatgtggc

SEQ ID NO: 81112 - DNA, 1443 bp, Homo sapiens
attggacggctgggcccaagtgggcggaaaacggacggtgcagggggtgggccacgtgtccagccctaacgaaacggtaaccagccctgggaagcccgcaagaggcctcagcggtggccgtccgagcgccgagaggtgagggtgcccccgcctcacctgcagaggggccgttccgggctcgaacccggcaccttccggaaaatggcggctgccaggcccagcctgggccgagtcctcccaggatcctctgtcctgttcctgtgtgacatgcaggagaagttccgccacaacatcgcctacttcccacagatcgtctcagtggctgcccgcatgctcaaggtggcccggctgcttgaggtgccagtcatgctgacggagcagtacccacaaggcctgggccccacggtgcccgagctggggactgagggccttcggccgctggccaagacctgcttcagcatggtgcctgccctgcagcaggagctggacagtcggccccagctgcgctctgtgctgctctgtggcattgaggcacaggcctgcatcttggtgagatgctgactgaccccaggggtccctcgttctaacctgggacccccatcctaaatagaacctccttccctgaccagaaacctccacttccctgcaggacccccatcctgacctgggccctctctcctcacctgtgggccccatcctatcttggatcccctcctgacctgggggccccttcctctgatccgagcctccctcctccccattctgggcccctaattctgactcaccatccccaattccttacccaggacccccgttcttatccggggttggccctgacctctctctacccacagaacacgaccctggacctcctagaccgggggctgcaggtccatgtggtggtggacgcctgctcctcacgcagccaggtggaccggctggtggctctggcccgcatgagacagagtggtgccttcctctccaccagcgaagggctcattctgcagcttgtgggcgatgccgtccacccccagttcaaggagatccagaaactcatcaaggagcccgccccagacagcggactgctgggcctcttccaaggccagaactccctcctccactgaactccaaccctgccttgagggaagaccaccctcctgtcacccggacctcagtggaagcccgttccccccatccctggatcccaagagtggtgcgatccaccaggagtgccgccccttgtgggggggggcagggtgctgccttcccattggacagctgctcccggaaatgcaaatgagactcctggaaactgggtgggaattggctgagccaagatggaggcggggctcggccccgggccacttcacggggcgggaaggggaggggaagaagagtctcagactgtgggacacggactcgcagaataaacatatatgtggc

SEQ ID NO: 81113 - DNA, 335 bp, Homo sapiens
tgctgtcgctcccaccctccgtgcacctagcaggagtgccagccacagccggaacagccaggccatgacccaggggagccaggctgccaccccacccagcgctgccagggagccgccatccgagcttgagctgggcgcacagaggtgcccgccaggatctgtggccctgtaacattccctcgatcttgtcttcccgttcctccccgcagtggttttgaaatcacagacctcgtgtatataaaatatgcagaacttgttttccgttcccctgccagttttatatttttggttttacaagaaaaaacattaaaaactggaaaggagatgtgaagtcc

SEQ ID NO: 81114 - DNA, 2827 bp, Homo sapiens
aaaaaaaacttggctctcgccctccggccgggaagcatggggcttcccaggctggtctgcgccttcttgctcgccgcctgctgctgctgtcctcgcgtcgcgggtgtgcccggagaggctgagcagcctgcgcctgagctggtggaggtggaagtgggcagcacagcccttctgaagtgcggcctctcccagtcccaaggcaacctcagccatgtcgactggttttctgtccacaaggagaagcggacgctcatcttccgtgtgcgccagggccagggccagagcgaacctggggagtacgagcagcggctcagcctccaggacagaggggctactctggccctgactcaagtcaccccccaagacgagcgcatcttcttgtgccagggcaagcgccctcggtcccaggagtaccgcatccagctccgcgtctacaaagctccggaggagccaaacatccaggtcaaccccctgggcatccctgtgaacagtaaggagcctgaggaggtcgctacctgtgtagggaggaacgggtaccccattcctcaagtcatctggtacaagaatggccggcctctgaaggaggagaagaaccgggtccacattcagtcgtcccagactgtggagtcgagtggtttgtacaccttgcagagtattctgaaggcacagctggttaaagaagacaaagatgcccagttttactgtgagctcaactaccggctgcccagtgggaaccacatgaaggagtccagggaagtcaccgtccctgttttctacccgacagaaaaagtgtggctggaagtggagcccgtgggaatgctgaaggaaggggaccgcgtggaaatcaggtgtttggctgatggcaaccctccaccacacttcagcatcagcaagcagaaccccagcaccagggaggcagaggaagagacaaccaacgacaacggggtcctggtgctggagcctgcccggaaggaacacagtgggcgctatgaatgtcagggcctggacttggacaccatgatatcgctgctgagtgaaccacaggaactactggtgaactatgtgtctgacgtccgagtgagtcccgcagcccctgagagacaggaaggcagcagcctcaccctgacctgtgaggcagagagtagccaggacctcgagttccagtggctgagagaagagacaggccaggtgctggaaagggggcctgtgcttcagttgcatgacctgaaacgggaggcaggaggcggctatcgctgcgtggcgtctgtgcccagcatacccggcctgaaccgcacacagctggtcaacgtggccatttttggccccccttggatggcattcaaggagaggaaggtgtgggtgaaagagaatatggtgttgaatctgtcttgtgaagcgtcagggcacccccggcccaccatctcctggaacgtcaacggcacggcaagtgaacaagaccaagatccacagcgagtcctgagcaccctgaatgtcctcgtgaccccggagctgttggagacaggtgttgaatgcacggcctccaacgacctgggcaaaaacaccagcatcctcttcctggagctggtcaatttaaccaccctcacaccagactccaacacaaccactggcctcagcacttccactgccagtcctcataccagagccaacagcacctccacagagagaaagctgccggagccggagagccggggcgtggtcatcgtggctgtgattgtgtgcatcctggtcctggcggtgctgggcgctgtcctctatttcctctataagaagggcaagctgccgtgcaggcgctcagggaagcaggagatcacgctgcccccgtctcgtaagagcgaacttgtagttgaagttaagtcagataagctcccagaagagatgggcctcctgcagggcagcagcggtgacaagagggctccgggagaccagggagagaaatacatcgatctgaggcattagccccgaatcacttcagctcccttccctgcctggaccattcccagctccctgctcactcttctctcagccaaagcctccaaagggactagagagaagcctcctgctcccctcgcctgcacaccccctttcagagggccactgggttaggacctgaggacctcacttggccctgcaaggcccgcttttcagggaccagtccaccaccatctccacgttgagtgaagctcatcccaagcaaggagccccagtctcccgagcgggtaggagagtttcttgcagaacgtgttttttctttacacacattatggctgtaaatacctggctcctgccagcagctgagctgggtagcctctctgagctgggattacaggcatgagcaactgcgcccagccaaattctacttcttaaaaatcacaaaaactagtttaaattgatgacttgttcgtatgttcaaaatgtaacaacaaaaaaagctaacaccagtcatttatattaactttttttttttaaatcaaaaattgttaatgttagaaacatactatgaagtgcctttatctgcttagacctaaggaagattttaaagttgggttgcacaggaaatgatgatgcttcaatttcttaatagttaaaaagtgctaaatactacttgaaattattgtttacagattagtgacaagagctggggttaggatccggttggactctgacatcggatgccctcaaacatacagaacttccaaactcaagtccagccataagctattttgccaacatgtcagagtaatctgtatttttgtatgtgatttctacttttatagacttgttttaaaacaataaaacacatttttat

SEQ ID NO: 81115 - DNA, 633 bp, Homo sapiens
ttccatcagccacatggtctcatgacctgcttccctgccctgggctggccctggagcaaggagccctcatccattccacatccttcacagcgggcccttctcttcctgtggccctgagataccaacctctcacctccctccctcctcccagcacgctgcccccgtctcgtaagagcgaacttgtagttgaagttaagtcagataagctcccagaagagatgggcctcctgcagggcagcagcggtgacaagagggctccgggagaccaggtaggaggcggttcctgtggccagagcctgccacatcctcagggaccgggggcagtagggactaacggttctctctatccttcatccctctttgtcagagatagggagcaggccccatcttgccttcttaacactactcacagatggcagggccaagcaagtggctgagggagcttggaggaagactgagaaagaccctgtcccatcaccttttcctgaccaatgcccgtggctctgggtgtggccatttcaccagtgcagtcagacgggggccgccctccttccctggcctgccatgcccatcctagcttcctccccaacgctgcccaccaaattcatcggcttctgcttccatctctccttc

SEQ ID NO: 81116 - DNA, 3213 bp, Homo sapiens
aaaaaaaacttggctctcgccctccggccgggaagcatggggcttcccaggctggtctgcgccttcttgctcgccgcctgctgctgctgtcctcgcgtcgcgggtgtgcccggagaggctgagcagcctgcgcctgagctggtggaggtggaagtgggcagcacagcccttctgaagtgcggcctctcccagtcccaaggcaacctcagccatgtcgactggttttctgtccacaaggagaagcggacgctcatcttccgtgtgcgccagggccagggccagagcgaacctggggagtacgagcagcggctcagcctccaggacagaggggctactctggccctgactcaagtcaccccccaagacgagcgcatcttcttgtgccagggcaagcgccctcggtcccaggagtaccgcatccagctccgcgtctacaaagctccggaggagccaaacatccaggtcaaccccctgggcatccctgtgaacagtaaggagcctgaggaggtcgctacctgtgtagggaggaacgggtaccccattcctcaagtcatctggtacaagaatggccggcctctgaaggaggagaagaaccgggtccacattcagtcgtcccagactgtggagtcgagtggtttgtacaccttgcagagtattctgaaggcacagctggttaaagaagacaaagatgcccagttttactgtgagctcaactaccggctgcccagtgggaaccacatgaaggagtccagggaagtcaccgtccctgttttctacccgacagaaaaagtgtggctggaagtggagcccgtgggaatgctgaaggaaggggaccgcgtggaaatcaggtgtttggctgatggcaaccctccaccacacttcagcatcagcaagcagaaccccagcaccagggaggcagaggaagagacaaccaacgacaacggggtcctggtgctggagcctgcccggaaggaacacagtgggcgctatgaatgtcagggcctggacttggacaccatgatatcgctgctgagtgaaccacaggaactactggtgaactatgtgtctgacgtccgagtgagtcccgcagcccctgagagacaggaaggcagcagcctcaccctgacctgtgaggcagagagtagccaggacctcgagttccagtggctgagagaagagacaggccaggtgctggaaagggggcctgtgcttcagttgcatgacctgaaacgggaggcaggaggcggctatcgctgcgtggcgtctgtgcccagcatacccggcctgaaccgcacacagctggtcaacgtggccatttttggccccccttggatggcattcaaggagaggaaggtgtgggtgaaagagaatatggtgttgaatctgtcttgtgaagcgtcagggcacccccggcccaccatctcctggaacgtcaacggcacggcaagtgaacaagaccaagatccacagcgagtcctgagcaccctgaatgtcctcgtgaccccggagctgttggagacaggtgttgaatgcacggcctccaacgacctgggcaaaaacaccagcatcctcttcctggagctggtcaatttaaccaccctcacaccagactccaacacaaccactggcctcagcacttccactgccagtcctcataccagagccaacagcacctccacagagagaaagctgccggagccggagagccggggcgtggtcatcgtggctgtgattgtgtgcatcctggtcctggcggtgctgggcgctgtcctctatttcctctataagaagggcaagctgccgtgcaggcgctcagggaagcaggagatggagagaaatacatcgatctgaggcattagccccgaatcacttcagctcccttccctgcctggaccattcccagctccctgctcactcttctctcagccaaagcctccaaagggactagagagaagcctcctgctcccctcgcctgcacaccccctttcagagggccactgggttaggacctgaggacctcacttggccctgcaaggcccgcttttcagggaccagtccaccaccatctccacgttgagtgaagctcatcccaagcaaggagccccagtctcccgagcgggtaggagagtttcttgcagaacgtgttttttctttacacacattatggctgtaaatacctggctcctgccagcagctgagctgggtagcctctctgagctggtttcctgccccaaaggctggcttccaccatccaggtgcaccactgaagtgaggacacaccggagccaggcgcctgctcatgttgaagtgcgctgttcacacccgctccggagagcaccccagcagcatccagaagcagctgcagtgttgctgccaccaccctcctgtctgcctcttcaaagtctcctgtgacattttttctttggtcagaagccaggaactggtgtcattccttaaaagatacgtgccggggccaggtgtggtggctcacgcctgtaatcccagcactttgggaggccgaggcgggcggatcacaaagtcaggacgagaccatcctggctaacacggtgaaaccctgtctctactaaaaatacaaaaaaaaattagctaggcgtagtggttggcacctatagtcccagctactcggaaggctgaagcaggagaatggtatgaatccaggaggtggagcttgcagtgagccgagaccgtgccactgcactccagcctgggcaacacagcgagactccgtctcgaggaaaaaaaaagaaaagacgcgtgcctgcggtgaggaagctgggcgctgttttcgagttcaggtgaattagcctcaatcccccgtgttcacttggctcccatagccctcttgatggatcacgtaaaactgaaaggcagcggggagcagacaaagatgaggtctacactgtccttcatggggattaaagctatggttatattagcaccaaacttctacaaaccaagctcagggccccaaccctagaagggcccaaatgagagaatggtacttagggatggaaaacgggcctggctagagcttcgggtgtgtgtgtctgtctgtgtgtatgcatacatatgtgtgtatatatggttttgtcaggtgtgtaaatttgcaaattgtttcctttatatatgtatgtatatatatatatgaaaatatatatatatatgaaaaataaagcttaattgtcccagaaa

SEQ ID NO: 81117 - DNA, 3173 bp, Homo sapiens
  misc_feature (109)..(109): n is a, c, g, or t
  misc_feature (113)..(113): n is a, c, g, or t
  misc_feature (165)..(165): n is a, c, g, or t
  misc_feature (231)..(231): n is a, c, g, or t
cggcacgagctcccagaagagatgggcctcctgcagggcagcagcggtgacaagagggctccgggagaccagggagagaaatacatcgatctgaggcattagccccgantcanttcagctcccttccctgcctggaccattcccagctccctgctcactcttctntcagccaaagcctccaaagggactagagagaagcctcctgctcccctcgcctgcacaccccctttnagagcgccctcggtcccaggagtaccgcatccagctccgcgtctacaaagctccggaggagccaaacatccaggtcaaccccctgggcatccctgtgaacagtaaggagcctgaggaggtcgctacctgtgtagggaggaacgggtaccccattcctcaagtcatctggtacaagaatggccggcctctgaaggaggagaagaaccgggtccacattcagtcgtcccagactgtggagtcgagtggtttgtacaccttgcagagtattctgaaggcacagctggttaaagaagacaaagatgcccagttttactgtgagctcaactaccggctgcccagtgggaaccacatgaaggagtccagggaagtcaccgtccctgttttctacccgacagaaaaagtgtggctggaagtggagcccgtgggaatgctgaaggaaggggaccgcgtggaaatcaggtgtttggctgatggcaaccctccaccacacttcagcatcagcaagcagaaccccagcaccagggaggcagaggaagagacaaccaacgacaacggggtcctggtgctggagcctgcccggaaggaacacagtgggcgctatgaatgtcagggcctggacttggacaccatgatatcgctgctgagtgaaccacaggaactactggtgaactatgtgtctgacgtccgagtgagtcccgcagcccctgagagacaggaaggcagcagcctcaccctgacctgtgaggcagagagtagccaggacctcgagttccagtggctgagagaagagacaggccaggtgctggaaagggggcctgtgcttcagttgcatgacctgaaacgggaggcaggaggcggctatcgctgcgtggcgtctgtgcccagcatacccggcctgaaccgcacacagctggtcaacgtggccatttttggccccccttggatggcattcaaggagaggaaggtgtgggtgaaagagaatatggtgttgaatctgtcttgtgaagcgtcagggcacccccggcccaccatctcctggaacgtcaacggcacggcaagtgaacaagaccaagatccacagcgagtcctgagcaccctgaatgtcctcgtgaccccggagctgttggagacaggtgttgaatgcacggcctccaacgacctgggcaaaaacaccagcatcctcttcctggagctggtcaatttaaccaccctcacaccagactccaacacaaccactggcctcagcacttccactgccagtcctcataccagagccaacagcacctccacagagagaaagctgccggagccggagagccggggcgtggtcatcgtggctgtgattgtgtgcatcctggtcctggcggtgctgggcgctgtcctctatttcctctataagaagggcaagctgccgtgcaggcgctcagggaagcaggagatcacgctgcccccgtctcgtaagagcgaacttgtagttgaagttaagtcagataagctcccagaagagatgggcctcctgcagggcagcagcggtgacaagagggctccgggagaccagggagagaaatacatcgatctgaggcattagccccgaatcacttcagctcccttccctgcctggaccattcccagctccctgctcactcttctctcagccaaagcctccaaagggactagagagaagcctcctgctcccctcgcctgcacaccccctttcagagggccactgggttaggacctgaggacctcacttggccctgcaaggcccgcttttcagggaccagtccaccaccatctccacgttgagtgaagctcatcccaagcaaggagccccagtctcccgagcgggtaggagagtttcttgcagaacgtgttttttctttacacacattatggctgtaaatacctggctcctgccagcagctgagctgggtagcctctctgagctggtttcctgccccaaaggctggcttccaccatccaggtgcaccactgaagtgaggacacaccggagccaggcgcctgctcatgttgaagtgcgctgttcacacccgctccggagagcaccccagcagcatccagaagcagctgcagtgttgctgccaccaccctcctgtctgcctcttcaaagtctcctgtgacattttttctttggtcagaagccaggaactggtgtcattccttaaaagatacgtgccggggccaggtgtggtggctcacgcctgtaatcccagcactttgggaggccgaggcgggcggatcacaaagtcaggacgagaccatcctggctaacacggtgaaaccctgtctctactaaaaatacaaaaaaaaattagctaggcgtagtggttggcacctatagtcccagctactcggaaggctgaagcaggagaatggtatgaatccaggaggtggagcttgcagtgagccgagaccgtgccactgcactccagcctgggcaacacagcgagactccgtctcgaggaaaaaaaaagaaaagacgcgtgcctgcggtgaggaagctgggcgctgttttcgagttcaggtgaattagcctcaatcccccgtgttcacttggctcccatagccctcttgatggatcacgtaaaactgaaaggcagcggggagcagacaaagatgaggtctacactgtccttcatggggattaaagctatggttatattagcaccaaacttctacaaaccaagctcagggccccaaccctagaagggcccaaatgagagaatggtacttagggatggaaaacgggcctggctagagcttcgggtgtgtgtgtctgtctgtgtgtatgcatacatatgtgtgtatatatggttttgtcaggtgtgtaaatttgcaaattgtttcctttatatatgtatgtatatatatatatgaaaatatatatatatatgaaaaataaagcttaattgtcccagaaa

SEQ ID NO: 81118 - DNA, 2405 bp, Homo sapiens
ggttgtctcttcctctgccttcctggtgctggagcctgcccggaaggaacacagtgggcgctatgaatgtcagggcctggacttggacaccatgatatcgctgctgagtgaaccacaggaactactggtgaactatgtgtctgacgtccgagtgagtcccgcagcccctgagagacaggaaggcagcagcctcaccctgacctgtgaggcagagagtagccaggacctcgagttccagtggctgagagaagagacaggccaggtgctggaaagggggcctgtgcttcagttgcatgacctgaaacgggaggcaggaggcggctatcgctgcgtggcgtctgtgcccagcatacccggcctgaaccgcacacagctggtcaacgtggccatttttggccccccttggatggcattcaaggagaggaaggtgtgggtgaaagagaatatggtgttgaatctgtcttgtgaagcgtcagggcacccccggcccaccatctcctggaacgtcaacggcacggcaagtgaacaagaccaagatccacagcgagtcctgagcaccctgaatgtcctcgtgaccccggagctgttggagacaggtgttgaatgcacggcctccaacgacctgggcaaaaacaccagcatcctcttcctggagctggtcaatttaaccaccctcacaccagactccaacacaaccactggcctcagcacttccactgccagtcctcataccagagccaacagcacctccacagagagaaagctgccggagccggagagccggggcgtggtcatcgtggctgtgattgtgtgcatcctggtcctggcggtgctgggcgctgtcctctatttcctctataagaagggcaagctgccgtgcaggcgctcagggaagcaggagatcacgctgcccccgtctcgtaagagcgaacttgtagttgaagttaagtcagataagctcccagaagagatgggcctcctgcagggcagcagcggtgacaagagggctccgggagaccagggagagaaatacatcgatctgaggcattagccccgaatcacttcagctcccttccctgcctggaccattcccagctccctgctcactcttctctcagccaaagcctccaaagggactagagagaagcctcctgctcccctcgcctgcacaccccctttcagagggccactgggttaggacctgaggacctcacttggccctgcaaggcccgcttttcagggaccagtccaccaccatctccacgttgagtgaagctcatcccaagcaaggagccccagtctcccgagcgggtaggagagtttcttgcagaacgtgttttttctttacacacattatggctgtaaatacctggctcctgccagcagctgagctgggtagcctctctgagctggtttcctgccccaaaggctggcttccaccatccaggtgcaccactgaagtgaggacacaccggagccaggcgcctgctcatgttgaagtgcgctgttcacacccgctccggagagcaccccagcagcatccagaagcagctgcagtgttgctgccaccaccctcctgtctgcctcttcaaagtctcctgtgacattttttctttggtcagaagccaggaactggtgtcattccttaaaagatacgtgccggggccaggtgtggtggctcacgcctgtaatcccagcactttgggaggccgaggcgggcggatcacaaagtcaggacgagaccatcctggctaacacggtgaaaccctgtctctactaaaaatacaaaaaaaaattagctaggcgtagtggttggcacctatagtcccagctactcggaaggctgaagcaggagaatggtatgaatccaggaggtggagcttgcagtgagccgagaccgtgccactgcactccagcctgggcaacacagcgagactccgtctcgaggaaaaaaaaagaaaagacgcgtgcctgcggtgaggaagctgggcgctgttttcgagttcaggtgaattagcctcaatcccccgtgttcacttggctcccatagccctcttgatggatcacgtaaaactgaaaggcagcggggagcagacaaagatgaggtctacactgtccttcatggggattaaagctatggttatattagcaccaaacttctacaaaccaagctcagggccccaaccctagaagggcccaaatgagagaatggtacttagggatggaaaacgggcctggctagagcttcgggtgtgtgtgtctgtctgtgtgtatgcatacatatgtgtgtatatatggttttgtcaggtgtgtaaatttgcaaattgtttcctttatatatgtatgtatatatatatatgaaaatatatatatatatgaaaaataaagcttaattgtcccagaaa

SEQ ID NO: 81119 - DNA, 2079 bp, Homo sapiens
cgctctgaggatccccgaacgggtgatgcggttgaatctgtcttgtgaagcgtcagggcacccccggcccaccatctcctggaacgtcaacggcacggcaagtgaacaagaccaagatccacagcgagtcctgagcaccctgaatgtcctcgtgaccccggagctgttggagacaggtgttgaatgcacggcctccaacgacctgggcaaaaacaccagcatcctcttcctggagctgggtgagggctgcatccctgcaggggatggcaggggcaggcccaggcacgggcagtaacttgcgcttctcctaacacccctccctctgcctcctagtcaatttaaccaccctcacaccagactccaacacaaccactggcctcagcacttccactgccagtcctcataccagagccaacagcacctccacagagagaaagctgccggagccggagagccggggcgtggtcatcgtggctgtgattgtgtgcatcctggtcctggcggtgctgggcgctgtcctctatttcctctataagaagggcaagctgccgtgcaggcgctcagggaagcaggagatcacgctgcccccgtctcgtaagagcgaacttgtagttgaagttaagtcagataagctcccagaagagatgggcctcctgcagggcagcagcggtgacaagagggctccgggagaccagggagagaaatacatcgatctgaggcattagccccgaatcacttcagctcccttccctgcctggaccattcccagctccctgctcactcttctctcagccaaagcctccaaagggactagagagaagcctcctgctcccctcgcctgcacaccccctttcagagggccactgggttaggacctgaggacctcacttggccctgcaaggcccgcttttcagggaccagtccaccaccatctccacgttgagtgaagctcatcccaagcaaggagccccagtctcccgagcgggtaggagagtttcttgcagaacgtgttttttctttacacacattatggctgtaaatacctggctcctgccagcagctgagctgggtagcctctctgagctggtttcctgccccaaaggctggcttccaccatccaggtgcaccactgaagtgaggacacaccggagccaggcgcctgctcatgttgaagtgcgctgttcacacccgctccggagagcaccccagcagcatccagaagcagctgcagtgttgctgccaccaccctcctgtctgcctcttcaaagtctcctgtgacattttttctttggtcagaagccaggaactggtgtcattccttaaaagatacgtgccggggccaggtgtggtggctcacgcctgtaatcccagcactttgggaggccgaggcgggcggatcacaaagtcaggacgagaccatcctggctaacacggtgaaaccctgtctctactaaaaatacaaaaaaaaattagctaggcgtagtggttggcacctatagtcccagctactcggaaggctgaagcaggagaatggtatgaatccaggaggtggagcttgcagtgagccgagaccgtgccactgcactccagcctgggcaacacagcgagactccgtctcgaggaaaaaaaaagaaaagacgcgtgcctgcggtgaggaagctgggcgctgttttcgagttcaggtgaattagcctcaatcccccgtgttcacttggctcccatagccctcttgatggatcacgtaaaactgaaaggcagcggggagcagacaaagatgaggtctacactgtccttcatggggattaaagctatggttatattagcaccaaacttctacaaaccaagctcagggccccaaccctagaagggcccaaatgagagaatggtacttagggatggaaaacgggcctggctagagcttcgggtgtgtgtgtctgtctgtgtgtatgcatacatatgtgtgtatatatggttttgtcaggtgtgtaaatttgcaaattgtttcctttatatatgtatgtatatatatatatgaaaatatatatatatatgaaaaataaagcttaattgtcccagaaa

SEQ ID NO: 81120 - DNA, 1694 bp, Homo sapiens
  misc_feature (48)..(48): n is a, c, g, or t
gggcgctcagggaagcaggagatcacgctgcccccgtctcgtaagacntggtcaatttaaccaccctcacaccagactccaacacaaccactggcctcagcacttccactgccagtcctcataccagagccaacagcacctccacagagagaaagctgccggagccggagagccggggcgtggtcatcgtggctgtgattgtgtgcatcctggtcctggcggtgctgggcgctgtcctctatttcctctataagaagggcaagctgccgtgcagggcagcagcggtgacaagagggctccgggagaccagggagagaaatacatcgatctgaggcattagccccgaatcacttcagctcccttccctgcctggaccattcccagctccctgctcactcttctctcagccaaagcctccaaagggactagagagaagcctcctgctcccctcgcctgcacaccccctttcagagggccactgggttaggacctgaggacctcacttggccctgcaaggcccgcttttcagggaccagtccaccaccatctccacgttgagtgaagctcatcccaagcaaggagccccagtctcccgagcgggtaggagagtttcttgcagaacgtgttttttctttacacacattatggctgtaaatacctggctcctgccagcagctgagctgggtagcctctctgagctggtttcctgccccaaaggctggcttccaccatccaggtgcaccactgaagtgaggacacaccggagccaggcgcctgctcatgttgaagtgcgctgttcacacccgctccggagagcaccccagcagcatccagaagcagctgcagtgttgctgccaccaccctcctgtctgcctcttcaaagtctcctgtgacattttttctttggtcagaagccaggaactggtgtcattccttaaaagatacgtgccggggccaggtgtggtggctcacgcctgtaatcccagcactttgggaggccgaggcgggcggatcacaaagtcaggacgagaccatcctggctaacacggtgaaaccctgtctctactaaaaatacaaaaaaaaattagctaggcgtagtggttggcacctatagtcccagctactcggaaggctgaagcaggagaatggtatgaatccaggaggtggagcttgcagtgagccgagaccgtgccactgcactccagcctgggcaacacagcgagactccgtctcgaggaaaaaaaaagaaaagacgcgtgcctgcggtgaggaagctgggcgctgttttcgagttcaggtgaattagcctcaatcccccgtgttcacttggctcccatagccctcttgatggatcacgtaaaactgaaaggcagcggggagcagacaaagatgaggtctacactgtccttcatggggattaaagctatggttatattagcaccaaacttctacaaaccaagctcagggccccaaccctagaagggcccaaatgagagaatggtacttagggatggaaaacgggcctggctagagcttcgggtgtgtgtgtctgtctgtgtgtatgcatacatatgtgtgtatatatggttttgtcaggtgtgtaaatttgcaaattgtttcctttatatatgtatgtatatatatatatgaaaatatatatatatatgaaaaataaagcttaattgtcccagaaa

SEQ ID NO: 81121 - DNA, 3343 bp, Homo sapiens
aaaaaaaacttggctctcgccctccggccgggaagcatggggcttcccaggctggtctgcgccttcttgctcgccgcctgctgctgctgtcctcgcgtcgcgggtgtgcccggagaggctgagcagcctgcgcctgagctggtggaggtggaagtgggcagcacagcccttctgaagtgcggcctctcccagtcccaaggcaacctcagccatgtcgactggttttctgtccacaaggagaagcggacgctcatcttccgtgtgcgccagggccagggccagagcgaacctggggagtacgagcagcggctcagcctccaggacagaggggctactctggccctgactcaagtcaccccccaagacgagcgcatcttcttgtgccagggcaagcgccctcggtcccaggagtaccgcatccagctccgcgtctacaaagctccggaggagccaaacatccaggtcaaccccctgggcatccctgtgaacagtaaggagcctgaggaggtcgctacctgtgtagggaggaacgggtaccccattcctcaagtcatctggtacaagaatggccggcctctgaaggaggagaagaaccgggtccacattcagtcgtcccagactgtggagtcgagtggtttgtacaccttgcagagtattctgaaggcacagctggttaaagaagacaaagatgcccagttttactgtgagctcaactaccggctgcccagtgggaaccacatgaaggagtccagggaagtcaccgtccctgttttctacccgacagaaaaagtgtggctggaagtggagcccgtgggaatgctgaaggaaggggaccgcgtggaaatcaggtgtttggctgatggcaaccctccaccacacttcagcatcagcaagcagaaccccagcaccagggaggcagaggaagagacaaccaacgacaacggggtcctggtgctggagcctgcccggaaggaacacagtgggcgctatgaatgtcagggcctggacttggacaccatgatatcgctgctgagtgaaccacaggaactactggtgaactatgtgtctgacgtccgagtgagtcccgcagcccctgagagacaggaaggcagcagcctcaccctgacctgtgaggcagagagtagccaggacctcgagttccagtggctgagagaagagacaggccaggtgctggaaagggggcctgtgcttcagttgcatgacctgaaacgggaggcaggaggcggctatcgctgcgtggcgtctgtgcccagcatacccggcctgaaccgcacacagctggtcaacgtggccatttttggccccccttggatggcattcaaggagaggaaggtgtgggtgaaagagaatatggtgttgaatctgtcttgtgaagcgtcagggcacccccggcccaccatctcctggaacgtcaacggcacggcaagtgaacaagaccaagatccacagcgagtcctgagcaccctgaatgtcctcgtgaccccggagctgttggagacaggtgttgaatgcacggcctccaacgacctgggcaaaaacaccagcatcctcttcctggagctggtcaatttaaccaccctcacaccagactccaacacaaccactggcctcagcacttccactgccagtcctcataccagagccaacagcacctccacagagagaaagctgccggagccggagagccggggcgtggtcatcgtggctgtgattgtgtgcatcctggtcctggcggtgctgggcgctgtcctctatttcctctataagaagggcaagctgccgtgcaggcgctcagggaagcaggagatcacgctgcccccgtctcgtaagagcgaacttgtagttgaagttaagtcagataagctcccagaagagatgggcctcctgcagggcagcagcggtgacaagagggctccgggagaccagggagagaaatacatcgatctgaggcattagccccgaatcacttcagctcccttccctgcctggaccattcccagctccctgctcactcttctctcagccaaagcctccaaagggactagagagaagcctcctgctcccctcgcctgcacaccccctttcagagggccactgggttaggacctgaggacctcacttggccctgcaaggcccgcttttcagggaccagtccaccaccatctccacgttgagtgaagctcatcccaagcaaggagccccagtctcccgagcgggtaggagagtttcttgcagaacgtgttttttctttacacacattatggctgtaaatacctggctcctgccagcagctgagctgggtagcctctctgagctggtttcctgccccaaaggctggcttccaccatccaggtgcaccactgaagtgaggacacaccggagccaggcgcctgctcatgttgaagtgcgctgttcacacccgctccggagagcaccccagcagcatccagaagcagctgcagtgttgctgccaccaccctcctgtctgcctcttcaaagtctcctgtgacattttttctttggtcagaagccaggaactggtgtcattccttaaaagatacgtgccggggccaggtgtggtggctcacgcctgtaatcccagcactttgggaggccgaggcgggcggatcacaaagtcaggacgagaccatcctggctaacacggtgaaaccctgtctctactaaaaatacaaaaaaaaattagctaggcgtagtggttggcacctatagtcccagctactcggaaggctgaagcaggagaatggtatgaatccaggaggtggagcttgcagtgagccgagaccgtgccactgcactccagcctgggcaacacagcgagactccgtctcgaggaaaaaaaaagaaaagacgcgtgcctgcggtgaggaagctgggcgctgttttcgagttcaggtgaattagcctcaatcccccgtgttcacttggctcccatagccctcttgatggatcacgtaaaactgaaaggcagcggggagcagacaaagatgaggtctacactgtccttcatggggattaaagctatggttatattagcaccaaacttctacaaaccaagctcagggccccaaccctagaagggcccaaatgagagaatggtacttagggatggaaaacgggcctggctagagcttcgggtgtgtgtgtctgtctgtgtgtatgcatacatacagacaaagatgaggtctacactgtccttcatggggattaaagctatggttatattagcaccaaacttctacaaaccaagctcagggccccaaccctagaagggcccaaatgagagaatggtacttagggatgg

SEQ ID NO: 81122 - DNA, 3121 bp, Homo sapiens
aaaaaaaacttggctctcgccctccggccgggaagcatggggcttcccaggctggtctgcgccttcttgctcgccgcctgctgctgctgtcctcgcgtcgcgggtgtgcccggagaggctgagcagcctgcgcctgagctggtggaggtggaagtgggcagcacagcccttctgaagtgcggcctctcccagtcccaaggcaacctcagccatgtcgactggttttctgtccacaaggagaagcggacgctcatcttccgtgtgcgccagggccagggccagagcgaacctggggagtacgagcagcggctcagcctccaggacagaggggctactctggccctgactcaagtcaccccccaagacgagcgcatcttcttgtgccagggcaagcgccctcggtcccaggagtaccgcatccagctccgcgtctacaaagctccggaggagccaaacatccaggtcaaccccctgggcatccctgtgaacagtaaggagcctgaggaggtcgctacctgtgtagggaggaacgggtaccccattcctcaagtcatctggtacaagaatggccggcctctgaaggaggagaagaaccgggtccacattcagtcgtcccagactgtggagtcgagtggtttgtacaccttgcagagtattctgaaggcacagctggttaaagaagacaaagatgcccagttttactgtgagctcaactaccggctgcccagtgggaaccacatgaaggagtccagggaagtcaccgtccctgttttctacccgacagaaaaagtgtggctggaagtggagcccgtgggaatgctgaaggaaggggaccgcgtggaaatcaggtgtttggctgatggcaaccctccaccacacttcagcatcagcaagcagaaccccagcaccagggaggcagaggaagagacaaccaacgacaacggggtcctggtgctggagcctgcccggaaggaacacagtgggcgctatgaatgtcagggcctggacttggacaccatgatatcgctgctgagtgaaccacaggaactactggtgaactatgtgtctgacgtccgagtgagtcccgcagcccctgagagacaggaaggcagcagcctcaccctgacctgtgaggcagagagtagccaggacctcgagttccagtggctgagagaagagacaggccaggtgctggaaagggggcctgtgcttcagttgcatgacctgaaacgggaggcaggaggcggctatcgctgcgtggcgtctgtgcccagcatacccggcctgaaccgcacacagctggtcaacgtggccatttttggccccccttggatggcattcaaggagaggaaggtgtgggtgaaagagaatatggtgttgaatctgtcttgtgaagcgtcagggcacccccggcccaccatctcctggaacgtcaacggcacggcaagtgaacaagaccaagatccacagcgagtcctgagcaccctgaatgtcctcgtgaccccggagctgttggagacaggtgttgaatgcacggcctccaacgacctgggcaaaaacaccagcatcctcttcctggagctggtcaatttaaccaccctcacaccagactccaacacaaccactggcctcagcacttccactgccagtcctcataccagagccaacagcacctccacagagagaaagctgccggagccggagagccggggcgtggtcatcgtggctgtgattgtgtgcatcctggtcctggcggtgctgggcgctgtcctctatttcctctataagaagggcaagctgccgtgcaggcgctcagggaagcaggagatcacgctgcccccgtctcgtaagagcgaacttgtagttgaagttaagtcagataagctcccagaagagatgggcctcctgcagggcagcagcggtgacaagagggctccgggagaccagggagagaaatacatcgatctgaggcattagccccgaatcacttcagctcccttccctgcctggaccattcccagctccctgctcactcttctctcagccaaagcctccaaagggactagagagaagcctcctgctcccctcgcctgcacaccccctttcagagggccactgggttaggacctgaggacctcacttggccctgcaaggcccgcttttcagggaccagtccaccaccatctccacgttgagtgaagctcatcccaagcaaggagccccagtctcccgagcgggtaggagagtttcttgcagaacgtgttttttctttacacacattatggctgtaaatacctggctcctgccagcagctgagctgggtagcctctctgagctggtttcctgccccaaaggctggcttccaccatccaggtgcaccactgaagtgaggacacaccggagccaggcgcctgctcatgttgaagtgcgctgttcacacccgctccggagagcaccccagcagcatccagaagcagctgcagtgttgctgccaccaccctcctgtctgcctcttcaaagtctcctgtgacattttttctttggtcagaagccaggaactggtgtcattccttaaaagatacgtgccggggccaggtgtggtggctcacgcctgtaatcccagcactttgggaggccgaggcgggcggatcacaaagtcaggacgagaccatcctggctaacacggtgaaaccctgtctctactaaaaatacaaaaaaaaattagctaggcgtagtggttggcacctatagtcccagctactcggaaggctgaagcaggagaatggtatgaatccaggaggtggagcttgcagtgagccgagaccgtgccactgcactccagcctgggcaacacagcgagactccgtctcgaggaaaaaaaaagaaaagacgcgtgcctgcggtgaggaagctgggcgctgttttcgagttcaggtgaattagcctcaatcccccgtgttcacttggctcccatagccctcttgatggatcacgtaaaactgaaaggcagcggggagcagacaaagatgaggtctacacagcgaaggtgggtaggtaacctaagaagtaacagagacacttcagagcaggcggttccaacgctaacaccaaagacagaaag

SEQ ID NO: 81123 - DNA, 1037 bp, Homo sapiens
  misc_feature (55)..(55): n is a, c, g, or t
ttataaaaggcaagttccgtcaggcgtcaggaaaccagagtcacggctacccccngtttcgtaaaacgaacttgtagaggtgcaccactgaagtgaggacacaccggagccaggcgcctgctcatgttgaagtgcgctgttcacacccgctccggagagcaccccagcagcatccagaagcagctgcagtgttgctgccaccaccctcctgtctgcctcttcaaagtctcctgtgacattttttctttggtcagaagccaggaactggtgtcattccttaaaagatacgtgccggggccaggtgtggtggctcacgcctgtaatcccagcactttgggaggccgaggcgggcggatcacaaagtcaggacgagaccatcctggctaacacggtgaaaccctgtctctactaaaaatacaaaaaaaaattagctaggcgtagtggttggcacctatagtcccagctactcggaaggctgaagcaggagaatggtatgaatccaggaggtggagcttgcagtgagccgagaccgtgccactgcactccagcctgggcaacacagcgagactccgtctcgaggaaaaaaaaagaaaagacgcgtgcctgcggtgaggaagctgggcgctgttttcgagttcaggtgaattagcctcaatcccccgtgttcacttggctcccatagccctcttgatggatcacgtaaaactgaaaggcagcggggagcagacaaagatgaggtctacactgtccttcatggggattaaagctatggttatattagcaccaaacttctacaaaccaagctcagggccccaaccctagaagggcccaaatgagagaatggtacttagggatggaaaacgggcctggctagagcttcgggtgtgtgtgtctgtctgtgtgtatgcatacatatgtgtgtatatatggttttgtcaggtgtgtaaatttgcaaattgtttcctttatatatgtatgtatatatatatatgaaaatatatatatatatgaaaaataaagcttaattgtcccagaaa

SEQ ID NO: 81124 - DNA, 2678 bp, Homo sapiens
aaaaaaaacttggctctcgccctccggccgggaagcatggggcttcccaggctggtctgcgccttcttgctcgccgcctgctgctgctgtcctcgcgtcgcgggtgtgcccggagaggctgagcagcctgcgcctgagctggtggaggtggaagtgggcagcacagcccttctgaagtgcggcctctcccagtcccaaggcaacctcagccatgtcgactggttttctgtccacaaggagaagcggacgctcatcttccgtgtgcgccagggccagggccagagcgaacctggggagtacgagcagcggctcagcctccaggacagaggggctactctggccctgactcaagtcaccccccaagacgagcgcatcttcttgtgccagggcaagcgccctcggtcccaggagtaccgcatccagctccgcgtctacaaagctccggaggagccaaacatccaggtcaaccccctgggcatccctgtgaacagtaaggagcctgaggaggtcgctacctgtgtagggaggaacgggtaccccattcctcaagtcatctggtacaagaatggccggcctctgaaggaggagaagaaccgggtccacattcagtcgtcccagactgtggagtcgagtggtttgtacaccttgcagagtattctgaaggcacagctggttaaagaagacaaagatgcccagttttactgtgagctcaactaccggctgcccagtgggaaccacatgaaggagtccagggaagtcaccgtccctgttttctacccgacagaaaaagtgtggctggaagtggagcccgtgggaatgctgaaggaaggggaccgcgtggaaatcaggtgtttggctgatggcaaccctccaccacacttcagcatcagcaagcagaaccccagcaccagggaggcagaggaagagacaaccaacgacaacggggtcctggtgctggagcctgcccggaaggaacacagtgggcgctatgaatgtcagggcctggacttggacaccatgatatcgctgctgagtgaaccacaggaactactggtgaactatgtgtctgacgtccgagtgagtcccgcagcccctgagagacaggaaggcagcagcctcaccctgacctgtgaggcagagagtagccaggacctcgagttccagtggctgagagaagagacaggccaggtgctggaaagggggcctgtgcttcagttgcatgacctgaaacgggaggcaggaggcggctatcgctgcgtggcgtctgtgcccagcatacccggcctgaaccgcacacagctggtcaacgtggccatttttggccccccttggatggcattcaaggagaggaaggtgtgggtgaaagagaatatggtgttgaatctgtcttgtgaagcgtcagggcacccccggcccaccatctcctggaacgtcaacggcacggcaagtgaacaagaccaagatccacagcgagtcctgagcaccctgaatgtcctcgtgaccccggagctgttggagacaggtgttgaatgcacggcctccaacgacctgggcaaaaacaccagcatcctcttcctggagctggtcaatttaaccaccctcacaccagactccaacacaaccactggcctcagcacttccactgccagtcctcataccagagccaacagcacctccacagagagaaagctgccggagccggagagccggggcgtggtcatcgtggctgtgattgtgtgcatcctggtcctggcggtgctgggcgctgtcctctatttcctctataagaagggcaagctgccgtgcaggcgctcagggaagcaggagatcacgctgcccccgtctcgtaagagcgaacttgtagttgaagttaagtcagataagctcccagaagagatgggcctcctgcagggcagcagcggtgacaagagggctccgggagaccagggagagaaatacatcgatctgaggcattagccccgaatcacttcagctcccttccctgcctggaccattcccagctccctgctcactcttctctcagccaaagcctccaaagggactagagagaagcctcctgctcccctcgcctgcacaccccctttcagagggccactgggttaggacctgaggacctcacttggccctgcaaggcccgcttttcagggaccagtccaccaccatctccacgttgagtgaagctcatcccaagcaaggagccccagtctcccgagcgggtaggagagtttcttgcagaacgtgttttttctttacacacattatggctgtaaatacctggctcctgccagcagctgagctgggtagcctctctgagctggtttcctgccccaaaggctggcttccaccatccaggtgcaccactgaagtgaggacacaccggagccaggcgcctgctcatgttgaagtgcgctgttcacacccgctccggagagcaccccagcagcatccagaagcagctgcagtgttgctgccaccaccctcctgtctgcctcttcaaagtctcctgtgacattttttctttggtcagaagccaggaactggtgtcattccttaaaagatacgtgccgggattacaggtgtgagccgcatgcccggcgggcttttaacttttaattgtcctaatgttaaggtcaacttgtgggtgttaagaacagtga

SEQ ID NO: 81125 - DNA, 2734 bp, Homo sapiens
  misc_feature (2381)..(2381): n is a, c, g, or t
  misc_feature (2413)..(2413): n is a, c, g, or t
  misc_feature (2497)..(2497): n is a, c, g, or t
  misc_feature (2509)..(2510): n is a, c, g, or t
  misc_feature (2516)..(2516): n is a, c, g, or t
  misc_feature (2534)..(2534): n is a, c, g, or t
  misc_feature (2540)..(2540): n is a, c, g, or t
  misc_feature (2548)..(2548): n is a, c, g, or t
  misc_feature (2550)..(2550): n is a, c, g, or t
  misc_feature (2556)..(2556): n is a, c, g, or t
  misc_feature (2568)..(2568): n is a, c, g, or t
  misc_feature (2576)..(2576): n is a, c, g, or t
  misc_feature (2583)..(2583): n is a, c, g, or t
  misc_feature (2596)..(2596): n is a, c, g, or t
  misc_feature (2605)..(2607): n is a, c, g, or t
  misc_feature (2614)..(2614): n is a, c, g, or t
  misc_feature (2626)..(2626): n is a, c, g, or t
  misc_feature (2661)..(2661): n is a, c, g, or t
  misc_feature (2733)..(2733): n is a, c, g, or t
aaaaaaaacttggctctcgccctccggccgggaagcatggggcttcccaggctggtctgcgccttcttgctcgccgcctgctgctgctgtcctcgcgtcgcgggtgtgcccggagaggctgagcagcctgcgcctgagctggtggaggtggaagtgggcagcacagcccttctgaagtgcggcctctcccagtcccaaggcaacctcagccatgtcgactggttttctgtccacaaggagaagcggacgctcatcttccgtgtgcgccagggccagggccagagcgaacctggggagtacgagcagcggctcagcctccaggacagaggggctactctggccctgactcaagtcaccccccaagacgagcgcatcttcttgtgccagggcaagcgccctcggtcccaggagtaccgcatccagctccgcgtctacaaagctccggaggagccaaacatccaggtcaaccccctgggcatccctgtgaacagtaaggagcctgaggaggtcgctacctgtgtagggaggaacgggtaccccattcctcaagtcatctggtacaagaatggccggcctctgaaggaggagaagaaccgggtccacattcagtcgtcccagactgtggagtcgagtggtttgtacaccttgcagagtattctgaaggcacagctggttaaagaagacaaagatgcccagttttactgtgagctcaactaccggctgcccagtgggaaccacatgaaggagtccagggaagtcaccgtccctgttttctacccgacagaaaaagtgtggctggaagtggagcccgtgggaatgctgaaggaaggggaccgcgtggaaatcaggtgtttggctgatggcaaccctccaccacacttcagcatcagcaagcagaaccccagcaccagggaggcagaggaagagacaaccaacgacaacggggtcctggtgctggagcctgcccggaaggaacacagtgggcgctatgaatgtcagggcctggacttggacaccatgatatcgctgctgagtgaaccacaggaactactggtgaactatgtgtctgacgtccgagtgagtcccgcagcccctgagagacaggaaggcagcagcctcaccctgacctgtgaggcagagagtagccaggacctcgagttccagtggctgagagaagagacaggccaggtgctggaaagggggcctgtgcttcagttgcatgacctgaaacgggaggcaggaggcggctatcgctgcgtggcgtctgtgcccagcatacccggcctgaaccgcacacagctggtcaacgtggccatttttggccccccttggatggcattcaaggagaggaaggtgtgggtgaaagagaatatggtgttgaatctgtcttgtgaagcgtcagggcacccccggcccaccatctcctggaacgtcaacggcacggcaagtgaacaagaccaagatccacagcgagtcctgagcaccctgaatgtcctcgtgaccccggagctgttggagacaggtgttgaatgcacggcctccaacgacctgggcaaaaacaccagcatcctcttcctggagctggtcaatttaaccaccctcacaccagactccaacacaaccactggcctcagcacttccactgccagtcctcataccagagccaacagcacctccacagagagaaagctgccggagccggagagccggggcgtggtcatcgtggctgtgattgtgtgcatcctggtcctggcggtgctgggcgctgtcctctatttcctctataagaagggcaagctgccgtgcaggcgctcagggaagcaggagatcacgctgcccccgtctcgtaagagcgaacttgtagttgaagttaagtcagataagctcccagaagagatgggcctcctgcagggcagcagcggtgacaagagggctccgggagaccagggagagaaatacatcgatctgaggcattagccccgaatcacttcagctcccttccctgcctggaccattcccagctccctgctcactcttctctcagccaaagcctccaaagggactagagagaagcctcctgctcccctcgcctgcacaccccctttcagagggccactgggttaggacctgaggacctcacttggccctgcaaggcccgcttttcagggaccagtccaccaccatctccacgttgagtgaagctcatcccaagcaaggagccccagtctcccgagcgggtaggagagtttcttgcagaacgtgttttttctttacacacattatggctgtaaatacctggctcctgccagcagctgagctgggtagcctctctgagctggtttcctgccccaaaggctggcttccaccatccgataaaaagnatgagccaccgcgcccggccactcttcggatnttaagcctgtgctaatggcgtgtccgctggccgtgtgggagtggaaggttctcttgggcagttagccgtcacagtgagtggganagaagaataggnnaagacnacgaagaataaggatatnccattnagactagntnaaggangcaggaagaganaaaaaagnaaaaacnatatctgagaagnaattaaagnnnaaaaggnaagataatcttnaaagccatcatttcgacctgaggtcccctgaaagntctgaagagatcgtgcaagtcgcctcctggaaagatgacagagccctgggtgtgtgctgggaccgaagcggng

SEQ ID NO: 81126 - DNA, 2207 bp, Homo sapiens
aaaaaaaacttggctctcgccctccggccgggaagcatggggcttcccaggctggtctgcgccttcttgctcgccgcctgctgctgctgtcctcgcgtcgcgggtgtgcccggagaggctgagcagcctgcgcctgagctggtggaggtggaagtgggcagcacagcccttctgaagtgcggcctctcccagtcccaaggcaacctcagccatgtcgactggttttctgtccacaaggagaagcggacgctcatcttccgtgtgcgccagggccagggccagagcgaacctggggagtacgagcagcggctcagcctccaggacagaggggctactctggccctgactcaagtcaccccccaagacgagcgcatcttcttgtgccagggcaagcgccctcggtcccaggagtaccgcatccagctccgcgtctacaaagctccggaggagccaaacatccaggtcaaccccctgggcatccctgtgaacagtaaggagcctgaggaggtcgctacctgtgtagggaggaacgggtaccccattcctcaagtcatctggtacaagaatggccggcctctgaaggaggagaagaaccgggtccacattcagtcgtcccagactgtggagtcgagtggtttgtacaccttgcagagtattctgaaggcacagctggttaaagaagacaaagatgcccagttttactgtgagctcaactaccggctgcccagtgggaaccacatgaaggagtccagggaagtcaccgtccctgttttctacccgacagaaaaagtgtggctggaagtggagcccgtgggaatgctgaaggaaggggaccgcgtggaaatcaggtgtttggctgatggcaaccctccaccacacttcagcatcagcaagcagaaccccagcaccagggaggcagaggaagagacaaccaacgacaacggggtcctggtgctggagcctgcccggaaggaacacagtgggcgctatgaatgtcagggcctggacttggacaccatgatatcgctgctgagtgaaccacaggaactactggtgaactatgtgtctgacgtccgagtgagtcccgcagcccctgagagacaggaaggcagcagcctcaccctgacctgtgaggcagagagtagccaggacctcgagttccagtggctgagagaagagacaggccaggtgctggaaagggggcctgtgcttcagttgcatgacctgaaacgggaggcaggaggcggctatcgctgcgtggcgtctgtgcccagcatacccggcctgaaccgcacacagctggtcaacgtggccatttttggccccccttggatggcattcaaggagaggaaggtgtgggtgaaagagaatatggtgttgaatctgtcttgtgaagcgtcagggcacccccggcccaccatctcctggaacgtcaacggcacggcaagtgaacaagaccaagatccacagcgagtcctgagcaccctgaatgtcctcgtgaccccggagctgttggagacaggtgttgaatgcacggcctccaacgacctgggcaaaaacaccagcatcctcttcctggagctggtcaatttaaccaccctcacaccagactccaacacaaccactggcctcagcacttccactgccagtcctcataccagagccaacagcacctccacagagagaaagctgccggagccggagagccggggcgtggtcatcgtggctgtgattgtgtgcatcctggtcctggcggtgctgggcgctgtcctctatttcctctataagaagggcaagctgccgtgcaggcgctcagggaagcaggagatcacgctgcccccgtctcgtaagagcgaacttgtagttgaagttaagtcagataagctcccagaagagatgggcctcctgcagggcagcagcggtgacaagagggctccgggagaccagggagcaggccccatcttgccttcttaacactactcacagatggcagggccaagcaagtggctgagggagcttggaggaagactgagaaagaccctgtcccatcaccttttcctgaccaatgcccgtggctctgggtgtggccatttcaccagtgcagtcagacgggggccgccctccttccctggcctgccatgcccatcctagcttcctccccaacgctgcccaccaaattcatcggcttctgcttccatctctccttc

SEQ ID NO: 81127 - DNA, 435 bp, Homo sapiens
  misc_feature (24)..(24): n is a, c, g, or t
  misc_feature (66)..(66): n is a, c, g, or t
  misc_feature (154)..(154): n is a, c, g, or t
  misc_feature (156)..(158): n is a, c, g, or t
  misc_feature (162)..(162): n is a, c, g, or t
  misc_feature (178)..(178): n is a, c, g, or t
tgagatttagccttcaaatccccnccgttgtttctactttggcctcctcattagcccttctttgantgtgattctatcgttataatacttgaaatggcagctggggatgtctagttcttaatgattgttggttctttcttcttttccttttttngnnntttntttttttttttttttntcaccaaacttctacaaaccaagctcagggccccaaccctagaagggcccaaatgagagaatggtacttagggatggaaaacgggcctggctagagcttcgggtgtgtgtgtctgtctgtgtgtatgcatacatatgtgtgtatatatggttttgtcaggtgtgtaaatttgcaaattgtttcctttatatatgtatgtatatatatatatgaaaatatatatatatatgaaaaataaagcttaattgtcccagaaa

SEQ ID NO: 81128 - DNA, 748 bp, Homo sapiens
aaaaaaaacttggctctcgccctccggccgggaagcatggggcttcccaggctggtctgcgccttcttgctcgccgcctgctgctgctgtcctcgcgtcgcgggtgtgcccggagaggctgagcagcctgcgcctgagctggtggaggtggaagtgggcagcacagcccttctgaagtgcggcctctcccagtcccaaggcaacctcagccatgtcgactggttttctgtccacaaggagaagcggacgctcatcttccgtgtgcgccagggccagggccagagcgaacctggggagtacgagcagcggctcagcctccaggacagaggggctactctggccctgactcaagtcaccccccaagacgagcgcatcttcttgtgccagggcaagcgccctcggtcccaggagtaccgcatccagctccgcgtctacaaagctccggaggagccaaacatccaggtcaaccccctgggcatccctgtgaacagtaaggagcctgaggaggtcgctacctgtgtagggaggaacgggtaccccattcctcaagtcatctggtacaagaatggccggcctctgaaggaggagaagaaccgtgagtagccctttctcccaaaagccacccttgggccaggtgtggtagctcacacctgtaatctcggtgctttgggaggccaaggcaggaggatctctggaggtgaggagttcaggaccaccttggacaacatagggtgaccctgtctctaca

SEQ ID NO: 81129 - DNA, 3331 bp, Homo sapiens
aaaaaaaacttggctctcgccctccggccgggaagcatggggcttcccaggctggtctgcgccttcttgctcgccgcctgctgctgctgtcctcgcgtcgcgggtgtgcccggagaggctgagcagcctgcgcctgagctggtggaggtggaagtgggcagcacagcccttctgaagtgcggcctctcccagtcccaaggcaacctcagccatgtcgactggttttctgtccacaaggagaagcggacgctcatcttccgtgtgcgccagggccagggccagagcgaacctggggagtacgagcagcggctcagcctccaggacagaggggctactctggccctgactcaagtcaccccccaagacgagcgcatcttcttgtgccagggcaagcgccctcggtcccaggagtaccgcatccagctccgcgtctacaaagctccggaggagccaaacatccaggtcaaccccctgggcatccctgtgaacagtaaggagcctgaggaggtcgctacctgtgtagggaggaacgggtaccccattcctcaagtcatctggtacaagaatggccggcctctgaaggaggagaagaaccgggtccacattcagtcgtcccagactgtggagtcgagtggtttgtacaccttgcagagtattctgaaggcacagctggttaaagaagacaaagatgcccagttttactgtgagctcaactaccggctgcccagtgggaaccacatgaaggagtccagggaagtcaccgtccctgttttctacccgacagaaaaagtgtggctggaagtggagcccgtgggaatgctgaaggaaggggaccgcgtggaaatcaggtgtttggctgatggcaaccctccaccacacttcagcatcagcaagcagaaccccagcaccagggaggcagaggaagagacaaccaacgacaacggggtcctggtgctggagcctgcccggaaggaacacagtgggcgctatgaatgtcagggcctggacttggacaccatgatatcgctgctgagtgaaccacaggaactactggtgaactatgtgtctgacgtccgagtgagtcccgcagcccctgagagacaggaaggcagcagcctcaccctgacctgtgaggcagagagtagccaggacctcgagttccagtggctgagagaagagacaggccaggtgctggaaagggggcctgtgcttcagttgcatgacctgaaacgggaggcaggaggcggctatcgctgcgtggcgtctgtgcccagcatacccggcctgaaccgcacacagctggtcaacgtggccatttttggccccccttggatggcattcaaggagaggaaggtgtgggtgaaagagaatatggtgttgaatctgtcttgtgaagcgtcagggcacccccggcccaccatctcctggaacgtcaacggcacggcaagtgaacaagaccaagatccacagcgagtcctgagcaccctgaatgtcctcgtgaccccggagctgttggagacaggtgttgaatgcacggcctccaacgacctgggcaaaaacaccagcatcctcttcctggagctggtcaatttaaccaccctcacaccagactccaacacaaccactggcctcagcacttccactgccagtcctcataccagagccaacagcacctccacagagagaaagctgccggagccggagagccggggcgtggtcatcgtggctgtgattgtgtgcatcctggtcctggcggtgctgggcgctgtcctctatttcctctataagaagggcaagctgccgtgcaggcgctcagggaagcaggagatcacgctgcccccgtctcgtaagagcgaacttgtagttgaagttaagtcagataagctcccagaagagatgggcctcctgcagggcagcagcggtgacaagagggctccgggagaccagggagagaaatacatcgatctgaggcattagccccgaatcacttcagctcccttccctgcctggaccattcccagctccctgctcactcttctctcagccaaagcctccaaagggactagagagaagcctcctgctcccctcgcctgcacaccccctttcagagggccactgggttaggacctgaggacctcacttggccctgcaaggcccgcttttcagggaccagtccaccaccatctccacgttgagtgaagctcatcccaagcaaggagccccagtctcccgagcgggtaggagagtttcttgcagaacgtgttttttctttacacacattatggctgtaaatacctggctcctgccagcagctgagctgggtagcctctctgagctggtttcctgccccaaaggctggcttccaccatccaggtgcaccactgaagtgaggacacaccggagccaggcgcctgctcatgttgaagtgcgctgttcacacccgctccggagagcaccccagcagcatccagaagcagctgcagtgttgctgccaccaccctcctgtctgcctcttcaaagtctcctgtgacattttttctttggtcagaagccaggaactggtgtcattccttaaaagatacgtgccggggccaggtgtggtggctcacgcctgtaatcccagcactttgggaggccgaggcgggcggatcacaaagtcaggacgagaccatcctggctaacacggtgaaaccctgtctctactaaaaatacaaaaaaaaattagctaggcgtagtggttggcacctatagtcccagctactcggaaggctgaagcaggagaatggtatgaatccaggaggtggagcttgcagtgagccgagaccgtgccactgcactccagcctgggcaacacagcgagactccgtctcgaggaaaaaaaaagaaaagacgcgtgcctgcggtgaggaagctgggcgctgttttcgagttcaggtgaattagcctcaatcccccgtgttcacttggctcccatagccctcttgatggatcacgtaaaactgaaaggcagcggggagcagacaaagatgaggtctacactgtccttcatggggattaaagctatggttatattagcaccaaacttctacaaaccaagctcagggccccaaccctagaagggcccaaatgagagaatggtacttagggatggaaaacgggcctggctagagcttcgggtgtgtgtgtctgtctgtgtgtatgcatacatatgtgtgtatatatggttttgtcaggtgtgtaaatttgcaaattgtttcctttatatatgtatgtatatatatatatgaaaatatatatatatatgaaaaataaagcttaattgtcccagaaa

SEQ ID NO: 81130 - DNA, 3593 bp, Homo sapiens
  misc_feature (3462)..(3462): n is a, c, g, or t
  misc_feature (3473)..(3473): n is a, c, g, or t
  misc_feature (3491)..(3492): n is a, c, g, or t
  misc_feature (3516)..(3517): n is a, c, g, or t
  misc_feature (3521)..(3522): n is a, c, g, or t
  misc_feature (3565)..(3565): n is a, c, g, or t
  misc_feature (3579)..(3580): n is a, c, g, or t
  misc_feature (3586)..(3587): n is a, c, g, or t
aaaaaaaacttggctctcgccctccggccgggaagcatggggcttcccaggctggtctgcgccttcttgctcgccgcctgctgctgctgtcctcgcgtcgcgggtgtgcccggagaggctgagcagcctgcgcctgagctggtggaggtggaagtgggcagcacagcccttctgaagtgcggcctctcccagtcccaaggcaacctcagccatgtcgactggttttctgtccacaaggagaagcggacgctcatcttccgtgtgcgccagggccagggccagagcgaacctggggagtacgagcagcggctcagcctccaggacagaggggctactctggccctgactcaagtcaccccccaagacgagcgcatcttcttgtgccagggcaagcgccctcggtcccaggagtaccgcatccagctccgcgtctacaaagctccggaggagccaaacatccaggtcaaccccctgggcatccctgtgaacagtaaggagcctgaggaggtcgctacctgtgtagggaggaacgggtaccccattcctcaagtcatctggtacaagaatggccggcctctgaaggaggagaagaaccgggtccacattcagtcgtcccagactgtggagtcgagtggtttgtacaccttgcagagtattctgaaggcacagctggttaaagaagacaaagatgcccagttttactgtgagctcaactaccggctgcccagtgggaaccacatgaaggagtccagggaagtcaccgtccctgttttctacccgacagaaaaagtgtggctggaagtggagcccgtgggaatgctgaaggaaggggaccgcgtggaaatcaggtgtttggctgatggcaaccctccaccacacttcagcatcagcaagcagaaccccagcaccagggaggcagaggaagagacaaccaacgacaacggggtcctggtgctggagcctgcccggaaggaacacagtgggcgctatgaatgtcagggcctggacttggacaccatgatatcgctgctgagtgaaccacaggaactactggtgaactatgtgtctgacgtccgagtgagtcccgcagcccctgagagacaggaaggcagcagcctcaccctgacctgtgaggcagagagtagccaggacctcgagttccagtggctgagagaagagacaggccaggtgctggaaagggggcctgtgcttcagttgcatgacctgaaacgggaggcaggaggcggctatcgctgcgtggcgtctgtgcccagcatacccggcctgaaccgcacacagctggtcaacgtggccatttttggccccccttggatggcattcaaggagaggaaggtgtgggtgaaagagaatatggtgttgaatctgtcttgtgaagcgtcagggcacccccggcccaccatctcctggaacgtcaacggcacggcaagtgaacaagaccaagatccacagcgagtcctgagcaccctgaatgtcctcgtgaccccggagctgttggagacaggtgttgaatgcacggcctccaacgacctgggcaaaaacaccagcatcctcttcctggagctggtcaatttaaccaccctcacaccagactccaacacaaccactggcctcagcacttccactgccagtcctcataccagagccaacagcacctccacagagagaaagctgccggagccggagagccggggcgtggtcatcgtggctgtgattgtgtgcatcctggtcctggcggtgctgggcgctgtcctctatttcctctataagaagggcaagctgccgtgcaggcgctcagggaagcaggagatcacgctgcccccgtctcgtaagagcgaacttgtagttgaagttaagtcagataagctcccagaagagatgggcctcctgcagggcagcagcggtgacaagagggctccgggagaccagggagagaaatacatcgatctgaggcattagccccgaatcacttcagctcccttccctgcctggaccattcccagctccctgctcactcttctctcagccaaagcctccaaagggactagagagaagcctcctgctcccctcgcctgcacaccccctttcagagggccactgggttaggacctgaggacctcacttggccctgcaaggcccgcttttcagggaccagtccaccaccatctccacgttgagtgaagctcatcccaagcaaggagccccagtctcccgagcgggtaggagagtttcttgcagaacgtgttttttctttacacacattatggctgtaaatacctggctcctgccagcagctgagctgggtagcctctctgagctggtttcctgccccaaaggctggcttccaccatccaggtgcaccactgaagtgaggacacaccggagccaggcgcctgctcatgttgaagtgcgctgttcacacccgctccggagagcaccccagcagcatccagaagcagctgcagtgttgctgccaccaccctcctgtctgcctcttcaaagtctcctgtgacattttttctttggtcagaagccaggaactggtgtcattccttaaaagatacgtgccggggccaggtgtggtggctcacgcctgtaatcccagcactttgggaggccgaggcgggcggatcacaaagtcaggacgagaccatcctggctaacacggtgaaaccctgtctctactaaaaatacaaaaaaaaattagctaggcgtagtggttggcacctatagtcccagctactcggaaggctgaagcaggagaatggtatgaatccaggaggtggagcttgcagtgagccgagaccgtgccactgcactccagcctgggcaacacagcgagactccgtctcgaggaaaaaaaaagaaaagacgcgtgcctgcggtgaggaagctgggcgctgttttcgagttcaggtgaattagcctcaatcccccgtgttcacttggctcccatagccctcttgatggatcacgtaaaactgaaaggcagcggggagcagacaaagatgaggtctacactgtccttcatggggattaaagctatggttatattagcaccaaacttctacaaaccaagctcagggccccaaccctagaagggcccaaatgagagaatggtacttagggatggaaaacgggcctggctagagcttcgggtgtgtgtgtctgtctgtgtgtatgcatacatatgtgtgtatatatggttttgtcaggtgtgtaaatttgcaaattgtttcctttatatatgtatgtatatatatatatgaaaatatatatatatatgaaaaataaagcttaattgtcccagaaaatcatacattgcttttttattcaacatgggtaccacaggaacctgggggcctgtgaaactacaaccaaaaggcacacaaaaccgtttccagttggcagcagagatcaggggttacctctgcttctgagcanatggctcaagntctaccagagcagacagnnaccctacttttcagcagcaaaacnncccnnatgacgcagcacgaagggcctggcaggctgttagcaggagctntgtcccttcctatnntttccnnccactt

SEQ ID NO: 81131 - DNA, 1145 bp, Homo sapiens
  misc_feature (1066)..(1066): n is a, c, g, or t
  misc_feature (1068)..(1069): n is a, c, g, or t
  misc_feature (1076)..(1076): n is a, c, g, or t
  misc_feature (1144)..(1144): n is a, c, g, or t
aaaaaaaacttggctctcgccctccggccgggaagcatggggcttcccaggctggtctgcgccttcttgctcgccgcctgctgctgctgtcctcgcgtcgcgggtgtgcccggagaggctgagcagcctgcgcctgagctggtggaggtggaagtgggcagcacagcccttctgaagtgcggcctctcccagtcccaaggcaacctcagccatgtcgactggttttctgtccacaaggagaagcggacgctcatcttccgtgtgcgccagggccagggccagagcgaacctggggagtacgagcagcggctcagcctccaggacagaggggctactctggccctgactcaagtcaccccccaagacgagcgcatcttcttgtgccagggcaagcgccctcggtcccaggagtaccgcatccagctccgcgtctacaaagctccggaggagccaaacatccaggtcaaccccctgggcatccctgtgaacagtaaggagcctgaggaggtcgctacctgtgtagggaggaacgggtaccccattcctcaagtcatctggtacaagaatggccggcctctgaaggaggagaagaaccgggtccacattcagtcgtcccagactgtggagtcgagtggtttgtacaccttgcagagtattctgaaggcacagctggttaaagaagacaaagatgcccagttttactgtgagctcaactaccggctgcccagtgggaaccacatgaaggagtccagggaagtcaccgtccctgttttctacccgacagaaaaagtgtggctggaagtggagcccgtgggaatgctgaaggaaggggaccgcgtggaaatcaggtgtttggctgatggcaaccctccaccacacttcagcatcagcaagcagaaccccagcaccagggaggcagaggaagagacaaccaacgacaacggggtcctggtgctggagcctgcccggaaggaacacagtgggcgctatgaatgtcagggcctggacttggacaccatgatatcgctgctgagtgaaccacaggaactactggtgaactatgttntnngtcgatnatccgcgccctgagaaaagaagcacagctcacctgactgtgagcaaaatagcagactcgattcagtgnt

SEQ ID NO: 81132 - DNA, 2243 bp, Homo sapiens
  misc_feature (5)..(5): n is a, c, g, or t
gacanatagaaaagtttgtaaaaaaagcaggtggtacggtccggaattcccgggatgccaggacctcgagttccagtggctgagagaagagacaggccaggtgctggaaagggggcctgtgcttcagttgcatgacctgaaacgggaggcaggaggcggctatcgctgcgtggcgtctgtgcccagcatacccggcctgaaccgcacacagctggtcaacgtggccatttttggccccccttggatggcattcaaggagaggaaggtgtgggtgaaagagaatatggtgttgaatctgtcttgtgaagcgtcagggcacccccggcccaccatctcctggaacgtcaacggcacggcaagtgaacaagaccaagatccacagcgagtcctgagcaccctgaatgtcctcgtgaccccggagctgttggagacaggtgttgaatgcacggcctccaacgacctgggcaaaaacaccagcatcctcttcctggagctggtcaatttaaccaccctcacaccagactccaacacaaccactggcctcagcacttccactgccagtcctcataccagagccaacagcacctccacagagagaaagctgccggagccggagagccggggcgtggtcatcgtggctgtgattgtgtgcatcctggtcctggcggtgctgggcgctgtcctctatttcctctataagaagggcaagctgccgtgcaggcgctcagggaagcaggagatcacgctgcccccgtctcgtaagagcgaacttgtagttgaagttaagtcagataagctcccagaagagatgggcctcctgcagggcagcagcggtgacaagagggctccgggagaccagggagagaaatacatcgatctgaggcattagccccgaatcacttcagctcccttccctgcctggaccattcccagctccctgctcactcttctctcagccaaagcctccaaagggactagagagaagcctcctgctcccctcgcctgcacaccccctttcagagggccactgggttaggacctgaggacctcacttggccctgcaaggcccgcttttcagggaccagtccaccaccatctccacgttgagtgaagctcatcccaagcaaggagccccagtctcccgagcgggtaggagagtttcttgcagaacgtgttttttctttacacacattatggctgtaaatacctggctcctgccagcagctgagctgggtagcctctctgagctggtttcctgccccaaaggctggcttccaccatccaggtgcaccactgaagtgaggacacaccggagccaggcgcctgctcatgttgaagtgcgctgttcacacccgctccggagagcaccccagcagcatccagaagcagctgcagtgttgctgccaccaccctcctgtctgcctcttcaaagtctcctgtgacattttttctttggtcagaagccaggaactggtgtcattccttaaaagatacgtgccggggccaggtgtggtggctcacgcctgtaatcccagcactttgggaggccgaggcgggcggatcacaaagtcaggacgagaccatcctggctaacacggtgaaaccctgtctctactaaaaatacaaaaaaaaattagctaggcgtagtggttggcacctatagtcccagctactcggaaggctgaagcaggagaatggtatgaatccaggaggtggagcttgcagtgagccgagaccgtgccactgcactccagcctgggcaacacagcgagactccgtctcgaggaaaaaaaaagaaaagacgcgtgcctgcggtgaggaagctgggcgctgttttcgagttcaggtgaattagcctcaatcccccgtgttcacttggctcccatagccctcttgatggatcacgtaaaactgaaaggcagcggggagcagacaaagatgaggtctacactgtccttcatggggattaaagctatggttatattagcaccaaacttctacaaaccaagctcagggccccaaccctagaagggcccaaatgagagaatggtacttagggatggaaaacgggcctggctagagcttcgggtgtgtgtgtctgtctgtgtgtatgcatacatatgtgtgtatatatggttttgtcaggtgtgtaaatttgcaaattgtttcctttatatatgtatgtatatatatatatgaaaatatatatatatatgaaaaataaagcttaattgtcccagaaa

SEQ ID NO: 81133 - DNA, 3197 bp, Homo sapiens
aaaaaaaacttggctctcgccctccggccgggaagcatggggcttcccaggctggtctgcgccttcttgctcgccgcctgctgctgctgtcctcgcgtcgcgggtgtgcccggagaggctgagcagcctgcgcctgagctggtggaggtggaagtgggcagcacagcccttctgaagtgcggcctctcccagtcccaaggcaacctcagccatgtcgactggttttctgtccacaaggagaagcggacgctcatcttccgtgtgcgccagggccagggccagagcgaacctggggagtacgagcagcggctcagcctccaggacagaggggctactctggccctgactcaagtcaccccccaagacgagcgcatcttcttgtgccagggcaagcgccctcggtcccaggagtaccgcatccagctccgcgtctacaaagctccggaggagccaaacatccaggtcaaccccctgggcatccctgtgaacagtaaggagcctgaggaggtcgctacctgtgtagggaggaacgggtaccccattcctcaagtcatctggtacaagaatggccggcctctgaaggaggagaagaaccgggtccacattcagtcgtcccagactgtggagtcgagtggtttgtacaccttgcagagtattctgaaggcacagctggttaaagaagacaaagatgcccagttttactgtgagctcaactaccggctgcccagtgggaaccacatgaaggagtccagggaagtcaccgtccctgttttctacccgacagaaaaagtgtggctggaagtggagcccgtgggaatgctgaaggaaggggaccgcgtggaaatcaggtgtttggctgatggcaaccctccaccacacttcagcatcagcaagcagaaccccagcaccagggaggcagaggaagagacaaccaacgacaacggggtcctggtgctggagcctgcccggaaggaacacagtgggcgctatgaatgtcagggcctggacttggacaccatgatatcgctgctgagtgaaccacaggaactactggtgaactatgtgtctgacgtccgagtgagtcccgcagcccctgagagacaggaaggcagcagcctcaccctgacctgtgaggcagagagtagccaggacctcgagttccagtggctgagagaagagacaggccaggtgctggaaagggggcctgtgcttcagttgcatgacctgaaacgggaggcaggaggcggctatcgctgcgtggcgtctgtgcccagcatacccggcctgaaccgcacacagctggtcaacgtggccatttttggccccccttggatggcattcaaggagaggaaggtgtgggtgaaagagaatatggtgttgaatctgtcttgtgaagcgtcagggcacccccggcccaccatctcctggaacgtcaacggcacggcaagtgaacaagaccaagatccacagcgagtcctgagcaccctgaatgtcctcgtgaccccggagctgttggagacaggtgttgaatgcacggcctccaacgacctgggcaaaaacaccagcatcctcttcctggagctggtcaatttaaccaccctcacaccagactccaacacaaccactggcctcagcacttccactgccagtcctcataccagagccaacagcacctccacagagagaaagctgccggagccggagagccggggcgtggtcatcgtggctgtgattgtgtgcatcctggtcctggcggtgctgggcgctgtcctctatttcctctataagaagggcaagctgccgtgcaggcgctcagggaagcaggagatcacgctgcccccgtctcgtaagagcgaacttgtagttgaagttaagtcagataagctcccagaagagatgggcctcctgcagggcagcagcggtgacaagagggctccgggagaccagggagagaaatacatcgatctgaggcattagccccgaatcacttcagctcccttccctgcctggaccattcccagctccctgctcactcttctctcagccaaagcctccaaagggactagagagaagcctcctgctcccctcgcctgcacaccccctttcagagggccactgggttaggacctgaggacctcacttggccctgcaaggcccgcttttcagggaccagtccaccaccatctccacgttgagtgaagctcatcccaagcaaggagccccagtctcccgagcggaggtgcaccactgaagtgaggacacaccggagccaggcgcctgctcatgttgaagtgcgctgttcacacccgctccggagagcaccccagcagcatccagaagcagctgcagtgttgctgccaccaccctcctgtctgcctcttcaaagtctcctgtgacattttttctttggtcagaagccaggaactggtgtcattccttaaaagatacgtgccggggccaggtgtggtggctcacgcctgtaatcccagcactttgggaggccgaggcgggcggatcacaaagtcaggacgagaccatcctggctaacacggtgaaaccctgtctctactaaaaatacaaaaaaaaattagctaggcgtagtggttggcacctatagtcccagctactcggaaggctgaagcaggagaatggtatgaatccaggaggtggagcttgcagtgagccgagaccgtgccactgcactccagcctgggcaacacagcgagactccgtctcgaggaaaaaaaaagaaaagacgcgtgcctgcggtgaggaagctgggcgctgttttcgagttcaggtgaattagcctcaatcccccgtgttcacttggctcccatagccctcttgatggatcacgtaaaactgaaaggcagcggggagcagacaaagatgaggtctacactgtccttcatggggattaaagctatggttatattagcaccaaacttctacaaaccaagctcagggccccaaccctagaagggcccaaatgagagaatggtacttagggatggaaaacgggcctggctagagcttcgggtgtgtgtgtctgtctgtgtgtatgcatacatatgtgtgtatatatggttttgtcaggtgtgtaaatttgcaaattgtttcctttatatatgtatgtatatatatatatgaaaatatatatatatatgaaaaataaagcttaattgtcccagaaa

SEQ ID NO: 81134 - DNA, 3539 bp, Homo sapiens
  misc_feature (3408)..(3408): n is a, c, g, or t
  misc_feature (3419)..(3419): n is a, c, g, or t
  misc_feature (3437)..(3438): n is a, c, g, or t
  misc_feature (3462)..(3463): n is a, c, g, or t
  misc_feature (3467)..(3468): n is a, c, g, or t
  misc_feature (3511)..(3511): n is a, c, g, or t
  misc_feature (3525)..(3526): n is a, c, g, or t
  misc_feature (3532)..(3533): n is a, c, g, or t
aaaaaaaacttggctctcgccctccggccgggaagcatggggcttcccaggctggtctgcgccttcttgctcgccgcctgctgctgctgtcctcgcgtcgcgggtgtgcccggagaggctgagcagcctgcgcctgagctggtggaggtggaagtgggcagcacagcccttctgaagtgcggcctctcccagtcccaaggcaacctcagccatgtcgactggttttctgtccacaaggagaagcggacgctcatcttccgtgtgcgccagggccagggccagagcgaacctggggagtacgagcagcggctcagcctccaggacagaggggctactctggccctgactcaagtcaccccccaagacgagcgcatcttcttgtgccagggcaagcgccctcggtcccaggagtaccgcatccagctccgcgtctacaaagctccggaggagccaaacatccaggtcaaccccctgggcatccctgtgaacagtaaggagcctgaggaggtcgctacctgtgtagggaggaacgggtaccccattcctcaagtcatctggtacaagaatggccggcctctgaaggaggagaagaaccgggtccacattcagtcgtcccagactgtggagtcgagtggtttgtacaccttgcagagtattctgaaggcacagctggttaaagaagacaaagatgcccagttttactgtgagctcaactaccggctgcccagtgggaaccacatgaaggagtccagggaagtcaccgtccctgttttctacccgacagaaaaagtgtggctggaagtggagcccgtgggaatgctgaaggaaggggaccgcgtggaaatcaggtgtttggctgatggcaaccctccaccacacttcagcatcagcaagcagaaccccagcaccagggaggcagaggaagagacaaccaacgacaacggggtcctggtgctggagcctgcccggaaggaacacagtgggcgctatgaatgtcagggcctggacttggacaccatgatatcgctgctgagtgaaccacaggaactactggtgaactatgtgtctgacgtccgagtgagtcccgcagcccctgagagacaggaaggcagcagcctcaccctgacctgtgaggcagagagtagccaggacctcgagttccagtggctgagagaagagacaggccaggtgctggaaagggggcctgtgcttcagttgcatgacctgaaacgggaggcaggaggcggctatcgctgcgtggcgtctgtgcccagcatacccggcctgaaccgcacacagctggtcaacgtggccatttttggccccccttggatggcattcaaggagaggaaggtgtgggtgaaagagaatatggtgttgaatctgtcttgtgaagcgtcagggcacccccggcccaccatctcctggaacgtcaacggcacggcaagtgaacaagaccaagatccacagcgagtcctgagcaccctgaatgtcctcgtgaccccggagctgttggagacaggtgttgaatgcacggcctccaacgacctgggcaaaaacaccagcatcctcttcctggagctggtcaatttaaccaccctcacaccagactccaacacaaccactggcctcagcacttccactgccagtcctcataccagagccaacagcacctccacagagagaaagctgccggagccggagagccggggcgtggtcatcgtggctgtgattgtgtgcatcctggtcctggcggtgctgggcgctgtcctctatttcctctataagaagggcaagctgccgtgcaggcgctcagggaagcaggagatcacgctgcccccgtctcgtaagagcgaacttgtagttgaagttaagtcagataagctcccagaagagatgggcctcctgcagggcagcagcggtgacaagagggctccgggagaccagggagagaaatacatcgatctgaggcattagccccgaatcacttcagctcccttccctgcctggaccattcccagctccctgctcactcttctctcagccaaagcctccaaagggactagagagaagcctcctgctcccctcgcctgcacaccccctttcagagggccactgggttaggacctgaggacctcacttggccctgcaaggcccgcttttcagggaccagtccaccaccatctccacgttgagtgaagctcatcccaagcaaggagccccagtctcccgagcgggtaggagagtttcttgcagaacgtgttttttctttacacacattatggctgtaaatacctggctcctgccagcagctgagctgggtagcctctctgagctggtttcctgccccaaaggctggcttccaccatccaggtgcaccactgaagtgaggacacaccggagccaggcgcctgctcatgttgaagtgcgctgttcacacccgctccggagagcaccccagcagcatccagaagcagctgcagtgttgctgccaccaccctcctgtctgcctcttcaaagtctcctgtgacattttttctttggtcagaagccaggaactggtgtcattccttaaaagatacgtgccggggccaggtgtggtggctcacgcctgtaatcccagcactttgggaggccgaggcgggcggatcacaaagtcaggacgagaccatcctggctaacacggtgaaaccctgtctctactaaaaatacaaaaaaaaattagctaggcgtagtggttggcacctatagtcccagctactcggaaggctgaagcaggagaatggtatgaatccaggaggtggagcttgcagtgagccgagaccgtgccactgcactccagcctgggcaacacagcgagactccgtctcgaggaaaaaaaaagaaaagacgcgtgcctgcggtgaggaagctgggcgctgttttcgagttcaggtgaattagcctcaatcccccgtgttcacttggctcccatagccctcttgatggatcacgtaaaactgaaaggcagcggggagcagacaaagatgaggtctacactgtccttcatggggattaaagctatggttatattagcaccaaacttctacaaaccaagctcagggccccaaccctagaagggcccaaatgagagaatggtacttagggatggaatatgtgtgtatatatggttttgtcaggtgtgtaaatttgcaaattgtttcctttatatatgtatgtatatatatatatgaaaatatatatatatatgaaaaataaagcttaattgtcccagaaaatcatacattgcttttttattcaacatgggtaccacaggaacctgggggcctgtgaaactacaaccaaaaggcacacaaaaccgtttccagttggcagcagagatcaggggttacctctgcttctgagcanatggctcaagntctaccagagcagacagnnaccctacttttcagcagcaaaacnncccnnatgacgcagcacgaagggcctggcaggctgttagcaggagctntgtcccttcctatnntttccnnccactt

SEQ ID NO: 81135 - DNA, 3597 bp, Homo sapiens
aaaaaaaacttggctctcgccctccggccgggaagcatggggcttcccaggctggtctgcgccttcttgctcgccgcctgctgctgctgtcctcgcgtcgcgggtgtgcccggagaggctgagcagcctgcgcctgagctggtggaggtggaagtgggcagcacagcccttctgaagtgcggcctctcccagtcccaaggcaacctcagccatgtcgactggttttctgtccacaaggagaagcggacgctcatcttccgtgtgcgccagggccagggccagagcgaacctggggagtacgagcagcggctcagcctccaggacagaggggctactctggccctgactcaagtcaccccccaagacgagcgcatcttcttgtgccagggcaagcgccctcggtcccaggagtaccgcatccagctccgcgtctacaaagctccggaggagccaaacatccaggtcaaccccctgggcatccctgtgaacagtaaggagcctgaggaggtcgctacctgtgtagggaggaacgggtaccccattcctcaagtcatctggtacaagaatggccggcctctgaaggaggagaagaaccgggtccacattcagtcgtcccagactgtggagtcgagtggtttgtacaccttgcagagtattctgaaggcacagctggttaaagaagacaaagatgcccagttttactgtgagctcaactaccggctgcccagtgggaaccacatgaaggagtccagggaagtcaccgtccctgttttctacccgacagaaaaagtgtggctggaagtggagcccgtgggaatgctgaaggaaggggaccgcgtggaaatcaggtgtttggctgatggcaaccctccaccacacttcagcatcagcaagcagaaccccagcaccagggaggcagaggaagagacaaccaacgacaacggggtcctggtgctggagcctgcccggaaggaacacagtgggcgctatgaatgtcagggcctggacttggacaccatgatatcgctgctgagtgaaccacaggaactactggtgaactatgtgtctgacgtccgagtgagtcccgcagcccctgagagacaggaaggcagcagcctcaccctgacctgtgaggcagagagtagccaggacctcgagttccagtggctgagagaagagacaggccaggtgctggaaagggggcctgtgcttcagttgcatgacctgaaacgggaggcaggaggcggctatcgctgcgtggcgtctgtgcccagcatacccggcctgaaccgcacacagctggtcaacgtggccatttttggccccccttggatggcattcaaggagaggaaggtgtgggtgaaagagaatatggtgttgaatctgtcttgtgaagcgtcagggcacccccggcccaccatctcctggaacgtcaacggcacggcaagtgaacaagaccaagatccacagcgagtcctgagcaccctgaatgtcctcgtgaccccggagctgttggagacaggtgttgaatgcacggcctccaacgacctgggcaaaaacaccagcatcctcttcctggagctggtcaatttaaccaccctcacaccagactccaacacaaccactggcctcagcacttccactgccagtcctcataccagagccaacagcacctccacagagagaaagctgccggagccggagagccggggcgtggtcatcgtggctgtgattgtgtgcatcctggtcctggcggtgctgggcgctgtcctctatttcctctataagaagggcaagctgccgtgcaggcgctcagggaagcaggagatcacgctgcccccgtctcgtaagagcgaacttgtagttgaagttaagtcagataagctcccagaagagatgggcctcctgcagggcagcagcggtgacaagagggctccgggagaccagggagagaaatacatcgatctgaggcattagccccgaatcacttcagctcccttccctgcctggaccattcccagctccctgctcactcttctctcagccaaagcctccaaagggactagagagaagcctcctgctcccctcgcctgcacaccccctttcagagggccactgggttaggacctgaggacctcacttggccctgcaaggcccgcttttcagggaccagtccaccaccatctccacgttgagtgaagctcatcccaagcaaggagccccagtctcccgagcgggtaggagagtttcttgcagaacgtgttttttctttacacacattatggctgtaaatacctggctcctgccagcagctgagctgggtagcctctctgagctggtttcctgccccaaaggctggcttccaccatccaggtgcaccactgaagtgaggacacaccggagccaggcgcctgctcatgttgaagtgcgctgttcacacccgctccggagagcaccccagcagcatccagaagcagctgcagtgttgctgccaccaccctcctgtctgcctcttcaaagtctcctgtgacattttttctttggtcagaagccaggaactggtgtcattccttaaaagatacgtgccggggccaggtgtggtggctcacgcctgtaatcccagcactttgggaggccgaggcgggcggatcacaaagtcaggacgagaccatcctggctaacacggtgaaaccctgtctctactaaaaatacaaaaaaaaattagctaggcgtagtggttggcacctatagtcccagctactcggaaggctgaagcaggagaatggtatgaatccaggaggtggagcttgcagtgagccgagaccgtgccactgcactccagcctgggcaacaggagtgaaactctatctcaaaaaaaaggagctaactttaaatattaaaacagaaatgggttaaccagaaacaaaagattgatagatataggtcatgctaactttaataaaaaagaatcttgggtggctacattaataccaggcaaagtagatttcagagaaaacaatattactggaggataacagagggaattttcatagacaatgtgttcaattcattacagtagaccataataattctaaatgtatgtgcacctaataataaaaattgaaaacacatgaaacaaaatcgggtagcatgacaagggagaaacaggcaaattcaccattacagtaaaatattacacactcatcttcatgattgtagaacagtcgacaatcttcaggatgccagaggctaaacataccataaccattgatctattccatatggacttcgcaaggagcaatatattcttcatttttcccggaccgaaattactaggaaccgtcggtgcaacagtcaattgtcatttacaccttttggtacggataaaaaaccgcacaggtgggatactgacataagtaacctcaaaaacgagccattgagaaaatgtttgcacgggaagttgaggctcttctcgctctgcactctattgctgagctgtccgcctctccccctcccccgaacacaacaacacaagacacacaaacacacacagcgaaaaacacacacaaagaaaaaagaacagaagcaggaccagaa

SEQ ID NO: 81136 - DNA, 2416 bp, Homo sapiens
aaaaaaaacttggctctcgccctccggccgggaagcatggggcttcccaggctggtctgcgccttcttgctcgccgcctgctgctgctgtcctcgcgtcgcgggtgtgcccggagaggctgagcagcctgcgcctgagctggtggaggtggaagtgggcagcacagcccttctgaagtgcggcctctcccagtcccaaggcaacctcagccatgtcgactggttttctgtccacaaggagaagcggacgctcatcttccgtgtgcgccagggccagggccagagcgaacctggggagtacgagcagcggctcagcctccaggacagaggggctactctggccctgactcaagtcaccccccaagacgagcgcatcttcttgtgccagggcaagcgccctcggtcccaggagtaccgcatccagctccgcgtctacaaagctccggaggagccaaacatccaggtcaaccccctgggcatccctgtgaacagtaaggagcctgaggaggtcgctacctgtgtagggaggaacgggtaccccattcctcaagtcatctggtacaagaatggccggcctctgaaggaggagaagaaccgggtccacattcagtcgtcccagactgtggagtcgagtggtttgtacaccttgcagagtattctgaaggcacagctggttaaagaagacaaagatgcccagttttactgtgagctcaactaccggctgcccagtgggaaccacatgaaggagtccagggaagtcaccgtccctgttttctacccgacagaaaaagtgtggctggaagtggagcccgtgggaatgctgaaggaaggggaccgcgtggaaatcaggtgtttggctgatggcaaccctccaccacacttcagcatcagcaagcagaaccccagcaccagggaggcagaggaagagacaaccaacgacaacggggtcctggtgctggagcctgcccggaaggaacacagtgggcgctatgaatgtcagggcctggacttggacaccatgatatcgctgctgagtgaaccacaggaactactggtgaactatgtgtctgacgtccgagtgagtcccgcagcccctgagagacaggaaggcagcagcctcaccctgacctgtgaggcagagagtagccaggacctcgagttccagtggctgagagaagagacaggccaggtgctggaaagggggcctgtgcttcagttgcatgacctgaaacgggaggcaggaggcggctatcgctgcgtggcgtctgtgcccagcatacccggcctgaaccgcacacagctggtcaacgtggccatttttggccccccttggatggcattcaaggagaggaaggtgtgggtgaaagagaatatggtgttgaatctgtcttgtgaagcgtcagggcacccccggcccaccatctcctggaacgtcaacggcacggcaagtgaacaagaccaagatccacagcgagtcctgagcaccctgaatgtcctcgtgaccccggagctgttggagacaggtgttgaatgcacggcctccaacgacctgggcaaaaacaccagcatcctcttcctggagctggtcaatttaaccaccctcacaccagactccaacacaaccactggcctcagcacttccactgccagtcctcataccagagccaacagcacctccacagagagaaagctgccggagccggagagccggggcgtggtcatcgtggctgtgattgtgtgcatcctggtcctggcggtgctgggcgctgtcctctatttcctctataagaagggcaagctgccgtgcaggcgctcagggaagcaggagatcacgctgcccccgtctcgtaagagcgaacttgtagttgaagttaagtcagataagctcccagaagagatgggcctcctgcagggcagcagcggtgacaagagggctccgggagaccagggagagaaatacatcgatctgaggcattagccccgaatcacttcagctcccttccctgcctggaccattcccagctccctgctcactcttctctcagccaaagcctccaaagggactagagagaagcctcctgctcccctcgcctgcacaccccctttcagagggccactgggttaggacctgaggacctcacttggccctgcaaggcccgcttttcagggaccagtccaccaccatctccacgttgagtgaagctcatcccaaatgagagaatggtacttagggatggaaaacgggcctggctagagcttcgggtgtgtgtgtctgtctgtgtgtatgcatacatatgtgtgtatatatggttttgtcaggtgtgtaaatttgcaaattgtttcctttatatatgtatgtatatatatatatgaaaatatatatatatatgaaaaataaagcttaattgtcccagaaa

SEQ ID NO: 81137 - DNA, 2311 bp, Homo sapiens
aaaaaaaacttggctctcgccctccggccgggaagcatggggcttcccaggctggtctgcgccttcttgctcgccgcctgctgctgctgtcctcgcgtcgcgggtgtgcccggagaggctgagcagcctgcgcctgagctggtggaggtggaagtgggcagcacagcccttctgaagtgcggcctctcccagtcccaaggcaacctcagccatgtcgactggttttctgtccacaaggagaagcggacgctcatcttccgtgtgcgccagggccagggccagagcgaacctggggagtacgagcagcggctcagcctccaggacagaggggctactctggccctgactcaagtcaccccccaagacgagcgcatcttcttgtgccagggcaagcgccctcggtcccaggagtaccgcatccagctccgcgtctacaaagctccggaggagccaaacatccaggtcaaccccctgggcatccctgtgaacagtaaggagcctgaggaggtcgctacctgtgtagggaggaacgggtaccccattcctcaagtcatctggtacaagaatggccggcctctgaaggaggagaagaaccgggtccacattcagtcgtcccagactgtggagtcgagtggtttgtacaccttgcagagtattctgaaggcacagctggttaaagaagacaaagatgcccagttttactgtgagctcaactaccggctgcccagtgggaaccacatgaaggagtccagggaagtcaccgtccctgttttctacccgacagaaaaagtgtggctggaagtggagcccgtgggaatgctgaaggaaggggaccgcgtggaaatcaggtgtttggctgatggcaaccctccaccacacttcagcatcagcaagcagaaccccagcaccagggaggcagaggaagagacaaccaacgacaacggggtcctggtgctggagcctgcccggaaggaacacagtgggcgctatgaatgtcagggcctggacttggacaccatgatatcgctgctgagtgaaccacaggaactactggtgaactatgtgtctgacgtccgagtgagtcccgcagcccctgagagacaggaaggcagcagcctcaccctgacctgtgaggcagagagtagccaggacctcgagttccagtggctgagagaagagacaggccaggtgctggaaagggggcctgtgcttcagttgcatgacctgaaacgggaggcaggaggcggctatcgctgcgtggcgtctgtgcccagcatacccggcctgaaccgcacacagctggtcaacgtggccatttttggccccccttggatggcattcaaggagaggaaggtgtgggtgaaagagaatatggtgttgaatctgtcttgtgaagcgtcagggcacccccggcccaccatctcctggaacgtcaacggcacggcaagtgaacaagaccaagatccacagcgagtcctgagcaccctgaatgtcctcgtgaccccggagctgttggagacaggtgttgaatgcacggcctccaacgacctgggcaaaaacaccagcatcctcttcctggagctggtcaatttaaccaccctcacaccagactccaacacaaccactggcctcagcacttccactgccagtcctcataccagagccaacagcacctccacagagagaaagctgccggagccggagagccggggcgtggtcatcgtggctgtgattgtgtgcatcctggtcctggcggtgctgggcgctgtcctctatttcctctataagaagggcaagctgccgtgcaggcgctcagggaagcaggagatcacgctgcccccgtctcgtaagagcgaacttgtagttgaagttaagtcagataagctcccagaagagatgggcctcctgcagggcagcagcggtgacaagagggctccgggagaccaggtaggaggcggttcctgtggccagagcctgccacatcctcagggaccgggggcagtagggactaacggttctctctatccttcatccctctttgtcagagatagggagcaggccccatcttgccttcttaacactactcacagatggcagggccaagcaagtggctgagggagcttggaggaagactgagaaagaccctgtcccatcaccttttcctgaccaatgcccgtggctctgggtgtggccatttcaccagtgcagtcagacgggggccgccctccttccctggcctgccatgcccatcctagcttcctccccaacgctgcccaccaaattcatcggcttctgcttccatctctccttc

SEQ ID NO: 81138 - DNA, 408 bp, Homo sapiens
aatattcatttgagagctagtaaaaatattctcttaacttactgagagttcagttttaataggtgatgttaattagaaaggatctatactgtctagtttatggaggtattaaagaatttgacaattagataaaatagaaaataattgcaaaaataaatatatgtttctttttatcagctcacctttgagtttgtagttttccaaatgaaatttagttcgtatatagtctttgtactcaggaactttgggatgggagataaattactactaaatggaagcggcagaatgaatacttcatcaacatgtcaggaaaatgcaaaggtcagtctttaggaatattgacacctaggcttttttctatttcagacattcaggaaaaaataaagctcatcatctgttatttgaatt

SEQ ID NO: 81139 - DNA, 4231 bp, Homo sapiens
  misc_feature (3182)..(3182): n is a, c, g, or t
cggagttctgcaccggcgggggcggggctctgcgtggccggggcgggctcggggatccgcggggcacgagccggtctggcttgggcaggctgcccgggccgtggcaggaagccggaagcagccgcggccccagttcgggagacatggcgggcgttaaagctctcgtggcattatccttcagtggggctattggactgacttttcttatgctgggatgtgccttagaggattatgggtgtacttctctgaagtaagatgatttgtcaaaaattctgtgtggttttgttacattgggaatttatttatgtgataactgcgtttaacttgtcatatccaattactccttggagatttaagttgtcttgcatgccaccaaattcaacctatgactacttccttttgcctgctggactctcaaagaatacttcaaattcgaatggacattatgagacagctgttgaacctaagtttaattcaagtggtactcacttttctaacttatccaaaacaactttccactgttgctttcggagtgagcaagatagaaactgctccttatgtgcagacaacattgaaggaaagacatttgtttcaacagtaaattctttagtttttcaacaaatagatgcaaactggaacatacagtgctggctaaaaggagacttaaaattattcatctgttatgtggagtcattatttaagaatctattcaggaattataactataaggtccatcttttatatgttctgcctgaagtgttagaagattcacctctggttccccaaaaaggcagttttcagatggttcactgcaattgcagtgttcatgaatgttgtgaatgtcttgtgcctgtgccaacagccaaactcaacgacactctccttatgtgtttgaaaatcacatctggtggagtaattttccagtcacctctaatgtcagttcagcccataaatatggtgaagcctgatccaccattaggtttgcatatggaaatcacagatgatggtaatttaaagatttcttggtccagcccaccattggtaccatttccacttcaatatcaagtgaaatattcagagaattctacaacagttatcagagaagctgacaagattgtctcagctacatccctgctagtagacagtatacttcctgggtcttcgtatgaggttcaggtgaggggcaagagactggatggcccaggaatctggagtgactggagtactcctcgtgtctttaccacacaagatgtcatatactttccacctaaaattctgacaagtgttgggtctaatgtttcttttcactgcatctataagaaggaaaacaagattgttccctcaaaagagattgtttggtggatgaatttagctgagaaaattcctcaaagccagtatgatgttgtgagtgatcatgttagcaaagttacttttttcaatctgaatgaaaccaaacctcgaggaaagtttacctatgatgcagtgtactgctgcaatgaacatgaatgccatcatcgctatgctgaattatatgtgattgatgtcaatatcaatatctcatgtgaaactgatgggtacttaactaaaatgacttgcagatggtcaaccagtacaatccagtcacttgcggaaagcactttgcaattgaggtatcataggagcagcctttactgttctgatattccatctattcatcccatatctgagcccaaagattgctatttgcagagtgatggtttttatgaatgcattttccagccaatcttcctattatctggctacacaatgtggattaggatcaatcactctctaggttcacttgactctccaccaacatgtgtccttcctgattctgtggtgaagccactgcctccatccagtgtgaaagcagaaattactataaacattggattattgaaaatatcttgggaaaagccagtctttccagagaataaccttcaattccagattcgctatggtttaagtggaaaagaagtacaatggaagatgtatgaggtttatgatgcaaaatcaaaatctgtcagtctcccagttccagacttgtgtgcagtctatgctgttcaggtgcgctgtaagaggctagatggactgggatattggagtaattggagcaatccagcctacacagttgtcatggatataaaagttcctatgagaggacctgaattttggagaataattaatggagatactatgaaaaaggagaaaaatgtcactttactttggaagcccctgatgaaaaatgactcattgtgcagtgttcagagatatgtgataaaccatcatacttcctgcaatggaacatggtcagaagatgtgggaaatcacacgaaattcactttcctgtggacagagcaagcacatactgttacggttctggccatcaattcaattggtgcttctgttgcaaattttaatttaaccttttcatggcctatgagcaaagtaaatatcgtgcagtcactcagtgcttatcctttaaacagcagttgtgtgattgtttcctggatactatcacccagtgattacaagctaatgtattttattattgagtggaaaaatcttaatgaagatggtgaaataaaatggcttagaatctcttcatctgttaagaagtattatatccatgatcattttatccccattgagaagtaccagttcagtctttacccaatatttatggaaggagtgggaaaaccaaagataattaatagtttcactcaagatgatattgaaaaacaccagagtgatgcaggtttatatgtaattgtgccagtaattatttcctcttccatcttattgcttggaacattattaatatcacaccaaagaatgaaaaagctattttgggaagatgttccgaaccccaagaattgttcctgggcacaaggacttaattttcagaagccagaaacgtttgagcatctttttatcaagcatacagcatcagtgacatgtggtcctcttcttttggagcctgaaacaatttcagaagatatcagtgttgatacatcatggaaaaataaagatgagatgatgccaacaactgtggtctctctactttcaacaacagatcttgaaaagggttctgtttgtattagtgaccagttcaacagtgttaacttctctgaggctgagggtactgaggtaacctatgaggncgaaagccagagacaaccctttgttaaatacgccacgctgatcagcaactctaaaccaagtgaaactggtgaagaacaagggcttataaatagttcagtcaccaagtgcttctctagcaaaaattctccgttgaaggattctttctctaatagctcatgggagatagaggcccaggcattttttatattatcagatcagcatcccaacataatttcaccacacctcacattctcagaaggattggatgaacttttgaaattggagggaaatttccctgaagaaaataatgataaaaagtctatctattatttaggggtcacctcaatcaaaaagagagagagtggtgtgcttttgactgacaagtcaagggtatcgtgcccattcccagccccctgtttattcacggacatcagagttctccaggacagttgctcacactttgtagaaaataatatcaacttaggaacttctagtaagaagacttttgcatcttacatgcctcaattccaaacttgttctactcagactcataagatcatggaaaacaagatgtgtgacctaactgtgtaatttcactgaagaaaccttcagatttgtgttataatgggtaatataaagtgtaatagattatagttgtgggtgggagagagaaaagaaaccagagtcaaatttgaaaataattgttccaaatgaatgttgtctgtttgttctctcttagtaacatagacaaaaaatttgagaaagccttcataagcctaccaatgtagacacgctcttctattttattcccaagctctagtgggaaggtcccttgtttccagctagaaataagcccaacagacaccatcttttgtgagatgtaattgttttttcagagggcgtgttgttttacctcaagtttttgttttgtaccaacacacacacacacacacattcttaacacatgtccttgtgtgttttgagagtatattatgtatttatattttgtgctatcagactgtaggatttgaagtaggactttcctaaatgtttaagataaacagaattc

SEQ ID NO: 81140 - DNA, 2939 bp, Homo sapiens
  misc_feature (2890)..(2891): n is a, c, g, or t
cccgcaccttgggcgaggagttcggagcggccccatcgcagagcccacggccagccgagcgcgcgcgacgcaggtgcccgagccccggcgccgccgcccatctctgccttcggtcgagttggacccccggatcaaggtgtacttctctgaagtaagatgatttgtcaaaaattctgtgtggttttgttacattgggaatttatttatgtgataactgcgtttaacttgtcatatccaattactccttggagatttaagttgtcttgcatgccaccaaattcaacctatgactacttccttttgcctgctggactctcaaagaatacttcaaattcgaatggacattatgagacagctgttgaacctaagtttaattcaagtggtactcacttttctaacttatccaaaacaactttccactgttgctttcggagtgagcaagatagaaactgctccttatgtgcagacaacattgaaggaaagacatttgtttcaacagtaaattctttagtttttcaacaaatagatgcaaactggaacatacagtgctggctaaaaggagacttaaaattattcatctgttatgtggagtcattatttaagaatctattcaggaattataactataaggtccatcttttatatgttctgcctgaagtgttagaagattcacctctggttccccaaaaaggcagttttcagatggttcactgcaattgcagtgttcatgaatgttgtgaatgtcttgtgcctgtgccaacagccaaactcaacgacactctccttatgtgtttgaaaatcacatctggtggagtaattttccagtcacctctaatgtcagttcagcccataaatatggtgaagcctgatccaccattaggtttgcatatggaaatcacagatgatggtaatttaaagatttcttggtccagcccaccattggtaccatttccacttcaatatcaagtgaaatattcagagaattctacaacagttatcagagaagctgacaagattgtctcagctacatccctgctagtagacagtatacttcctgggtcttcgtatgaggttcaggtgaggggcaagagactggatggcccaggaatctggagtgactggagtactcctcgtgtctttaccacacaagatgtcatatactttccacctaaaattctgacaagtgttgggtctaatgtttcttttcactgcatctataagaaggaaaacaagattgttccctcaaaagagattgtttggtggatgaatttagctgagaaaattcctcaaagccagtatgatgttgtgagtgatcatgttagcaaagttacttttttcaatctgaatgaaaccaaacctcgaggaaagtttacctatgatgcagtgtactgctgcaatgaacatgaatgccatcatcgctatgctgaattatatgtgattgatgtcaatatcaatatctcatgtgaaactgatgggtacttaactaaaatgacttgcagatggtcaaccagtacaatccagtcacttgcggaaagcactttgcaattgaggtatcataggagcagcctttactgttctgatattccatctattcatcccatatctgagcccaaagattgctatttgcagagtgatggtttttatgaatgcattttccagccaatcttcctattatctggctacacaatgtggattaggatcaatcactctctaggttcacttgactctccaccaacatgtgtccttcctgattctgtggtgaagccactgcctccatccagtgtgaaagcagaaattactataaacattggattattgaaaatatcttgggaaaagccagtctttccagagaataaccttcaattccagattcgctatggtttaagtggaaaagaagtacaatggaagatgtatgaggtttatgatgcaaaatcaaaatctgtcagtctcccagttccagacttgtgtgcagtctatgctgttcaggtgcgctgtaagaggctagatggactgggatattggagtaattggagcaatccagcctacacagttgtcatggatataaaagttcctatgagaggacctgaattttggagaataattaatggagatactatgaaaaaggagaaaaatgtcactttactttggaagcccctgatgaaaaatgactcattgtgcagtgttcagagatatgtgataaaccatcatacttcctgcaatggaacatggtcagaagatgtgggaaatcacacgaaattcactttcctgtggacagagcaagcacatactgttacggttctggccatcaattcaattggtgcttctgttgcaaattttaatttaaccttttcatggcctatgagcaaagtaaatatcgtgcagtcactcagtgcttatcctttaaacagcagttgtgtgattgtttcctggatactatcacccagtgattacaagctaatgtattttattattgagtggaaaaatcttaatgaagatggtgaaataaaatggcttagaatctcttcatctgttaagaagtattatatccatgatcattttatccccattgagaagtaccagttcagtctttacccaatatttatggaaggagtgggaaaaccaaagataattaatagtttcactcaagatgatattgaaaaacaccagagtgatgcaggtttatatgtaattgtgccagtaattatttcctcttccatcttattgcttggaacattattaatatcacaccaaagaatgaaaaagctattttgggaagatgttccgaaccccaagaattgttcctgggcacaaggacttaattttcagaagaaaatgcctggcacaaaggaactactgggtggaggttggttgacttaggaaatgcttgtannctacgtcctacctcgtgcgcacctgctctccctgaggtgtgcacaatg

SEQ ID NO: 81141 - DNA, 3141 bp, Homo sapiens
cggagttctgcaccggcgggggcggggctctgcgtggccggggcgggctcggggatccgcggggcacgagccggtctggcttgggcaggctgcccgggccgtggcaggaagccggaagcagccgcggccccagttcgggagacatggcgggcgttaaagctctcgtggcattatccttcagtggggctattggactgacttttcttatgctgggatgtgccttagaggattatgggtgtacttctctgaagtaagatgatttgtcaaaaattctgtgtggttttgttacattgggaatttatttatgtgataactgcgtttaacttgtcatatccaattactccttggagatttaagttgtcttgcatgccaccaaattcaacctatgactacttccttttgcctgctggactctcaaagaatacttcaaattcgaatggacattatgagacagctgttgaacctaagtttaattcaagtggtactcacttttctaacttatccaaaacaactttccactgttgctttcggagtgagcaagatagaaactgctccttatgtgcagacaacattgaaggaaagacatttgtttcaacagtaaattctttagtttttcaacaaatagatgcaaactggaacatacagtgctggctaaaaggagacttaaaattattcatctgttatgtggagtcattatttaagaatctattcaggaattataactataaggtccatcttttatatgttctgcctgaagtgttagaagattcacctctggttccccaaaaaggcagttttcagatggttcactgcaattgcagtgttcatgaatgttgtgaatgtcttgtgcctgtgccaacagccaaactcaacgacactctccttatgtgtttgaaaatcacatctggtggagtaattttccagtcacctctaatgtcagttcagcccataaatatggtgaagcctgatccaccattaggtttgcatatggaaatcacagatgatggtaatttaaagatttcttggtccagcccaccattggtaccatttccacttcaatatcaagtgaaatattcagagaattctacaacagttatcagagaagctgacaagattgtctcagctacatccctgctagtagacagtatacttcctgggtcttcgtatgaggttcaggtgaggggcaagagactggatggcccaggaatctggagtgactggagtactcctcgtgtctttaccacacaagatgtcatatactttccacctaaaattctgacaagtgttgggtctaatgtttcttttcactgcatctataagaaggaaaacaagattgttccctcaaaagagattgtttggtggatgaatttagctgagaaaattcctcaaagccagtatgatgttgtgagtgatcatgttagcaaagttacttttttcaatctgaatgaaaccaaacctcgaggaaagtttacctatgatgcagtgtactgctgcaatgaacatgaatgccatcatcgctatgctgaattatatgtgattgatgtcaatatcaatatctcatgtgaaactgatgggtacttaactaaaatgacttgcagatggtcaaccagtacaatccagtcacttgcggaaagcactttgcaattgaggtatcataggagcagcctttactgttctgatattccatctattcatcccatatctgagcccaaagattgctatttgcagagtgatggtttttatgaatgcattttccagccaatcttcctattatctggctacacaatgtggattaggatcaatcactctctaggttcacttgactctccaccaacatgtgtccttcctgattctgtggtgaagccactgcctccatccagtgtgaaagcagaaattactataaacattggattattgaaaatatcttgggaaaagccagtctttccagagaataaccttcaattccagattcgctatggtttaagtggaaaagaagtacaatggaagatgtatgaggtttatgatgcaaaatcaaaatctgtcagtctcccagttccagacttgtgtgcagtctatgctgttcaggtgcgctgtaagaggctagatggactgggatattggagtaattggagcaatccagcctacacagttgtcatggatataaaagttcctatgagaggacctgaattttggagaataattaatggagatactatgaaaaaggagaaaaatgtcactttactttggaagcccctgatgaaaaatgactcattgtgcagtgttcagagatatgtgataaaccatcatacttcctgcaatggaacatggtcagaagatgtgggaaatcacacgaaattcactttcctgtggacagagcaagcacatactgttacggttctggccatcaattcaattggtgcttctgttgcaaattttaatttaaccttttcatggcctatgagcaaagtaaatatcgtgcagtcactcagtgcttatcctttaaacagcagttgtgtgattgtttcctggatactatcacccagtgattacaagctaatgtattttattattgagtggaaaaatcttaatgaagatggtgaaataaaatggcttagaatctcttcatctgttaagaagtattatatccatgatcattttatccccattgagaagtaccagttcagtctttacccaatatttatggaaggagtgggaaaaccaaagataattaatagtttcactcaagatgatattgaaaaacaccagagtgatgcaggtttatatgtaattgtgccagtaattatttcctcttccatcttattgcttggaacattattaatatcacaccaaagaatgaaaaagctattttgggaagatgttccgaaccccaagaattgttcctgggcacaaggacttaattttcagaagatgcttgaaggcagcatgttcgttaagagtcatcaccactccctaatctcaagtacccagggacacaaacactgcggaaggccacagggtcctctgcataggaaaaccagagacctttgttcacttgtttatctgctgaccctccctccactattgtcctatgaccctgccaaatccccctctgtgagaaacacccaagaatgatcaataaaa

SEQ ID NO: 81142 - DNA, 397 bp, Homo sapiens
ccttttattctgccctcctcgattgttagtttggtggagtatcaattcttagaaatagcctttccaagagaacattgagataattcctgccttaacatatagtatccagtgttgcttctgagcagtcagatactattgtgatttttactcctcactgtttacttataatttcctttttaaacagatgcttgaaggcagcatgttcgttaagagtcatcaccactccctaatctcaagtacccagggacacaaacactgcggaaggccacagggtcctctgcataggaaaaccagagacctttgttcacttgtttatctgctgaccctccctccactattgtcctatgaccctgccaaatccccctctgtgagaaacacccaagaatgatcaataaaa

SEQ ID NO: 81143 - DNA, 2445 bp, Homo sapiens
cggagttctgcaccggcgggggcggggctctgcgtggccggggcgggctcggggatccgcggggcacgagccggtctggcttgggcaggctgcccgggccgtggcaggaagccggaagcagccgcggccccagttcgggagacatggcgggcgttaaagctctcgtggcattatccttcagtggggctattggactgacttttcttatgctgggatgtgccttagaggattatggcgtttactggcccttattcgtcctgattttccacgccatctcccccatcccccatttcattgccaaaagagtcacctatgactcagatgcaaccagtagtgcctgtcgggaactggcatatttcttcactactggaattgttgtttctgcctttggatttcctgttattcttgctcgtgtggctgtgatcaaatggggagcctgcggccttgtgttggcaggcaatgcagtcattttccttacaattcaagggtttttccttatatttggaagaggagatgattttagctgggagcagtggtagcactttattctgattacagtgcattgaatttcttagaactcatactatctgtatacatgtgcacatgcggcattttactatgaaatttaatatgctgggttttttaatacctttatatatcatgttcactttaagaaagacttcataagtaggagatgagttttattctcagcaaatagacctgtcaaatttagattatgttactcaaattatgttacttgtttggctgttcatgtagtcacggtgctctcagaaaatatattaacgcagtcttgtaggcagctgccaccttatgcagtgcatcgaaaccttttgcttggggatgtgcttggagaggcagataacgctgaagcaggcctctcatgacccaggaaggccggggtggatccctctttgtgttgtagtccatgctattaaaagtgtggcccacagaccaagagcctcaacatttcctagagccttattagaaatgcagaatctgaagccccactctggacccaggacattttgatgagatccaaaggagttgtatgcacatgaaagtttgagaagcatcatcatagagaagtaaacatcacacccaacttccttatctttccagtggctaaaccacttaacctctctgggtgttacctgctcatttgtttaaaaaaaaaaaaaaagtctcacctgctttcatgctgaggacaagttcagatgttcaagcctataatatttaggcagttcctcaaatttatgaaaagtgttctcagaattgggagacagtcaaagggtacaaagcctcagttaggaggaataagtgtgatttttttttaaagatcacttgcacagcatgctaaatataggaataattgaatgtatatttcaatattgctaagagagtaaatttctaatgttctcataaaaaagttaaatatttgagatcatatgttaattagtgtaatcattccaccttatattcaaaaatcataaaaccgtattgtaccctataaaaatatacaataatttgtcaatatataatcaaaataaaaaacaaaacatactctctcccccaaaaaaacatctcagtggggaacagatgtatcttttcatctgaaagacaatgctgggggaagagctccactgagatgcgggcagggaggctgggctcgagccagcccctgcgttagcaggagggggagaacagataggtaactcttttacatttcctttatgatctggcacttctccccagctccttccctctgccccccacccctactcctcaacagttctggtttgccctgacttctctacggctctggcttcttcccgaagagatataggagccatgtaagcacgcagtgggtgaactgcttaatttcactacatgttgatgtacttgtcttccgtcctgtaggtcttttctatataactttatgccacccttaaatgaatcattgggtatacctgtcatgttggatcctgtaatcacagttttccctgctcacctttttgtctaagatctattgagaaagggaaatatgggaaggagaaccatttgatcagaatacaaccaatagtctttaagcattgttaaagtatgaaactgaaatacattcaaaacacttaatccttgaggcttgtgatctgagtaattagcaggtatgatgctgggactggaaaatagaaagtaataactaaagggttaatgtgcaacgttattttttggccttgttcatgattttatgttttcagtgtcctgtgtacatatagaattgttaaagttgtcatttccaatatttatattagaaaaattatttagatactttataattttaaccggcatttttaataatgacacttgcatttattgtattgtaataaatttcacttttaactttaaaagtttaactttaaaaaaaaa

SEQ ID NO: 81144 - DNA, 2313 bp, Homo sapiens
cagctctttagacatggcgggcgttaactctcgtggcattatccttcagtggggctattggactgacttttcttatgctgggatgtgccttagaggattatggcgtttactggcccttattcgtcctgattttccacgccatctcccccatcccccatttcattgccaaaagagtcacctatgactcagatgcaaccagtagtgcctgtcgggaactggcatatttcttcactactggaattgttgtttctgcctttggatttcctgttattcttgctcgtgtggctgtgatcaaatggggagcctgcggccttgtgttggcaggcaatgcagtcattttccttacaattcaagggtttttccttatatttggaagaggagatgattttagctgggagcagtggtagcactttattctgattacagtgcattgaatttcttagaactcatactatctgtatacatgtgcacatgcggcattttactatgaaatttaatatgctgggttttttaatacctttatatatcatgttcactttaagaaagacttcataagtaggagatgagttttattctcagcaaatagacctgtcaaatttagattatgttactcaaattatgttacttgtttggctgttcatgtagtcacggtgctctcagaaaatatattaacgcagtcttgtaggcagctgccaccttatgcagtgcatcgaaaccttttgcttggggatgtgcttggagaggcagataacgctgaagcaggcctctcatgacccaggaaggccggggtggatccctctttgtgttgtagtccatgctattaaaagtgtggcccacagaccaagagcctcaacatttcctagagccttattagaaatgcagaatctgaagccccactctggacccaggacattttgatgagatccaaaggagttgtatgcacatgaaagtttgagaagcatcatcatagagaagtaaacatcacacccaacttccttatctttccagtggctaaaccacttaacctctctgggtgttacctgctcatttgtttaaaaaaaaaaaaaaagtctcacctgctttcatgctgaggacaagttcagatgttcaagcctataatatttaggcagttcctcaaatttatgaaaagtgttctcagaattgggagacagtcaaagggtacaaagcctcagttaggaggaataagtgtgatttttttttaaagatcacttgcacagcatgctaaatataggaataattgaatgtatatttcaatattgctaagagagtaaatttctaatgttctcataaaaaagttaaatatttgagatcatatgttaattagtgtaatcattccaccttatattcaaaaatcataaaaccgtattgtaccctataaaaatatacaataatttgtcaatatataatcaaaataaaaaacaaaacatactctctcccccaaaaaaacatctcagtggggaacagatgtatcttttcatctgaaagacaatgctgggggaagagctccactgagatgcgggcagggaggctgggctcgagccagcccctgcgttagcaggagggggagaacagataggtaactcttttacatttcctttatgatctggcacttctccccagctccttccctctgccccccacccctactcctcaacagttctggtttgccctgacttctctacggctctggcttcttcccgaagagatataggagccatgtaagcacgcagtgggtgaactgcttaatttcactacatgttgatgtacttgtcttccgtcctgtaggtcttttctatataactttatgccacccttaaatgaatcattgggtatacctgtcatgttggatcctgtaatcacagttttccctgctcacctttttgtctaagatctattgagaaagggaaatatgggaaggagaaccatttgatcagaatacaaccaatagtctttaagcattgttaaagtatgaaactgaaatacattcaaaacacttaatccttgaggcttgtgatctgagtaattagcaggtatgatgctgggactggaaaatagaaagtaataactaaagggttaatgtgcaacgttattttttggccttgttcatgattttatgttttcagtgtcctgtgtacatatagaattgttaaagttgtcatttccaatatttatattagaaaaattatttagatactttataattttaaccggcatttttaataatgacacttgcatttattgtattgtaataaatttcacttttaactttaaaagtttaactttaaaaaaaaa

SEQ ID NO: 81145 - DNA, 2380 bp, Homo sapiens
attttccatgaaagaagttgatgtgtgcagaactttcagtacccaatattgtaattgcactatttataatcttaccacttgagttttacttaaggcaatcattgtcaattaaaaacaagtagagaaatatgtctaattgggaacatgttaaggatgataccagacttaattaacaagcatcacagaagtaattagactcattactgaacagttcattgtctcctgttacattattaagccttttagcagctttgtgtaacatttcattggatgtttctaatgcagaaaataatagggattgcaaagagtacaatatgaaggaagtaaggatttaatccttcttttcttgtctttcagatcaaatggggagcctgcggccttgtgttggcaggcaatgcagtcattttccttacaattcaagggtttttccttatatttggaagaggagatgattttagctgggagcagtggtagcactttattctgattacagtgcattgaatttcttagaactcatactatctgtatacatgtgcacatgcggcattttactatgaaatttaatatgctgggttttttaatacctttatatatcatgttcactttaagaaagacttcataagtaggagatgagttttattctcagcaaatagacctgtcaaatttagattatgttactcaaattatgttacttgtttggctgttcatgtagtcacggtgctctcagaaaatatattaacgcagtcttgtaggcagctgccaccttatgcagtgcatcgaaaccttttgcttggggatgtgcttggagaggcagataacgctgaagcaggcctctcatgacccaggaaggccggggtggatccctctttgtgttgtagtccatgctattaaaagtgtggcccacagaccaagagcctcaacatttcctagagccttattagaaatgcagaatctgaagccccactctggacccaggacattttgatgagatccaaaggagttgtatgcacatgaaagtttgagaagcatcatcatagagaagtaaacatcacacccaacttccttatctttccagtggctaaaccacttaacctctctgggtgttacctgctcatttgtttaaaaaaaaaaaaaaagtctcacctgctttcatgctgaggacaagttcagatgttcaagcctataatatttaggcagttcctcaaatttatgaaaagtgttctcagaattgggagacagtcaaagggtacaaagcctcagttaggaggaataagtgtgatttttttttaaagatcacttgcacagcatgctaaatataggaataattgaatgtatatttcaatattgctaagagagtaaatttctaatgttctcataaaaaagttaaatatttgagatcatatgttaattagtgtaatcattccaccttatattcaaaaatcataaaaccgtattgtaccctataaaaatatacaataatttgtcaatatataatcaaaataaaaaacaaaacatactctctcccccaaaaaaacatctcagtggggaacagatgtatcttttcatctgaaagacaatgctgggggaagagctccactgagatgcgggcagggaggctgggctcgagccagcccctgcgttagcaggagggggagaacagataggtaactcttttacatttcctttatgatctggcacttctccccagctccttccctctgccccccacccctactcctcaacagttctggtttgccctgacttctctacggctctggcttcttcccgaagagatataggagccatgtaagcacgcagtgggtgaactgcttaatttcactacatgttgatgtacttgtcttccgtcctgtaggtcttttctatataactttatgccacccttaaatgaatcattgggtatacctgtcatgttggatcctgtaatcacagttttccctgctcacctttttgtctaagatctattgagaaagggaaatatgggaaggagaaccatttgatcagaatacaaccaatagtctttaagcattgttaaagtatgaaactgaaatacattcaaaacacttaatccttgaggcttgtgatctgagtaattagcaggtatgatgctgggactggaaaatagaaagtaataactaaagggttaatgtgcaacgttattttttggccttgttcatgattttatgttttcagtgtcctgtgtacatatagaattgttaaagttgtcatttccaatatttatattagaaaaattatttagatactttataattttaaccggcatttttaataatgacacttgcatttattgtattgtaataaatttcacttttaactttaaaagtttaactttaaaaaaaaa

SEQ ID NO: 81146 - DNA, 2835 bp, Homo sapiens
agaagatcatggggaaggacattgcaagcagggggcacagctagcgcaaaggccccaggataacagctatgagctcaagagtgttcaagggacagaaaaaaggctggtgtggctacagattaagcaaatgaagggaaaagagtacaaaatgaatggaagaagtagataataccagaccataaaggctttgtaggctagggcaaggaatttggggtttattctaagctcttaaaaggtttcaagcatgcgtgcactcaaaagatctttaccgaactagcttttgcaagacactctactatgttctatagggaaggcagaaatgaccaagttaaaattctgtctttgaagaaattgtggctcagtggtacagaaaacagtaaagtttctagggtatatattatatagtggcttcttaacacaatataagctacctacatagtaattttaaaattatcactacttatctatccctggtagaaatcatcttatgttctaatattcacaattaattaattttttgacctaaacatttaaaatagcaatgattttgaaatagtagtatgtctttcatttaaaatgtaactgttacttttctttttggattttgcctgggtccaactgacagcgtttactggcccttattcgtcctgattttccacgccatctcccccatcccccatttcattgccaaaagagtcacctatgactcagatgcaaccagtagtgcctgtcgggaactggcatatttcttcactactggaattgttgtttctgcctttggatttcctgttattcttgctcgtgtggctgtgatcaaatggggagcctgcggccttgtgttggcaggcaatgcagtcattttccttacaattcaagggtttttccttatatttggaagaggagatgattttagctgggagcagtggtagcactttattctgattacagtgcattgaatttcttagaactcatactatctgtatacatgtgcacatgcggcattttactatgaaatttaatatgctgggttttttaatacctttatatatcatgttcactttaagaaagacttcataagtaggagatgagttttattctcagcaaatagacctgtcaaatttagattatgttactcaaattatgttacttgtttggctgttcatgtagtcacggtgctctcagaaaatatattaacgcagtcttgtaggcagctgccaccttatgcagtgcatcgaaaccttttgcttggggatgtgcttggagaggcagataacgctgaagcaggcctctcatgacccaggaaggccggggtggatccctctttgtgttgtagtccatgctattaaaagtgtggcccacagaccaagagcctcaacatttcctagagccttattagaaatgcagaatctgaagccccactctggacccaggacattttgatgagatccaaaggagttgtatgcacatgaaagtttgagaagcatcatcatagagaagtaaacatcacacccaacttccttatctttccagtggctaaaccacttaacctctctgggtgttacctgctcatttgtttaaaaaaaaaaaaaaagtctcacctgctttcatgctgaggacaagttcagatgttcaagcctataatatttaggcagttcctcaaatttatgaaaagtgttctcagaattgggagacagtcaaagggtacaaagcctcagttaggaggaataagtgtgatttttttttaaagatcacttgcacagcatgctaaatataggaataattgaatgtatatttcaatattgctaagagagtaaatttctaatgttctcataaaaaagttaaatatttgagatcatatgttaattagtgtaatcattccaccttatattcaaaaatcataaaaccgtattgtaccctataaaaatatacaataatttgtcaatatataatcaaaataaaaaacaaaacatactctctcccccaaaaaaacatctcagtggggaacagatgtatcttttcatctgaaagacaatgctgggggaagagctccactgagatgcgggcagggaggctgggctcgagccagcccctgcgttagcaggagggggagaacagataggtaactcttttacatttcctttatgatctggcacttctccccagctccttccctctgccccccacccctactcctcaacagttctggtttgccctgacttctctacggctctggcttcttcccgaagagatataggagccatgtaagcacgcagtgggtgaactgcttaatttcactacatgttgatgtacttgtcttccgtcctgtaggtcttttctatataactttatgccacccttaaatgaatcattgggtatacctgtcatgttggatcctgtaatcacagttttccctgctcacctttttgtctaagatctattgagaaagggaaatatgggaaggagaaccatttgatcagaatacaaccaatagtctttaagcattgttaaagtatgaaactgaaatacattcaaaacacttaatccttgaggcttgtgatctgagtaattagcaggtatgatgctgggactggaaaatagaaagtaataactaaagggttaatgtgcaacgttattttttggccttgttcatgattttatgttttcagtgtcctgtgtacatatagaattgttaaagttgtcatttccaatatttatattagaaaaattatttagatactttataattttaaccggcatttttaataatgacacttgcatttattgtattgtaataaatttcacttttaactttaaaagtttaactttaaaaaaaaa

SEQ ID NO: 81147 - DNA, 2331 bp, Homo sapiens
cagctctttagacatggcgggcgttaactctcgtggcattatccttcagtggggctattggactgacttttcttatgctgggatgtgccttagaggattatggcctgggtccaactgacagcgtttactggcccttattcgtcctgattttccacgccatctcccccatcccccatttcattgccaaaagagtcacctatgactcagatgcaaccagtagtgcctgtcgggaactggcatatttcttcactactggaattgttgtttctgcctttggatttcctgttattcttgctcgtgtggctgtgatcaaatggggagcctgcggccttgtgttggcaggcaatgcagtcattttccttacaattcaagggtttttccttatatttggaagaggagatgattttagctgggagcagtggtagcactttattctgattacagtgcattgaatttcttagaactcatactatctgtatacatgtgcacatgcggcattttactatgaaatttaatatgctgggttttttaatacctttatatatcatgttcactttaagaaagacttcataagtaggagatgagttttattctcagcaaatagacctgtcaaatttagattatgttactcaaattatgttacttgtttggctgttcatgtagtcacggtgctctcagaaaatatattaacgcagtcttgtaggcagctgccaccttatgcagtgcatcgaaaccttttgcttggggatgtgcttggagaggcagataacgctgaagcaggcctctcatgacccaggaaggccggggtggatccctctttgtgttgtagtccatgctattaaaagtgtggcccacagaccaagagcctcaacatttcctagagccttattagaaatgcagaatctgaagccccactctggacccaggacattttgatgagatccaaaggagttgtatgcacatgaaagtttgagaagcatcatcatagagaagtaaacatcacacccaacttccttatctttccagtggctaaaccacttaacctctctgggtgttacctgctcatttgtttaaaaaaaaaaaaaaagtctcacctgctttcatgctgaggacaagttcagatgttcaagcctataatatttaggcagttcctcaaatttatgaaaagtgttctcagaattgggagacagtcaaagggtacaaagcctcagttaggaggaataagtgtgatttttttttaaagatcacttgcacagcatgctaaatataggaataattgaatgtatatttcaatattgctaagagagtaaatttctaatgttctcataaaaaagttaaatatttgagatcatatgttaattagtgtaatcattccaccttatattcaaaaatcataaaaccgtattgtaccctataaaaatatacaataatttgtcaatatataatcaaaataaaaaacaaaacatactctctcccccaaaaaaacatctcagtggggaacagatgtatcttttcatctgaaagacaatgctgggggaagagctccactgagatgcgggcagggaggctgggctcgagccagcccctgcgttagcaggagggggagaacagataggtaactcttttacatttcctttatgatctggcacttctccccagctccttccctctgccccccacccctactcctcaacagttctggtttgccctgacttctctacggctctggcttcttcccgaagagatataggagccatgtaagcacgcagtgggtgaactgcttaatttcactacatgttgatgtacttgtcttccgtcctgtaggtcttttctatataactttatgccacccttaaatgaatcattgggtatacctgtcatgttggatcctgtaatcacagttttccctgctcacctttttgtctaagatctattgagaaagggaaatatgggaaggagaaccatttgatcagaatacaaccaatagtctttaagcattgttaaagtatgaaactgaaatacattcaaaacacttaatccttgaggcttgtgatctgagtaattagcaggtatgatgctgggactggaaaatagaaagtaataactaaagggttaatgtgcaacgttattttttggccttgttcatgattttatgttttcagtgtcctgtgtacatatagaattgttaaagttgtcatttccaatatttatattagaaaaattatttagatactttataattttaaccggcatttttaataatgacacttgcatttattgtattgtaataaatttcacttttaactttaaaagtttaactttaaaaaaaaa

SEQ ID NO: 81148 - DNA, 2255 bp, Homo sapiens
cgcgctgcaggattcggcacgagctctcgtggcattatccttcagtggggctattggactgacttttcttatgctgggatgtgccttagaggattatggcgtttactggcccttattcgtcctgattttccacgccatctcccccatcccccatttcattgcctatttcttcactactggaattgttgtttctgcctttggatttcctgttattcttgctcgtgtggctgtgatcaaatggggagcctgcggccttgtgttggcaggcaatgcagtcattttccttacaattcaagggtttttccttatatttggaagaggagatgattttagctgggagcagtggtagcactttattctgattacagtgcattgaatttcttagaactcatactatctgtatacatgtgcacatgcggcattttactatgaaatttaatatgctgggttttttaatacctttatatatcatgttcactttaagaaagacttcataagtaggagatgagttttattctcagcaaatagacctgtcaaatttagattatgttactcaaattatgttacttgtttggctgttcatgtagtcacggtgctctcagaaaatatattaacgcagtcttgtaggcagctgccaccttatgcagtgcatcgaaaccttttgcttggggatgtgcttggagaggcagataacgctgaagcaggcctctcatgacccaggaaggccggggtggatccctctttgtgttgtagtccatgctattaaaagtgtggcccacagaccaagagcctcaacatttcctagagccttattagaaatgcagaatctgaagccccactctggacccaggacattttgatgagatccaaaggagttgtatgcacatgaaagtttgagaagcatcatcatagagaagtaaacatcacacccaacttccttatctttccagtggctaaaccacttaacctctctgggtgttacctgctcatttgtttaaaaaaaaaaaaaaagtctcacctgctttcatgctgaggacaagttcagatgttcaagcctataatatttaggcagttcctcaaatttatgaaaagtgttctcagaattgggagacagtcaaagggtacaaagcctcagttaggaggaataagtgtgatttttttttaaagatcacttgcacagcatgctaaatataggaataattgaatgtatatttcaatattgctaagagagtaaatttctaatgttctcataaaaaagttaaatatttgagatcatatgttaattagtgtaatcattccaccttatattcaaaaatcataaaaccgtattgtaccctataaaaatatacaataatttgtcaatatataatcaaaataaaaaacaaaacatactctctcccccaaaaaaacatctcagtggggaacagatgtatcttttcatctgaaagacaatgctgggggaagagctccactgagatgcgggcagggaggctgggctcgagccagcccctgcgttagcaggagggggagaacagataggtaactcttttacatttcctttatgatctggcacttctccccagctccttccctctgccccccacccctactcctcaacagttctggtttgccctgacttctctacggctctggcttcttcccgaagagatataggagccatgtaagcacgcagtgggtgaactgcttaatttcactacatgttgatgtacttgtcttccgtcctgtaggtcttttctatataactttatgccacccttaaatgaatcattgggtatacctgtcatgttggatcctgtaatcacagttttccctgctcacctttttgtctaagatctattgagaaagggaaatatgggaaggagaaccatttgatcagaatacaaccaatagtctttaagcattgttaaagtatgaaactgaaatacattcaaaacacttaatccttgaggcttgtgatctgagtaattagcaggtatgatgctgggactggaaaatagaaagtaataactaaagggttaatgtgcaacgttattttttggccttgttcatgattttatgttttcagtgtcctgtgtacatatagaattgttaaagttgtcatttccaatatttatattagaaaaattatttagatactttataattttaaccggcatttttaataatgacacttgcatttattgtattgtaataaatttcacttttaactttaaaagtttaactttaaaaaaaaa

SEQ ID NO: 81149 - DNA, 1264 bp, Homo sapiens
  misc_feature (1256)..(1256): n is a, c, g, or t
cggagttctgcaccggcgggggcggggctctgcgtggccggggcgggctcggggatccgcggggcacgagccggtctggcttgggcaggctgcccgggccgtggcaggaagccggaagcagccgcggccccagttcgggagacatggcgggcgttaaagctctcgtggcattatccttcagtggggctattggactgacttttcttatgctgggatgtgccttagaggattatggcgtttactggcccttattcgtcctgattttccacgccatctcccccatcccccatttcattgccaaaagagtcacctatgactcagatgcaaccagtagtgcctgtcgggaactggcatatttcttcactactggaattgttgtttctgcctttggatttcctgttattcttgctcgtgtggctgtgatcaaatggggagcctgcggccttgtgttggcaggcaatgcagtcattttccttacaattcaagggtttttccttatatttggaagaggagatgattttagctgggagcagtggtagcactttattctgattacagtgcattgaatttcttagaactcatactatctgtatacatgtgcacatgcggcattttactatgaaatttaatatgctgggttttttaatacctttatatatcatgttcactttaagaaagacttcataagtaggagatgagttttattctcagcaaatagacctgtcaaatttagattatgttactcaaattatgttacttgtttggctgttcatgtagtcacggtgctctcagaaaatatattaacgcagtcttgtaggcagctgccaccttatgcagtgcatcgaaaccttttgcttggggatgtgcttggagaggcagataacgctgaagcaggcctctcatgacccaggaaggccggggtggatccctctttgtgttgtagtccatgctattaaaagtgtggcccacagaccaagagcctcaacatttcctagagccttattagaaatgcagaatctgaagccccactctggacccaggacattttgatgagatccaaaggagttgtatgcacatgaaagtttgagaagcatcatcatagagaagtaaacatcacacccaacttccttatctttccagtggctaaaccacttaacctctctgggtgttacctgctcatttgtttaaaaaaaacttcgagggggggcccggtacccaatttggcctataggtgagtggaatttcagttcacttgncggttgtt

SEQ ID NO: 81150 - DNA, 2391 bp, Homo sapiens
cggagttctgcaccggcgggggcggggctctgcgtggccggggcgggctcggggatccgcggggcacgagccggtctggcttgggcaggctgcccgggccgtggcaggaagccggaagcagccgcggccccagttcgggagacatggcgggcgttaaagctctcgtggcattatccttcagtggggctattggactgacttttcttatgctgggatgtgccttagaggattatggcgtttactggcccttattcgtcctgattttccacgccatctcccccatcccccatttcattgccaaaagagtcacctatgactcagatgcaaccagtagtgcctgtcgggaactggcatatttcttcactactggaattgttgtttctgcctttggatttcctgttattcttgctcgtgtggctgtgatcaaatggggagcctgcggccttgtgttggcaggcaatgcagtcattttccttacaattcaagggtttttccttatatttggaagaggagatgattttagctgggagcagtggtagcactttattctgattacagtgcattgaatttcttagaactcatactatctgtatacatgtgcacatgcggcattttactatgaaatttaatatgctgggttttttaatacctttatatatcatgttcactttaagaaagacttcataagtaggagatgagttttattctcagcaaatagacctgtcaaatttagattatgttactcaaattatgttacttgtttggctgttcatgtagtcacggtgctctcagaaaatatattaacgcagtcttgtaggcagctgccaccttatgcagtgcatcgaaaccttttgcttggggatgtgcttggagaggcagataacgctgaagcaggcctctcatgacccaggaaggccggggtggatccctctttgtgttgtagtccatgctattatgcagaatctgaagccccactctggacccaggacattttgatgagatccaaaggagttgtatgcacatgaaagtttgagaagcatcatcatagagaagtaaacatcacacccaacttccttatctttccagtggctaaaccacttaacctctctgggtgttacctgctcatttgtttaaaaaaaaaaaaaaagtctcacctgctttcatgctgaggacaagttcagatgttcaagcctataatatttaggcagttcctcaaatttatgaaaagtgttctcagaattgggagacagtcaaagggtacaaagcctcagttaggaggaataagtgtgatttttttttaaagatcacttgcacagcatgctaaatataggaataattgaatgtatatttcaatattgctaagagagtaaatttctaatgttctcataaaaaagttaaatatttgagatcatatgttaattagtgtaatcattccaccttatattcaaaaatcataaaaccgtattgtaccctataaaaatatacaataatttgtcaatatataatcaaaataaaaaacaaaacatactctctcccccaaaaaaacatctcagtggggaacagatgtatcttttcatctgaaagacaatgctgggggaagagctccactgagatgcgggcagggaggctgggctcgagccagcccctgcgttagcaggagggggagaacagataggtaactcttttacatttcctttatgatctggcacttctccccagctccttccctctgccccccacccctactcctcaacagttctggtttgccctgacttctctacggctctggcttcttcccgaagagatataggagccatgtaagcacgcagtgggtgaactgcttaatttcactacatgttgatgtacttgtcttccgtcctgtaggtcttttctatataactttatgccacccttaaatgaatcattgggtatacctgtcatgttggatcctgtaatcacagttttccctgctcacctttttgtctaagatctattgagaaagggaaatatgggaaggagaaccatttgatcagaatacaaccaatagtctttaagcattgttaaagtatgaaactgaaatacattcaaaacacttaatccttgaggcttgtgatctgagtaattagcaggtatgatgctgggactggaaaatagaaagtaataactaaagggttaatgtgcaacgttattttttggccttgttcatgattttatgttttcagtgtcctgtgtacatatagaattgttaaagttgtcatttccaatatttatattagaaaaattatttagatactttataattttaaccggcatttttaataatgacacttgcatttattgtattgtaataaatttcacttttaactttaaaagtttaactttaaaaaaaaa

SEQ ID NO: 81151 - DNA, 5106 bp, Homo sapiens
cccgcaccttgggcgaggagttcggagcggccccatcgcagagcccacggccagccgagcgcgcgcgacgcaggtgcccgagccccggcgccgccgcccatctctgccttcggtcgagttggacccccggatcaaggtgtacttctctgaagtaagatgatttgtcaaaaattctgtgtggttttgttacattgggaatttatttatgtgataactgcgtttaacttgtcatatccaattactccttggagatttaagttgtcttgcatgccaccaaattcaacctatgactacttccttttgcctgctggactctcaaagaatacttcaaattcgaatggacattatgagacagctgttgaacctaagtttaattcaagtggtactcacttttctaacttatccaaaacaactttccactgttgctttcggagtgagcaagatagaaactgctccttatgtgcagacaacattgaaggaaagacatttgtttcaacagtaaattctttagtttttcaacaaatagatgcaaactggaacatacagtgctggctaaaaggagacttaaaattattcatctgttatgtggagtcattatttaagaatctattcaggaattataactataaggtccatcttttatatgttctgcctgaagtgttagaagattcacctctggttccccaaaaaggcagttttcagatggttcactgcaattgcagtgttcatgaatgttgtgaatgtcttgtgcctgtgccaacagccaaactcaacgacactctccttatgtgtttgaaaatcacatctggtggagtaattttccagtcacctctaatgtcagttcagcccataaatatggtgaagcctgatccaccattaggtttgcatatggaaatcacagatgatggtaatttaaagatttcttggtccagcccaccattggtaccatttccacttcaatatcaagtgaaatattcagagaattctacaacagttatcagagaagctgacaagattgtctcagctacatccctgctagtagacagtatacttcctgggtcttcgtatgaggttcaggtgaggggcaagagactggatggcccaggaatctggagtgactggagtactcctcgtgtctttaccacacaagatgtcatatactttccacctaaaattctgacaagtgttgggtctaatgtttcttttcactgcatctataagaaggaaaacaagattgttccctcaaaagagattgtttggtggatgaatttagctgagaaaattcctcaaagccagtatgatgttgtgagtgatcatgttagcaaagttacttttttcaatctgaatgaaaccaaacctcgaggaaagtttacctatgatgcagtgtactgctgcaatgaacatgaatgccatcatcgctatgctgaattatatgtgattgatgtcaatatcaatatctcatgtgaaactgatgggtacttaactaaaatgacttgcagatggtcaaccagtacaatccagtcacttgcggaaagcactttgcaattgaggtatcataggagcagcctttactgttctgatattccatctattcatcccatatctgagcccaaagattgctatttgcagagtgatggtttttatgaatgcattttccagccaatcttcctattatctggctacacaatgtggattaggatcaatcactctctaggttcacttgactctccaccaacatgtgtccttcctgattctgtggtgaagccactgcctccatccagtgtgaaagcagaaattactataaacattggattattgaaaatatcttgggaaaagccagtctttccagagaataaccttcaattccagattcgctatggtttaagtggaaaagaagtacaatggaagatgtatgaggtttatgatgcaaaatcaaaatctgtcagtctcccagttccagacttgtgtgcagtctatgctgttcaggtgcgctgtaagaggctagatggactgggatattggagtaattggagcaatccagcctacacagttgtcatggatataaaagttcctatgagaggacctgaattttggagaataattaatggagatactatgaaaaaggagaaaaatgtcactttactttggaagcccctgatgaaaaatgactcattgtgcagtgttcagagatatgtgataaaccatcatacttcctgcaatggaacatggtcagaagatgtgggaaatcacacgaaattcactttcctgtggacagagcaagcacatactgttacggttctggccatcaattcaattggtgcttctgttgcaaattttaatttaaccttttcatggcctatgagcaaagtaaatatcgtgcagtcactcagtgcttatcctttaaacagcagttgtgtgattgtttcctggatactatcacccagtgattacaagctaatgtattttattattgagtggaaaaatcttaatgaagatggtgaaataaaatggcttagaatctcttcatctgttaagaagtattatatccatgatcattttatccccattgagaagtaccagttcagtctttacccaatatttatggaaggagtgggaaaaccaaagataattaatagtttcactcaagatgatattgaaaaacaccagagtgatgcaggtttatatgtaattgtgccagtaattatttcctcttccatcttattgcttggaacattattaatatcacaccaaagaatgaaaaagctattttgggaagatgttccgaaccccaagaattgttcctgggcacaaggacttaattttcagaagagaacggacattctttgaagtctaatcatgatcactacagatgaacccaatgtgccaacttcccaacagtctatagagtattagaagatttttacattttgaagaaggggagcaaatctaaaaaaaattcagttgaacttctgagagttaacatatggtggattatgttgatttagaacttaaaatagatgtgtaaatttgggttcaaaatgtagatttgagtccagtttggatgtgtgattaattttcaaatcatctaaagtttaaaagtagtattcatgatttctggcttttgatttgtcatattcctggtcataaaacattaagaaaattatggctgttgctgtcattacatatctattaaatgtcatcaaatatgtagtagacaatgctgtaattaggtgaactctaaaactgcaacatctgacaaatagctttaaaaatacaatgattataagtatggaatcagtgaaaatatttagtttgtatttttatgtccaaacttttccattttagattcctttatagacacgtcagcctaaaaatcagcctattcgggtgttcttttgaatatctcctggcatttttgtatctaactttgttcaatctgggaatttcagttttcaatatccttgaaaatggcttaagtgataacttccgtttcagttaaaaggaagcccgaagttgtgtttgtgctgcccacaggacagtgggagttacagttcatatcaggatgaccctacatacccaggtcagattgacgggaccagaagggaacatcgacttctaatccagctttcttgtttaattatgacctaaatctaatttacttccactgaaccatccaagacctctggcaggcagggaaatgggcagtgatgcaaaaaagggagactctttggagcttttatgaatagttcatggtgaggacagaacttttctactttcagacagactgcttgctagttttatgaattcagcacacgaattatgctgtgttgctcacattcaaaccaaaccaacgactatgtttaatgaactcagtattcaaatttattatatatgcgtatatatgtatatatggatcccttatatttagatttaactcgtagttttatttgaaagtagaaaagaactctacaaaaacgggaagaatgtgtctttcttcccttcttgacttctaataggtgtcattgaaatgtaaaatctaagtatgaaattatgaaaggacattctttaattactgcccactcaacacatatttaatatgtgcccagattattctaaaatcttaaaaaaagatgcatatagtgaaattttttaaatggatatacttttaataaagttttataactcactgacaaaacatatttcaatagtatatgagtatgagatttcttatcaattatgagtgaaatattctatctgaatgcattggaaggcatttacagtatttgctttcaacagttactgagtatgacattttagcatgaaatatatcaaacacatcatttgaaggacatatgtaatcttgactatggttatggtttttttgtatgtattccttgttttcatattgatagcatctaattcttttgacaatcttaatatgtaggttcatttaaattttaagacagttcagtgcatatatagtagaagccttaagaaaaaagaaaatgagcaagcaaatatttgaagaaatgtataaaaccatagatttctttcagaaaaaaaaaacaggcataggaacagttttctcttcatatattatgattatgaataataggaaagttgtattaattcagtatttgtcattatgcagtattttaatacctacataagtctattccattattatattttgcgcttggcatatttattcctttatgcttttaatcactaacatattttacttaagagtataaaactatgctaaataaattgtattgtatatggaatatgcttgccattatgaagaacagctgggtataccattatttcaagtaataaatctgaattctattagtttaaaaattgtaaaattcaagttaaatgacgtgtatgatatataagctgaacacattttctatagcccttaatttagttgtgttaatttttcaaggtgatgtatcaacagctttttttattttgcatttgttttttcaatgtgtttacattgtatgaattgagctttttgcccacagattcttgatttgtagttgtttggcaggatttttctttgtgatataatcacttctataaaaaatatgatgtaca

SEQ ID NO: 81152 - DNA, 5045 bp, Homo sapiens
cccgcaccttgggcgaggagttcggagcggccccatcgcagagcccacggccagccgagcgcgcgcgacgcaggtgcccgagccccggcgccgccgcccatctctgccttcggtcgagttggacccccggatcaaggtgtacttctctgaagtaagatgatttgtcaaaaattctgtgtggttttgttacattgggaatttatttatgtgataactgcgtttaacttgtcatatccaattactccttggagatttaagttgtcttgcatgccaccaaattcaacctatgactacttccttttgcctgctggactctcaaagaatacttcaaattcgaatggacattatgagacagctgttgaacctaagtttaattcaagtggtactcacttttctaacttatccaaaacaactttccactgttgctttcggagtgagcaagatagaaactgctccttatgtgcagacaacattgaaggaaagacatttgtttcaacagtaaattctttagtttttcaacaaatagatgcaaactggaacatacagtgctggctaaaaggagacttaaaattattcatctgttatgtggagtcattatttaagaatctattcaggaattataactataaggtccatcttttatatgttctgcctgaagtgttagaagattcacctctggttccccaaaaaggcagttttcagatggttcactgcaattgcagtgttcatgaatgttgtgaatgtcttgtgcctgtgccaacagccaaactcaacgacactctccttatgtgtttgaaaatcacatctggtggagtaattttccagtcacctctaatgtcagttcagcccataaatatggtgaagcctgatccaccattaggtttgcatatggaaatcacagatgatggtaatttaaagatttcttggtccagcccaccattggtaccatttccacttcaatatcaagtgaaatattcagagaattctacaacagttatcagagaagctgacaagattgtctcagctacatccctgctagtagacagtatacttcctgggtcttcgtatgaggttcaggtgaggggcaagagactggatggcccaggaatctggagtgactggagtactcctcgtgtctttaccacacaagatgtcatatactttccacctaaaattctgacaagtgttgggtctaatgtttcttttcactgcatctataagaaggaaaacaagattgttccctcaaaagagattgtttggtggatgaatttagctgagaaaattcctcaaagccagtatgatgttgtgagtgatcatgttagcaaagttacttttttcaatctgaatgaaaccaaacctcgaggaaagtttacctatgatgcagtgtactgctgcaatgaacatgaatgccatcatcgctatgctgaattatatgtgattgatgtcaatatcaatatctcatgtgaaactgatgggtacttaactaaaatgacttgcagatggtcaaccagtacaatccagtcacttgcggaaagcactttgcaattgaggtatcataggagcagcctttactgttctgatattccatctattcatcccatatctgagcccaaagattgctatttgcagagtgatggtttttatgaatgcattttccagccaatcttcctattatctggctacacaatgtggattaggatcaatcactctctaggttcacttgactctccaccaacatgtgtccttcctgattctgtggtgaagccactgcctccatccagtgtgaaagcagaaattactataaacattggattattgaaaatatcttgggaaaagccagtctttccagagaataaccttcaattccagattcgctatggtttaagtggaaaagaagtacaatggaagatgtatgaggtttatgatgcaaaatcaaaatctgtcagtctcccagttccagacttgtgtgcagtctatgctgttcaggtgcgctgtaagaggctagatggactgggatattggagtaattggagcaatccagcctacacagttgtcatggatataaaagttcctatgagaggacctgaattttggagaataattaatggagatactatgaaaaaggagaaaaatgtcactttactttggaagcccctgatgaaaaatgactcattgtgcagtgttcagagatatgtgataaaccatcatacttcctgcaatggaacatggtcagaagatgtgggaaatcacacgaaattcactttcctgtggacagagcaagcacatactgttacggttctggccatcaattcaattggtgcttctgttgcaaattttaatttaaccttttcatggcctatgagcaaagtaaatatcgtgcagtcactcagtgcttatcctttaaacagcagttgtgtgattgtttcctggatactatcacccagtgattacaagctaatgtattttattattgagtggaaaaatcttaatgaagatggtgaaataaaatggcttagaatctcttcatctgttaagaagtattatatccatgatcattttatccccattgagaagtaccagttcagtctttacccaatatttatggaaggagtgggaaaaccaaagataattaatagtttcactcaagatgatattgaaaaacaccagagtgatgcaggtttatatgtaattgtgccagtaattatttcctcttccatcttattgcttggaacattattaatatcacaccaaagaatgaaaaagctattttgggaagatgttccgaaccccaagaattgttcctgggcacaaggacttaattttcagaagagaacggacattctttgaagtctaatcatgatcactacagatgaacccaatgtgccaacttcccaacagtctatagagtattagaagatttttacattttgaagaaggggagcaaatctaaaaaaaattcagttgaacttctgagagttaacatatggtggattatgttgatttagaacttaaaatagatgtgtaaatttgggttcaaaatgtagatttgagtccagtttggatgtgtgattaattttcaaatcatctaaagtttaaaagtagtattcatgatttctggcttttgatttgtcatattcctggtcataaaacattaagaaaattatggctgttgctgtcattacatatctattaaatgtcatcaaatatgtagtagacaatgctgtaattaggtgaactctaaaactgcaacatctgacaaatagctttaaaaatacaatgattataagtatggaatcagtgaaaatatttagtttgtatttttatgtccaaacttttccattttagattcctttatagacacgtcagcctaaaaatcagcctattcgggtgttcttttgaatatctcctggcatttttgtatctaactttgttcaatctgggaatttcagttttcaatatccttgaaaatggcttaagtgataacttccgtttcagttaaaaggaagcccgaagttgtgtttgtgctgcccacaggacagtgggagttacagttcatatcaggatgaccctacatacccaggtcagattgacgggaccagaagggaacatcgacttctaatccagctttcttgtttaattatgacctaaatctaatttacttccactgaaccatccaagacctctggcaggcagggaaatgggcagtgatgcaaaaaagggagactctttggaggttttatgaattcagcacacgaattatgctgtgttgctcacattcaaaccaaaccaacgactatgtttaatgaactcagtattcaaatttattatatatgcgtatatatgtatatatggatcccttatatttagatttaactcgtagttttatttgaaagtagaaaagaactctacaaaaacgggaagaatgtgtctttcttcccttcttgacttctaataggtgtcattgaaatgtaaaatctaagtatgaaattatgaaaggacattctttaattactgcccactcaacacatatttaatatgtgcccagattattctaaaatcttaaaaaaagatgcatatagtgaaattttttaaatggatatacttttaataaagttttataactcactgacaaaacatatttcaatagtatatgagtatgagatttcttatcaattatgagtgaaatattctatctgaatgcattggaaggcatttacagtatttgctttcaacagttactgagtatgacattttagcatgaaatatatcaaacacatcatttgaaggacatatgtaatcttgactatggttatggtttttttgtatgtattccttgttttcatattgatagcatctaattcttttgacaatcttaatatgtaggttcatttaaattttaagacagttcagtgcatatatagtagaagccttaagaaaaaagaaaatgagcaagcaaatatttgaagaaatgtataaaaccatagatttctttcagaaaaaaaaaacaggcataggaacagttttctcttcatatattatgattatgaataataggaaagttgtattaattcagtatttgtcattatgcagtattttaatacctacataagtctattccattattatattttgcgcttggcatatttattcctttatgcttttaatcactaacatattttacttaagagtataaaactatgctaaataaattgtattgtatatggaatatgcttgccattatgaagaacagctgggtataccattatttcaagtaataaatctgaattctattagtttaaaaattgtaaaattcaagttaaatgacgtgtatgatatataagctgaacacattttctatagcccttaatttagttgtgttaatttttcaaggtgatgtatcaacagctttttttattttgcatttgttttttcaatgtgtttacattgtatgaattgagctttttgcccacagattcttgatttgtagttgtttggcaggatttttctttgtgatataatcacttctataaaaaatatgatgtaca

SEQ ID NO: 81153 - DNA, 3829 bp, Homo sapiens
gggaggtgagagagcagcattaccacctgcgctccacctcctgtcagatcagcgcagcattagattcttagaggagagcagaaccctatcagtcaagtgggcatgctctcctaatgaccatctaatgcctggtgatctgaagtggaacagtttcatcctcgaaatcctgaaccatctaccatcccccattagtggaaaaattgtcttccatgaaaccggtccctggtgccattgttgcttttattaatgtatactaattgactatttttgtatcttttaaaggagcagcctttactgttctgatattccatctattcatcccatatctgagcccaaagattgctatttgcagagtgatggtttttatgaatgcattttccagccaatcttcctattatctggctacacaatgtggattaggatcaatcactctctaggttcacttgactctccaccaacatgtgtccttcctgattctgtggtgaagccactgcctccatccagtgtgaaagcagaaattactataaacattggattattgaaaatatcttgggaaaagccagtctttccagagaataaccttcaattccagattcgctatggtttaagtggaaaagaagtacaatggaagatgtatgaggtttatgatgcaaaatcaaaatctgtcagtctcccagttccagacttgtgtgcagtctatgctgttcaggtgcgctgtaagaggctagatggactgggatattggagtaattggagcaatccagcctacacagttgtcatggatataaaagttcctatgagaggacctgaattttggagaataattaatggagatactatgaaaaaggagaaaaatgtcactttactttggaagcccctgatgaaaaatgactcattgtgcagtgttcagagatatgtgataaaccatcatacttcctgcaatggaacatggtcagaagatgtgggaaatcacacgaaattcactttcctgtggacagagcaagcacatactgttacggttctggccatcaattcaattggtgcttctgttgcaaattttaatttaaccttttcatggcctatgagcaaagtaaatatcgtgcagtcactcagtgcttatcctttaaacagcagttgtgtgattgtttcctggatactatcacccagtgattacaagctaatgtattttattattgagtggaaaaatcttaatgaagatggtgaaataaaatggcttagaatctcttcatctgttaagaagtattatatccatgatcattttatccccattgagaagtaccagttcagtctttacccaatatttatggaaggagtgggaaaaccaaagataattaatagtttcactcaagatgatattgaaaaacaccagagtgatgcaggtttatatgtaattgtgccagtaattatttcctcttccatcttattgcttggaacattattaatatcacaccaaagaatgaaaaagctattttgggaagatgttccgaaccccaagaattgttcctgggcacaaggacttaattttcagaagagaacggacattctttgaagtctaatcatgatcactacagatgaacccaatgtgccaacttcccaacagtctatagagtattagaagatttttacattttgaagaaggggagcaaatctaaaaaaaattcagttgaacttctgagagttaacatatggtggattatgttgatttagaacttaaaatagatgtgtaaatttgggttcaaaatgtagatttgagtccagtttggatgtgtgattaattttcaaatcatctaaagtttaaaagtagtattcatgatttctggcttttgatttgtcatattcctggtcataaaacattaagaaaattatggctgttgctgtcattacatatctattaaatgtcatcaaatatgtagtagacaatgctgtaattaggtgaactctaaaactgcaacatctgacaaatagctttaaaaatacaatgattataagtatggaatcagtgaaaatatttagtttgtatttttatgtccaaacttttccattttagattcctttatagacacgtcagcctaaaaatcagcctattcgggtgttcttttgaatatctcctggcatttttgtatctaactttgttcaatctgggaatttcagttttcaatatccttgaaaatggcttaagtgataacttccgtttcagttaaaaggaagcccgaagttgtgtttgtgctgcccacaggacagtgggagttacagttcatatcaggatgaccctacatacccaggtcagattgacgggaccagaagggaacatcgacttctaatccagctttcttgtttaattatgacctaaatctaatttacttccactgaaccatccaagacctctggcaggcagggaaatgggcagtgatgcaaaaaagggagactctttggagcttttatgaatagttcatggtgaggacagaacttttctactttcagacagactgcttgctagttttatgaattcagcacacgaattatgctgtgttgctcacattcaaaccaaaccaacgactatgtttaatgaactcagtattcaaatttattatatatgcgtatatatgtatatatggatcccttatatttagatttaactcgtagttttatttgaaagtagaaaagaactctacaaaaacgggaagaatgtgtctttcttcccttcttgacttctaataggtgtcattgaaatgtaaaatctaagtatgaaattatgaaaggacattctttaattactgcccactcaacacatatttaatatgtgcccagattattctaaaatcttaaaaaaagatgcatatagtgaaattttttaaatggatatacttttaataaagttttataactcactgacaaaacatatttcaatagtatatgagtatgagatttcttatcaattatgagtgaaatattctatctgaatgcattggaaggcatttacagtatttgctttcaacagttactgagtatgacattttagcatgaaatatatcaaacacatcatttgaaggacatatgtaatcttgactatggttatggtttttttgtatgtattccttgttttcatattgatagcatctaattcttttgacaatcttaatatgtaggttcatttaaattttaagacagttcagtgcatatatagtagaagccttaagaaaaaagaaaatgagcaagcaaatatttgaagaaatgtataaaaccatagatttctttcagaaaaaaaaaacaggcataggaacagttttctcttcatatattatgattatgaataataggaaagttgtattaattcagtatttgtcattatgcagtattttaatacctacataagtctattccattattatattttgcgcttggcatatttattcctttatgcttttaatcactaacatattttacttaagagtataaaactatgctaaataaattgtattgtatatggaatatgcttgccattatgaagaacagctgggtataccattatttcaagtaataaatctgaattctattagtttaaaaattgtaaaattcaagttaaatgacgtgtatgatatataagctgaacacattttctatagcccttaatttagttgtgttaatttttcaaggtgatgtatcaacagctttttttattttgcatttgttttttcaatgtgtttacattgtatgaattgagctttttgcccacagattcttgatttgtagttgtttggcaggatttttctttgtgatataatcacttctataaaaaatatgatgtaca

SEQ ID NO: 81154 - DNA, 1493 bp, Homo sapiens
agaagatcatggggaaggacattgcaagcagggggcacagctagcgcaaaggccccaggataacagctatgagctcaagagtgttcaagggacagaaaaaaggctggtgtggctacagattaagcaaatgaagggaaaagagtacaaaatgaatggaagaagtagataataccagaccataaaggctttgtaggctagggcaaggaatttggggtttattctaagctcttaaaaggtttcaagcatgcgtgcactcaaaagatctttaccgaactagcttttgcaagacactctactatgttctatagggaaggcagaaatgaccaagttaaaattctgtctttgaagaaattgtggctcagtggtacagaaaacagtaaagtttctagggtatatattatatagtggcttcttaacacaatataagctacctacatagtaattttaaaattatcactacttatctatccctggtagaaatcatcttatgttctaatattcacaattaattaattttttgacctaaacatttaaaatagcaatgattttgaaatagtagtatgtctttcatttaaaatgtaactgttacttttctttttggattttgcctgggtccaactgacagcgtttactggcccttattcgtcctgattttccacgccatctcccccatcccccatttcattgccaaaagagtcacctatgactcagatgcaaccagtagtgcctgtcgggaactggcatatttcttcactactggaattgttgtttctgcctttggatttcctgttattcttgctcgtgtggctgtggtaagttttattttctattgttttgcccaaccgttgctgagtttacttcagaggcctgtgtctgggacctccatttcatgctcattacttaggctttatactcaaggccgtgtgtttttagtttctctgttcctctactttagacctgcctaacagtagttcggccatgccttcagagtgctttctttatttctcttacaacttttagccagacgatatgatttcttactttttctactttaagctattctctggaattgttcttaaattcctgcctcttaaatcttacagtaatccacagatactatgctagcagtacttttctagttgcaagatgaagatatttcaaattcttctcctgcaaatgggatcatggactcaactctcaactcagtataataggtatatgttgagggacaactgtgtagcttccagaaaatgcagtgaataagttgacatcttcacttccaagacaaaaactttctttttgtcttcagagtacacattgtaggtataatttattcaattatttgctattcactgtctttcctactatttgattttattccctccaattacgttctattttaattttatgaaactcttatttgaggcattgaatatcagataagcgcaagtcttgttcattcaattaaaatagaacgtaattggaggtcgacc

SEQ ID NO: 81155 - DNA, 1050 bp, Homo sapiens
cggagttctgcaccggcgggggcggggctctgcgtggccggggcgggctcggggatccgcggggcacgagccggtctggcttgggcaggctgcccgggccgtggcaggaagccggaagcagccgcggccccagttcgggagacatggcgggcgttaaagctctcgtggcattatccttcagtggggctattggactgacttttcttatgctgggatgtgccttagaggattatggcgtttactggcccttattcgtcctgattttccacgccatctcccccatcccccatttcattgccaaaagagtcacctatgactcagatgcaaccagtagtgcctgtcgggaactggcatatttcttcactactggaattgttgtttctgcctttggatttcctgttattcttgctcgtgtggctgtggtaagttttattttctattgttttgcccaaccgttgctgagtttacttcagaggcctgtgtctgggacctccatttcatgctcattacttaggctttatactcaaggccgtgtgtttttagtttctctgttcctctactttagacctgcctaacagtagttcggccatgccttcagagtgctttctttatttctcttacaacttttagccagacgatatgatttcttactttttctactttaagctattctctgggctagcagtacttttctagttgcaagatgaagatatttcaaattcttctcctgcaaatgggatcatggactcaactctcaactcagtataataggtatatgttgagggacaactgtgtagcttccagaaaatgcagtgaataagttgacatcttcacttccaagacaaaaactttctttttgtcttcagagtacacattgtaggtataatttattcaattatttgctattcactgtctttcctactatttgattttattccctccaattacgttctattttaattttatgaaactcttatttgaggcattgaatatcagataagcgcaagtcttgttcattcaattaaaatagaacgtaattggaggtcgacc

SEQ ID NO: 81156 - DNA, 777 bp, Homo sapiens
cagctctttagacatggcgggcgttaactctcgtggcattatccttcagtggggctattggactgacttttcttatgctgggatgtgccttagaggattatgggtaagttatcatttcaaaaagaactattcctctttctgtgtctttgtcactattagtatgggtgttagagagttcggtcaatttagcaccaagttctaaccagtgagttagtggagcccagtttatgaacacagtccctttgtgggtcaggtgtacttttgcagagggctctgttaaaaattgatgtattcattccataagcatttgtttaacacctactctggactagctggggacacacaaatgaagagagagtcctgtcctcaaagaggaggtaaagttctagttgtgagtgagagacaggcaaacggtctagtcagtaatctggcagctgcagtggagatgccagcacagtacgctggagctcggataaagtgcacctgagtttcagtgggacagtcagggaaggctgcatggcagaggttgtatctgagccaagactaggtggatgaataagagtttttcagggtgatgagtcaggggaggacattccaggcagagggaacattctacacattttttcattcaaccattgttggttgaatgcttcccatgtgccagctactgttatgggaactagggattaagacataagaaaacaaaggtcctgctctctcagagtttgtgtttcagtgggggagacggacagtaaacaacaaaagtatgcatactgt

SEQ ID NO: 81157 - DNA, 330 bp, Homo sapiens
cagctctttagacatggcgggcgttaactctcgtggcattatccttcagtggggctattggactgacttttcttatgctgggatgtgccttagaggattatggagatgccacaacacccagctgattttttttagaagtttttgtagagaccgagtctctctgtgttgctcaggctggtcttgaactcctggcctcaagtcatcctcctgccttggcctcccaaagctgtatcttgatagtgaaccaggattatcatctatattggaagtcagcaaactgccacatataacctgctacctgtttttgtaataaaggttttattgaaatac

SEQ ID NO: 81158 - DNA, 3042 bp, Homo sapiens
cccgcaccttgggcgaggagttcggagcggccccatcgcagagcccacggccagccgagcgcgcgcgacgcaggtgcccgagccccggcgccgccgcccatctctgccttcggtcgagttggacccccggatcaaggtgtacttctctgaagtaagatgatttgtcaaaaattctgtgtggttttgttacattgggaatttatttatgtgataactgcgtttaacttgtcatatccaattactccttggagatttaagttgtcttgcatgccaccaaattcaacctatgactacttccttttgcctgctggactctcaaagaatacttcaaattcgaatggacattatgagacagctgttgaacctaagtttaattcaagtggtactcacttttctaacttatccaaaacaactttccactgttgctttcggagtgagcaagatagaaactgctccttatgtgcagacaacattgaaggaaagacatttgtttcaacagtaaattctttagtttttcaacaaatagatgcaaactggaacatacagtgctggctaaaaggagacttaaaattattcatctgttatgtggagtcattatttaagaatctattcaggaattataactataaggtccatcttttatatgttctgcctgaagtgttagaagattcacctctggttccccaaaaaggcagttttcagatggttcactgcaattgcagtgttcatgaatgttgtgaatgtcttgtgcctgtgccaacagccaaactcaacgacactctccttatgtgtttgaaaatcacatctggtggagtaattttccagtcacctctaatgtcagttcagcccataaatatggtgaagcctgatccaccattaggtttgcatatggaaatcacagatgatggtaatttaaagatttcttggtccagcccaccattggtaccatttccacttcaatatcaagtgaaatattcagagaattctacaacagttatcagagaagctgacaagattgtctcagctacatccctgctagtagacagtatacttcctgggtcttcgtatgaggttcaggtgaggggcaagagactggatggcccaggaatctggagtgactggagtactcctcgtgtctttaccacacaagatgtcatatactttccacctaaaattctgacaagtgttgggtctaatgtttcttttcactgcatctataagaaggaaaacaagattgttccctcaaaagagattgtttggtggatgaatttagctgagaaaattcctcaaagccagtatgatgttgtgagtgatcatgttagcaaagttacttttttcaatctgaatgaaaccaaacctcgaggaaagtttacctatgatgcagtgtactgctgcaatgaacatgaatgccatcatcgctatgctgaattatatgtgattgatgtcaatatcaatatctcatgtgaaactgatgggtacttaactaaaatgacttgcagatggtcaaccagtacaatccagtcacttgcggaaagcactttgcaattgaggtatcataggagcagcctttactgttctgatattccatctattcatcccatatctgagcccaaagattgctatttgcagagtgatggtttttatgaatgcattttccagccaatcttcctattatctggctacacaatgtggattaggatcaatcactctctaggttcacttgactctccaccaacatgtgtccttcctgattctgtggtgaagccactgcctccatccagtgtgaaagcagaaattactataaacattggattattgaaaatatcttgggaaaagccagtctttccagagaataaccttcaattccagattcgctatggtttaagtggaaaagaagtacaatggaagatgtatgaggtttatgatgcaaaatcaaaatctgtcagtctcccagttccagacttgtgtgcagtctatgctgttcaggtgcgctgtaagaggctagatggactgggatattggagtaattggagcaatccagcctacacagttgtcatggatataaaagttcctatgagaggacctgaattttggagaataattaatggagatactatgaaaaaggagaaaaatgtcactttactttggaagcccctgatgaaaaatgactcattgtgcagtgttcagagatatgtgataaaccatcatacttcctgcaatggaacatggtcagaagatgtgggaaatcacacgaaattcactttcctgtggacagagcaagcacatactgttacggttctggccatcaattcaattggtgcttctgttgcaaattttaatttaaccttttcatggcctatgagcaaagtaaatatcgtgcagtcactcagtgcttatcctttaaacagcagttgtgtgattgtttcctggatactatcacccagtgattacaagctaatgtattttattattgagtggaaaaatcttaatgaagatggtgaaataaaatggcttagaatctcttcatctgttaagaagtattatatccatgatcattttatccccattgagaagtaccagttcagtctttacccaatatttatggaaggagtgggaaaaccaaagataattaatagtttcactcaagatgatattgaaaaacaccagagtgatgcaggtttatatgtaattgtgccagtaattatttcctcttccatcttattgcttggaacattattaatatcacaccaaagaatgaaaaagctattttgggaagatgttccgaaccccaagaattgttcctgggcacaaggacttaattttcagaagatgcttgaaggcagcatgttcgttaagagtcatcaccactccctaatctcaagtacccagggacacaaacactgcggaaggccacagggtcctctgcataggaaaaccagagacctttgttcacttgtttatctgctgaccctccctccactattgtcctatgaccctgccaaatccccctctgtgagaaacacccaagaatgatcaataaaa

SEQ ID NO: 81159 - DNA, 612 bp, Homo sapiens
cggtacccgactacatacttccgatgggaatttatttatgtgataactgcgtttaacttgtcatatccaattactccttggagatttaagttgtcttgcatgccaccaaattcaacctatgactacttccttttgcctgctggactctcaaagaatacttcaaattcgaatggacattatgagacagctgttgaacctaagtttaattcaagtggtactcacttttctaacttatccaaaacaactttccactgttgctttcggagtgagcaagatagaaactgctccttatgtgcagacaacattgaaggaaagacatttgtttcaacagtaaattctttagtttttcaacaaatagatgcaaactggaacatacagtgctggctaaaaggagacttaaaattattcatctgttatgtggagtcattatttaagaatctattcaggaattataactataaggtccatcttttatatgttctgccggaagtatgtagtcctggtatctccaagaatgggcagacccgagagcatgcccttctggcttacacactgtgtgtgaaacaatctaattgtcggtgtaacaaaatggttccactgaccacctacagc

SEQ ID NO: 81160 - DNA, 2329 bp, Homo sapiens
ggggcggggtctggagcagcaggcgccgcgtttgcgagctaagctctcgtggcattatccttcagtggggctattggactgacttttcttatgctgggatgtgccttagaggattatggcgtttactggcccttattcgtcctgattttccacgccatctcccccatcccccatttcattgccaaaagagtcacctatgactcagatgcaaccagtagtgcctgtcgggaactggcatatttcttcactactggaattgttgtttctgcctttggatttcctgttattcttgctcgtgtggctgtgatcaaatggggagcctgcggccttgtgttggcaggcaatgcagtcattttccttacaattcaagggtttttccttatatttggaagaggagatgattttagctgggagcagtggtagcactttattctgattacagtgcattgaatttcttagaactcatactatctgtatacatgtgcacatgcggcattttactatgaaatttaatatgctgggttttttaatacctttatatatcatgttcactttaagaaagacttcataagtaggagatgagttttattctcagcaaatagacctgtcaaatttagattatgttactcaaattatgttacttgtttggctgttcatgtagtcacggtgctctcagaaaatatattaacgcagtcttgtaggcagctgccaccttatgcagtgcatcgaaaccttttgcttggggatgtgcttggagaggcagataacgctgaagcaggcctctcatgacccaggaaggccggggtggatccctctttgtgttgtagtccatgctattaaaagtgtggcccacagaccaagagcctcaacatttcctagagccttattagaaatgcagaatctgaagccccactctggacccaggacattttgatgagatccaaaggagttgtatgcacatgaaagtttgagaagcatcatcatagagaagtaaacatcacacccaacttccttatctttccagtggctaaaccacttaacctctctgggtgttacctgctcatttgtttaaaaaaaaaaaaaaagtctcacctgctttcatgctgaggacaagttcagatgttcaagcctataatatttaggcagttcctcaaatttatgaaaagtgttctcagaattgggagacagtcaaagggtacaaagcctcagttaggaggaataagtgtgatttttttttaaagatcacttgcacagcatgctaaatataggaataattgaatgtatatttcaatattgctaagagagtaaatttctaatgttctcataaaaaagttaaatatttgagatcatatgttaattagtgtaatcattccaccttatattcaaaaatcataaaaccgtattgtaccctataaaaatatacaataatttgtcaatatataatcaaaataaaaaacaaaacatactctctcccccaaaaaaacatctcagtggggaacagatgtatcttttcatctgaaagacaatgctgggggaagagctccactgagatgcgggcagggaggctgggctcgagccagcccctgcgttagcaggagggggagaacagataggtaactcttttacatttcctttatgatctggcacttctccccagctccttccctctgccccccacccctactcctcaacagttctggtttgccctgacttctctacggctctggcttcttcccgaagagatataggagccatgtaagcacgcagtgggtgaactgcttaatttcactacatgttgatgtacttgtcttccgtcctgtaggtcttttctatataactttatgccacccttaaatgaatcattgggtatacctgtcatgttggatcctgtaatcacagttttccctgctcacctttttgtctaagatctattgagaaagggaaatatgggaaggagaaccatttgatcagaatacaaccaatagtctttaagcattgttaaagtatgaaactgaaatacattcaaaacacttaatccttgaggcttgtgatctgagtaattagcaggtatgatgctgggactggaaaatagaaagtaataactaaagggttaatgtgcaacgttattttttggccttgttcatgattttatgttttcagtgtcctgtgtacatatagaattgttaaagttgtcatttccaatatttatattagaaaaattatttagatactttataattttaaccggcatttttaataatgacacttgcatttattgtattgtaataaatttcacttttaactttaaaagtttaactttaaaaaaaaa

SEQ ID NO: 81161 - DNA, 2258 bp, Homo sapiens
cggagttctgcaccggcgggggcggggctctgcgtggccggggcgggctcggggatccgcggggcacgagccggtctggcttgggcaggctgcccgggccgtggcaggaagccggaagcagccgcggccccagttcgggagacatggcgggcgttaaagctctcgtggcattatccttcagtggggctattggactgacttttcttatgctgggatgtgccttagaggattatggatcaaatggggagcctgcggccttgtgttggcaggcaatgcagtcattttccttacaattcaagggtttttccttatatttggaagaggagatgattttagctgggagcagtggtagcactttattctgattacagtgcattgaatttcttagaactcatactatctgtatacatgtgcacatgcggcattttactatgaaatttaatatgctgggttttttaatacctttatatatcatgttcactttaagaaagacttcataagtaggagatgagttttattctcagcaaatagacctgtcaaatttagattatgttactcaaattatgttacttgtttggctgttcatgtagtcacggtgctctcagaaaatatattaacgcagtcttgtaggcagctgccaccttatgcagtgcatcgaaaccttttgcttggggatgtgcttggagaggcagataacgctgaagcaggcctctcatgacccaggaaggccggggtggatccctctttgtgttgtagtccatgctattaaaagtgtggcccacagaccaagagcctcaacatttcctagagccttattagaaatgcagaatctgaagccccactctggacccaggacattttgatgagatccaaaggagttgtatgcacatgaaagtttgagaagcatcatcatagagaagtaaacatcacacccaacttccttatctttccagtggctaaaccacttaacctctctgggtgttacctgctcatttgtttaaaaaaaaaaaaaaagtctcacctgctttcatgctgaggacaagttcagatgttcaagcctataatatttaggcagttcctcaaatttatgaaaagtgttctcagaattgggagacagtcaaagggtacaaagcctcagttaggaggaataagtgtgatttttttttaaagatcacttgcacagcatgctaaatataggaataattgaatgtatatttcaatattgctaagagagtaaatttctaatgttctcataaaaaagttaaatatttgagatcatatgttaattagtgtaatcattccaccttatattcaaaaatcataaaaccgtattgtaccctataaaaatatacaataatttgtcaatatataatcaaaataaaaaacaaaacatactctctcccccaaaaaaacatctcagtggggaacagatgtatcttttcatctgaaagacaatgctgggggaagagctccactgagatgcgggcagggaggctgggctcgagccagcccctgcgttagcaggagggggagaacagataggtaactcttttacatttcctttatgatctggcacttctccccagctccttccctctgccccccacccctactcctcaacagttctggtttgccctgacttctctacggctctggcttcttcccgaagagatataggagccatgtaagcacgcagtgggtgaactgcttaatttcactacatgttgatgtacttgtcttccgtcctgtaggtcttttctatataactttatgccacccttaaatgaatcattgggtatacctgtcatgttggatcctgtaatcacagttttccctgctcacctttttgtctaagatctattgagaaagggaaatatgggaaggagaaccatttgatcagaatacaaccaatagtctttaagcattgttaaagtatgaaactgaaatacattcaaaacacttaatccttgaggcttgtgatctgagtaattagcaggtatgatgctgggactggaaaatagaaagtaataactaaagggttaatgtgcaacgttattttttggccttgttcatgattttatgttttcagtgtcctgtgtacatatagaattgttaaagttgtcatttccaatatttatattagaaaaattatttagatactttataattttaaccggcatttttaataatgacacttgcatttattgtattgtaataaatttcacttttaactttaaaagtttaactttaaaaaaaaa

SEQ ID NO: 81162 - DNA, 1223 bp, Homo sapiens
cggagttctgcaccggcgggggcggggctctgcgtggccggggcgggctcggggatccgcggggcacgagccggtctggcttgggcaggctgcccgggccgtggcaggaagccggaagcagccgcggccccagttcgggagacatggcgggcgttaaagctctcgtggcattatccttcagtggggctattggactgacttttcttatgctgggatgtgccttagaggattatggcgtttactggcccttattcgtcctgattttccacgccatctcccccatcccccatttcattgccaaaagagtcacctatgactcagatgcaaccagtagtgcctgtcgggaactggcatatttcttcactactggaattgttgtttctgcctttggatttcctgttattcttgctcgtgtggctgtgatcaaatggggagcctgcggccttgtgttggcaggcaatgcagtcattttccttacaattcaagggtttttccttatatttggaagaggagatgattttagctgggagcagtggtagcactttattctgattacagtgcattgaatttcttagaactcatactatctgtatacatgtgcacatgcggcattttactatgaaatttaatatgctgggttttttaatacctttatatatcatgttcactttaagaaagacttcataagtaggagatgagttttattctcagcaaatagacctgtcaaatttagattatgttactcaaattatgttacttgtttggctgttcatgtagtcacggtgctctcagaaaatatattaacgcagtcttgtaggcagctgccaccttatgcagtgcatcgaaaccttttgcttggggatgtgcttggagaggcagataacgctgaagcaggcctctcatgacccaggaaggccggggtggatccctctttgtgttgtagtccatgctattaaaagtgtggcccacagaccaagagcctcaacatttcctagagccttattagaaatgcagaatctgaagccccactctggacccaggacattttgatgagatccaaaggagttgtatgcacatgaaagtttgagaagcatcatcatagagaagtaaacatcacacccaacttccttatctttccagtggctaaaccacttaacctctctgggtgttacctgctcatttgtttaaaaaaagtcgaccggccgctaatttagtagtagtag

SEQ ID NO: 81163 - DNA, 1219 bp, Homo sapiens
  misc_feature (1212)..(1212): n is a, c, g, or t
  misc_feature (1217)..(1217): n is a, c, g, or t
cggagttctgcaccggcgggggcggggctctgcgtggccggggcgggctcggggatccgcggggcacgagccggtctggcttgggcaggctgcccgggccgtggcaggaagccggaagcagccgcggccccagttcgggagacatggcgggcgttaaagctctcgtggcattatccttcagtggggctattggactgacttttcttatgctgggatgtgccttagaggattatggcgtttactggcccttattcgtcctgattttccacgccatctcccccatcccccatttcattgccaaaagagtcacctatgactcagatgcaaccagtagtgcctgtcgggaactggcatatttcttcactactggaattgttgtttctgcctttggatttcctgttattcttgctcgtgtggctgtgatcaaatggggagcctgcggccttgtgttggcaggcaatgcagtcattttccttacaattcaagggtttttccttatatttggaagaggagatgattttagctgggagcagtggtagcactttattctgattacagtgcattgaatttcttagaactcatactatctgtatacatgtgcacatgcggcattttactatgaaatttaatatgctgggttttttaatacctttatatatcatgttcactttaagaaagacttcataagtaggagatgagttttattctcagcaaatagacctgtcaaatttagattatgttactcaaattatgttacttgtttggctgttcatgtagtcacggtgctctcagaaaatatattaacgcagtcttgtaggcagctgccaccttatgcagtgcatcgaaaccttttgcttggggatgtgcttggagaggcagataacgctgaagcaggcctctcatgacccaggaaggccggggtggatccctctttgtgttgtagtccatgctattaaaagtgtggcccacagaccaagagcctcaacatttcctagagccttattagaaatgcagaatctgaagccccactctggacccaggacattttgatgagatccaaaggagttgtatgcacatgaaagtttgagaagcatcatcatagagaagtaaacatcacacccaacttccttatctttccagtggctaaaccacttaacctctctgggtgttacctgctcatttgtttaaaaaaaggggggggggggggggggngaaanct

SEQ ID NO: 81164 - DNA, 5205 bp, Homo sapiens
cggagttctgcaccggcgggggcggggctctgcgtggccggggcgggctcggggatccgcggggcacgagccggtctggcttgggcaggctgcccgggccgtggcaggaagccggaagcagccgcggccccagttcgggagacatggcgggcgttaaagctctcgtggcattatccttcagtggggctattggactgacttttcttatgctgggatgtgccttagaggattatgggtgtacttctctgaagtaagatgatttgtcaaaaattctgtgtggttttgttacattgggaatttatttatgtgataactgcgtttaacttgtcatatccaattactccttggagatttaagttgtcttgcatgccaccaaattcaacctatgactacttccttttgcctgctggactctcaaagaatacttcaaattcgaatggacattatgagacagctgttgaacctaagtttaattcaagtggtactcacttttctaacttatccaaaacaactttccactgttgctttcggagtgagcaagatagaaactgctccttatgtgcagacaacattgaaggaaagacatttgtttcaacagtaaattctttagtttttcaacaaatagatgcaaactggaacatacagtgctggctaaaaggagacttaaaattattcatctgttatgtggagtcattatttaagaatctattcaggaattataactataaggtccatcttttatatgttctgcctgaagtgttagaagattcacctctggttccccaaaaaggcagttttcagatggttcactgcaattgcagtgttcatgaatgttgtgaatgtcttgtgcctgtgccaacagccaaactcaacgacactctccttatgtgtttgaaaatcacatctggtggagtaattttccagtcacctctaatgtcagttcagcccataaatatggtgaagcctgatccaccattaggtttgcatatggaaatcacagatgatggtaatttaaagatttcttggtccagcccaccattggtaccatttccacttcaatatcaagtgaaatattcagagaattctacaacagttatcagagaagctgacaagattgtctcagctacatccctgctagtagacagtatacttcctgggtcttcgtatgaggttcaggtgaggggcaagagactggatggcccaggaatctggagtgactggagtactcctcgtgtctttaccacacaagatgtcatatactttccacctaaaattctgacaagtgttgggtctaatgtttcttttcactgcatctataagaaggaaaacaagattgttccctcaaaagagattgtttggtggatgaatttagctgagaaaattcctcaaagccagtatgatgttgtgagtgatcatgttagcaaagttacttttttcaatctgaatgaaaccaaacctcgaggaaagtttacctatgatgcagtgtactgctgcaatgaacatgaatgccatcatcgctatgctgaattatatgtgattgatgtcaatatcaatatctcatgtgaaactgatgggtacttaactaaaatgacttgcagatggtcaaccagtacaatccagtcacttgcggaaagcactttgcaattgaggtatcataggagcagcctttactgttctgatattccatctattcatcccatatctgagcccaaagattgctatttgcagagtgatggtttttatgaatgcattttccagccaatcttcctattatctggctacacaatgtggattaggatcaatcactctctaggttcacttgactctccaccaacatgtgtccttcctgattctgtggtgaagccactgcctccatccagtgtgaaagcagaaattactataaacattggattattgaaaatatcttgggaaaagccagtctttccagagaataaccttcaattccagattcgctatggtttaagtggaaaagaagtacaatggaagatgtatgaggtttatgatgcaaaatcaaaatctgtcagtctcccagttccagacttgtgtgcagtctatgctgttcaggtgcgctgtaagaggctagatggactgggatattggagtaattggagcaatccagcctacacagttgtcatggatataaaagttcctatgagaggacctgaattttggagaataattaatggagatactatgaaaaaggagaaaaatgtcactttactttggaagcccctgatgaaaaatgactcattgtgcagtgttcagagatatgtgataaaccatcatacttcctgcaatggaacatggtcagaagatgtgggaaatcacacgaaattcactttcctgtggacagagcaagcacatactgttacggttctggccatcaattcaattggtgcttctgttgcaaattttaatttaaccttttcatggcctatgagcaaagtaaatatcgtgcagtcactcagtgcttatcctttaaacagcagttgtgtgattgtttcctggatactatcacccagtgattacaagctaatgtattttattattgagtggaaaaatcttaatgaagatggtgaaataaaatggcttagaatctcttcatctgttaagaagtattatatccatgatcattttatccccattgagaagtaccagttcagtctttacccaatatttatggaaggagtgggaaaaccaaagataattaatagtttcactcaagatgatattgaaaaacaccagagtgatgcaggtttatatgtaattgtgccagtaattatttcctcttccatcttattgcttggaacattattaatatcacaccaaagaatgaaaaagctattttgggaagatgttccgaaccccaagaattgttcctgggcacaaggacttaattttcagaagagaacggacattctttgaagtctaatcatgatcactacagatgaacccaatgtgccaacttcccaacagtctatagagtattagaagatttttacattttgaagaaggggagcaaatctaaaaaaaattcagttgaacttctgagagttaacatatggtggattatgttgatttagaacttaaaatagatgtgtaaatttgggttcaaaatgtagatttgagtccagtttggatgtgtgattaattttcaaatcatctaaagtttaaaagtagtattcatgatttctggcttttgatttgtcatattcctggtcataaaacattaagaaaattatggctgttgctgtcattacatatctattaaatgtcatcaaatatgtagtagacaatgctgtaattaggtgaactctaaaactgcaacatctgacaaatagctttaaaaatacaatgattataagtatggaatcagtgaaaatatttagtttgtatttttatgtccaaacttttccattttagattcctttatagacacgtcagcctaaaaatcagcctattcgggtgttcttttgaatatctcctggcatttttgtatctaactttgttcaatctgggaatttcagttttcaatatccttgaaaatggcttaagtgataacttccgtttcagttaaaaggaagcccgaagttgtgtttgtgctgcccacaggacagtgggagttacagttcatatcaggatgaccctacatacccaggtcagattgacgggaccagaagggaacatcgacttctaatccagctttcttgtttaattatgacctaaatctaatttacttccactgaaccatccaagacctctggcaggcagggaaatgggcagtgatgcaaaaaagggagactctttggagcttttatgaatagttcatggtgaggacagaacttttctactttcagacagactgcttgctagttttatgaattcagcacacgaattatgctgtgttgctcacattcaaaccaaaccaacgactatgtttaatgaactcagtattcaaatttattatatatgcgtatatatgtatatatggatcccttatatttagatttaactcgtagttttatttgaaagtagaaaagaactctacaaaaacgggaagaatgtgtctttcttcccttcttgacttctaataggtgtcattgaaatgtaaaatctaagtatgaaattatgaaaggacattctttaattactgcccactcaacacatatttaatatgtgcccagattattctaaaatcttaaaaaaagatgcatatagtgaaattttttaaatggatatacttttaataaagttttataactcactgacaaaacatatttcaatagtatatgagtatgagatttcttatcaattatgagtgaaatattctatctgaatgcattggaaggcatttacagtatttgctttcaacagttactgagtatgacattttagcatgaaatatatcaaacacatcatttgaaggacatatgtaatcttgactatggttatggtttttttgtatgtattccttgttttcatattgatagcatctaattcttttgacaatcttaatatgtaggttcatttaaattttaagacagttcagtgcatatatagtagaagccttaagaaaaaagaaaatgagcaagcaaatatttgaagaaatgtataaaaccatagatttctttcagaaaaaaaaaacaggcataggaacagttttctcttcatatattatgattatgaataataggaaagttgtattaattcagtatttgtcattatgcagtattttaatacctacataagtctattccattattatattttgcgcttggcatatttattcctttatgcttttaatcactaacatattttacttaagagtataaaactatgctaaataaattgtattgtatatggaatatgcttgccattatgaagaacagctgggtataccattatttcaagtaataaatctgaattctattagtttaaaaattgtaaaattcaagttaaatgacgtgtatgatatataagctgaacacattttctatagcccttaatttagttgtgttaatttttcaaggtgatgtatcaacagctttttttattttgcatttgttttttcaatgtgtttacattgtatgaattgagctttttgcccacagattcttgatttgtagttgtttggcaggatttttctttgtgatataatcacttctataaaaaatatgatgtaca

SEQ ID NO: 81165 - DNA, 5715 bp, Homo sapiens
cccgcaccttgggcgaggagttcggagcggccccatcgcagagcccacggccagccgagcgcgcgcgacgcaggtgcccgagccccggcgccgccgcccatctctgccttcggtcgagttggacccccggatcaaggtgtacttctctgaagtaagatgatttgtcaaaaattctgtgtggttttgttacattgggaatttatttatgtgataactgcgtttaacttgtcatatccaattactccttggagatttaagttgtcttgcatgccaccaaattcaacctatgactacttccttttgcctgctggactctcaaagaatacttcaaattcgaatggacattatgagacagctgttgaacctaagtttaattcaagtggtactcacttttctaacttatccaaaacaactttccactgttgctttcggagtgagcaagatagaaactgctccttatgtgcagacaacattgaaggaaagacatttgtttcaacagtaaattctttagtttttcaacaaatagatgcaaactggaacatacagtgctggctaaaaggagacttaaaattattcatctgttatgtggagtcattatttaagaatctattcaggaattataactataaggtccatcttttatatgttctgcctgaagtgttagaagattcacctctggttccccaaaaaggcagttttcagatggttcactgcaattgcagtgttcatgaatgttgtgaatgtcttgtgcctgtgccaacagccaaactcaacgacactctccttatgtgtttgaaaatcacatctggtggagtaattttccagtcacctctaatgtcagttcagcccataaatatggtgaagcctgatccaccattaggtttgcatatggaaatcacagatgatggtaatttaaagatttcttggtccagcccaccattggtaccatttccacttcaatatcaagtgaaatattcagagaattctacaacagttatcagagaagctgacaagattgtctcagctacatccctgctagtagacagtatacttcctgggtcttcgtatgaggttcaggtgaggggcaagagactggatggcccaggaatctggagtgactggagtactcctcgtgtctttaccacacaagatgtcatatactttccacctaaaattctgacaagtgttgggtctaatgtttcttttcactgcatctataagaaggaaaacaagattgttccctcaaaagagattgtttggtggatgaatttagctgagaaaattcctcaaagccagtatgatgttgtgagtgatcatgttagcaaagttacttttttcaatctgaatgaaaccaaacctcgaggaaagtttacctatgatgcagtgtactgctgcaatgaacatgaatgccatcatcgctatgctgaattatatgtgattgatgtcaatatcaatatctcatgtgaaactgatgggtacttaactaaaatgacttgcagatggtcaaccagtacaatccagtcacttgcggaaagcactttgcaattgaggtatcataggagcagcctttactgttctgatattccatctattcatcccatatctgagcccaaagattgctatttgcagagtgatggtttttatgaatgcattttccagccaatcttcctattatctggctacacaatgtggattaggatcaatcactctctaggttcacttgactctccaccaacatgtgtccttcctgattctgtggtgaagccactgcctccatccagtgtgaaagcagaaattactataaacattggattattgaaaatatcttgggaaaagccagtctttccagagaataaccttcaattccagattcgctatggtttaagtggaaaagaagtacaatggaagatgtatgaggtttatgatgcaaaatcaaaatctgtcagtctcccagttccagacttgtgtgcagtctatgctgttcaggtgcgctgtaagaggctagatggactgggatattggagtaattggagcaatccagcctacacagttgtcatggatataaaagttcctatgagaggacctgaattttggagaataattaatggagatactatgaaaaaggagaaaaatgtcactttactttggaagcccctgatgaaaaatgactcattgtgcagtgttcagagatatgtgataaaccatcatacttcctgcaatggaacatggtcagaagatgtgggaaatcacacgaaattcactttcctgtggacagagcaagcacatactgttacggttctggccatcaattcaattggtgcttctgttgcaaattttaatttaaccttttcatggcctatgagcaaagtaaatatcgtgcagtcactcagtgcttatcctttaaacagcagttgtgtgattgtttcctggatactatcacccagtgattacaagctaatgtattttattattgagtggaaaaatcttaatgaagatggtgaaataaaatggcttagaatctcttcatctgttaagaagtattatatccatgatcattttatccccattgagaagtaccagttcagtctttacccaatatttatggaaggagtgggaaaaccaaagataattaatagtttcactcaagatgatattgaaaaacaccagagtgatgcaggtttatatgtaattgtgccagtaattatttcctcttccatcttattgcttggaacattattaatatcacaccaaagaatgaaaaagctattttgggaagatgttccgaaccccaagaattgttcctgggcacaaggacttaattttcagaagagaacggacattctttgaagtctaatcatgatcactacagatgaacccaatgtgccaacttcccaacagtctatagagtattagaagatttttacattttgaagaaggggagcaaatctaaaaaaaattcagttgaacttctgagagttaacatatggtggattatgttgatttagaacttaaaatagatgtgtaaatttgggttcaaaatgtagatttgagtccagtttggatgtgtgattaattttcaaatcatctaaagtttaaaagtagtattcatgatttctggcttttgatttgtcatattcctggtcataaaacattaagaaaattatggctgttgctgtcattacatatctattaaatgtcatcaaatatgtagtagacaatgctgtaattaggtgaactctaaaactgcaacatctgacaaatagctttaaaaatacaatgattataagtatggaatcagtgaaaatatttagtttgtatttttatgtccaaacttttccattttagattcctttatagacacgtcagcctaaaaatcagcctattcgggtgttcttttgaatatctcctggcatttttgtatctaactttgttcaatctgggaatttcagttttcaatatccttgaaaatggcttaagtgataacttccgtttcagttaaaaggaagcccgaagttgtgtttgtgctgcccacaggacagtgggagttacagttcatatcaggatgaccctacatacccaggtcagattgacgggaccagaagggaacatcgacttctaatccagctttcttgtttaattatgacctaaatctaatttacttccactgaaccatccaagacctctggcaggcagggaaatgggcagtgatgcaaaaaagggagactctttggagcttttatgaatagttcatggtgaggacagaacttttctactttcagacagactgcttgctagttttatgaattcagcacacgaattatgctgtgttgctcacattcaaaccaaaccaacgactatgtttaatgaactcagtattcaaatttattatatatgcgtatatatgtatatatggatcccttatatttagatttaactcgtagttttatttgaaagtagaaaagaactctacaaaaacgggaagaatgtgtctttcttcccttcttgacttctaataggtgtcattgaaatgtaaaatctaagtatgaaattatgaaaggacattctttaattactgcccactcaacacatatttaatatgtgcccagattattctaaaatcttaaaaaaagatgcatatagtgaaattttttaaatggatatacttttaataaagttttataactcactgacaaaacatatttcaatagtatatgagtatgagatttcttatcaattatgagtgaaatattctatctgaatgcattggaaggcatttacagtatttgctttcaacagttactgagtatgacattttagcatgaaatatatcaaacacatcatttgaaggacatatgtaatcttgactatggttatggtttttttgtatgtattccttgttttcatattgatagcatctaattcttttgacaatcttaatatgtaggttcatttaaattttaagacagttcagtgcatatatagtagaagccttaagaaaaaagaaaatgagcaagcaaatatttgaagaaatgtataaaaccatagatttctttcagaaaaaaaaaacaggcataggaacagttttctcttcatatattatgattatgaataataggaaagttgtattaattcagtatttgtcattatgcagtattttaatacctacataagtctattccattattatattttgcgcttggcatatttattcctttatgcttttaatcactaacatattttacttaagagtataaaactatgctaaataaattgtattgtatatggaatatgcttgccattatgaagaacagctgggtataccattatttcaagtaataaatctgaattctattagtttaaaaattgtaaaattcaagttaaatgacgtgtatgatatataagctgaacacattttctatagcccttaatttagttgtgttaatttttcaaggtgatgtatcaacagctttttttattttgcatttgttttttcaatgtgtttacattgtatgaattgagctttttgcccacagattcttgatttgtagttgtttggcaggatttttctttgtgatataatcacttctataaaaaatatgatgtacatttgtcttgtgtatttgtcttcatttcacatgtccatagtaaatatttttacgtgaagttatttataaggaatagtaatttaccagtttgtgatcatctctttcatcatcattgttctctacatatgatattattagctcttattttcagatagtctcaagcagattctcagtatacagcagataagtttttaatagtcaacacaattattttactttcataccatatcttatttcacaacatagttattttaactgtttttagacaagttattttggtcatttcatttcaatccacttttttctattttgggctaacatttttagtttatgggaatgtaatttgctacaaaatattaggaaggaaatatcttcagaagatagcattttccaatgacagtaaccaatctttcctgagagctaagcacttgcagacactaatttatttctagccacaataccatgaagcacatttttagagatgatgaaattgaaaggcagagaggttagtgtacttgttcatggttgtagaattggaagaactcaagtctaagtctgtcttgtcccactttcaaatgctatcatcttaaacgggctcttccttatgctt

SEQ ID NO: 81166 - DNA, 989 bp, Homo sapiens
cagctctttagacatggcgggcgttaactctcgtggcattatccttcagtggggctattggactgacttttcttatgctgggatgtgccttagaggattatggcctgggtccaactgacagcgtttactggcccttattcgtcctgattttccacgccatctcccccatcccccatttcattgccaaaagagtcacctatgactcagatgcaaccagtagtgcctgtcgggaactggcatatttcttcactactggaattgttgtttctgcctttggatttcctgttattcttgctcgtgtggctgtggtaagttttattttctattgttttgcccaaccgttgctgagtttacttcagaggcctgtgtctgggacctccatttcatgctcattacttaggctttatactcaaggccgtgtgtttttagtttctctgttcctctactttagacctgcctaacagtagttcggccatgccttcagagtgctttctttatttctcttacaacttttagccagacgatatgatttcttactttttctactttaagctattctctggaattgttcttaaattcctgcctcttaaatcttacagtaatccacagatactatgctagcagtacttttctagttgcaagatgaagatatttcaaattcttctcctgcaaatgggatcatggactcaactctcaactcagtataataggtatatgttgagggacaactgtgtagcttccagaaaatgcagtgaataagttgacatcttcacttccaagacaaaaactttctttttgtcttcagagtacacattgtaggtataatttattcaattatttgctattcactgtctttcctactatttgattttattccctccaattacgttctattttaattttatgaaactcttatttgaggcattgaatatcagataagcgcaagtcttgttcattcaattaaaatagaacgtaattggaggtcgacc

SEQ ID NO: 81167 - DNA, 399 bp, Homo sapiens
aaaaaaccctcctttttttttcccccttttccccaaaaacccccccccaaattctccagcaagggacccaggactggcaggaaatgagaggcagaggcctggcaaggagagacagcttataattctgacagcaaggtgcttagcatgtagaatgcaaaatgcaaatgctgggaaacatcctcaatcatttctggaatggaaatctttccctaatgagcgatgacgatggcagagagctgattgcactgaagaaaaactgcttaaaattcataatcaatcaagcgagttgattttagtcttttgtaaccaagctatcccattctagcttcctttattggccaactggagcttatcactccctaccttgttcccttcatctagctcagatggtaggtccca

SEQ ID NO: 81168 - DNA, 452 bp, Homo sapiens
ctatcatcctgtcagaggtcggcttgttgaccgtcaggcatgggccagccagtggtcaacatggccatgatcttcctgcactttcctctggggtcacttctcaccatcccagcaagggacccaggactggcaggaaatgagaggcagaggcctggcaaggagagacagcttataattctgacagcaaggtgcttagcatgtagaatgcaaaatgcaaatgctgggaaacatcctcaatcatttctggaatggaaatctttccctaatgagcgatgacgatggcagagagctgattgcactgaagaaaaactgcttaaaattcataatcaatcaagcgagttgattttagtcttttgtaaccaagctatcccattctagcttcctttattggccaactggagcttatcactccctaccttgttcccttcatctagctcagatggtaggtccca

SEQ ID NO: 81169 - DNA, 613 bp, Homo sapiens
atggtagattatctttttgatatgctgttggactcagttcactagtattttgttgaggattttggcatcaatgttcatcgggggtactggtctgtagtcttctttttttgttcttaatattttcttattttcattttgcctacacagatcaaaataaatgttgatgtgaatagtaaatctcacatttaaagaaatacaaatttccctttgtttataactcattcatcagttaaacaaatatttactggtcatttgttacatcctagctgatgagaaaacttcagaaaacaaaatctttgctcccagggactttacattctagtggggattacaaatgtttttaaaggattatttattggggtagtgataagtgctttagcgtgttaaaggaatgaagaatgctcaggactgctgctttagataaggctttcagagaactccttcctctgtgaggtggggacatgaacagaggcctaaatgaactgagtgcattacgtggatctaggcagatgggtgcacagctgcaaaggcctcggggtaagagcacacttgtgtccagtgtggtgcaacagtacggtgagggcaacaaagtgataggagaaaaggctccaga

SEQ ID NO: 81170 - DNA, 269 bp, Homo sapiens
atttccttggctgaaatttagacagaaaatcaaaggtaacacacagactacctcatgcaaaaaacatgattggatattttataaacctgcttaatcaagctcacatttgtagcgcttgatgttaaattctaagccactaacttctttcagagtaatggtccttctcctttgatagatcagggcccctttgagaatctgattgagaaagggaaaaataaaccaccataactctttagagaagtatacaaattcacttatacaaaaagact

SEQ ID NO: 81171 - DNA, 706 bp, Homo sapiens
ggggcgctggtcggtgcgcgggctgggacgctaagtcatgaggaattaaactgggaaacctggcgtgggtccaggcgccttccaggaggcatccggcgcggcccggacgtgcttctacccagaaccaccccctccaggccggggtgcacttaacggggctatacaaagagtctgacactgttattgcccatctgaactcgtcaactgagaaggaaagagatggtttatgctgtgaataaaatacagttgtgctgtgatgtaaatcccctcatcctggagcagctgagcaaggtctaaggcaggaagaaccttcaagcaggtcatggctgtaagcctcctgagtttatcccagcaagttgtataagggattatctttttatctgcatattatgacatatgtgaggatgtgtaaaggtttggcaagcactggcctactcaacagccagtcctacctaacttcagaaatctttcttgtgggcaaatgtcaggagatagggcccaggcccaggtccagctacaaagaatgaatacaattaaagtgctacttccattcacctcaccccagattagtttaggcaagagctcaggatgcagttttgacatttgaaagataaggagtagtctgctgggagcctgataaattgaaacagggatggcacagttctaaatattattaaataatagtaataatattaagtattactga

SEQ ID NO: 81172 - DNA, 400 bp, Homo sapiens
aaaaaaaaaaaatctcatgaagtttacctttccaggttttggacttgcttgggaactgtcactcttccaccccttatatggctccccttcggaatagcattgtttatcttataactgttccaccattataatttaaaagtacacaactgatttgattttacatctggagaagaatgttggctcagcatgaatgttacattgactctcacccttatctgattcagatgctatttaaatgagactttgattttaggcttcagagttaatgatagaatgagtcaagacttttgatggtgttgggatggaataaatgtattttgcatgtgaggaaatacattggggtggagattacaatattattgagtttatttgtcccctgaaattcatacgttgaaagact

SEQ ID NO: 81173 - DNA, 689 bp, Homo sapiens
ctcagttctttagaacagctaaaactgcatccaatcactgtctcttgtaccaatctaaaatcagtgcccagaagactcaaattttactggaaaacaaaagggaagccaagtgtcctgagactgctaaattccaccaaccaccagacagctctctacaacaaagagttaattggcagctgtgagacttgaggcaggtatcacggatgtgtctaaaggaaacgttaagcttctgatgtttctccctaatcctcggagcaacgttctcaaatcagactcctctcatcccagatgacccaagaatgcttgctatttcatctctttctaagagaacttctgatccaattccaatctggtaaatagataagaaaattgagactcatagcctctcttactcagctgtttacccatggaggcaggaaccaagacagttctgcacagccgtctatccccaggatctaacccctggctgccacataagcatcctggtggccttatggaactgacaaacactaatcaacacaactagtgtgcctggtgctatgctaggaggcgacagaagaaaaagacacaagacctgccttcagtagctcataatggagaagacagttgtacatacaatttgacatgatggatggtgtggctgggacatatatgtgacactggtgatgggtgccaggaagacagaccca

SEQ ID NO: 81174 - DNA, 559 bp, Homo sapiens
actgggctggaaacctagactccagcgtctggggataggagggatggtggggaatccgctgggaaaaactgggctgtgatcaagagaatttatcagtatctgagtttttccaccctggaaggagtgcgggcagacttactgtttaaacattgggagcttatgatggtaaagcgccttagttctggagccaggtatacccattaatgaccccaactgggccagcctttctgtagccatgcccttggattgttgctctccttctaggtttgactatgtggtttgcttcagccactagaacaatagcaaacatgatacaagcagaggcttggaaagtgcttatgcggccgggtgtggtggctcacacctataatcccagcactttgggaggccagggcgggcagatcacaaggtcaggagatcgagaccatcctggctaacacagtgaaaccccgtctctctactaaaaatacaaaaaattagctgggtgtggtggtgcacacctgtagtcccagctactcgggaggctgaggcaggagaatagcttgaacctgggaggcgg

SEQ ID NO: 81175 - DNA, 406 bp, Homo sapiens
ttctcaaacatcccatggcaaatacagctttgaattctttccccaacacctgtctctcccagcctttgctgtccagcaaatgatagaatccacccacttactcccctccaagtagaagtccttcccccaagtttgtcctcattcccactcccaccgtgcgcctgctctgctccaggtgctggctgctgtctacaaggctctgagtgaccaccacatctacctggaatgcaccttgctgaagcccaacatggccaccccaggccatgcttgcactcaagaagttttctcatgaggagattgccatggcgaccgtcacagcgctgcgccgaaaagtgccccccgctgtcactgggatcaccttcctgtctggaggccagagtgaggaggaggcgtccatcaacctcaa

SEQ ID NO: 81176 - DNA, 724 bp, Homo sapiens
gccagtgagaactcattgaagttggcactgtgttgtttcgacattgcccctgtcactttttaagcattttctggcaccacaagatgtttcaggcttcctcacattttccctatctcagccctggcatcagtcattctctaagaagctcccagttccttttattccagaaaaaaggaacttagaaaccaagttgtttcttgatgccactggaaaccaagatctggacagaatatatactcctggctagagtatcattggcggagtgtcattgcttgtaggcctgctcagcagacagagctagaaaacatatatgtatatatgttaaaacatgcaaatacaagcacctgaatttattattctatccatctgtatgttattaaaaaccgtgagccaggtatggtggctcgtgcctgtatcccaggactttgggaggccaaagtgggaggatcacttgagcccaggagttcaagaccagcctgcgcatcatagcaagacctcatcctccaaacgtttaaaaaataaaaaattagccaggcatggtggtgcattcctgtaatcctagctacgtaggaggctgaggcaggaggatcgcttgagttcagaaggttgaggctgtagtgaactgtgattgtaccactgcactgcagcctgagtgacagagcaagactccgtttcatatttttaaaaataaataaaaatcatgagtttagatacggttttaatt

SEQ ID NO: 81177 - DNA, 97 bp, Homo sapiens
aatgctgatgactttcagttctagacatggatcctacttgaggtctgcttatacttcttttcttgcagccatgaaacactccaatcccctccccctg

SEQ ID NO: 81178 - DNA, 543 bp, Homo sapiens
tggaacaattgaagaagaataggcatttgttcattgtgattaattccaaataatttttgcagacactctgcccctaggaagtggaacataagtcttcacttcttatttgtgtgttgtgtgtagtgacttctttttgaaacatacaacatggaaaggagaagaaaaaaacagtaatttcacagtgcagaaatttgattggaactatctcattcaggtgattaaattaacatcaaaagtgataaagctgttgcagtctgtacccttaacaggatgtgatgagaatggcaatttccctctgtggtcttcctccctgaaacctacaatccattctaatcatgaaagaaacaccaaagaaatcccaaattaggaatgccaatgtcatagcaatcatgcaaacttggagaaattgtcacagtcaaagtcgattaaggagcatgaattgtaaatgtaatgaggtatcctggataggatcctggaacagaaactcgacattaaatgatgactaaatcaatctgaataaagcgcggatggttaataaaagtg

SEQ ID NO: 81179 - DNA, 589 bp, Homo sapiens
ctgtagtcccagctactccaaaggctgaggcaagagaatcacttgaacccgcgaggtggaggttgtagagagccgagatcatgccactatactctagcctgggggacagagtgaaacttggtctcaaaataataatcacaatcatcatcatcatcatcatcatcatcatcaaggaaataagaaaatttctcagtgttgaagaaaggcacacatattcaaatcacaaaagctcactaaatactcaaaaggatgaaggagaaaagactccacctagacataacttcatgtaacttcagaagactcagaaaaattatctgaaacttgaaaataggcagaagagattactgggtaatctattttttaaaatggctactttacatctgtaggaacagagtttaagttgtagatgttatttcagtagagatgaaaataaggttctgttcaattggaacttcagaagttacagttcatggctttggagtacattaatcagttttgtatctatcccagcaatcttcttctaagattaccaataaatgcttagcttctcaaatgctctttgaacaagtgctccctcgttaatcactca

SEQ ID NO: 81180 - DNA, 717 bp, Homo sapiens
ctgtctgcaaaatgaaaagcttgaactggatggccttaagggtgattttcagctcgaaaatcccaatatcctaaccctcaagcttgggttagatccaactcctctgtgctcttcctgtaactaagcaatgagcccagtctatggtaaatcccccacccctaatcctagcctgtgacagagggagaccaagtgtctctgggtctctgtctgcccccagcaccttgagcagggcctggcatgtaggagttgttcagtagatgtttgtgaaatgaaaaaatgaatgaaaacaagcatacatggtctactcctctatttctttctcttaggtgacttggtttatcgtgtgagccattctggcagaagttagacttcatgtaaccccataatgaattcctgtctagtagatcactctaataggcaaaacatatcgcagctaccctctgccggcttcagagactggggtcactatcaaactggtccctggcccacctgcttaaatgctgtggctcctaaccactctttgtgactttgctgcagctacagatatcaagaactccagtgggccatggtacttcttggtccatggccgagggattatgcaaaagctacatccatgcaggagatttccttcatatttggatagtttcaaagataagagcatcttataataaaggggaaagaaacttcagaatgtcacaggcaaagtcttaggaagtg

SEQ ID NO: 81181 - DNA, 540 bp, Homo sapiens
ggctctgtgtttctagagcatcttggtttctggtgcgttatgatccaatgacatttactgcctatcagaaacggcaaatgatgtggagttgaaattattctaacaaaaatataacttttctaatatctgttgctgtttttctgttgaaaatgagcaggtagaatatacattgataggaaatgtgaaaatttttgcttgtgatcccttagtccgaagatagttctgccaggtaagttttcttaaaaatgtttttttctgtcctggcgcggtggctcacgcctgcaatcccagcactttgggaggccgaggcgggcagatcacttgaggccaggagttccagaccagcctggccaacatggtaagacccccgtctctactgaaaatacaaaaattagccgggcatagtggcgtgtgcctgtaatcccagtttcttgagatgctgaggcagaggaattgcttgaacccaggaggcggaggttgcagtgagccgggatcgcgccactgcactccagcctgggcgacagagcaagacgctgtttc

SEQ ID NO: 81182 - DNA, 888 bp, Homo sapiens
tccggtggtgccagcactagcccccatgtcggtctcagagaaccttctccccacctctgagttattctctcagtgtatcgaagatatcagtcaactatcttctggattgcattgatgctattgagaaggcagcctgcagtctaaaagtcatggttttaaaggcggaacacaccaggagccccagcgcaaccctcccctccaatgtgccttcatgccggtccctgtcatccagcgaagacggccccagtggcccttccagcctcgcagatggaggcctagcccacaacttacaggatagtgtcaggcaccgcatcctctacctctcagagcagctgagagtggagaaggccagtcgggatggcaacactgtgagctacctcaagctggtatccaaagcagaccggcaccaggtgccgcacatccagcaggcctttgagaaggtgaaccagcgcgcctctgccaccatcgcccagatcgagcacaggctccaccagtgtcaccagcagctccaggagctggaggaaggctgcaggcccgagggcttactgctgatggcagaaagcgacccagccaactgcgagccacccagtgagaaggccctgctttcagagccccccgagccaggtggggaagacgggccggtcaacctgcctcatgccagcaggcccttcatcttggagagtcgcttccagagcttacagcaggggacgtgcttagagacagaggatgtggcccagcaacaaaacctgctgttgcagaaggtaaaggcagagctggaagaagccaagaggttccacatcagcctccaggagtcctatcacagcctaaaggagaggtctctgactgacctgcagctgttgctggagtcccttcaggaggagaagtgta

SEQ ID NO: 81183 - DNA, 145 bp, Homo sapiens
ttgggacatatatgatataaatgggaaaggatacagggggcaatgtggacacaaagggaaaaagtggcaaggtccttggcaaataattacctatattgagctaaaattacctaaatcaaaagttacctgtccttgaggggtgtat

SEQ ID NO: 81184 - DNA, 443 bp, Homo sapiens
tacttgggaggctgaggcaggagaatggcttgagctcaagagtttgaggctgtaatgcaccatgatcactcctgtgaatagcccctgaactctagcctggatgacactgggagatgctgtctctaataaatacatgaatggtggagaagggtcaactctttcttacacaagaattccaaataatatatatagaaggaatgagggaagtagaaaattcccattagaataccacagtaataattgctgcagacaagatccattaaatgctaaaactagtgggcaaaactttaaggtgaaacacagttgcacatccttaaagtatcaccttcaggctgggcacagcagctcacgcctgtaatcccaacaaaaggctgaggtgggaggatcgcttaggctgaggagttccagaccagcctaagcaacatggtgaaaccccatgtcaa

SEQ ID NO: 81185 - DNA, 319 bp, Homo sapiens
agaccgacccagccccacgcagaaatcatcgcactcccagggcctgactcaggccgaccgcacaggcagttttcaaagtccatggggtcaaaggctgaggtggcgtcatcttccaggcctcccgacctttccccggattccaggtgacatctcagagcagcaggcgggcgggaggactcattcaccggggtcaccaccaggtgactgaggcacagggcaggcacgtgccttgaagtttagtgaaggtcccaacagagctggaagaacacctggatatggctgttgctttgcatgccggagaggagggggtctgcaacgt

SEQ ID NO: 81186 - DNA, 285 bp, Homo sapiens
taaagggttgttaaaaagaagaagacagggatcatatgtgacccgcaaagccaaaaatatttactgtctggccttttacaggaaaagtttgttgacccgttgaccctgacagaacattcccatcccacttggagttccctctggccccttggcagggattcctcccctcccccaggcagccactgatctgctttctatagatgtagttgcgccttttctagaattttgcatgaatgaaatcataccgtatgttgcctgttgtgtctggcttccttcacttatcat

SEQ ID NO: 81187 - DNA, 389 bp, Homo sapiens
tcctgggctcaagtgatcctcccgcctcagcgtcctgagtagctaagactatagatacatgccaccatgcccagccttttccatttatttgacttttatcttattctgacaggttttttgtgtgtgtgtgtgtgtgtgtgtgtgtgtggaatttttaaggttttctacccatgagattatgtcatctgcaaacaaagataattttactgtttcctttccaatttaggtgaattttttttttagccaagttgctctggctaggacttctactactatgttgataagaagtggtgaaagtggacattcttttcttcctcttgatcttacaggaaaagctttcagtcatttaccattgagtatgctattagctgtgggcttttcatatatga

SEQ ID NO: 81188 - DNA, 508 bp, Homo sapiens
  misc_feature (493)..(493): n is a, c, g, or t
aaatattaattttataatttgtatatattcattatttaggatcacatatgtttatgtaacatacccatttgcttgggtatcatttcataccagcaaactaataggaataattttgtgaatgatcttctattttgctaaatttgctaattttgctaaattttgctaaatttgcgagtgatcttctattaagtggagtccatagagcagtagagaataaaattagaaaaaatggccagccatggtggctcacacctgtaatcccagcactttaggaggctgaggcaggcagatcacttgaggttaggggttcaagaccagcctggccaacatggtgaaaccttgtctctactaaaaatatgaaaattagctgggcatggtggcgcatgcctgtaatcccaactactcgggaggctgaggtgagagaagtgcttgagcctggagtgcagaggttgaagtgagctgagatcacgcaactccagcgtggatgatagangtgagactctgtctc

SEQ ID NO: 81189 - DNA, 599 bp, Homo sapiens
aaaatacctttattggtgggcaagtgaaggaattgaatacgttcacctgccttacaatataatctttctgagttactagtgtttacatgtgaacattgaaccagacatttctgtaagcacactgaggttttccgatacctgtgcatagaaagtatatctaacatttggcacagtctctgggaattgtgtttaatgttagagatgaactgaattacctttaaaaaatttttttttcatagagacgtggtctcactctgttgcccaggctggagtgcagtggtgctgtcatagttcactgcagcctcaaactcctaggctcacgctatcctgctgcctcggtctcctgagtagctatgacgacagatgttcatcaccatgcccagctaatttttaaaatatttgtagagacagagtcctgcagtgttgcctaggctagtcttgaattcctgggctcaagcaatctgccttggcctcccagagtgctgggattacaggattactggcctgaattgccatttcaaacatggttgtgatttcatactcttgttggaaaagtataaaattaaattttaaggcaatgtcttcattttgaactttaa

SEQ ID NO: 81190 - DNA, 422 bp, Homo sapiens
  misc_feature (1)..(1): n is a, c, g, or t
ntactactactaaattcgcggccgcgtcgacccacattccaaaagtggagtggtaggtgttccagacagagtgctgattcaagagtgagtaggggtgtagggtgaaagttggctactaattcaagcctcacctgaggcagtgttgctcaaacagaaaagtgccctctctaattagctgcccccatatgcgcttagattaatgacagccaactaacttagaaaccccttccagagtaagctagccaaacaatagatgttccatggacatgacaaagagctaattttcttgtgctaaggaatttttagctcttgtatttgtggtggactgcctcatcacctaatgaaggtgaagtacattctccattttaggaggcagagttaaaacattttcctcctgtggatgtctgattagaaaaaaaaaa

SEQ ID NO: 81191 - DNA, 1196 bp, Homo sapiens
ttttttttggttcaaagtgaaattagtgcagtgattaatcccattttagagtctttgttcagcatgattgaagtttaatgtttttgctaggaaaaattacttggtgttttgatagagctgtaacacctacaataccaccagtagcattggttcttgagaggagacatagcatgcattccctcagatataatccttcaataaatactactgaagcagctctctaccaggaaggaaaacagcactcatcctcatcctcccgtggactcactgtttttgtcttgcctattctgtgctgtaattctcacatcttaactaaaggagctaccacaactaaacaaacagacaaaaaaaaatcagagtataccttcacaaaataagcagtctatatgaaataagggagttgcatttggtttttttgtcagtaagtctgtaatgctcgatatatcaactttcagaattacagtaagtcagagcaaagagaatgaaatctgtagctcagcttgtttatttttttggtttgcttctgctgaattttgtttcccccaagtcagaatacgagtctttttgtgttctctctcttctcttattcttccgagaagtgaaggtggtgggtgtacagcccatatttgtttactttttctgtagctcatatatctattattactggtggtttcttagtggaaatttttctttcactctcactttggctttacctccaagtgctttcttctcttggctgcaattgagcactataatttgtggctttccggagggggagccttggtggtcaggtggaggaggcagcccacattccaaaagtggagtggtaggtgttccagacagagtgctgattcaagagtgagtaggggtgtagggtgaaagttggctactaattcaagcctcacctgaggcagtgttgctcaaacagaaaagtgccctctctaattagctgcccccatatgcgcttagattaatgacagccaactaacttagaaaccccttccagagtaagctagccaaacaatagatgttccatggacatgacaaagagctaattttcttgtgctaaggaatttttagctcttgtatttgtggtggactgcctcatcacctaatgaaggtgaagtacattctccattttaggaggcagagttaaaacattttcctcctgtggatgtctgattagaaaaaaaaaa

SEQ ID NO: 81192 - DNA, 765 bp, Homo sapiens
  misc_feature (1)..(1): n is a, c, g, or t
ntactactactaaattcgcggccgcgtcgaagtaagtcagagcaaagagaatgaaatctgtagctcagcttgtttatttttttggtttgcttctgctgaattttgtttcccccaagtcagaatacgagtctttttgtgttctctctcttctcttattcttccgagaagtgaaggtggtgggtgtacagcccatatttgtttactttttctgtagctcatatatctattattactggtggtttcttagtggaaatttttctttcactctcactttggctttacctccaagtgctttcttctcttggctgcaattgagcactataatttgtggctttccggagggggagccttggtggtcaggtggaggaggcagcccacattccaaaagtggagtggtaggtgttccagacagagtgctgattcaagagtgagtaggggtgtagggtgaaagttggctactaattcaagcctcacctgaggcagtgttgctcaaacagaaaagtgccctctctaattagctgcccccatatgcgcttagattaatgacagccaactaacttagaaaccccttccagagtaagctagccaaacaatagatgttccatggacatgacaaagagctaattttcttgtgctaaggaatttttagctcttgtatttgtggtggactgcctcatcacctaatgaaggtgaagtacattctccattttaggaggcagagttaaaacattttcctcctgtggatgtctgattagaaaaaaaaaa

SEQ ID NO: 81193 - DNA, 437 bp, Homo sapiens
ctgctcttcctgcctccctctcaccttctcaaggacttggctccaacattatcctctttcctggcatattataaatgtttccctctactggatcattcctattagctcataacatgctatcatcgctctcatttaaaaatacaactaaaaacttcctgtacccatgtcccctccagccaccatcccatgactcttcccttttaacagaactcctctagagagtcgtctacactgatgttcccacctctactctatttgtttcctctccccaccactccaaacctatcaaggtcactcacaaccacctcttatcaaagccaataggaaactctccagcccacgaagaataagaagaaaagaacccctcggtgtcttggtttccaggccactagactctcactagtttcttccttcttcaaacagagtccttttcaatg

SEQ ID NO: 81194 - DNA, 431 bp, Homo sapiens
gaaagatctggaagcctgcttctttctcagattttagtcccctaaacccacacccctatgttgtgtcaatttagtttggactcagctaggaacctctgcaagtggaagttcttactgtattttttcctaataattatttattaaaaagaatcacttaagtgtccccacaaacatctggtagactctctctaagtccatataagcagccgtatttgacgtcttctaggaattaacaatatctgatagtcaaggtatccaggactatattttacaatgagtagagctgaattgtatttagcttttgtattcctagataaaaaagcacagtagccaacatctagtcagtaaccttacattaggagactttacctctattcagacagttttgaacccaagggaaaaaaaaaggaggctgacgaagatcagaaaat

SEQ ID NO: 81195 - DNA, 307 bp, Homo sapiens
gttgctgactgctgattggagatgacgtgtacccatcctctagacagtctgtgcttttcctgtctttggagcttccagttccacccccatcagtttttttctgaccactccatcttgccttatttctctctctttccttttgactggaagagtactcatcttttctaacatcttttcataaactgttttgatttcacttatattgatttttaacgtataatgtgctggtgttctatttcctcagttagatcagaaggcccctaaagacagggctccattggtgttaaactgccatcttcaaggtctg

SEQ ID NO: 81196 - DNA, 1230 bp, Homo sapiens
aaatcctggctgtcatgtacttgctatgggcctagagtagcttacctaaatgctactaaccttcctccataccattattgtaaagattaaaggtgatgcatctgttaagtaactaatagagtgcttattaaaaggtaggtgttcaataagtattaattccctccctttctttttcttactagtgcacttgtgtttttaatggatcatactttaccctagattgtattgtaggaggcatcgtggatggatggctgctggaaaccccttgccatagccagctcttcttcaatacttaaggatttaccgtggctttgagtaatgagaatttcgaaaccacatttgagaagtatttccatccagtgctacttgtgtttacttctaaacagtcattttctaactgaagctggcattcatgtcttcattttgggatgcagctaatatacccagttggcccaaagcacctaacctatagttatataatctgactctcagttcagttttactctactaatgccttcatggtattgggaaccatagatttgtgcagctgtttcagtgcagggcttcctaaaacagaagccaactgggtgaatgtaataagtgatttgaaaaaaattgaagatcttattcaatctatgcatattgatgctactttatatacggaaagtgatgttcaccccagttgcaaagtaacagcaatgaagtgctttctcttggagttacaagttatttcacttgagtccggagatgcaagtattcatgatacagtagaaaatctgatcatcctagcaaacaacagtttgtcttctaatgggaatgtaacagaatctggatgcaaagaatgtgaggaactggaggaaaaaaatattaaagaatttttgcagagttttgtacatattgtccaaatgttcatcaacacttcttgattgcaattgattctttttaaagtgtttctgttattaacaaacatcactctgctgcttagacataacaaaacactcggcatttcaaatgtgctgtcaaaacaagtttttctgtcaagaagatgatcagaccttggatcagatgaactcttagaaatgaaggcagaaaaatgtcattgagtaatatagtgactatgaacttctctcagacttactttactcatttttttaatttattattgaaattgtacatatttgtggaataatgtaaaatgttgaataaaaatatgtacaagtgttgtttttt

SEQ ID NO: 81197 - DNA, 313 bp, Homo sapiens
ccagctggtcataaatagtcacgatggtgtcggtgttgctgtccctgttcgtgacatctgtcctgctctgcttcatcttcggccagcacttgcgccagcagcggatgggcactaccggggtgcgagcggcttggaggaggctgcccccacgttctcattgacttccttactaagcatagcaaacagaggaagaatttgttatcagtaagaaaaagaagaactatatgtgaatcctcttctttacactgtaatttagttattgatgtataaagcaactgttatgaaataaagaaattgcaataactggcaaaaa

SEQ ID NO: 81198 - DNA, 1465 bp, Homo sapiens
ctccgggtggcaggcgcccgggggaatcccagctgactcgctcactgccttcgaagtccggcgccccccgggagggaactgggtggccgcaccctcccggctgcggtggctgtcgccccccaccctgcagccaggactcgatggagaatccattccaatatatggccatgtggctctttggagcaatgttccatcatgttccatgctgctgacgtcacatggagcacagaaatcaatgttagcagatagccagcccatacaagatcgtttgtaggaggcatcgtggatggatggctgctggaaaccccttgccatagccagctcttcttcaatacttaaggatttaccgtggctttgagtaatgagaatttcgaaaccacatttgagaagtatttccatccagtgctacttgtgtttacttctaaacagtcattttctaactgaagctggcattcatgtcttcattttgggctgtttcagtgcagggcttcctaaaacagaagccaactgggtgaatgtaataagtgatttgaaaaaaattgaagatcttattcaatctatgcatattgatgctactttatatacggaaagtgatgttcaccccagttgcaaagtaacagcaatgaagtgctttctcttggagttacaagttatttcacttgagtccggagatgcaagtattcatgatacagtagaaaatctgatcatcctagcaaacaacagtttgtcttctaatgggaatgtaacagaatctggatgcaaagaatgtgaggaactggaggaaaaaaatattaaagaatttttgcagagttttgtacatattgtccaaatgttcatcaacacttcttgattgcaattgattctttttaaagtgtttctgttattaacaaacatcactctgctgcttagacataacaaaacactcggcatttcaaatgtgctgtcaaaacaagtttttctgtcaagaagatgatcagaccttggatcagatgaactcttagaaatgaaggcagaaaaatgtcattgagtaatatagtgactatgaacttctctcagacttactttactcatttttttaatttattattgaaattgtacatatttgtggaataatgtaaaatgttgaataaaaatatgtacaagtgttgttttttaagttgcactgatattttacctcttattgcaaaatagcatttgtttaagggtgatagtcaaattatgtattggtggggctgggtaccaatgctgcaggtcaacagctatgctggtaggctcctgcctgtgtggaaccactgactactggctctcattgacttccttactaagcatagcaaacagaggaagaatttgttatcagtaagaaaaagaagaactatatgtgaatcctcttctttacactgtaatttagttattgatgtataaagcaactgttatgaaataaagaaattgcaataactggcaaaaa

SEQ ID NO: 81199 - DNA, 2317 bp, Homo sapiens
ctccgggtggcaggcgcccgggggaatcccagctgactcgctcactgccttcgaagtccggcgccccccgggagggaactgggtggccgcaccctcccggctgcggtggctgtcgccccccaccctgcagccaggactcgatggaggtacagagctcggcttctttgccttgggaggggagtggtggtggttgaaagggcgatggaattttccccgaaagcctacgcccagggcccctcccagctccagcgttaccctccggtctatcctactggccgagctgccccgccttctcatggggaaaacttagccgcaacttcaatttttggtttttcctttaatgacacttctgaggctctcctagccatcctcccgcttccggaggagcgcagatcgcaggtccctttgcccctggcgtgcgactccctactgcgctgcgctcttacggcgttccaggctgctggctagcgcaaggcgggccgggcaccccgcgctccgctgggagggtgagggacgcgcgtctggcggccccagccaagctgcgggtttctgagaagacgctgtcccgcagccctgagggctgagttctgcacccagtcaagctcaggaaggccaagaaaagaatccattccaatatatggccatgtggctctttggagcaatgttccatcatgttccatgctgctgacgtcacatggagcacagaaatcaatgttagcagatagccagcccatacaagatcgttttcaactagtggccccactgtgtccggaattgatgggttcttggtctcactgacttcaagaatgaagccgcggaccctcgcggtgagtgttacagctcttaaggtggcgcatctggagtttgttccttctgatgttcggatgtgttcggagtttcttccttctggtgggttcgtggtctcgctggctcaggagtgaagctacagaccttcgcgtgcacttgtgtttttaatggatcatactttaccctagattgtattgtaggaggcatcgtggatggatggctgctggaaaccccttgccatagccagctcttcttcaatacttaaggatttaccgtggctttgagtaatgagaatttcgaaaccacatttgagaagtatttccatccagtgctacttgtgtttacttctaaacagtcattttctaactgaagctggcattcatgtcttcattttgggatgcagctaatatacccagttggcccaaagcacctaacctatagttatataatctgactctcagttcagttttactctactaatgccttcatggtattgggaaccatagatttgtgcagctgtttcagtgcagggcttcctaaaacagaagccaactgggtgaatgtaataagtgatttgaaaaaaattgaagatcttattcaatctatgcatattgatgctactttatatacggaaagtgatgttcaccccagttgcaaagtaacagcaatgaagtgctttctcttggagttacaagttatttcacttgagtccggagatgcaagtattcatgatacagtagaaaatctgatcatcctagcaaacaacagtttgtcttctaatgggaatgtaacagaatctggatgcaaagaatgtgaggaactggaggaaaaaaatattaaagaatttttgcagagttttgtacatattgtccaaatgttcatcaacacttcttgattgcaattgattctttttaaagtgtttctgttattaacaaacatcactctgctgcttagacataacaaaacactcggcatttcaaatgtgctgtcaaaacaagtttttctgtcaagaagatgatcagaccttggatcagatgaactcttagaaatgaaggcagaaaaatgtcattgagtaatatagtgactatgaacttctctcagacttactttactcatttttttaatttattattgaaattgtacatatttgtggaataatgtaaaatgttgaataaaaatatgtacaagtgttgttttttaagttgcactgatattttacctcttattgcaaaatagcatttgtttaagggtgatagtcaaattatgtattggtggggctgggtaccaatgctgcaggtcaacagctatgctggtaggctcctgcctgtgtggaaccactgactactggctctcattgacttccttactaagcatagcaaacagaggaagaatttgttatcagtaagaaaaagaagaactatatgtgaatcctcttctttacactgtaatttagttattgatgtataaagcaactgttatgaaataaagaaattgcaataactggcaaaaa

SEQ ID NO: 81200 - DNA, 1541 bp, Homo sapiens
aaatcctggctgtcatgtacttgctatgggcctagagtagcttacctaaatgctactaaccttcctccataccattattgtaaagattaaaggtgatgcatctgttaagtaactaatagagtgcttattaaaaggtaggtgttcaataagtattaattccctccctttctttttcttactagtgcacttgtgtttttaatggatcatactttaccctagattgtattgtaggaggcatcgtggatggatggctgctggaaaccccttgccatagccagctcttcttcaatacttaaggatttaccgtggctttgagtaatgagaatttcgaaaccacatttgagaagtatttccatccagtgctacttgtgtttacttctaaacagtcattttctaactgaagctggcattcatgtcttcattttgggatgcagctaatatacccagttggcccaaagcacctaacctatagttatataatctgactctcagttcagttttactctactaatgccttcatggtattgggaaccatagatttgtgcagctgtttcagtgcagggcttcctaaaacagaagccaactgggtgaatgtaataagtgatttgaaaaaaattgaagatcttattcaatctatgcatattgatgctactttatatacggaaagtgatgttcaccccagttgcaaagtaacagcaatgaagtgctttctcttggagttacaagttatttcacttgagtccggagatgcaagtattcatgatacagtagaaaatctgatcatcctagcaaacaacagtttgtcttctaatgggaatgtaacagaatctggatgcaaagaatgtgaggaactggaggaaaaaaatattaaagaatttttgcagagttttgtacatattgtccaaatgttcatcaacacttcttgattgcaattgattctttttaaagtgtttctgttattaacaaacatcactctgctgcttagacataacaaaacactcggcatttcaaatgtgctgtcaaaacaagtttttctgtcaagaagatgatcagaccttggatcagatgaactcttagaaatgaaggcagaaaaatgtcattgagtaatatagtgactatgaacttctctcagacttactttactcatttttttaatttattattgaaattgtacatatttgtggaataatgtaaaatgttgaataaaaatatgtacaagtgttgttttttaagttgcactgatattttacctcttattgcaaaatagcatttgtttaagggtgatagtcaaattatgtattggtggggctgggtaccaatgctgcaggtcaacagctatgctggtaggctcctgcctgtgtggaaccactgactactggctctcattgacttccttactaagcatagcaaacagaggaagaatttgttatcagtaagaaaaagaagaactatatgtgaatcctcttctttacactgtaatttagttattgatgtataaagcaactgttatgaaataaagaaattgcaataactggcaaaaa

SEQ ID NO: 81201 - DNA, 1701 bp, Homo sapiens
gctggtaccggtccggaggttagggattgaggctctcctagccatcctcccgcttccggaggagcgcagatcgcaggtccctttgcccctggcgtgcgactccctactgcgctgcgctcttacggcgttccaggctgctggctagcgcaaggcgggccgggcaccccgcgctccgctgggagggtgagggacgcgcgtctggcggccccagccaagctgcgggtttctgagaagacgctgtcccgcagccctgagggctgagttctgcacccagtcaagctcaggaaggccaagaaaagaatccattccaatatatggccatgtggctctttggagcaatgttccatcatgttccatgctgctgacgtcacatggagcacagaaatcaatgttagcagatagccagcccatacaagatcgttttcaactagtggccccactgtgtccggaattgatgggttcttggtctcactgacttcaagaatgaagccgcggaccctcgcgttgtaggaggcatcgtggatggatggctgctggaaaccccttgccatagccagctcttcttcaatacttaaggatttaccgtggctttgagtaatgagaatttcgaaaccacatttgagaagtatttccatccagtgctacttgtgtttacttctaaacagtcattttctaactgaagctggcattcatgtcttcattttgggctgtttcagtgcagggcttcctaaaacagaagccaactgggtgaatgtaataagtgatttgaaaaaaattgaagatcttattcaatctatgcatattgatgctactttatatacggaaagtgatgttcaccccagttgcaaagtaacagcaatgaagtgctttctcttggagttacaagttatttcacttgagtccggagatgcaagtattcatgatacagtagaaaatctgatcatcctagcaaacaacagtttgtcttctaatgggaatgtaacagaatctggatgcaaagaatgtgaggaactggaggaaaaaaatattaaagaatttttgcagagttttgtacatattgtccaaatgttcatcaacacttcttgattgcaattgattctttttaaagtgtttctgttattaacaaacatcactctgctgcttagacataacaaaacactcggcatttcaaatgtgctgtcaaaacaagtttttctgtcaagaagatgatcagaccttggatcagatgaactcttagaaatgaaggcagaaaaatgtcattgagtaatatagtgactatgaacttctctcagacttactttactcatttttttaatttattattgaaattgtacatatttgtggaataatgtaaaatgttgaataaaaatatgtacaagtgttgttttttaagttgcactgatattttacctcttattgcaaaatagcatttgtttaagggtgatagtcaaattatgtattggtggggctgggtaccaatgctgcaggtcaacagctatgctggtaggctcctgcctgtgtggaaccactgactactggctctcattgacttccttactaagcatagcaaacagaggaagaatttgttatcagtaagaaaaagaagaactatatgtgaatcctcttctttacactgtaatttagttattgatgtataaagcaactgttatgaaataaagaaattgcaataactggcaaaaa

SEQ ID NO: 81202 - DNA, 1360 bp, Homo sapiens
  misc_feature (1)..(1): n is a, c, g, or t
  misc_feature (28)..(28): n is a, c, g, or t
nctttaaggtgacgtgactctcttctgnaaccgccgaatcaaatccattccaatatatggccatgtggctctttggagcaatgttccatcatgttccatgctgctgacgtcacatggagcacagaaatcaatgttagcagatagccagcccatacaagatcgtttgtaggaggcatcgtggatggatggctgctggaaaccccttgccatagccagctcttcttcaatacttaaggatttaccgtggctttgagtaatgagaatttcgaaaccacatttgagaagtatttccatccagtgctacttgtgtttacttctaaacagtcattttctaactgaagctggcattcatgtcttcattttgggctgtttcagtgcagggcttcctaaaacagaagccaactgggtgaatgtaataagtgatttgaaaaaaattgaagatcttattcaatctatgcatattgatgctactttatatacggaaagtgatgttcaccccagttgcaaagtaacagcaatgaagtgctttctcttggagttacaagttatttcacttgagtccggagatgcaagtattcatgatacagtagaaaatctgatcatcctagcaaacaacagtttgtcttctaatgggaatgtaacagaatctggatgcaaagaatgtgaggaactggaggaaaaaaatattaaagaatttttgcagagttttgtacatattgtccaaatgttcatcaacacttcttgattgcaattgattctttttaaagtgtttctgttattaacaaacatcactctgctgcttagacataacaaaacactcggcatttcaaatgtgctgtcaaaacaagtttttctgtcaagaagatgatcagaccttggatcagatgaactcttagaaatgaaggcagaaaaatgtcattgagtaatatagtgactatgaacttctctcagacttactttactcatttttttaatttattattgaaattgtacatatttgtggaataatgtaaaatgttgaataaaaatatgtacaagtgttgttttttaagttgcactgatattttacctcttattgcaaaatagcatttgtttaagggtgatagtcaaattatgtattggtggggctgggtaccaatgctgcaggtcaacagctatgctggtaggctcctgcctgtgtggaaccactgactactggctctcattgacttccttactaagcatagcaaacagaggaagaatttgttatcagtaagaaaaagaagaactatatgtgaatcctcttctttacactgtaatttagttattgatgtataaagcaactgttatgaaataaagaaattgcaataactggcaaaaa

SEQ ID NO: 81203 - DNA, 1841 bp, Homo sapiens
ctccgggtggcaggcgcccgggggaatcccagctgactcgctcactgccttcgaagtccggcgccccccgggagggaactgggtggccgcaccctcccggctgcggtggctgtcgccccccaccctgcagccaggactcgatggagaatccattccaatatatggccatgtggctctttggagcaatgttccatcatgttccatgctgctgacgtcacatggagcacagaaatcaatgttagcagatagccagcccatacaagatcgttttcaactagtggccccactgtgtccggaattgatgggttcttggtctcactgacttcaagaatgaagccgcggaccctcgcggtgagtgttacagctcttaaggtggcgcatctggagtttgttccttctgatgttcggatgtgttcggagtttcttccttctggtgggttcgtggtctcgctggctcaggagtgaagctacagaccttcgcgtgcacttgtgtttttaatggatcatactttaccctagattgtattgtaggaggcatcgtggatggatggctgctggaaaccccttgccatagccagctcttcttcaatacttaaggatttaccgtggctttgagtaatgagaatttcgaaaccacatttgagaagtatttccatccagtgctacttgtgtttacttctaaacagtcattttctaactgaagctggcattcatgtcttcattttgggatgcagctaatatacccagttggcccaaagcacctaacctatagttatataatctgactctcagttcagttttactctactaatgccttcatggtattgggaaccatagatttgtgcagctgtttcagtgcagggcttcctaaaacagaagccaactgggtgaatgtaataagtgatttgaaaaaaattgaagatcttattcaatctatgcatattgatgctactttatatacggaaagtgatgttcaccccagttgcaaagtaacagcaatgaagtgctttctcttggagttacaagttatttcacttgagtccggagatgcaagtattcatgatacagtagaaaatctgatcatcctagcaaacaacagtttgtcttctaatgggaatgtaacagaatctggatgcaaagaatgtgaggaactggaggaaaaaaatattaaagaatttttgcagagttttgtacatattgtccaaatgttcatcaacacttcttgattgcaattgattctttttaaagtgtttctgttattaacaaacatcactctgctgcttagacataacaaaacactcggcatttcaaatgtgctgtcaaaacaagtttttctgtcaagaagatgatcagaccttggatcagatgaactcttagaaatgaaggcagaaaaatgtcattgagtaatatagtgactatgaacttctctcagacttactttactcatttttttaatttattattgaaattgtacatatttgtggaataatgtaaaatgttgaataaaaatatgtacaagtgttgttttttaagttgcactgatattttacctcttattgcaaaatagcatttgtttaagggtgatagtcaaattatgtattggtggggctgggtaccaatgctgcaggtcaacagctatgctggtaggctcctgcctgtgtggaaccactgactactggctctcattgacttccttactaagcatagcaaacagaggaagaatttgttatcagtaagaaaaagaagaactatatgtgaatcctcttctttacactgtaatttagttattgatgtataaagcaactgttatgaaataaagaaattgcaataactggcaaaaa

SEQ ID NO: 81204 - DNA, 2024 bp, Homo sapiens
ctccgggtggcaggcgcccgggggaatcccagctgactcgctcactgccttcgaagtccggcgccccccgggagggaactgggtggccgcaccctcccggctgcggtggctgtcgccccccaccctgcagccaggactcgatggaggtacagagctcggcttctttgccttgggaggggagtggtggtggttgaaagggcgatggaattttccccgaaagcctacgcccagggcccctcccagctccagcgttaccctccggtctatcctactggccgagctgccccgccttctcatggggaaaacttagccgcaacttcaatttttggtttttcctttaatgacacttctgaggctctcctagccatcctcccgcttccggaggagcgcagatcgcaggtccctttgcccctggcgtgcgactccctactgcgctgcgctcttacggcgttccaggctgctggctagcgcaaggcgggccgggcaccccgcgctccgctgggagggtgagggacgcgcgtctggcggccccagccaagctgcgggtttctgagaagacgctgtcccgcagccctgagggctgagttctgcacccagtcaagctcaggaaggccaagaaaagaatccattccaatatatggccatgtggctctttggagcaatgttccatcatgttccatgctgctgacgtcacatggagcacagaaatcaatgttagcagatagccagcccatacaagatcgttttcaactagtggccccactgtgtccggaattgatgggttcttggtctcactgacttcaagaatgaagccgcggaccctcgcgttgtaggaggcatcgtggatggatggctgctggaaaccccttgccatagccagctcttcttcaatacttaaggatttaccgtggctttgagtaatgagaatttcgaaaccacatttgagaagtatttccatccagtgctacttgtgtttacttctaaacagtcattttctaactgaagctggcattcatgtcttcattttgggctgtttcagtgcagggcttcctaaaacagaagccaactgggtgaatgtaataagtgatttgaaaaaaattgaagatcttattcaatctatgcatattgatgctactttatatacggaaagtgatgttcaccccagttgcaaagtaacagcaatgaagtgctttctcttggagttacaagttatttcacttgagtccggagatgcaagtattcatgatacagtagaaaatctgatcatcctagcaaacaacagtttgtcttctaatgggaatgtaacagaatctggatgcaaagaatgtgaggaactggaggaaaaaaatattaaagaatttttgcagagttttgtacatattgtccaaatgttcatcaacacttcttgattgcaattgattctttttaaagtgtttctgttattaacaaacatcactctgctgcttagacataacaaaacactcggcatttcaaatgtgctgtcaaaacaagtttttctgtcaagaagatgatcagaccttggatcagatgaactcttagaaatgaaggcagaaaaatgtcattgagtaatatagtgactatgaacttctctcagacttactttactcatttttttaatttattattgaaattgtacatatttgtggaataatgtaaaatgttgaataaaaatatgtacaagtgttgttttttaagttgcactgatattttacctcttattgcaaaatagcatttgtttaagggtgatagtcaaattatgtattggtggggctgggtaccaatgctgcaggtcaacagctatgctggtaggctcctgcctgtgtggaaccactgactactggctctcattgacttccttactaagcatagcaaacagaggaagaatttgttatcagtaagaaaaagaagaactatatgtgaatcctcttctttacactgtaatttagttattgatgtataaagcaactgttatgaaataaagaaattgcaataactggcaaaaa

SEQ ID NO: 81205 - DNA, 1083 bp, Homo sapiens
cggattgggatcggacctacttgattcacttctgggaaatcaaggatctacgtaccatggattttcaggtgcagattttcagcttcctgctaatcagtgcctcagtcataatgtctagaagccaactgggtgaatgtaataagtgatttgaaaaaaattgaagatcttattcaatctatgcatattgatgctactttatatacggaaagtgatgttcaccccagttgcaaagtaacagcaatgaagtgctttctcttggagttacaagttatttcacttgagtccggagatgcaagtattcatgatacagtagaaaatctgatcatcctagcaaacaacagtttgtcttctaatgggaatgtaacagaatctggatgcaaagaatgtgaggaactggaggaaaaaaatattaaagaatttttgcagagttttgtacatattgtccaaatgttcatcaacacttcttgattgcaattgattctttttaaagtgtttctgttattaacaaacatcactctgctgcttagacataacaaaacactcggcatttcaaatgtgctgtcaaaacaagtttttctgtcaagaagatgatcagaccttggatcagatgaactcttagaaatgaaggcagaaaaatgtcattgagtaatatagtgactatgaacttctctcagacttactttactcatttttttaatttattattgaaattgtacatatttgtggaataatgtaaaatgttgaataaaaatatgtacaagtgttgttttttaagttgcactgatattttacctcttattgcaaaatagcatttgtttaagggtgatagtcaaattatgtattggtggggctgggtaccaatgctgcaggtcaacagctatgctggtaggctcctgcctgtgtggaaccactgactactggctctcattgacttccttactaagcatagcaaacagaggaagaatttgttatcagtaagaaaaagaagaactatatgtgaatcctcttctttacactgtaatttagttattgatgtataaagcaactgttatgaaataaagaaattgcaataactggcaaaaa

SEQ ID NO: 81206 - DNA, 430 bp, Homo sapiens
gcccccattaccttctttgctgctaccacaacaaggtatattagcccttgaaattaaagatgttgctgtcccagttgtgcttgtcttcacctaaatgcatacagtcatattccaaaagactatatattagtgatatctatatagttcacccttcatatacatgagctcccgtgtgtggagtgaactaattgcagatataaaatatttgggaaaaaatttcatgtgtactgaacatgtatagactttttttcttgttatcatttcctaaataatacagaataataaccactgtttacatagcatttacattgtgttaggtattataaataatctgtacataatttaaactgtacaggagaatatgcataagtcatatgtgaataccacaccattttatatcaagtacttgagccatctgcagattgtggtg

SEQ ID NO: 81207 - DNA, 540 bp, Homo sapiens
ttccgtggctgacacaataaacattatctcaccgttgctgtgctccaggaatttgggagcaacatgacaggacgattcccactccagttctgtcatgaggtggcggtgagctcttagcccaggctgcagtcacccaagggcgtgactggggctggagggtgttcttcccaggtgggtcacccttgtggctggcaagccagagctggctgttggccagaggcctgggttccatccacgtggatctctccacagggccattgagggtcctcttccagagtaagtgattcaaggcagagcaaaagcagaagccacatgccttttacagcctagtctcagaagccacacattgtcatttctgcgctgtcttattggttacacaggtttgccctgctcagtgtgagaggagaccacaccagggtgttgacttccaggagaactgggtcctcaggggccatcttaagggctggctgtcacagctgtgatcacaaccctcagtcggtcccttatgaacaaatggtccaaccctgagaatagtttaaa

SEQ ID NO: 81208 - DNA, 502 bp, Homo sapiens
gtgggtcctcacaaaagcaaacatccacatagagacctacacataaatgttcatagcacctttacctgtagtagttaaaaactggaaacagcccaaatgttcaacaggtaaacaagtaaatagtagtatatctacacaacaaaccactactcagctatgaaagggaataggctcttgactcacacatcataggtaaatcttaatggtttcacatgtgtatatgtatgttaaaacttatcaaaacgtgcactttaaagatgtgtttatgtccatcatacttcaataaagctgttttttaaaaagacctactaattcaacgatttaagttgttataaatcagaacaaaagtgagaattattcccttttttttttttttttaattgagacagagtctcactctgtcgcccaggctggagtgcagcggcactatctcggctcactgcaacctccatctcccaggttcaagtgattctcctgcctcagcctcctgagtaggtgggat

SEQ ID NO: 81209 - DNA, 104 bp, Homo sapiens
catgctgggcactgccctccctagacaagacctgtctgtggactctttccagcgcagctgtttagccagacgctggccccgtctgcagccgtcacaggccctct

SEQ ID NO: 81210 - DNA, 458 bp, Homo sapiens
cctgcagcctggctaatgtcttgatggcaacttaacaagataccttaagccagaaccatctagctaatacactcttgaattcctattacaaacactgggaaataatcaatgtttgttgttttaagctgctaaactttgatattatttattttattcatttattttttgagacagggtcttgctgtattgcccaggctggagcgcaatggagcgatctcggctcactccagtctccatctcctgcgttcaagtgattctcctgcctcagcctcccgagtagctgggattacagacgtgcaccaccatgccgagctaatttttaggagagatggggtttcaccatgttggtcaggctggtctccaactcccaggctcaagtgatcctcccacttcggcctcccaaagtgctgggattacaggcatgagccattgcacctggccgagattatttattatac

SEQ ID NO: 81211 - DNA, 448 bp, Homo sapiens
ggcaatttaataccttaatcttcaggttttggaattttgccacaaatttagaaaccaaaaaagttggagatcacttcttaatttaagtcaagacagggttaggagaatattcttcattatgtagcttccaaatttagccttcttttcttcacaagcctgaactctttcttagtttttagtgttccatgactgtatctaccttaagaaagcccaataatgtacatcaaaattcaggtttgtaaaactaaagagaatgatcaatcactttatacaaagccagtgttcctataggaggggcagaagttcctgtggtacattcaatattgatattattcctaaaatatgcttacctataattctttcagggatttcctttttgttacatatcaaagtgtatttgcactgaaatgtctatgaatagataagagtacctttagtttgaaagaat

SEQ ID NO: 81212 - DNA, 641 bp, Homo sapiens
ataaggaactgccaataaaaaagaaataaaggaatcaaaacaccaaaacagaaatagaggtaatgtgaggtaattgaaagcactccttcaaggactttaggaattacactatttcaaaataaaacttgaaatgtaaatccaggaacgttatatagagttacttacgtttcattaatcaataggacacagtgctttatgatggccttaagtacaatttatagacgttattcaataaagaaagtctataaaaatacaaacaaaatttaaaatgccctgctcaaaaccaaatttttttcccaaagaatttcaactttcctcaaaacgtcaacaatctccaaaatttccatccaaataaaacagtttatataagacatgttaagtaatacagcactgttttatatatctgtctgcctcaaactcctgaatatacttcacaaatataaaacatctaatcaaacccaagtcttttcattatcaactaaaagactgagtgaatgttcaccaaaatatcactcacatctttatctctcctacccccaactccactctcccaactgcttccaatttccctttttctattaggggtactcctcctagtgccaatggctagaaatctcaattcaatcctgcttctttaaaat

SEQ ID NO: 81213 - DNA, 587 bp, Homo sapiens
ataaggaactgccaataaaaaagaaataaaggaatcaaaacaccaaaacagaaatagaggtaatgtgaggtaattgaaagcactccttcaaggactttaggaattacactatttcaaaataaaacttgaaatgtaaatccaggaacgttatatagagttacttacgtttcattaatcaataggacacagtgctttatgatggccttaagtacaatttatagacgttattcaataaagatttcccaaagaatttcaactttcctcaaaacgtcaacaatctccaaaatttccatccaaataaaacagtttatataagacatgttaagtaatacagcactgttttatatatctgtctgcctcaaactcctgaatatacttcacaaatataaaacatctaatcaaacccaagtcttttcattatcaactaaaagactgagtgaatgttcaccaaaatatcactcacatctttatctctcctacccccaactccactctcccaactgcttccaatttccctttttctattaggggtactcctcctagtgccaatggctagaaatctcaattcaatcctgcttctttaaaat

SEQ ID NO: 81214 - DNA, 189 bp, Homo sapiens
gacagtggtgagatgcaagaggtgaggtctctataagcaaaacctgtttcaaattgtccctgtagttggcaacccaggaagtttttatacttaggtatattgcaccacattaatatctaagatgtgtaagaaattcgtctttcaagtgggagaataactgtgaagagggatgtgaaaataaaactccgg

SEQ ID NO: 81215 - DNA, 450 bp, Homo sapiens
tactctgaagaagaactgagcaggatgagtggatagaaggtgtcaacagcagccgtaactggtctgggaagacccctcagagctgtccatatctgagcagagatctaatatgcattagatcagtatgcatttcccaaactgaaatgacaagggaacctctttgtcacagagcatcttgcaggactgcttctgagaacctgctttgagaaagtgggcatggagacagtcggagtagaaagtgggatcttcagagtcccaagacctgggtgctcatgttagaatggggactctgaatctcataaatgcaaagtaagacctttcatgtaggagtcttatcacccacccccaactgggaggtctctgcttcgacttcagggttggaaaagcactgcacatactctccccagctgccctggattcacgctgattctgcagggttcatgaagatgg

SEQ ID NO: 81216 - DNA, 585 bp, Homo sapiens
actggaattaaaacagagtttttaagttttttctttgcttgtttttgttcttttcttgtgatcaaagtgaagttgtcatcaaacttgttatattttctgaaccccttagggaaaccacaactcaaaaaagtctaaacagataaactaaaaataaaaagtaaaacatactatgagaaaaaatcatttatccacaaaggaagacagaaagaaaaaaagagaggacttccaaaacaaccagaaaacaaaaaacaaactggcagtagttaagtctttacctaacaataataaactgactgttgatggactaacttatctgattaaaagatacagaatggctcaatgaataagaaaacaagaccaactatatgctgcctacaagaaattcactttggctgggcacggtggctcacacctgtaatcctaacactttgggaggccacagtgggcagatcacttgaggtcaggggttcaagaccagcctggccaacatggcaaaaccccatctctactgaaaaaaaaaattagctgggcatggtggcttgtgcctgtaggcccagctacttaggaggctgaggcaggagaatc

SEQ ID NO: 81217 - DNA, 818 bp, Homo sapiens
cgagcccgcactcctcagcccttgggcggtcaatggggcgcggcgctgtgaagcagggggcggcgcctgtcagggaggctccggcggcgccggagggagtgggggtttgctcaggcatgccgggctgcaggtcccaagcccgtcccgctgggaagaggctgaggcctggcaagaattagagcgctgcgccggcaggccggaagtgctggcggacccagcgcaccctccgcagctgctggcccaggtgctaagcttctcactgcctggggccagcattgtcagctgcctgctcggaatgcggggccagccgagcccgcacccaccgggaactcgtgctggccagcgagcgccagcgcgcggcccaggttccacccgcgcctctctctccaaacctcccggcaagcagagggagccggctccggcctcagccagcccagagaggggcttccacagtgcagcggtcagctgaagggctcctgaagaggggccagagtggacaccgcagcctgaggaggtgcagagggagcgagggctgctagcacgttgtcacctctcaatagcaagaccaaagcttacagatgtccattatgtaaataggtaagaaatatctggttcttttctttgttgataagcttctcagcatttttttgtgttttaaaagtattttgtagtttatttgctatatggaatcaactttaattttcttacttcttattcaggcttttttataagtcactatatgaaaaaagtcttaaaatcctagtttcagaaagcaatgtaagctcaacaaatggagggtatctaacttctattgaaaa

SEQ ID NO: 81218 - DNA, 193 bp, Homo sapiens
atggggacaaatgttcaaacccatggcagcacatgaataaaacagaatagaaaagccaaaaattttaaaaaataagaaaacccaaaaataaacttaatgacatctggaagtctaataagtggtaaatatgccatctcaaatcaatagagaaaaagaagaccttcctaataaatagtcctgtcataaatgggta

SEQ ID NO: 81219 - DNA, 373 bp, Homo sapiens
acaaattgtgacatttcctaacaatgtgatattatacagcaatgaaaaagaacaaactactgctaaatgtgccaaaataaattaatatccctaagataatggtgaattgtaagtgccaaacacaactgagtacatactacatgagtccactttagaaaagctcaagaacaggcaaactgattgtagaaagaagtcagaacactggttactgctagaaagagagctattgattgggaagaggcacaaagcctatatcttcacctgagtagtggtgaaacatgtgtatataaacataaaaatgtttttatgtttaatatctttgcctttgtttatgttgaatatctttgcctttcatgcatttaaactaattaaa

SEQ ID NO: 81220 - DNA, 454 bp, Homo sapiens
aaaaattagctgggcgtgatggcgagcgcctgtaatccagctactccagcgcctgaggcaggagaatcgcttgaaccccggaggcggaggttgcagtgagctgagaactcaccattgcactccagcctggatgacagagtgagactccatctcaaaaaagaagaacaaactacagcggggagagggcgaggggaagaagatagtgggggaaaaagagcaccgagaaagggagaagagatggggagagctctattgtgtcactgaacattcctcagttaaagttaaaatgttctcataagtttgtgtgttttcaacttttgctcttccagttggtatattcttttcttcctccatctcctttttatacctccaaccacctttctctttttattttccaatgtttttctttcttctaagaacattgttaacgctggtaacactttacaatgttgca

SEQ ID NO: 81221 - DNA, 342 bp, Homo sapiens
ataactttcgtgtgtcatcaaggacattcttaagtaaaactggcattacaatttttttaaagaatatttttactgttaatattgcccggaagaaaagaatagagaagaatataatgacaactgggacagtttggtgctgcagtgaattaattacgtaggcaatcgagactctaataaggatattttgctccagcaattcctgattgtcccctgtagctgacgtgtactatgaaagttatcactgtggtattcttttttttttttttttaattgaaagcaagtttattaagaaagtaaaggaataaagaatggcttactccataggcaaagcagccctaaggg

SEQ ID NO: 81222 - DNA, 693 bp, Homo sapiens
ctcgttggtaagcatgttctagggagagctagtggtagacaggcccaggccacagcaggccttgtagatgggccagggctgcttacctgtgcactaggggtggtacttggccctgccctggcccctgtgtgggcttatcctctgctgagaccattgtggttctctggtgccagaggcacccagaggtctgtgatctgcctgctttgaggcgggaagggttgttccagttctgctttcccaagcggtggctgtgggcaacccttatgatccaggacgcatggtcatcttaacgagcagctggctttacacccagggcgagcagaggtcttaaattatgcccgttgtcctggagtaatttagagcagcctcttttgtattcaggcatcctggtttgcatggtaaggtatgaatatagttgcctttaaacagcacgatgaagtgggcgggttattgttctcatttcaccaaggaggataatgaaccttagcgatctcgagtgactttcccggccccatcccctttgaggggcagggctcgctctgcttccctgtctgggcaccaccctcctctctgcacctcagtccacgccgggatgtcctttctgacctcactgcagtggcacttccccctcaaccgggggtgcccagaacgaatgggtgtatttgggtgaagccagtatgactgtttctaccc

SEQ ID NO: 81223 - DNA, 448 bp, Homo sapiens
taaatacaaagacccatttccctgttatcacagcactgatactgaaagatagtaaaataataacagtaaattaattttatctgtctataaatataattggctatcacttattaagcttctaccatgtcctaatcctcacaacagcctctacaaagtaggaaccattatcctccttttataggtaaagaaacagaatcagaaagttaactgatgagctacaatttagttaaggggatatcaaaagacataataggcatgaaacagaagtataaaatgaagtctgagaaagaagtcatgaattctgactttggaaaattaagtatcattattgttatatccatgtacagcagttatgattaacaaaattatagaattcttcacataatgaagcaaacattttaaaatttaaaacatacggatgccctaggtaaggccagtagttttttta

SEQ ID NO: 81224 - DNA, 803 bp, Homo sapiens
gcagttgcgcagtctcggctcactgtaacctccgcctcctggattcaagagattctcatccctcagcctcccgagtagctgggattacaggcgcatgccatcacacccagctaatttttgtattaggtggtttttaaaggccaccgcttcttcagtgttctgcaccaggtctgggaatgttctcagctcacctagtcatgttcagaatggacaaatccctcagaggaagcagacacggtttctcgggacggtgatcctttagagccacatgcacatgcttgctttcttttattattatctttttttgagatggagtctcactccgtcaccgaggctggagtgggaggatcgtttgaacccaggagatggaggcgtcaatgagccgaaatcacaccaccgcactccagcctgggcaacagagcaagactccgtctcaaaaacaaaacaaaacaaagcaaaaaaaaaccaaaaaaaaaaaaaaaaacacttggtcgcacagcactaggcccatcggaaaagctctgtcgaaagaaccagcccgggttgaagagcggagggacccagataggtaacatcgacacaccggcggcgataagagctagggtcccccaaaagagagaccccggggacgaagagaaaataagggcgtagggagagtcccacgcagatataaaagaagggcccaggggtgtgaaacccgcagactctactagaaagaaaaccccgagtaagaggatcaggaacgacattcacgggagtctacaagagaggggcccacagacgagcacgaaataaaattagcc

SEQ ID NO: 81225 - DNA, 370 bp, Homo sapiens
gcagttgcgcagtctcggctcactgtaacctccgcctcctggattcaagagattctcatccctcagcctcccgagtagctgggattacaggcgcatgccatcacacccagctaatttttgtattaggtggtttttaaaggccaccgcttcttcagtgttctgcaccaggtctgggaatgttctcagctcacctagtcatgttcagaatggacaaatccctcagaggaagcagacacggtttctcgggacggtgatcctttagagccacatgcacatgcttgctttcttttattattatctttttttgagatggagtctcactccgtcaccgaggctggagtgcagtggcataatcttggctcactacaac

SEQ ID NO: 81226 - DNA, 334 bp, Homo sapiens
acactggactcaactgtttctgaattctgtgtcttcctttttctttatttacttcatcattttattatagtacatgtcaagtctcctgtcaggaaagagtacatggaaggcagagttgttgagtgtctgtgtctttctctgacctctcacttgatggtagtttggctggctctggaattctaggttgaaaaatttccctagaagtttgtagccactgcttcactgacttacagcatccactgctgctaatgagatgcctgattccaatctgatacttatttatttgacaatcagtaaatagtatttacattacagtgatctgttttcccacccc

SEQ ID NO: 81227 - DNA, 487 bp, Homo sapiens
ggcagcttccagggcgggctggactggggggagaatccctcatgtcccatgcacgaagatagcagcaggtggatgaggagcaggggtggagatggaacttagctaaacccccagtgagaggctgtggctgtgaaatcccaggatatttgcagcatgagctgggacaggattcatgtaggcacccgtggggagtcccagaaatacctggaggaatcatgcaagaggcctgtcctatgggaataagtgaatctcagaggtgatgggcgtctatggtctggggactgagggcagggaaaactgggaacttggcttaccttttatcgtgggcagcaccctctccagagagccctgggattggcgggagaggccaggacccttcctcgctgcagcctccagtcactccaaactgtaggaggggcaggctggccttggatttggtgagcctgggagcacctgtatcagtaacaagacttcccctctagcttta

SEQ ID NO: 81228 - DNA, 202 bp, Homo sapiens
gcaaaacactgccccgcccccactcctccgcatttacagccatggcatttatagccaggtagcactagagcagcagtggactataagggaccatgtggaaagggacaagtggaatcacaagcccctggtgccaacaaatgattgaccattgttggtactagagctttgacccctgaaagaatccatttgcctgtgcaccatg

SEQ ID NO: 81229 - DNA, 271 bp, Homo sapiens
gagattcatttatgtagaacgtggctgaaatgatgtaaatctacagtttccacctcaaactcagcagatgcaaagaatttcaacaactcccctgtgagtgttaagatatcccacagggtagatgagccattattgtaccgagccactgatacttagctccagtgatccttaatcggaaactgctttctcttttaagggtaacatcatcttcctaagattccattgtttgttattctcaggagcaaacagctgggagtggcggctcacacct

SEQ ID NO: 81230 - DNA, 945 bp, Homo sapiens
tagagacagggtcttgctctgtcacccaggctggagtggagtggtgtgttcatagctcactgtaaccttgaactcctgggctgaagccatcctcctgcctcagccttccgagtagccaggaccatagtcatgcaccacacccctggctaattttttaaaaattttttgtagagaagaggtcttgatgtgttgcccaggctggtcttgaactcctggactcaagtgatcctcctgcctcagcctgccaaagtgctgggattacaggagtgagccatcatgcccagtctcattctgctttcatctgaggggcagaaacaggagactcaagaggagaagccggggctcgagggctggcaaagccagcgtcgctcttccaggtcctgtgcagcatttcagatggaacccttggaagcccactgaccacatgtgtgacctggggaaggcccatcttttggaaactttgtatcacctgctttgcccattccttcaagaaacgctgatttgttgaaggaacataatttgttccactatgtacagggctttcttctgaacttagaaaaccaaaaacaaaaccacctcaaaaactgtgcatgcatcaagattcaaagcccagatgcattgcaggatgtttgtttaatttgcaaaaccttcaccatgaggtttctttcagtaattagctcccaagtgcatatgaaaaatattatagataaaaacgtttgtggaaggcaaaaaaaagctttaactgaatagatttagttatacttgcatgataaaaagtgtccaaaatgtttctagttttctccttgcctttcatatttgtcagtgaatttaatgacaaacatcaattacctgaaaaatgtccttgcggtaggtggtagcattgaattgtattacagatcttattgaaggggtgaatacttaatatactaacgttcacatttacaa

SEQ ID NO: 81231 - DNA, 745 bp, Homo sapiens
cgtaaggatattggggtgagaagcaagtgtctcggagtgacccatcccctgccctatttcgtttgcctcccttttttgtaagttctccaaggatcagcactcccttgaccaatcacaagcatcccagtcccaggtgacctaacccactcaggccccacccctgcagtccctagagctggtggtcttcctacagacccccttctacacttgcgtggcatcagcaacgcgtgctgcacctgcagtgcagaggtctcgggttccagcaggcaggctgagcactgagggcaggttgcttgtctcctggagggagccgttgaggagctgtcacttcgctggagcatgtattggcctcagattccctcccctagcgggctccatgcataattttaaaaagccaattgcaggagtaggaattcagttcaattgtggggaaggtagaacccagcttttaggtagtgtgggtttataattctataggatgggcttattcagaaataaattcatgtgactctgagtgaagaattgagtatctaataataaatttttcttccagttatgcaaccattagtgctgtgtttgtgttttggccaacacgctttttaagctaggcctcagtttcctgagtgcaaaaatgagtggcagaaatgaactgaggtctgaggcttctgtctgtcctggcatgctgtggttctgggacgctagtggtgccagggcaccgtttccccacacttttccataaagtctt

SEQ ID NO: 81232 - DNA, 683 bp, Homo sapiens
cgtgagctgagactgtgccactacactccagcccggggtgacagagcaagactccatctcaaaaaaaaaagaaaagaaaacgaaagaaaaagaaaaaagaaaggcagattattctaattgaatgaataagaggctgagagtcaatacctagttccaacgcccttttgtttttgcagggtttttattggccactaactagctatgcaagctgattttaggcaagtttcatagcctctctgtgcctaaaattccttcacctgcaaaatggggataagaatgcctgcctacttacctcacagtgctgttatgagaattaattgttgtaatagttgtgactaaccattggcggggagaattctaagtactataccaatacaaatttcagcattttttcatatactgaaccctagcaaaaaaaaaaaaaattctgatgaacatcagattcaacctgtcattttacccggatgttgtgatgagccagcacttgtcccaggaggacgttgaatcagggacacgaaatctcagcacacagagattctagcatcattccaatagattggaccctgatttctgtttctgacatcctgttttttgtttgtgcgtgtttgggtccctggtcttttacccaaatcaaatgaaaagtgttgctcagaggcagaataaaaatggttttaagtaagcct

SEQ ID NO: 81233 - DNA, 559 bp, Homo sapiens
aaacattaattacctaattcattcattcattcattcattcattcatacatgatctggtcattggtcaggtttgttctaaaaaccatgctggaaaaaatggaacagaaacgaactgccaagggtggaccaaagatacagagccttgaaagccgggtgaaggtattggaacttgttggccaacctgccaaccaacctgcccatttactctgtccttccacacccacgcctgagcatcctctctgcacaacctcccacctattcattacagctgcgattttcaaccttgggcctcatcggaagcacctgcagggcatgttgaaacacagctggctgggctccacggcagcctctgactcagcagcctggggtggagcctggtaatttgcatttctaataagttccccggtgatgctaatgctgctcgtccagggttcacaccttgggagccaccgcgtactggaatggtgacagcgtctcaggtgactgtgcctgccagttcacactatatttcctaacagccctgtgaatttgggatgattggtgcccctctgtagatggc

SEQ ID NO: 81234 - DNA, 413 bp, Homo sapiens
ctagcctcggttatggtctgtgctggaagggttgtgaaacctgattagcaatggtcttgaaccccatgccagtttgatctttgtctagataatggggaaagattgaaggtttttgaatacaacaagattgtcatgactttatttttcttgtgctttagaccagcccttcttaagcgctgcagtaaatatttatattttttcctttcaatactgccatcatattttgtgaagaaactttcattgatgtttctcttgcttaaagtaaaacaaaaaatgcccactagagggtactctcacccccaaatgtgcttctgtaaaaccatctacaaaccatctactaagctggaaagcagttttcagttgtatgaagactattatttaaagtcttttcttgcctagaaaagaaacacaca

SEQ ID NO: 81235 - DNA, 702 bp, Homo sapiens
ctacttgtaaaacaccagaaataagaaataggtactgtctctgctcctgaggaacacagaaactagcttgctgggtaagtatactataagtgtactaagtgagacggttgaagcatgatcagaatgccataggggcaccaagaagagagaaattccgactggcatttgatatgggcctctaaggataaatagcatttgtattgaggtaggatggctgttgtatggaatgacattcaagtgtaagaatgcagtatatagaataaagaagaatccagtgtggtagagctaaaagaaagttgttgaggttaaggctggaagggttgtgaaacctgattagcaatggtcttgaaccccatgccagtttgatctttgtctagataatggggaaagattgaaggtttttgaatacaacaagattgtcatgactttatttttcttgtgctttagaccagcccttcttaagcgctgcagtaaatatttatattttttcctttcaatactgccatcatattttgtgaagaaactttcattgatgtttctcttgcttaaagtaaaacaaaaaatgcccactagagggtactctcacccccaaatgtgcttctgtaaaaccatctacaaaccatctactaagctggaaagcagttttcagttgtatgaagactattatttaaagtcttttcttgcctagaaaagaaacacaca

SEQ ID NO: 81236 - DNA, 668 bp, Homo sapiens
agattcggcactagggggaatgttatcattggagctaaaatttgaagaacaagtaggagtagggcaagtagaatatcttgggcagaaagaacgttagcattataccaataaaagtagtcagatattaacaaactaagttaaagaaaaataaagcaaaaggcagcagctaactgtattctgtgaagagacatgtttaaaacaaagataggagaaggttgaaaggaaaagctctatcatgcaaacacaaccaaaagagctggtacggctacaaaaattagacttttaagcaaaaaccatattattagagatagaggaaacttaataatggtaaatatacctaataacatagtccttgaaatatataaatcatatggagaatttaacaactgtatagtcttagtgggcagtcttaacatgtctctctgatagaccagtagacaaaactcagtaaagctatagaagatgtaggtacattagcagatgtaactaatggacatacgtagaccactgcaaccaccaataacaaaatgtatattctttttcagtatccctggaatgtttacaaaaattgactattttggacaataaagtgtaaatacattttaaaaggatgaagtgatacaaagtgtattttctgaccacaaagtccttattctagaaattaatac

SEQ ID NO: 81237 - DNA, 1508 bp, Homo sapiens
  misc_feature (1501)..(1508): n is a, c, g, or t
cggacgcgtgggtcgacccacgcctccgcacggctgcgagaagacgatacaaggggaggactggctttgtgctcagtatttggcttttgccactacagactccctcagttgtattgtgaaaattctgcagcaccgttaatgtgtacctggatgatgcttttactacatcttcaccttcttcatgtcacccatgcacttcccctccctagtgctcactccaaattcaaggaaagaagaaaggcaaacctctatccctgtccgtgaacaagtgggtctattcagaaaggttatccactgccccagattgaatgagaagctgagtctgtcttaactttacagaaattcagctgcacaaacttgcagttgccttcccttgaaacaccttctatcctaatagtcccataaatgcaggtaaaaatgaaaatccatattcttgaagggacagcttctttggtatgaactcagccagtgagctgtgtccatttcctccataattctggatatcacctatctttttagcaccaagtatttattctcactagcagtagacagacttaaccagtctctaccacgacccagtagactctgacaacagactcttcctttaaggtgtcaacaactgacttactaggcaggactgccatccttagcatcagcccagttttggttaccagggactatatcttttgttccaggagagagtagaaagaaaaggagagatcccatccttgggtcatagacccattttcattgccattatctgtaagtatgtgcactgcatggaggacagccctaatagtctcccctctgctgccactgcctgattctccactctgtccccacttgccagtgaagtttggatttatcagccacttgtggcccattacagagctgacccaaggtggtgtcaccaatgcctcagcagggtggagtgcagttcagagcttataaatagctggcagggcatgaggagatgattttcttgcatgtgcaattctctaggggccatcaggaaacagagtttaaagtaccctttgattactgtcagaactgtcagcatttgcagttttccccgagcagtaattggccagctcccttctatcagtagccagtgttaactagtttaccaaatgctgtaaacaattgccctgaatgaaatagctgtcagtggagctctaagatctcctttagagggcacagtgaggtgggctgttgggatggccgtaggcaggggagaggaagaaggccactgatgagactgctgacctcctcagaatgttgacctcttctagagagactgcctcccagtgtttaagtggctcattgctccttctgactctgtaaaatggctctggaggacagctcacaggaattctgattgctgaggtgggtgattgagagctgttcaccatgtgtgcagcctgtgctccccttctatggatatgtgtgcaatttttgtatgtatttttttagctgtatattacagtgtttatgttgcaannnnnnnn

SEQ ID NO: 81238 - DNA, 2526 bp, Homo sapiens
  misc_feature (2519)..(2526): n is a, c, g, or t
agagcaaagctaaagaatctcagcagtattatcacagcttggctgtccggcagagtctggctgtccattttaacattcagcaggactgtggtcatttccttgctgaagtccctaaccgtctgcttccctgggaggatccagatgaccctgaaaaggatgaggatgacatggaagagactgaagaagacgccaaaggagaaacggatgggaaaaacccaaagccctgttctgaagcagcatcatcccagaaagagaatcagggagtcatgagcaagaagcagaggagccacgttgtggtcatcaccagggaggttccatgtcttactgtggctgattttgtgcgagactctctggcccagcatgggaaaagccctgatttgtatgagaggcaggtgtgtctgctgctcttacagctatgctctggtcttgagcacctcaaaccctaccatgtcactcactgcgatctacgcctagagaacctgctacttgtccactaccagcctggggggactgcccaaggctttgggcctgcagagcccagccccacctcatcttatcccactaggcttatagtgagcaacttctctcaggccaagcagaagagccatctggtggaccccgagatcctccgggaccagtctcgccttgccccagagatcataacagctacccagtataaaaagtgtgatgagttccagacaggcatcctcatctatgagatgctgcacctacccaacccctttgatgagaacccagagctgaaggagagggaatacacacgagcagacctgcctcgcatcccattccgctccccctactcccggggtctgcagcagctggccagctgcctcctgaatcccaacccttctgagcggatcctcatttcagacgccaaaggcatcctccagtgtctgctctggggcccccgcgaagatctcttccagactttcaccgcctgccctagcctagtacagaggaacaccctgctccaaaactggctagacatcaagcgaacactgctcatgatcaagtttgctgagaagtccctggacagggaaggtggaatcagccttgaggactggctttgtgctcagtatttggcttttgccactacagactccctcagttgtattgtgaaaattctgcagcaccgttaatgtgtacctggatgatgcttttactacatcttcaccttcttcatgtcacccatgcacttcccctccctagtgctcactccaaattcaaggaaagaagaaaggcaaacctctatccctgtccgtgaacaagtgggtctattcagaaaggttatccactgccccagattgaatgagaagctgagtctgtcttaactttacagaaattcagctgcacaaacttgcagttgccttcccttgaaacaccttctatcctaatagtcccataaatgcaggtaaaaatgaaaatccatattcttgaagggacagcttctttggtatgaactcagccagtgagctgtgtccatttcctccataattctggatatcacctatctttttagcaccaagtatttattctcactagcagtagacagacttaaccagtctctaccacgacccagtagactctgacaacagactcttcctttaaggtgtcaacaactgacttactaggcaggactgccatccttagcatcagcccagttttggttaccagggactatatcttttgttccaggagagagtagaaagaaaaggagagatcccatccttgggtcatagacccattttcattgccattatctgtaagtatgtgcactgcatggaggacagccctaatagtctcccctctgctgccactgcctgattctccactctgtccccacttgccagtgaagtttggatttatcagccacttgtggcccattacagagctgacccaaggtggtgtcaccaatgcctcagcagggtggagtgcagttcagagcttataaatagctggcagggcatgaggagatgattttcttgcatgtgcaattctctaggggccatcaggaaacagagtttaaagtaccctttgattactgtcagaactgtcagcatttgcagttttccccgagcagtaattggccagctcccttctatcagtagccagtgttaactagtttaccaaatgctgtaaacaattgccctgaatgaaatagctgtcagtggagctctaagatctcctttagagggcacagtgaggtgggctgttgggatggccgtaggcaggggagaggaagaaggccactgatgagactgctgacctcctcagaatgttgacctcttctagagagactgcctcccagtgtttaagtggctcattgctccttctgactctgtaaaatggctctggaggacagctcacaggaattctgattgctgaggtgggtgattgagagctgttcaccatgtgtgcagcctgtgctccccttctatggatatgtgtgcaatttttgtatgtatttttttagctgtatattacagtgtttatgttgcaannnnnnnn

SEQ ID NO: 81239 - DNA, 397 bp, Homo sapiens
ggtcaacacagacctggagacctgggctctggcctgctctgctccctggagaatctgggcacagatggtgtgggcccccacatgctgccttctgcgtgtccctggttgggcccatgctggccatcaccccagcttgggttcagtctaccatattctactagctttccttggtgaccacgttgattggctgtctcgagccagccagtgtcaggaatgcagcaggttccaccctctgttcctgctagaacgcttttcctgaccccagcagaacacatggctcagggtgggcaccagccaagctgggggctgacttagacagtccctgactctggtgagaagaggggagtggccatgctgagctttgtgtgttctccctggcactggggctgtgggggac

SEQ ID NO: 81240 - DNA, 363 bp, Homo sapiens
ctcaacaaagtttggattttctccacgatgactccttgggtgaatttttaatcaagttatttcaaccatttttctcatatatttcgtgcatccctattctggtattcagtgaatacatgggagaggtatgttattctcagctcccacagcccataagtcggggaaccaggacttcattcccctctgctctaactcagactgtgaggtcattgagggcaagactgatgaattgttcctcttcctatcactggtgccaagcacagtagttggcataaagaaggtactcaataaagaggggtgaattaatgaaagacagagaagaggaacctggggaagaggtggcataaagtgaaggtacaaaca

SEQ ID NO: 81241 - DNA, 412 bp, Homo sapiens
aaaattagctgagtgtggtggcaggcacctgtagtcccagctactcaggaggctgaggcaggagaatggtgtgaacctgggaggcagagcttgcagtgagccgagatcgcgccactgcactccagcctggctgacagagcgagactccgtctcaaaaaaaaaaaaaaaaaaaatctgtcccaaggtgaacacctttttaatattctagaaaatcttttgaggtttaaaagcagtctgtccaagtaatttgttcagaacctgtcaaaatagtattacactacttttaaagtttttacagaatttcccctgtggacacaaaggttattacaacagcaaagttttctattgtattgtttttagcctataattacttaaaaatcattaaaactctgtgcatatgaacatttgattt

SEQ ID NO: 81242 - DNA, 1705 bp, Homo sapiens
  misc_feature (139)..(139): n is a, c, g, or t
  misc_feature (144)..(144): n is a, c, g, or t
  misc_feature (1249)..(1249): n is a, c, g, or t
ggagccacagtgaaagtcaagaatgtcagtgattccacatttaatatctacatttttgcagggcagttactcttttgtagtataacattgagctgatagcacatagtgtagacaagtgaatacaggattctctgggttntattnccagaagtctggaggtcatttggatatttgtgggcccttggcttcactctgacttgtgtgacacataaaaattgtgatgaaatgtcctatagatgtcctgcaggtcttaaaagaacctttccaaactatgaaacagcccagcagcactgagttagaggtaaattctgaacccttgaacactaaaactattctaactgcacatagaattggcaagtagcattctatgtctatgaacagtatgtcttttctatataacagagaaaatctttttaagcaaactactcagtttaaaacctaattcttctcataatctcagtacttttgaatgaagacatatcaatgcaacagtacactcttattcaggcatttgaaagaaagaattcgagatctagtttgtatcagatattataaattagtatggtttagtctttgtcatgaaattctacttaatttttggactataggtttaagaatgtaagcagaagttctgcaccaatcagaataagctacattatgcttgagtgacaactactgtaatgacaaaatatcagtggcttaatacaatggtttttctctcatacttgttcataaagagtcagcaaggaccctgctcattatggtccctcagggacccaggttgttggaagctccaccattttagatagctcccttcaaagtcagccatctttgcagtcatgtcccccaacagctgcaaaatttgctctgatgctcaagaattgagcatcggcagttaaatgcttcaacatgaaagtgacacctgccactcccactcacatcccattggccagaactagtcacatggccagacctaacttcagaaggttggagaattgtaatcctccatgtacccaaaaagtagagaagccagatactgagaaacatcaataatggctaacagaaatccattctaccattccctttgcctaaagtgaaaagatgagtactttcatcaatttgtaaactgtacttttgaagtaaatcctggtagcttgcatgggggctggatttccagaaagccatatgtaatttgggaatgacattcacttaagctcatagaatatcattatttgatgtaaaatgcccncatttgcaatacaggaccaaaatgcactaaccacaaaattccactccacaagggtctgggttctaatttcttcattctttaaatgaggcattctatgatttggaatggaagcccagttgtagtcgtaagaattttacttaattcaagaattattctcactgaatatgtgccagttctgaaaggaatgcaaagtcaaattttgcatcttctttgctcaagggcctttagatgtaacaacacagacatgatacaaggctgacaatgacattatgatttaaatatgttaaacaacttattaaattgtgaatcaacaaaaaattatgttctttattttatggttttgcatagtcctgactcactgcctacatacccctcttgttcctcagttcttatccctgatttcttacaggatggcctaagacagctgtagatgtttttatttagcaaaaaaaaaaa

SEQ ID NO: 81243 - DNA, 648 bp, Homo sapiens
taaaaatgggttgtttgtctctttagtattaagttgtgagtttctttatatacagattctatatcagatatatgttttgcagatatttttttcccaatctgtagctggtgttttcattttcttgttaaaattcgtattctggagaaatttttagacttacataaacatttaaaaattgtatagggagttaccatataccctgtactctgctcttccactaatgttaaaaatcttaaaaaccgtggtatagttatcaaaaccaggaaatcaatattgatgcaatcccattaactacagaccttatttgaatttcaccaatttttgactaatgtcttttaaatttttattttctcatttaaatagctaaagtttttaaattttagtttatattttatgatgcttatatttttaaatgactaaaaaaacaaaagaaaaatattttgtgacatgaaaatcgtgaagtcgtttagttttttagttttataaactaaacaggttatttcataacctgttcaagaaatatttgcctaaccttaggtcactcagaatttcttaatatgttttcttctagaagttttaaagttttagcccttacatttaaatttgcgatccattttgagttagtttttgtatatggtgtgatataag

SEQ ID NO: 81244 - DNA, 419 bp, Homo sapiens
gacaaactagacaaaagcagcaaaataaacccaggaaataaaaatgaattataatacataaaatgtaaaatttatgaagaaacctatgatctggtcttgggtttattcacacatatatgcaatataaattagtctactagtttaacttcatatgaaaagagagtataaagaaattaaaagactgaatgcggtggctcatgcctgtaatctccgcatttgggaggccgaggcaggatcactcgagcccaggagttttagaccagcctgagcaatatagtgagaacttgtctctacaaattaaaacaaacaaacaaaaacaacaacaacaaattagctagtcattggagggtgagcatgtggtccgtactactcgtgaagctgaggtgagaggattacttgagcccaggaagtcgagactg

SEQ ID NO: 81245 - DNA, 276 bp, Homo sapiens
taggatattcagcaattctttactggatgtgatcagcaaagacaagacatctgcagctgatgggatcacctagatttggaggttggggaacagggaagatctaaacacccttgttttcttggcctctttggtctcagccacatggaatcagattatttgactaggactattaatgcataagaagggagaaacacaaaaaggtgatttcttgaggtttcagcttaccttgtcaatgattctgcaactgtgtgccatgaattcttagtcctgcaacat

SEQ ID NO: 81246 - DNA, 707 bp, Homo sapiens
gctggagtgcagtggcgcgatctcagctcactgcaagctccacctcctgggttcacaccattctcctgcctcagcctcctgagtagctgggactacaggcacccgccaccatgcccagctaatttttttgtatttttagtagagacagggtttcaccatgttagccaggatggtctcgatctcctgaccttgtgatctgccagcctcgggctcccaaagtgctgcgattacaggacattgccaaagattttcccaggggcgaggagtctctggagacgctggaggagcagtctgcgggtgtcattcggaacacctctcctttgggtgcagagaagatcaccggagaactggaagagatgaggaaagttctggagaagctgcgcgccctctgggaggaggaggaggagcggctgcggggcctgctccggtccaggggagcctgggagcagcagattaagcagctggaggctgagctcagtgagttcaggatggtcctgcagaggctggcccaggagggcctgcagcctgcggcgaaagcggggaccgaggacgagctggtggcacactggagacgctactcggcaacacgggcggcgctggcctcggaggagccccgggtggaccggctgcaagcccagctgaaggagctcatcgtcttccctcacaacctgaagccactctctgatagtgtcatcgctaccatccag

SEQ ID NO: 81247 - DNA, 369 bp, Homo sapiens
tcttcaggcttattattttaaatgttttagtcctaacaacttgaagtcacgttgctcttaattcagtatcctaattctgtcatacccttgttcattgagtacctattacatgtcatacaatattgtttttaatggtgattcctcatctgaaccacaatatacagaaaatgatttgagtgactgttttctctattctcccatcttagatgcataaaagtgaagttactgtattatatacattgggtgccttaaggtagcaattttcaaaccattttgtttcagaactactttatacatttaaaaattaatgaagacccccaaagagctttagcttatatggcttaaaggtattaatatttaccatattag

SEQ ID NO: 81248 - DNA, 846 bp, Homo sapiens
gagacagaatctcacccaggctggagtgcagtgatgccatcttggctccctgcaacttctgcctcctgagttcaagggattctcatgccttagcctcctgagcagctgggactacaggcatacacccccagctaattttttgtagttttagtagagaccggatttcactgtgttggctaggctggtcttgaactcctggcctcaagtgatccgtccacctcggcctcccaaagcactggggttacaggcatgagccactgtgtccagtcaatacttttcaattttaattcaagttgaagctacatgataccaaagctcccaatgaattcacgtcagtgcggggaaaaaaaaaattcagtcgatttaagataaaaagatattcaagtaggcaaataggttttttaccattttttcctttttgaatgttctaacattgtttagttaatcaactgataatcatcatttataggatccgagtttcttacagcctaacagaaatgtgaaaaggatatttatagcgaaacattattttcccaactacaagagaaaatcaaatgaagtaaacaaaatttatgaaagtttgctgtgcttaatatgaattctccattggtctgagagatgatgctcttctttctttgcacagagtgaaagctagggtagaatttgggcaggaaataaagaatagagcaagatactggaacttgggggaaaaatctaactcctcacggctgaagtcttcgtaattctgcatcagtgccacagtctaccagaaaccaggccccctagtggattaaaagagttaaggactgaatgccacatgagaatgatttcaacactgaggtgtag

SEQ ID NO: 81249 - DNA, 261 bp, Homo sapiens
gcctgcctcagcctcccaagtagctggaattacaggttggcaccaccatacccgccttatttttgtatttttagtagagatgggttttcaccgtattggccaggctagtccctaactcctgacctcaagtgatcggcccacatcggcctcccagagtgttggaattataggtgtgagccactgtgcctggcccaaacaattttaagatatgttttgatataatgtagcttgctaaagctgtaagacccctatgaatattcc

SEQ ID NO: 81250 - DNA, 277 bp, Homo sapiens
ccgggcagtgcagcacggtaagtaaggcgcctacagggtagcagcagccacggggaagtagagatggaagcagacctgttcctccaggagtttgggtcacaaacaagataggcaggtgtgggctccccctcctcctgaggcaccgactgcccctcctgagagttcagcgtcactcaggtgcctcattgtcctgggtcctcctgctgggaatgctcagatcagacctcaggtctcctagggccttccagtggacgccgcaggcaagtgtccagggcac

SEQ ID NO: 81251 - DNA, 557 bp, Homo sapiens
cacgctccaggcctggagagccgccccgcctctgcaggagctgcttctcctccctccctgctgctccaacttggggctggggtctccaggcagtgtcacctctctggcccttccaaatctcatctcccaccctctgaagccaagagggaccttatgagaattgttctaaccttcagtaaagtgtcctccccattccggtatccgtgagatctgctaggctggaaggttttgtgtccccccgacacacacacacacacaccctcccctgggtcccctgcttgatgagcgctggaatcaggacgctgtagttcaactctgaacagagatccaggcagcaggagtgactgcgacagggcagtgccgggcaggaccccatcgatgggcgagcggagagcaggcacggagctgagcaacctggggaaataaagcgagaggcagagacacagggagagggagagaggacctggagtgagcaggagcgagcgggaggcagagaggagagccgcacttcctaagacagctgcaagtgacagctaaactgagtgccagcgttgggg

SEQ ID NO: 81252 - DNA, 779 bp, Homo sapiens
aagtggaaatgatttgattacatggggaaagcgctttttttctttcaaataatgtaggcagggcctgagatggaaaaatgtacaataaaataaatctattttcttacaaagaataataaaaatgcccctatcaaataacttgtcaataaaatgaggattattcttgaaaatttgactagggttctaccaaagtgtaaggaggcagccatgatgacttctcatttattggcatgttcagggaaatttttggtttctataaaacttcactgtgtcagaactcacaaccatgaatctgttgtctaagagaaaggactgtgtctcaaaatgagtgaatagtattttcttgacatctttaaggcaaagcaccccaatatctgactttatagtcattgtcaataagtgtaggctggtttttatccagtgttatgaaatttacatggaccagggacaacaaagagaccaatctgagtgcaaaacttggagggcttggtgacctggtgaaaatatttgtaaggttaccataaatgccatgttcaaaagattgttatctgtaattttatacgcctcctccagtactgaccttctttctaacaaatctttagaagagaaggacaaatgttaagagttaaatgatggcaatataccccatcctgaaattgacccaggagcaatctatccctggaaatacatgtttaaacaatagatgtccccagacaaaccaagggaagccttggactggtatgggagctatgttatgacttgcattccttcaacaggga

SEQ ID NO: 81253 - DNA, 877 bp, Homo sapiens
gtggtggtggagctaatgacatgtgtgcagaaactcttctgaatgggacttcccctgatcctgtttttacctgatcttcatgctcaatagaaaaagcctcagctttggaatcagcttcccagtgaacaccgagagttgagtttagcaactgtttggactggccatgtaacagggccgtccaggtagcatggcatggtactggaacactatgtcttctctctgacctctcggaatatctctgtgattcaatgtgttggcccattggaggccctggactggttaaaacctggaggtttgagaaacccctgatcttctccatactcttcacaagggcaatggctggccaagattacaaattagtgactgttgaggctggaatctgtaccgaggtcatgggaaccccctgcactgccccttctaatcaccctcctgcttggaccctgggagtatgacaaagagtcagataagacaactgaggctgaagatcacacaaccagtaaatggaacagccagaaatcaaatgttatatattggccctgaagtggggataaagcagctaaaagaaagtgtactttacattaaattttaaggtatccaaaagcaaatcaataagccatactctagttacattaagatattttcacaagtgctaggttaagtaatataaaattaccatttttgtaggtcaaaagtaatggaatatcatgcttgtatatggtttgatctaatatatatcattatcaggttctactaatacagagttttctgcctttacttaaccatcacaataaactaaggacttccaagctagtaagaataatgacacagataataattagaaaagtattcataacattatcaacaaacacttctacca

SEQ ID NO: 81254 - DNA, 856 bp, Homo sapiens
gggatgagcaaataggacctacctcccaggacacctgggaggatgaaatgagatcacgtgtgtgaagctcttagcatggcgtgggggacacagcaagtgcaggggacgcagcaacagtgtggcggctgctacatcacggaggctgtaaggccagactccttgtccccagtgcccagctaggtcccttgcccccccggctctgttgtctttagtggctcttcctcctcactcactcctctgtgcagtcacacagcccaacccagctgctgcactcacctgctgcatgaccctgggcaaggtgcttactttccttacgtctgcatttcctgatttagaaaacagggtaaagctgccctgcctgcatgcttccaaggctctggcacacacacaaggatgtagcccagcccttcctccaaggagttccatgacaggaaagacagaaggggaaagaaatacttgcaaattcggtgtgagctatgacagaggtgcacggacattcagcaggaggcaggcaatggcatcacgggctcagagtacagtgagggtgaaagaagatgattccacacataatagttgctcagtaaacatcttttcccttctccagccttactctttccatatagcctaactttttagactcagctgctttccacctcagaaccccaatctctgtcctttctgctgagcctgcaaaatctggaaggagggatagaagacgggccccttggggagcccctcctatcatcaccaaccttagttaacatttgctgtttactgtttccaggcactgggcaggtgttctgcatacattaaaatctaattgaatcctcacaacagctccacggaacagttgtca

SEQ ID NO: 81255 - DNA, 207 bp, Homo sapiens
aactttttaaaggcatttaattttatttggataatcacaagttatgggtcatgttgtcctaacttttatgttccttttaaaaattgaacagatattgaaactggaaagaggatttcgttatctgatccatttatggtcagagcaagattgtttcttgctatatatttttggatttttaatttttgtcatcaactgaggatggttata

SEQ ID NO: 81256 - DNA, 282 bp, Homo sapiens
gtgagagcagctcccattgtgatggcattattgtggtgccagctaacccaacccaccgagcttctcacgtgccagacactgttcttcagagcactttccacacagcggctccctaaattctcaggacaaggttgtgaagttggtactgtcgtcacgcccattttacagatgggggaccgagaggttcaataactgcccagggatcctccccgagggaggctggtgatgggcttcataattcttgttcattgtgaccactgtggtgatgatgatggcagtgat

SEQ ID NO: 81257 - DNA, 325 bp, Homo sapiens
ttctatactaagcaggctttgaaaattaaaagcacagaagtatatgttcttgtattatatagtcacactaataaaagcaataaaacatatccaggggttgcctgacatgaacaattttataagcctggtatcgatccccagattcttttcaagtgaggttgctttgcagtaacctattcccttgtgcattttctatcactgcactcctaagccttgtgctaaatataggagagcttggaatttcacgcattgtgacaatttattgcaacttttgttctattgtcaaagtttattatccagtcagaattaacaccagtgcacaagg

SEQ ID NO: 81258 - DNA, 335 bp, Homo sapiens
tcacagggcttttactactgctttttgttcactgctcctaaaatgtgttttcctgtcatcatcaccaagttaaatcctacataaacttctgatcttattcaagaattacctcctaaatgaagtattctgactcctgcaacaaatcccccaattttaggctcttgttgcacaacgtacctttaacacttgtcatagtcacaattttatagtgtgactaatgtgtccctccccaatcagatcataaagtccgtatgaacacgtctggttttgttcatctttgatgtcccagcactcagcacactgccaggcacacagcatgcactcaacaaatattt

SEQ ID NO: 81259 - DNA, 776 bp, Homo sapiens
gctgtcaggaagccaggtgcgtcctcactccccagccctaaaatccaaagaaagaagagattgtttgagacgatctgaagaaaggtcaggtcctaacagatccacgggaccttctttttcaccttccttgtcttgggttctggagcacgggcgctgaatcagctgaatgcggcctgggcatctggaagtggtcctgagggacacctcgcggtgcagcccccgggacgacccaggacaccctggacaccctggacacccaggccgagagccgggacccgcccacgcctcctcactgctgctcgagggtaggcaggagcacgcggaccccgtgggggctgaagcggggctctgctgcccgccctgcgcaagctcccggctctggttgctggtccacaaaatcgggaggctgaattagccggtcgggtggcccccagccttatagcttcgaattctgtgatcctattttagacccagacttgtccgcgaagggaaatgaagaggcgcggaaggcttggagcgtgaaccaaaaaacaatgggtggggatcgtctaaccagctcccttccctagaagggcggaaacggctttcgaagcatccgcgattctctttattgaatcttgagtgacacctagtggcccatccgcctcaccgtcacggcgatgctggtttcactgggcttttcagaaggcgtgctggcctgcccatggttctcggctaaaagactttggagcgtagggtgccgatgaagtttcctgggaccttccggaagcacttgc

SEQ ID NO: 81260 - DNA, 834 bp, Homo sapiens
atggcatcggttctcctcactctccagcctgttggctcatcctgtggattttggacttgccagttccaacatggttcaagccaattccttatcacaaatctctgtctgtatatcagcacatcctgtgggttcagcttctcttgagaacactgaccaatccaatcaccgttactcccgatgacttgtaggtgaagccccttaaggaaaatttctttcacaaatgagagctagggaaagatttactcttcctgagcagctaaagtattttctccaatggccacgagaaccttaaacctttccttctttccacgctcccattggccgccaggaacttgcagcttggctacagcaatcatgaaggacctgactgggctcagcacatgtgcccaggccacccaggtagaggtggagggcatgggattcaagcccaggccatcgttggctctgaacatatacctgaaacaacctccctaccaggaaggaggctgccctgcctggagtgaagagtgcatggagcagtctcagccgacccaggtgggatgcgtaacatggccgagaaatccacccatgctgctgagagctactgcgccatggggtcatgtgtcacctaactgacttagcccagcctgactgatcccccgtgtgtgaccagacatcagcacattcagaggacctcatactgagaattggtggacctttcagaatggacatgaccactcaaagtagggacattactcgctatttgatggcccatgtgggatcaaaggccactggggttccctcaaggcacagcacacttagaatcccataagtcctcagttctaaggcatgtat

SEQ ID NO: 81261 - DNA, 378 bp, Homo sapiens
aaggtttttggtttgtgtatctgaaagtgcttagtatatatgaggaaccacaaaccaagtgtatgagtttctaaatatttgaattattaagggatttttcattcattttctagagagcaaatttatctaggcatttataacattttaatttagacagtgccttttcagtttttatctttggtgaagcaaaacatgaatttaatctttagtaacaaatcccatatctatcttcctatttaaagactaattgtatttgtcttttcacattaattttgaaaaaatgacggcttatgtgttataaaccacatgtagttctcatgttctgaattatcatttaattttggtcttactggaatatttctagataacttttttttt

SEQ ID NO: 81262 - DNA, 424 bp, Homo sapiens
actttggcaatcctaaaacctttaaccaggaacaactctgtgaaatgagaactgacagtgtggccttgacctggaccgagcgaaagtccagtgactggcaaagaaagccattcttttggatcacaggtccttctcccctgttggcatgtgtagaaacactttgaaaggatctcaaacacctagtcagttggacttaatttccaaggaagcatcgatatttctaaccattaccttaataaaccacttgggttataagaaattcagaaatcattatatgctcaagcccaaagaaataagtttcttaggtgaaagaaaaatatactttttctttatatctctcttctagtctgctcgttgtttcatttatgtgaaactgggtgaagaatgcactgcatgtatttaccctaaactgttggtagtggat

SEQ ID NO: 81263 - DNA, 338 bp, Homo sapiens
aaactagaaattaataaaatgtggcatctaaaacattttttacaaagggagccattggggacttgaaactgggagactacttgatcatatttaatgttctgaaaagatcactctagctgctgtggattatgggggaagggtagaaacttgaaggccacctcgaagtttatggcagtgatcctgaggagagatgatggtaactgggactggaatagcagtaatgggtggggttagattcaggatattttgaaggtgacagtacttgctgatagatcaaatatgtcaagaaaacaggagacaaatcaagggttgctagtcaatttctaggcaatttgata

SEQ ID NO: 81264 - DNA, 405 bp, Homo sapiens
ctccaaggagtgcggttttattgatccacagctctgctaggccctggctgtgtgttcctcaaatacagatgcagttagctttgcaggggattggaagtggaggtctgagttccactcaggaaacgtatggcccgcatcacggcgaggcagggcttctgagggcttggtgaggtgccgggcacagcacagtgagcacacctcctgtgcccccttatttgtgggtgtttctgtaagagaccctgatgctgaggcgtggttggttggttggtgtgatatgggcttcttaagggcacgtgtggatcatgtgtctgcatacagagccgtagcactccatgtggacaggaacgcgtgttccgatatgctctgtggatgtgtgatgcctcagatcatccctctcactgcagt

SEQ ID NO: 81265 - DNA, 434 bp, Homo sapiens
agtgatatgggaagagggggcagaaaggggcccccagggatccataattctcatttttaagggagctcataaatgaatattggcactgccttttcggagggcaatttttcaaaatgtatccaaatttgaagctggcttaacttttgaccttggaatttcactttcaagaagttatcctatagtaacatttccaccaatgtgcaaaaatgtacatacgaatattgtaatgttgcttggtatagtgtaccactggaaaaagataaaagcctaaatacataaattatggtacacccatgcaatagaactctatatagccattaggaatataataactagatatcgttggttgcacaacattgtgaactggaaatgccactgaatttttgctttagaatggttagtcttacattatgtgaatttcacctgaataaaaa

SEQ ID NO: 81266 - DNA, 262 bp, Homo sapiens
tggtccctaaataggagggtttgggggccccgggcccccgcgaaggatccacgattaatgctgagctgggacatcagggtgaactagggttgggcagatagggcacaggtgtgttctagcagaggggcttcttagctctgtggcagtacttttcccacttcatcagatcaggaaatcccaagtagccttatgagttctcacggaaagtacccacatttgcaaacccctggcctgactttgtaccccgtgctggtggagagac

SEQ ID NO: 81267 - DNA, 141 bp, Homo sapiens
gggaaaaacaacatgtcatgcccagaatgataaggtgatatctgaacaggttccccaaacacaaagacgagcatgcatgcactgaagtgagagagtgagaagagaacttcagagagacgtccagtgttgctaaccacagag

SEQ ID NO: 81268 - DNA, 506 bp, Homo sapiens
ttgatgaatattaatcatgtgaatgcagagctgcaaatggaagttattgaattgcagtgcaacactatactgaaaactaaatatgatgatgtgcgaatcccagaattctacaaattcctaggtagtggttaccctaaatataaaaaacattgtgcaaagattctgtgcatgtttggaaatacctatgtttatgagcagctattttctcttatgaaactaagtaaaactaaatattgctcccagttaaaggaaaggtgaattctctgctgcacgttgctatgcaagattcacaacctgatgctgattgatatcttgggccctaagaaaggaatgttagatttcggatttcaaatctgagaagtaataaattacgaaacttgggataattatttctattttcaaattatattttttcaatatgaagtttagagtacaatctctggcattatatatgtttgttaaatcttataccatataaaataaagttggattatacttttggtggt

SEQ ID NO: 81269 - DNA, 425 bp, Homo sapiens
ccataacatttgcaaaaagatcattttgtatttcttaaagagggcctccccacaaaattgtgtgcactttaggtaggatgaacaactgtccctattttagcattaaaagtcccttatctggccaggcacggtggctcacgcctgtaatcccagcactttgggaggccgaggcgggcggatcacgaggccaggagaccgagaccatcctggctaacacggtgaaaccccgtctctacttaaaaaaaaacagaaaacaaaaaacaaaaaaatagcggggcgtggtggctggctcctgtggtcccgggtactagggaggctgaggccggagaatggcgtgaacccgggaggcggggcttgcagtgagccgagatcgcgccactacactccagcctgggagacacagcgagactccgtctcaaaaaaaa

SEQ ID NO: 81270 - DNA, 472 bp, Homo sapiens
aagactcacacacaggaccacagcagcatcactgagccgagctgggggcaagtttcaccagattcgcttacctgatccttgcatcaacctcaatgcagttgtcagccccatttttcagacctggacacggaggcacagggtgctggtgtgacttgcccacagttattagtgtgtgaggtgatgggttttgtcccgtcccagctccaaaggccctgctcttcctcaagctccagaacctctcactgagctcctgcagtgaagtcccccctcagagccctcagcccttcctgctttcaggctccagatgtcagagcacccttgggtgccagccacaagtggccctccagcaggctgagcacccagggggaggctgccctgactcaaccccagcctggggctttgtgctgcacctgagggagtagccgctctgtaaatccttgttgaaagaatgaagtgtcaaaaggttgtgcgt

SEQ ID NO: 81271 - DNA, 387 bp, Homo sapiens
gaagtcataaggcctaaatattaatccagtctgtgacaacgacaaggtgaatacaagccagtctctacttctctgggcctctgttttctgcactttatataaagattgggcaagatggtctaacttaaattttatgattcactaacttgattttgtatggggcagatttttcttcgatgaaatattaacaaataagacactcaaataaatcagcaatggggtgcagatgaggactaccgtttctacagcaaaatatgggtgaactcagtaagtgtagaacacagaagttaatgctgacctcttgcatagcatgtatggatattaaatcatttcctgccttcatttcagggatgaggaagaaacagctgttcctgaactcttttaaga

SEQ ID NO: 81272 - DNA, 473 bp, Homo sapiens
gagcaatgagttccttgggttacaagaggctggatctggctcctggccagtggagacctctcctaggattccagtctctgtcatcaaaagtcattactttttgtacaaatacagcacccctgccctgcccagccctccctggaagcattgcaggattcctgggagcacagtttgctaactccagccctgggaactctacagactcggaggtcagtgcctggaggagaggtcagtgatttctgtttcaggcagattctcaggcttgagctcctcagaaaaagagatcaccatggggaagtgactgggggcttttcagctcccagcttgagaaggaaaaactacgttttcgttgagtccccacctatattttaaatctctttttctttttttctgatggacacttctgctgtttagctttctctgcctcttgctctctctccaaacaaataaaccttttattgacttacttgaaa

SEQ ID NO: 81273 - DNA, 633 bp, Homo sapiens
ccagatatgagaactacaccaaagaaagaagaaaagtcagctggatgtgatgcctcatgcctgtaatcctaccactttgggaggccaacacgggtggatctcttgagcccaggagttcgagactagcctggccaacatggcgaaaccccttctctctttctttttttaaaattttttagttagaaatgaaaaaaagaaagaagtctaggttttctgaaacaagcactgtcttggtgctaccttttttcatgtgtggacacatagaaagcgaggatatttgtacagcaccttgaaacaaataagcaggaggtgatgtcatgagccttagccctgcagggaccagactaggccttctgaagctgaggtggtccttgtccccacaccttgtaacccatttccagcccatgggtgtcagttgggaaattctacacaagatcctagtagatgtaattacatataattcaatggtttttgatgatggggttttaaaatcaagttattcaataggtggggtgcagtggctcacgcctgtaattccagcactttgggaggccgaggagggcagatcacaaggtcgggagttcaagaccagcctgaccaacatggtaaaactccgtctctactaaaaataca

SEQ ID NO: 81274 - DNA, 477 bp, Homo sapiens
ccccggagaaagaatgaagctgctaggggggcctacacggttgcaaccaataaaacctctttccaacagagacagggagcctgaagagtcaccacaatgccccactgccacccctaaggaattcaagttgctcttttgtgcctccttccttaaggcagtgtgtgtgaccactatggtggcccccagctttgctccattgacagaccttcttaatttgccttgtttgaagatgctacttgaggcctgttttttcttaaccaagcattcttattaatgttcttgacattgtttttatgatataaccacatatacttccggaggcaataaggtggaggaggctgataatactataaaaagtattttcatgcagtaaagtgccagccaaaccaaaccctatggagcagaggtatgaactgaaagccaacatacatttaggagtgaatcataagaccaatatgttagtatgttaatggtata

SEQ ID NO: 81275 - DNA, 432 bp, Homo sapiens
ctttgttcacactgtggtcctccacaaagtgctcttgcaaaagagcttgcaagggagcccaccccactgcactgtgtgggtcagccaagcctctgctgtcccaaaactactgcagctgaggtcctggaacaaacaagatgtcaaatccaaacaatgccatcttgtcctacagagtgttcccaaagcagccttttctgtttttacttaaagctttccccaacccaccctctacaaatctcagctagggcctggcttgaaacctgagtgacaagtaccatgttacatctagcattattccctctctcccatgaccagcttgcagtcaagctcctagcaggctctctgtccttcatatgaatacatttttggtaggccccacatcgctaatttgctaggtacctcctgatatatgtcagtctcaatctaggctag

SEQ ID NO: 81276 - DNA, 470 bp, Homo sapiens
tataatatatttgatttggattgacagtgaaagggaaagcagtttgaattttttcaaattattaataggcattaaaataataatttaatgtaagtttttctgtaatgtgccttaataggatttttttaaacttcagtcatcactacaggctccagcacgtgcaaatgaaaatgtgacacatttgtccccacagctgcccacgatgaggttctcaaagtggttagaaaattcagtagccaatgttaacaatttaataatgattaattcatcattccggttgcctgctaaaagaagaaatctaggaaacaaagggtataaatttggaaaagtattttgcattctaatgaagtaaaatggatatttagatacagggaaaatttgaaattatcttcacctgtttcctcagcttatttttatttttattttttgaagtcttcgattttatgtaaaaagttaatttagggacctgg

SEQ ID NO: 81277 - DNA, 425 bp, Homo sapiens
ataatttacctgtgacagactgacatctatacatgacagtgattaaacttcactgaatacccaaaacggtaacttttttttagttcacaatctttgaattagacaactattcctgtttttatttaaaaataacccactttcggccaggcaccgtggctcacgcctgtaatcccagcactttgggaggccgaagctggtggatcacgaggtccggagttggagaccatcctggctaacatggtgaaaccccgtctctactaaaaatacaaaaaattagccgggcgtggtgatacccgcctgtaatcccagctacttgggaggctgaggcaggagaatcgcttgaacccaggaggcggaggttgcagtgagccgagaccgcgccactgcactccagcctgggcaagagagcaagactgcatttaaaa

SEQ ID NO: 81278 - DNA, 791 bp, Homo sapiens
aaagattagaagtagattgaatgaaacactcctgcttgtaggtgcactcccactcatagacagggagcttaagatgtatataagcactagaaaaaatcttctaaccttgagttggtctggtgagttactctgaccttctccttgtaactggttgcagaaaataaactcccttctttcccagtctgcctgcatctcattattggatcaccaggacaagcagccaggcctcattctgtccgggagcaaatctggtaactctcccaggagagctcagcagccagcggctcgcaaagaggtagtctttgggtgacccccagcagctgcctggtatggtttgtcctggggactctcctgaggacctttctggctgcaaagactgcccgtctctctattactgggaaagaatagagattgggagcagttgcactcaaaagccctgcagctagctgtcccaagtaaacaaggctcttggagtaaattggaaactcacacagcatggaaaccacaaccttctggacagactgaaaggatgaatcaaacacgaaaacagtgccaaactgtgccaactaaaatggattcaggtactcagcattgtactgctttgggtaagtgacccctagaagtgggatgaggttaaatccctataaaattataaatgggagaccctttgctgctaatctgtcttgggttacttgggtacctcttaatagaaagccaactattaaacactatgctactcacttgggacaaatacttaatgttttgcataagcttgcttgcaacaggagtat

SEQ ID NO: 81279 - DNA, 368 bp, Homo sapiens
ctcttccagaacatcatataaattgaattatatggtatgtagctttttgaatctgacttacttcacttagtatagtgcatttgaaagtcatctgtgttgatgcaccaataattcattgctttttattgctgagtagtattccattgggaaaataccttggagtgatattgctgggtcatatgatagatggacaggcatacctcattttattgcacttcactttactacactttgcaaattacagtgttttttttttaattgaaggtttatggcaaccctgtgttgagcgtctgtcagcatcatgtttccagcagcgtgcactcactttctatctctgtgtcatattttgataattctttcaatatttc

SEQ ID NO: 81280 - DNA, 631 bp, Homo sapiens
gtaaaaataacgtgactgtcttcttatcttggaattcttttttagtttttagcagagttacatttcttcgttgtggtaaaatacttaatgccactgaactgtcacttaaaatggttaaaattgtgcactttagattatgtatactttaccacaataaaaatgaatttttttttttttgagacggagtctcgctctttcgcccaggctggagtgcagtggtgtgatctcagctcactgcaagctccgcctcccgggttcacaccattctcctgcctcagcctccggagtagctgggactataggcacccaccaccgcgcctggctaatttttttgtatttttagtagagacggggtttcaccatgttagccaggatggtctcaatctcctgacctcgtgatccgcccaccttggcctcccaaagtgctgggattacaggtgtgagccaccatgcctggccataaatactttttttataaagccagtgagctgatggggaacccggcaaggtgtgacatctgtaggactcaaaggttgtagtgaagttttctcctagcacgttaatgttctgtgttgatgacacatgtaatcagaacgccttcgccatatatgaagacctttaggaaaaagcc

SEQ ID NO: 81281 - DNA, 1021 bp, Homo sapiens
gggtcatgagtttcaaccagaaattttcttttttaatgagatagaattcaataatattttaagacgacatctcagacaagaagagagactgttattccatgcaccttttgttttggatctatcacattatgtaagtatgtgtgtacaggatcccatgtgaaaaatatttatttcttgctatcttgcctctgagtagagaaagataacagacataaagaacacagaccagaaaggaaagattgggattttgctttgaaagctattgcttaaagttatttccacaaatgtacaagaatatgtaagaatgtatatttatcattgtaatagtgaaaaattggaaatgtcaatatcctctgtaaaaggaatgcagacaacagaatactatataacactgaaaatgaatgaactagagctatgtgtattgatattgaccagttgataaatctgaaccacatgaagttgagtaaaaaaagcaatttgcagaaggatacatacaaaatgacaccatttatatagtagactgaaagcatgcagaacaatccattgttgtttacgtgtgtaacagtcataggaatgacaaccactgccttcagaattatggcgacctctgcgatggaagagaatgggatcagagaaggatacacaataggctttaactgattttgtgattattgatattagaaatgtttaaaattaagatattaacatttcatgaagctgagtggtgagcacaccagtgttatattctctctatataactttgtgtatatttgaaatgttttctcataaaaagtatttaagcaagtttaggaaagaatattgataaatgaaatctagagaccatcaaaagccaatttcaccatcacaaagtataattgtgtttcaaatataattgaaattgtgtgactgttgcatattctcttttttgttgttgttaatgaaagcatcttaaacagttgcctttcaaagctgttatctttgataataacatacattaacctaacattgtggacttctgtta

SEQ ID NO: 81282 - DNA, 104 bp, Homo sapiens
cagctcctcttcctcctcatccgggtctcagctcaaatgtcacctcctcgggaaggcctccctgatccctccagctagtaatgtcacctgcacacccagtcact

SEQ ID NO: 81283 - DNA, 1319 bp, Homo sapiens
  misc_feature (494)..(494): n is a, c, g, or t
aaaacctgtgggtgcctcagaccacagcagagctcacagaacctgcgggagccaggctgacccgccagcatggtagagttcgcgcccttgtttatgccgtgggagcgcaggctgcagacacttgctgtcctacagtttgtcttctccttcttggcactggccgagatctgcactgtgggcttcatagccctcctgtttacaagattctggctcctcactgtcctgtatgcggcctggtggtatctggaccgagacaagccacggcaggggggccggcacatccaggccatcaggtgctggactatatggaagtacatgaaggactatttccccatctcgctggtcaagactgctgagctggacccctctcggaactacattgcgggcttccacccccatggagtcctggcagtcggagcctttgccaacctgtgcactgagagcacaggcttctcttcgatcttccccggtatccgcccccatctgatgatgcngaccttgtggttccgggcccccttcttcagagattacatcatgtctgcagggttggtcacatcagaaaaggagagtgctgctcacattctgaacaggaagggtggcggaaacttgctgggcatcattgtagggggtgcccaggaggccctggatgccaggcctggatccttcacgctgttactgcggaaccgaaagggcttcgtcaggctcgccctgacacacggggcacccctggtgccaatcttctccttcggggagaatgacctatttgaccagattcccaactcttctggctcctggttacgctatatccagaatcggttgcagaagatcatgggcatctccctcccactctttcatggccgtggtgtcttccagtaacagctttggtttaataccctaccgccggcccatcaccactgtgggtaagtccaggaccaggctgggagggaggaggccaaagggacagggcaggttgtgtgctgcaaggggacatggagatgagccagatttattcctgccctaatggggctcacattctagactgggaaacatacacatacaagcagatagaatagaagacagtctgggataggaactatagcagaggtgccaacagcaatagttgtgactaattgctgagcacctgctgtgtgccaggcactacactagctgccctacatgaagcaactcagcttatcctaacaatcttcatggcaggatttttttttaagagttttgctcttgtcgctcagcctggagtgcagtgagctgagattgcgccactgcactccagcctgggctacagagcgagactctacctc

SEQ ID NO: 81284 - DNA, 1964 bp, Homo sapiens
  misc_feature (494)..(494): n is a, c, g, or t
aaaacctgtgggtgcctcagaccacagcagagctcacagaacctgcgggagccaggctgacccgccagcatggtagagttcgcgcccttgtttatgccgtgggagcgcaggctgcagacacttgctgtcctacagtttgtcttctccttcttggcactggccgagatctgcactgtgggcttcatagccctcctgtttacaagattctggctcctcactgtcctgtatgcggcctggtggtatctggaccgagacaagccacggcaggggggccggcacatccaggccatcaggtgctggactatatggaagtacatgaaggactatttccccatctcgctggtcaagactgctgagctggacccctctcggaactacattgcgggcttccacccccatggagtcctggcagtcggagcctttgccaacctgtgcactgagagcacaggcttctcttcgatcttccccggtatccgcccccatctgatgatgcngaccttgtggttccgggcccccttcttcagagattacatcatgtctgcagggttggtcacatcagaaaaggagagtgctgctcacattctgaacaggaagggtggcggaaacttgctgggcatcattgtagggggtgcccaggaggccctggatgccaggcctggatccttcacgctgttactgcggaaccgaaagggcttcgtcaggctcgccctgacacacgggtatcaagcctctgggaagagcactctgggttcagttggcaattggcaaggattttattttggtgggaagatggcagagacgaatgcagattctattttggtagagattttcagtccattcacaattaagattatattttggtgtcttatgcccaaatacctagaaaagtttccacaacggagactcagtgatctaagaaactaggtggcaatgaacatattccacaaagctggcatttgatctgagatctgtggtatctagaagagtgatatttggggtacatttcagagctgttctccctccttggggtgaggcatccttgagaaacatgagccagctgaggtgggagatatttttctaggaaaaacaatgcagatttttatatctgggaggactctctgaagcattctggtctacctctcatggtgcaactgggaagttgtggccctgcaagggacctgcccaaggtcagagaatggggctgtgaaggtctgggagataacccaggcctccacctccagcccaggtggctgacctctgctccatttcttggtcactgagtccctgcaggaagctaaagggcctttcagctcgtgccttctctggggcctcccacatgccctctttcctctatttgtctccagggcacccctggtgccaatcttctccttcggggagaatgacctatttgaccagattcccaactcttctggctcctggttacgctatatccagaatcggttgcagaagatcatgggcatctccctcccactctttcatggccgtggtgtcttccagtaacagctttggtttaataccctaccgccggcccatcaccactgtgggtaagtccaggaccaggctgggagggaggaggccaaagggacagggcaggttgtgtgctgcaaggggacatggagatgagccagatttattcctgccctaatggggctcacattctagactgggaaacatacacatacaagcagatagaatagaagacagtctgggataggaactatagcagaggtgccaacagcaatagttgtgactaattgctgagcacctgctgtgtgccaggcactacactagctgccctacatgaagcaactcagcttatcctaacaatcttcatggcaggatttttttttaagagttttgctcttgtcgctcagcctggagtgcagtgagctgagattgcgccactgcactccagcctgggctacagagcgagactctacctc

SEQ ID NO: 81285 - DNA, 724 bp, Homo sapiens
gtttttttttttatgttttgggtttacactgtttttgtgagttgtaacgcttatcacgaaagtctgcagtttcagtcttgaggttagcgagactacaaaaccaccaggaagaacgaacgattccagacgcgctaccttgagaactgtaacactcacggagaaagtctgtagcttcgtttctgaacgagcgagaccaccgaatccaccggacggaaaaaactctcaacacatccgaatatgggaaggagcaaactccagaaacgcgcctttaagaactaagtaacactcaactgcgagggtctgcggcttcatttttgaagtcagaccgagaacctacggattccggacacaagtccagctcgtgaggtggggaaggggaagggggaggggagggaggaggttcatatagtaagagtaacctgggagtgtggggaggggatagaaccctgctcactgccccctgcccatagtgaacaatcggcactatctattttgccctccagacactaccgtttccgtagagacagtactaagaggaggcttatttcctcctgtagacctagcgggagggcggaggcttaaatctagaaaaccaaccattgagagcaggtgaattctaggtatgatgagctcattttctgacctgcagggggtgagggtggttaggggtaaacctgtgatcccaaaggcaccaaggggagcgtcagcaggtctctgggatatg

SEQ ID NO: 81286 - DNA, 464 bp, Homo sapiens
agcaactatggagaggccccttgagaaaccaagttgttctctaggaattaaaacatcaaatgcatctttacaggattcaacttctcagccaccaagcatcaccagtttaagtgtgaataatcttatccatcagagcagcatcagccatcctctggccagctgtgcgggtttatccccaacttcagagcaaacaactgtgcctgcaacggttaatctgaccgtttcatctagctcctatggcagtcaacctcctggaccatctctgatgactgaatattcccaagaacagctaaatactatgactagtaccataccaaattcacagattcaagagccactcttaaagccaagccatgaaagccgtaaggattctgctaagcgtgctgtccaagatgaccttttactgtcttcagctaaacgtcaaaagcactgtcagccagcccccctcaggcttgaaagtatgt

SEQ ID NO: 81287 - DNA, 1095 bp, Homo sapiens
gtacctttctctcctcgactgtgaagcgggccgggacctgccaggccagaccaaaccggacctcgggggcgatgcggctgctgcccctgctgcggactgtcctctgggccgcgttcctcggctcccctctgcgcgggggctccagcctccgccacgtagtctactggaactccagtaaccccaggttgcttcgaggagacgccgtggtggagctgggcctcaacgattacctagacattgtctgcccccactacgaaggcccagggccccctgagggccccgagacgtttgctttgtacatggtggactggccaggctatgagtcctgccaggcagagggcccccgggcctacaagcgctgggtgtgctccctgccctttggccatgttcaattctcagagaagattcagcgcttcacacccttctccctcggctttgagttcttacctggagagacttactactacatctcggtgcccactccagagagttctggccagtgcttgaggctccaggtgtctgtctgctgcaaggagaggaaccttccctctcatcccaaggagccagagtcctcccaagatcccctggaggaggagggatccctgctgcctgcactgggggtgccaattcagaccgacaagatggagcattgatgggggagatcagagggtctgaggtgactcttgcaggagcctgtcccctcatcacaggctaaagaagagcagtagacagccctggacactctgaagcagaggcaagacaaacacaggcgctttgcaggctgctctgagggtctcagcccatcccccaggaggactgggatttggtatgatcaaatcctcaagccagctgggggcccaggctgaagacctggggacaggtcgattgctggaccagggcaaagaagaagccctgccatctgtgccctgtgggccttttccctggggcagcaccttgccctccccaggggatcactcacttgtcttctatgaagacggactcttcatgaggttgaatttcatgccagtttgtatttttataagtatctagaccaaaccttcaataaaccactcatctttttgttgccctccccaa

SEQ ID NO: 81288 - DNA, 555 bp, Homo sapiens
gagaggactggatggggcctgatacatgggtgtggccccaaagtaaggaaacgctttccagggacctggagagaagaaaacctgggagggtctgaaacagtctgaggcatacaaaggggtgactccctgtgctaactttttcccactttcccactacccagcggtgcccactccagagagttctggccagtgcttgaggctccaggtgtctgtctgctgcaaggagaggaagtaagtgggttgggagcatggaccctactggctaatgtggggccttgggaaggagggaaggagtgagaagaatctaggaggatcagactccaggggtcctggtgaagcttcaagctgtggtctcttctccccatttagccttgagggagcttctactgcaccatcctctccccacttctgttttgttttgttttggttttagacggagtctcgctctgttgcccaggctggagtgcagtggctcgatctcagctcactgcaagctccgcctctctggttcacgccattctcctgaatggaggccaaggggatccttagatcacc

SEQ ID NO: 81289 - DNA, 1307 bp, Homo sapiens
gtacctttctctcctcgactgtgaagcgggccgggacctgccaggccagaccaaaccggacctcgggggcgatgcggctgctgcccctgctgcggactgtcctctgggccgcgttcctcggctcccctctgcgcgggggctccagcctccgccacgtagtctactggaactccagtaaccccaggttgcttcgaggagacgccgtggtggagctgggcctcaacgattacctagacattgtctgcccccactacgaaggcccagggccccctgagggccccgagacgtttgctttgtacatggtggactggccaggctatgagtcctgccaggcagagggcccccgggcctacaagcgctgggtgtgctccctgccctttggccatgttcaattctcagagaagattcagcgcttcacacccttctccctcggctttgagttcttacctggagagacttactactacatctcggtgcccactccagagagttctggccagtgcttgaggctccaggtgtctgtctgctgcaaggagaggaagtctgagtcagcccatcctgttgggagccctggagagagtggcacatcagggtggcgagggggggacactcccagccccctctgtctcttgctattactgctgcttctgattcttcgtcttctgcgaattctgtgagccaagcagaccttccctctcatcccaaggagccagagtcctcccaagatcccctggaggaggagggatccctgctgcctgcactgggggtgccaattcagaccgacaagatggagcattgatgggggagatcagagggtctgaggtgactcttgcaggagcctgtcccctcatcacaggctaaagaagagcagtagacagccctggacactctgaagcagaggcaagacaaacacaggcgctttgcaggctgctctgagggtctcagcccatcccccaggaggactgggatttggtatgatcaaatcctcaagccagctgggggcccaggctgaagacctggggacaggtcgattgctggaccagggcaaagaagaagccctgccatctgtgccctgtgggccttttccctggggcagcaccttgccctccccaggggatcactcacttgtcttctatgaagacggactcttcatgaggttgaatttcatgccagtttgtatttttataagtatctagaccaaaccttcaataaaccactcatctttttgttgccctccccaaaaaaaaaagggggggctagattcccggggccattccgtccccgtttgccagggcccagggggaagc

SEQ ID NO: 81290 - DNA, 1241 bp, Homo sapiens
gtacctttctctcctcgactgtgaagcgggccgggacctgccaggccagaccaaaccggacctcgggggcgatgcggctgctgcccctgctgcggactgtcctctgggccgcgttcctcggctcccctctgcgcgggggctccagcctccgccacgtagtctactggaactccagtaaccccaggttgcttcgaggagacgccgtggtggagctgggcctcaacgattacctagacattgtctgcccccactacgaaggcccagggccccctgagggccccgagacgtttgctttgtacatggtggactggccaggctatgagtcctgccaggcagagggcccccgggcctacaagcgctgggtgtgctccctgccctttggccatgttcaattctcagagaagattcagcgcttcacacccttctccctcggctttgagttcttacctggagagacttactactacatctcggtgcccactccagagagttctggccagtgcttgaggctccaggtgtctgtctgctgcaaggagaggaagtctgagtcagcccatcctgttgggagccctggagagagtggcacatcagggtggcgagggggggacactcccagccccctctgtctcttgctattactgctgcttctgattcttcgtcttctgcgaattctgtgagccaagcagaccttccctctcatcccaaggagccagagtcctcccaagatcccctggaggaggagggatccctgctgcctgcactgggggtgccaattcagaccgacaagatggagcattgatgggggagatcagagggtctgaggtgactcttgcaggagcctgtcccctcatcacaggctaaagaagagcagtagacagccctggacactctgaagcagaggcaagacaaacacaggcgctttgcaggctgctctgagggtctcagcccatcccccaggaggactgggatttggtatgatcaaatcctcaagccagctgggggcccaggctgaagacctggggacaggtcgattgctggaccagggcaaagaagaagccctgccatctgtgccctgtgggccttttccctggggcagcaccttgccctccccaggggatcactcacttgtcttctatgaagacggactcttcatgaggttgaatttcatgccagtttgtatttttataagtatctagaccaaaccttcaataaaccactcatctttttgttgccctccccaa

SEQ ID NO: 81291 - DNA, 959 bp, Homo sapiens
gtacctttctctcctcgactgtgaagcgggccgggacctgccaggccagaccaaaccggacctcgggggcgatgcggctgctgcccctgctgcggactgtcctctgggccgcgttcctcggctcccctctgcgcgggggctccagcctccgccacgtagtctactggaactccagtaaccccaggttgcttcgaggagacgccgtggtggagctgggcctcaacgattacctagacattgtctgcccccactacgaaggcccagggccccctgagggccccgagacgtttgctttgtacatggtggactggccaggctatgagtcctgccaggcagagggcccccgggcctacaagcgctgggtgtgctccctgccctttggccatgttcaattctcagagaagattcagcgcttcacacccttctccctcggctttgagttcttacctggagagacttactactacatctcggtgcccactccagagagttctggccagtgcttgaggctccaggtgtctgtctgctgcaaggagaggagtgactcttgcaggagcctgtcccctcatcacaggctaaagaagagcagtagacagccctggacactctgaagcagaggcaagacaaacacaggcgctttgcaggctgctctgagggtctcagcccatcccccaggaggactgggatttggtatgatcaaatcctcaagccagctgggggcccaggctgaagacctggggacaggtcgattgctggaccagggcaaagaagaagccctgccatctgtgccctgtgggccttttccctggggcagcaccttgccctccccaggggatcactcacttgtcttctatgaagacggactcttcatgaggttgaatttcatgccagtttgtatttttataagtatctagaccaaaccttcaataaaccactcatctttttgttgccctccccaa

SEQ ID NO: 81292 - DNA, 539 bp, Homo sapiens
attctttgatgttcaaatttctcatttacttatgaaaatccctaattatatagttttatataatgtgtatacagagtaggattgttgatgaaattgagcggttggaacaccctcatggaacactggcaacatggaatgtagagagctgatgtcttccccctcatagaggccattggcttcctttgtataaggagagggagaagtgattctggaaggagaagttggtatgtctagcttcattgcggcccctcgggctacccagcaagaggattctgcatcaaggaactggacgagccgctacccaaactgccaccatctttactctttacaaaatggacccatcgagaatgttgaaaagcttggaagtatcacttttgaaaaaaaaaaaaattattttgcattcagcatggactcgaccaggcatctatggagattatttttttgcttcattttataaagttgtatttagaaaagtcttaagtattgtgctttgtaaagaagatgattaaaatgaaattttgtgagaatagttttgttca

SEQ ID NO: 81293 - DNA, 383 bp, Homo sapiens
taccgtgaaccaaaacacagtgcagaaatcaactgggtgctaaccttgcattgactgcacaacctcttaccaaactcctggttttgtgctcaccacagaaccacatctccctggtctaacaatcaactttaacaggaaatatgataaattaaaatgtataaaatacctttttacagactggaagacaacgtctggttttgcttaggaaaatatcaaatgcaaaccctcaatttacagaggaagaccctgaggccagaaaatattatgttttccagttagaatcaaaccagcaccccaattcctgcctaatactacatggcctccgccaaaccaagctgagtctaccagctgcatgcggaaactcagaaaggaagagacctctc

SEQ ID NO: 81294 - DNA, 794 bp, Homo sapiens
tgtatgctctgttcaatcgttttgctgaatatttattagcattccatcactttgtgtttaattaatagaagttgagttcaaacaatgtttttaaaattcacacaaagctcgttagattcttttaactctgcctggcaacgcatttgtgtcttctggcatagttttggataacactcatgaactcaactccatctctttcattagaaaagagtattgctaagtgcatgtacatgtcatattaagacatgatacacattgcctagaaatgctaaaacagtcttaattcttcggcttgatttgcttgtgtgtgtcactctagggaaattttctaacagtatctttttgatggtgtgttccagaaatctttttaaatagttacttttagaacaggaagttttaaaatttgtagtaccatgtttataaaataaatttttaaatagttctgtagccatttaaattaatacataaatgtaaattgtgagatgagataaacatgaaggtttaatctttcaaatagttttccaaatgtagccagaatgtgagtactttggggtatgctttatagtttctcttagaaaaaggaaaaatagcactctgtttagaaatgtaataagagtagctttcaaaagtatgatgatttatttcaaatagctaactttgagctgtcatgatgttgatgtgaatgatatatattatttttatcagtgtaggaaggtttgagctatatttttgataatttgaatatgatattgaaaggtttattttgtttcataataaaaccaccatagaagttg

SEQ ID NO: 81295 - DNA, 333 bp, Homo sapiens
aaaaagtaaaaaaaaaaacctttaggtaataatgagatctctgaagaaaaatattgtgagggaatggaaaggaagggagttgggtttgggatggcgagtaattgagagttagtatggtcagcaaagttctctgagtaggtatatgaatgatgtgatgtaacacaccacacgcagttctatgcaaagcatttcccagatggagggaatattaaatataaagtctctaaggcagaaaatgcttaggtcttagaagataaacaagagtccagtgtatggctggagaaaaataattaagagggagagtgtcaggggaggagatcagagacatggaca

SEQ ID NO: 81296 - DNA, 700 bp, Homo sapiens
tcccacacttctgaggttttctttccaggacagcctggtttcccttcttcggcttattgttccatcagatttcagattttgagttctgatttttggtcagaagagtaaagtttctgggattggggacgtgtgtgctatgggaactcagtgtgtccccagcccttgtttgtaaacaaggaagggacagagatcagggaaataaaggcagaaggcagtgagagggaggctatgcctgctgcttggattctctgggctcactcccacagtgagctgcacactgtgatggagactcctctggagaaggccctgaccactatggtgaccacgtttcacaaatattcggggagagagggtagcaaactgaccctgagtaggaaggaactcaaggagctgatcaagaaagagctgtgtcttggggagatgaaggagagcagcatcgatggcttgatgaagagcctggacaagaacagcgaccaggagatcgacttcaaggagtactcggtgttcctgaccatgctgtgcatggcctacaacgacttctttctagaggacaacaagtgaccagggctgccctccaccctcaccctccaccctttgctgctgacctcggctgctcctctcacagaccctctttggccccctgccctcctctccctcccagatggacccttccatgggaggaaataaagtttccatcgca

SEQ ID NO: 81297 - DNA, 485 bp, Homo sapiens
ttttttttaattattattttgtatgtatataaaagaacacaaggggacccctaagctgcacactgtgatggagactcctctggagaaggccctgaccactatggtgaccacgtttcacaaatattcggggagagagggtagcaaactgaccctgagtaggaaggaactcaaggagctgatcaagaaagagctgtgtcttggggagatgaaggagagcagcatcgatggcttgatgaagagcctggacaagaacagcgaccaggagatcgacttcaaggagtactcggtgttcctgaccatgctgtgcatggcctacaacgacttctttctagaggacaacaagtgaccagggctgccctccaccctcaccctccaccctttgctgctgacctcggctgctcctctcacagaccctctttggccccctgccctcctctccctcccagatggacccttccatgggaggaaataaagtttccatcgca

SEQ ID NO: 81298 - DNA, 445 bp, Homo sapiens
tgtggaaaaccagttcctaagctggaagaagcagagagaaaatcgtgacccttgatctgctccaccatctgccaccagggccttttgaggaggtcgtcttctcatctttctgcctcaggcctacttttcaacaactccccagcaggagagtctgtggtctcctttggggtcttgctgttctccttgtaccagcagctccagagtttgttgtgggtctcattgtaacctgtactgatatagatgggcgctcttgttagtggatttcagtctcatcctgggttccagtctcttgttctttgagggaggggcctcagaggtaggctagtgctgctggtggtgacttcctgaggaatgggatcttcccctctccctctacaagctgcacactgtgatggagactcctctggagaaggccctgaccactatggtgaccacgtttcacaaa

SEQ ID NO: 81299 - DNA, 506 bp, Homo sapiens
cagccccctctcagccctggactctctctttgccctgtccccgactttaataatgggacactcctcgatatcagagctgcacactgtgatggagactcctctggagaaggccctgaccactatggtgaccacgtttcacaaatattcggggagagagggtagcaaactgaccctgagtaggaaggaactcaaggagctgatcaagaaagagctgtgtcttggggagatgaaggagagcagcatcgatggcttgatgaagagcctggacaagaacagcgaccaggagatcgacttcaaggagtactcggtgttcctgaccatgctgtgcatggcctacaacgacttctttctagaggacaacaagtgaccagggctgccctccaccctcaccctccaccctttgctgctgacctcggctgctcctctcacagaccctctttggccccctgccctcctctccctcccagatggacccttccatgggaggaaataaagtttccatcgca

SEQ ID NO: 81300 - DNA, 552 bp, Homo sapiens
cctaattccagagcatctggctgggttgttgggttctagactttgtcctcacctcccagtgaccctgactagccacaggccatgagataccagggggccgttccttggatggagcctgtggttgatgcaaggcttccttgtccccaagcaagtcttcagaaggttagaacccagtgttgactgagtctgtgcttgaaaccaggccagagccatggattaggaagggcaaagagaaggcaccagaatgagtaaagcaggcaggtggtgaagccaacccataaacttctcaggagtgacatgtgcttccttcaaaggcatttttgttaaccatatccttctgagttctatgtttccttcacagctgttctatccattttgtggactgtcccccacccccaccccatcattgtttttaaaaaattaaggcctggcgcagcagctcatgcctataatcccagcactttgggaggctgaggcgggcggatcacttgaggccaggagtttgagaccagcccaggcaacatagcaaaaccccattctgctttaaaaaaa

SEQ ID NO: 81301 - DNA, 566 bp, Homo sapiens
actgctgccttactatacctgatttaaacaaatcctgagcacattttaaaacataaattcaacagctggacctgctatgcagagcaattcaggcggagggaatggctcatgcacactctccaagtactgttaggtatgagttctaaatttctcttcaaagaatcaatatgtcagtatgttcagttctttgccttctactgttaaacttaacttcctcgtaaagcaacctttttccattacctgctccaccctgactcattctgattacctgctcattctccaccctggcttactctgatttcctgctctgccctgtaaccatttttcccgccaaaccactcaccctgtcactctctttaaattagccaattggaattagtttagcctgtgcagtctaacccaagccaataggggaaccatacagcagcagggaccacgtgcctcagggataagaaccccttcccctcccttgtccaagtgtgcgctcacgattgctccatctgtaagggtgcacccttctatagaagtacgttgtcttgctgagaattaaaaagaaaattttatat

SEQ ID NO: 81302 - DNA, 711 bp, Homo sapiens
ggctgttgagactccaggggtgttcggggctgggagcctgctgagtgttccctgttcccacctccaatctgctccatcctccagctgcatttcattccggatctaccaggatccaactttactactgtcatggagggaattacagtaattctaccaacttttgaggcaaccttcttctgacactgtgtgaaacagactgaaaagactctaaagatggagagagctcaatgcttgagaaaaggaattctgtcctttgaaaggtctctagaacaaaggagtcttattctgtcacctaggctggagtacagtggtgcaatcacagctcactgcagcctcgatctcctggactcaactaatcctcctgcctcagccttctgggtagttgagactacagatacagaagatgagagagagaaaaagagagaaattacagagtgacggagaaggcagacatcatgcaacatgctcaagggctattcattttaagctgaaacatacatgtgtagaaagcatccttgtacttataatcccaatgactatgaagaaaaataatttagccaaatagttcctagaacaggaaaaataaggaattatattttgagataagaagttaagctctagtataacaatgatatgggtcaaagaaaaatgaaaacaaattttaaaaacgttgcaacatgaataaaagtttcaccaaatcgggagtctatt

SEQ ID NO: 81303 - DNA, 794 bp, Homo sapiens
cgtgtgcagagtaatggcaatatagccaccccagtgtgggggagcagtcggaggagggtaggttaaagagaaaaactgatgctgggtgtaatcactcatacctgtagtcttagctacttaggaggctgaggcaggaggatcacttgagcccaggagtttgaggctgcagttgagatgggtaagtttcctggacccctcgtgggacttgtaatggggtgtgacttgttttgcttggccaccgagctcaaacttcttgtaggagggggagcacacagtttagcacctgcaggagcctgggcgagtggttgccagtgacctctggagccccaggtgtatgttacaaataatgctcttttagcagttgtcatccacggatggctaagtgttaaccagctcagtggagagtcggggtgacagcctttttcaccctcccgtcttggtacctgggttcctgtctggtgtccaggaagaatcaggtcacatggacttgaaggatggtgaatgtgtaggttttattgggtgatggaggtggctctcagcgggatggggagctggaaaggggaaggaataggaagataatcttcccctggagtttgactattcctaaggtaatgcccacggtttccagtgttgaaggtggggcctttgcagggaaccaccctcttctacccagtatttccctgccgcctgtccatatcattcctagtgagctacgatagtaccactgcaccccagtccaggtgacagaggcacctggactctatttttttaatagaaacctgtctctacttaaa

SEQ ID NO: 81304 - DNA, 362 bp, Homo sapiens
tggtaagtattcaaaaatatcactcatatccagaaagatcctgcttagtgttaagctgcttccattttggagaaaactggttttaaaaattacaaatccaaaatttgatccataaaccttttacaatacttaggtttttttttaaaaaaaaaaaacacttgaattaaaactataggaagcaaaacgcttacagaggtatcactatttactttcaggtttttaaaaagaactctggtgaacaattcattcatttattttatttttaaacctgagaataatgtactccaaagaatgggtggatgaaaggactaaatcattagcagagtcttcttcatctttggttatgtataatgcaaatattc

SEQ ID NO: 81305 - DNA, 357 bp, Homo sapiens
tttaccagtttactcaattaacaggtcagcatataaaacctggatcttctgacccttgattgtaccacactctgaaatgtatataaaatttatgattaccacaaataaagatacttcaaagaccctaaggaaggaaacacagaagaagggaacagcttcctcacctataaaataataaaaatgtggtctttttgacatccttgagctaaataaggtcgcaaggtggagcccactgcccagaagttttacccaaatagtctaacatagaaataggcctggaaacaggaggagtaacataaatttaaggcttaccagtgtataaagtaccttctattatcatttgatcctcactactca

SEQ ID NO: 81306 - DNA, 449 bp, Homo sapiens
tataaggaattctaagctcaaccacatttacaaatgctcagccctcggggttccaagactgctggtcttgggataccttagtgcggcatttatgacacaacacagctttgaggcatttgtccttggctggaaatgtcacacctgggagcaggcacaccctgcaagaggctattccgctgccacccaagcaatgaattatgagacaaagcaaaaattacactgatgttacagagacatcactgatccctgcaatgagtaataatcttcttttgactttgaactggtaggcaaatggaagaaatcttaacagctgacaacatcctagctggtaattaaaaaaataatctttagtactccagtttgaaatttggtctttcacggaaattttccctcatttgggaggtcaccaaaattgtgctagctttttaaatttttattattttttttta

SEQ ID NO: 81307 - DNA, 470 bp, Homo sapiens
ctattgttgaaatttctgcctggctgtagaaagcctctggggcaatagcagatccttccagtgtggggacacagttgtgccatctgaagagggtggcatgttgggtggattgggcagccccaggccaaagaaggtggcagttctgcagtcggaccttttacttcactgtctacacatctgtattatttcgctggggctgccatagcaaaatactacatacagggttggcttaaacaatagaaatttattttctcacagctctggaggctggaagtccaaggctaaggtgccggcagggttggtttcttttgaggcctctccacttggcttgcagatggctgcctttcctgtgtgtcctcacacagtcttgcctctgtgctcacatccctggtgtttctttacgtgcccagctttcctctttccatgaagacaccagccacattggaccaaggcccacccaaacagcacca

SEQ ID NO: 81308 - DNA, 483 bp, Homo sapiens
aagcagcactgtgaagaggcgcaggtggtaaaactgaagaccttcacaaacagccagcactaatttgccaaccaaatgacggtctttggaaaacagatcctctggcctcaggtgaaaaatgagaagattaaataagccatgggaagattttttaaaatgacatgaaactccaagggtaaaaagtaaccttctcccgcagtatcctggttcccatgctttctgtacccacgtgcctactcttgcaatctatacattgttcctgttcagcagagtttggatgaatacccaacagcctgaggagactgactgttacttgaaatgaaggagtgttcttgtttgaacgatcctgctcagaaggaccagcctgggcttgcatctcttgtagtattttactaaaccctgcaacagtagccactttttttccctgccaagttatctaaatgtagagcttcctgtggtctgagttttaagagattacaggtg

SEQ ID NO: 81309 - DNA, 373 bp, Homo sapiens
aaacaccaaccacccagtgcatgctaagctcacactggcctcacaaagtagacatgatggggcaatactttccaaatcaaattgaagtatttgacattagccccacatcattcacacacacttatactaataaggatttttagccacagaaaatgaatttttagtctaactagtttaagcacaaaggatttattgagtgtgaagacagcttaaagaattttggggaagagtgaaacaacttccaggtatgatttcaaaagtccctagactgcccagggagctgattcccctgcttgattaggaagttgcagctgccaactccagaaccttattacctcttataatttaccatgaagaagttaccaaatcagag

SEQ ID NO: 81310 - DNA, 462 bp, Homo sapiens
ccgtgttagcgagggtggtgatggtctcgatctcctgatctcatgatctgtctgcctcagcctcaaaagtgctgggattacaggcgtgagcccaccgcgcctggccacttccctgtttttaaaccatctctttctgctctagctctccctgttccttcctgttccctacacatactctgttctggtctctctcagtggtagtggtggtggtatgggctctggtgttagactcactgagtttctaatccaacatccaccaacaaccttggcaagttacttcacctttttgaggatcagcatcctcctgtgaaataaccccacatggtggttgagaggagtaaataaaaaatcatctgtacctcataaatatatatacctactatgtacccccaaatgtaaaaattaaaaaaaaagtaaaacgacatctgcaaacccgctctcattcctgagaccctcttcaaa

SEQ ID NO: 81311 - DNA, 816 bp, Homo sapiens
ctggccacagagcagttaaccttcttatctatgtggaatattttccatttgtctcaggctcacttgtttattctgcaacatttctggaatactaactttgtatgggctcctgccctcaggcatcttataggctgttggaaggaaaaggaccaaaataaggaacaatagtaaaaaatagtcatgaagcctgtcatacctgttccctttcttgttcctcatagcctcatgggtaggcctgcaggggttgtttttggccatggtgaggacatttgagaggacagtccttgtcttgcaggctggctgtgatgattccaggaaatggtacacagaggacactgctggccaaatgttccataggaacacatgtgcatgcacaccgcagtcttctttctagtttaccgagctgctcccagcagttgtcattatatatgcagttctacatgtcagtacatttatctaaaatccattcacagtccacacataagattttaagtacttgtgataaatgttgtctttgttccactcccggtccctccccttttctcctcccctcctttggcccagagggctgcacagtgcctctctcggaaaaagtacttcataggtttgccatgaggactgctgggaccaaggccacttgctcgccagggtgtttcatattccagtcagatgatctgggtgatacgggtttggtttggagcccaccttccaagaatgaaagaggccacttaccactttgtctgacactttgcagtccgccttcactggctgaaagactgactcttaggacttctaccccaaaccatagcacctagg

SEQ ID NO: 81312 - DNA, 378 bp, Homo sapiens
tcctctccctccataagtttgaagaagagggtgtttctcctgtctctgagggaattacaacctacatcctttcctgccatttgcctacaaaccttgttgtaccaattaatttctcttttctttcttaaaaaattttctttttaatgtaaaagttttactatggcttgatcaattgaatgatagggagaaagttttaaatagcaaacagatgtgattttgacagctaaatattagaattaacataacttgcatgggcacagtggctcacacctgtaatcccagcactttgggaggccgaggcaggcagatgacttgagattaggaattcaagaccagcctggccaacatggcgaaaccccatctctactaaaaatacaa

SEQ ID NO: 81313 - DNA, 136 bp, Homo sapiens
tctgtactccaggctgggtgacagactgacaccctgtctcaaaaaaagaaggtttgtacatactgtaacaggatatgaagctccagatagagcaaaattatggtgacagaagtgaatcagagattgcgtgagttgg

SEQ ID NO: 81314 - DNA, 278 bp, Homo sapiens
atgtttgaggtgatatgctaattaccctgactcaatccttgtatgcatttatcgaaataccacatgtaccccataaatatgtataataattatgtattaataaaattaaacattttaaaaaatgtatatagagagaaggaagtttctctctccctgtcctcctttggctttgccagctcaccttcctaaaagcagtcacctagtttattgtatgtccttctggaaggatctctgatggagcttagctaatgacaatccacagcagccacagcccaggc

SEQ ID NO: 81315 - DNA, 278 bp, Homo sapiens
gttgggtctcgaattcctggggctcaatgtaattctcccaccagggtcccccaaaacactgggaatcacagtgtgagagccaccacacccagccctccttttctttctttctgttttttttttggtttgggtggtggtggtggttggtttttttggagacggagtgtcgctctgtcgcccaggctggagtgcagtggcgtgatctcggctcactgcaacctccgcctcccgggttcaagtgattctcctgcctcagcctcccaagtagctgggactac

SEQ ID NO: 81316 - DNA, 91 bp, Homo sapiens
gctgacaccacccctaaggccagcagccaagagtctcagcggtgtcttcaactcagccaacccaggagctgctcagccaccaggaaagaaa

SEQ ID NO: 81317 - DNA, 507 bp, Homo sapiens
cgatgcgatcaactggaagaaagggtatcagtgatggaagatgaaatgaattttaaaacattttaatgagaatttcttaattttattctctgtgataggatggactggtgcaatttttttttttttttttaacaaacgagggaaattaagctagaaagcataggtggggacctaggattaaatgccatatattctaattccaagtccaagtccaatcctcttttcattatgccaccctgattttcaacatcagtatggtatcattgacttaaaatctagggaaaataagttataactaaaatatctttacattatgtctaacatatgacctgtatgagcaaaaatcagttttgagaaagcatcaatgaagctgagatctccccaagtcattacttacccacaaagaaaagcattgtttcccaatgaataaataattgcaggaaatagtttgcagtaatcaatttgtatgagtaaaaataaagatattttatattgagtatttcctca

SEQ ID NO: 81318 - DNA, 200 bp, Homo sapiens
cagtagcagcacatggtgcgatgtgatctgtgattatatcatcgctagcgctgtactgtcactacattcctgagctttctatggctactcgtcttctgcagagcagctatgatgggagctgccattcaagccttacatgcgtttctgcatttaatccttactcctgtgaggtaagcagtattttaaccccattttacaga

SEQ ID NO: 81319 - DNA, 338 bp, Homo sapiens
aggaaagcaggggtctcaattctgtacgaaagaggagggtgttttacttcctggaattatagaggccagaggtgtctctttttcaatttattgggaaggtttattttaatatggacttagaaataaataacttattaaagtgaaggttcacctggagccttaggctggctgctaagtgtgagtctgggctgttgaagggactgtgctgttcttctgggtctctgtaggagtttgaaggagaagactggccccaaagggtgtttgaacaggttagatgtgcccattggttagaacttacttggatagggagaagggatctagggcgtatccacaaactt

SEQ ID NO: 81320 - DNA, 381 bp, Homo sapiens
ggcaacagagcgagactctgtctcaaaaaaaagaaagaacacttgtaatactttctatttgaagagcataaccacataagatttcagttgaaatttcatattttcatattttctatctatcttttgcatatttggacagtttctctaagttgaaattagggactgtattctactttcctcactgaacatttaatcaattttctttcatttcctatagttgttataattgtctgtaactggacctctaggttagtttgcctgttgcttccttaatattaattatcaggttgaactaatgaacatttagttacttagttccctataaagccaacattgcattatagttctaaagttggacacttgtttttaccttttttgctg

SEQ ID NO: 81321 - DNA, 453 bp, Homo sapiens
aatctgtatacagttttagctccatttgatattagtcccctttaagtaagtttaaagtgattatgattaggaaatctatgaggctttaaaaaatttttcttttaattttggtgaaatacacataacatgaaatttaccatcctcaccatttttatagtatacagttcagcaatgctatgtacagtcacattattgtgcaaccggtttccagagctctcagcttacatgactgaaactctgtatgtattaaacatctccccagcacccctttttctagcctctggcagtcattattctgctttccatatctataaatttgactactctacatacctcaaataagtggaagcatacagtatttgtccttttgtgactggctcgtttcacccagcgtatggtcttcaaggttcatccattttgtagcatgtatcacaatttctttcctttttaagg

SEQ ID NO: 81322 - DNA, 437 bp, Homo sapiens
taaatgtactttctgttttaagttcagtttcctgttacttgcagtcaaagacttccttggtgatatacatttatcaataagtgtctttatttgattgattttagtgtcaaagaacctcttagaaagaagaggatgctttttaaaaagtgaaaaaaaaaaatcactagttcactttgattgggaaaggaatttcatcctagatagaaattttttaaaaatatgtggtttttattcctgttcattccttgttcataaacttgcacattaaatgttattttaaactttagtattgttcacgatttgaagataaaaaagtggtgggcacaatggctcactcctgtaatcccagcactttggaaggccgaggtgggcagatcacttgagcccagggatttgcaaccattcaggttttgaacatagtaagaccctatctctgt

SEQ ID NO: 81323 - DNA, 415 bp, Homo sapiens
caagagagagggtggggaggtgctacacacttttaaacaaccagatgttgtgagaactcacaagggggcatggtactaagcaattcatgagaaaccatccccataatctaatcacctcctaccaggccccacttctaacactggggattcgacatgagatttagtggggacacagacccaaatcatatcattccacccatggccccactaaatctcatgtccctctcacattgcaaaatacaattatgtgttcccaatagtccctcagagtcttaacttattccagcattaactcagaagtccaaagactcatctgagacaaggctagtcccttctcccacctcagcctcccgagtagctgggaccacaggcgtgtgccaccatgcccagctaatttttgtatttttagtagaga

SEQ ID NO: 81324 - DNA, 2299 bp, Homo sapiens
caagtttgaactgtgcaggtccacttatatgtggatctaaaatacagtatttgtgggatgcaaaatctgagtatatggaggaccaactttttgtagaggcaggttcctcagggttaactgcaggacttgagtaagtgcagattatggtatgcacaggggatcctggaaccagtccccagaccaaaaatgaccactgtatcttgagagcaccttcatggtcttctttcctgtccccagtcgtaagatacgacccttcatctgctttgtctcaacattctgttagtggtgaactgataactccagcttttctctctcttttttttttttttttttttttgggtggtggtggtggtgggggtttgaaggcaaatcttggctcgggcccccaggtgggatttgcagggcgcacagaatctcggggcttcactggcaagctcttcctgcctctgcctcccgggttcacgccattctcctgcctcagcctcccaagtagctgggactacaggtgcccgccaccacgcccggctaattttttttgtatttttagtagagacggggtttcaccatgttgggctcgatctcctgacctcatgatccgcccgcctcggcctcccaaagtgctgggattacaggcgtgatgagccacctagtgctaattcatctctaaacctctgtagttggagtctcctgaaatctcagactacctcctgctttcattttctacccagggaatacactattgtcctaagttatttagccttgaaatgtcagaggcattttaggttcttcatgtttctcccactttcagttgattaccattacaggatcttaggcttctttttatctttttgcagtgccttgcatccactggttgttgttttactctgttgggcactacttatttccttacctctggtttcttctcctacagcttatgttctgaaatgtgtattcctaaaatactgttttcctcttgttacttttctgctcgaggacttccagtaacttaccattgtttataaggtgatgttcaaacccttcagtctggagactttctgccacctatctgactgtacctttatcttcaagcttatctctttccaaacaagaggctcatttagcagctttctctgattgccatgttcatcctacactcagcctcattcagtttacagcatggaaactgtataggacctctttcctatagaaattgaagacacttaaataggaagaaaattaaaatatacatttggatacatgagtattccagtcaaataatatctataaaataccagatagagtataaaagacaactgaaggacaacagagtgatgaaaggactttattaggcatttggattggttatgatttaaatttcaatttaattagaacgtttccatggcaaggaaggaagcatggaggactgtggaaaagtcattcagtattgagttcatttgcattagaggaatttcatagtttaaaacttgtatatctttacctatccttcgtatgttttcttcttaagcatatttgactttttctacctcagcatctgtataagaaaatatttgtgagtcagatgttgtgggttttccttacctattattattttcttccatgctttacaacacattttttaaactaccttgttcttaaataattacacggacctgcttctgtgtactttcacagaatctttgacagttaaaaattgtatgttatataaaaatttgacaagcttctacagttaggaaaagcctttagaaatctgccttccccaaaccgtatgttatcatagcactcatgtctccccatgtctaaaaggtaaatagatacagaaacctcaccaaaagttgaatcatctgtactaaaccactgcttttttatccagactttttatataaatcttttattttccaaaaaactgatcttttacctacccctcttagagttaaaaatattgcctgtcaggcaagagtatagtatgccaatataaataatatgctttatttggttagaaacagttggtttgggaagctagcaacatagcatattctttacaaatttaataaggtgtattttgatactgtgataacctgcattgtaaattaccaaatggttggaattgaccagtttatacttattaaaatttttgatgtgccaatggctatccaattcattgcatttgtgaattgtgcttttagaaaaattgtggacattttagttttatatacatatttatgagttatttgtgcatatgataaaattatatataataataaaagtatatatgtaactt

SEQ ID NO: 81325 - DNA, 839 bp, Homo sapiens
ttgttgttgttttgaggcagagtcttgctctgtcgcccaggctggagtgcagtggcacgatctcggctcactgcaagctctgcctcccgggttcacgccattctcctgcctcagcctcccaagtagctgggactacaggtgcccgccaccacgcccggctaattttttttgtatttttagtagagacggggtttcaccatgttgggctcgatctcctgacctcatgatccgcccgcctcggcctcccaaagtgctgggattacaggcgtgatgagccacctagtgctaattcatctctaaacctctgtagttggagtctcctgaaatctcagactacctcctgctttcattttctacccagggaatacactattgtcctaagttatttagccttgaaatgtcagaggcattttaggttcttcatgtttctcccactttcagttgattaccattacaggatcttaggcttctttttatctttttgcagtgccttgcatccactggttgttgttttactctgttgggcactacttatttccttacctctggtttcttctcctacagcttatgttctgaaatgtgtattcctaaaatactgttttcctcttgttacttttctgctcgaggacttccagtaacttaccattgtttataaggtgatgttcaaacccttcagtctggagactttctgccacctatctgactgtacctttatcttcaagcttatctctttccaaacaagaggctcatttagcagctttctctgattgccatgttcatcctacactcagcctcattcagtttacagcatggaaactgtataggacctctttcctata

SEQ ID NO: 81326 - DNA, 1651 bp, Homo sapiens
gagttagaaagcaggataaagtcggtatcctcggggaacgtgcgggcaccatgcgtccccacctgtcgccgccgctgcagcagctactactgccggtgctgctcgcctgcgccgcgcactcgactggagcccttccccgactatgtgacgtgctacaagtgctgtgggaagagcaagaccagtgcctgcaggaactctccagagagcagacaggagacctgggcacggagcagccagtgccaggttgtgaggggatgtgggacaacataagctgctggccctcttctgtgccgggccggatggtggaggtggaatgcccgagattcctccggatgctcaccagcagaaatggttccttgttccgaaactgcacacaggatggctggtcagaaaccttccccaggcctaatctggcctgtggcgttaatgtgaacgactcttccaacgagaagcggcactcctacctgctgaagctgaaagtcatgtacaccgtgggctacagctcctccctggtcatgctcctggtcgcccttggcatcctctgtgctttccggaggctccactgcactcgcaactacatccacatgcacctgttcgtgtccttcatccttcgtgccctgtccaacttcatcaaggacgccgtgctcttctcctcagatgatgtcacctactgcgatgcccacagggcgggctgcaagctggtcatggtgctgttccagtactgcatcatggccaactactcctggctgctggtggaaggcctctaccttcacacactcctcgccatctccttcttctctgaaagaaagtacctccagggatttgtggcattcggatggggttctccagccatttttgttgctttgtgggctattgccagacactttctggaagatgttgggtgctgggacatcaatgccaacgcatccatctggtggatcattcgtggtcctgtgatcctctccatcctgattaatttcatccttttcataaacattctaagaatcctgatgagaaaacttagaacccaagaaacaagaggaaatgaagtcagccattataagcgcctggccaggtccactctcctgctgatccccctctttggcatccactacatcgtcttcgccttctccccagaggacgctatggagatccagctgttttttgaactagcccttggctcattccagggactggtggtggccgtcctctactgcttcctcaacggggaggtgcagctggaggttcagaagaagtggcagcaatggcacctccgtgagttcccactgcaccccgtggcctccttcagcaacagcaccaaggccagccacttggagcagagccagggcacctgcaggaccagcatcatctgagaggctggagcagggtcacccatggacagagaccaagagaggtcctgcgaaggctgggcactgctgtgggacagccagtcttcccagcagacaccctgtgtcctccttcagctgaagatgcccctccccaggccttggactcttccgaagggatgtgaggcactgtggggcaggacaagggcctgggatttggttcgtttgctcttctgggaagagaagttcaggggtcccagaaagggacagggaaataaatggtgcctgggatgagattcaatcta

SEQ ID NO: 81327 - DNA, 771 bp, Homo sapiens
tttctcactgcagcatgtagcaaattagactggccacctggagacccaggtcctcattcaggttatgctcacagaatgtgttacccggaaagagctgaagtctagggcctcagtttccccagtgcactggtggcaggtgggcctggctgagtcccagcccctcaggctctggcctctatgtccctacattctctccctgcaggaggctccactgcactcgcaactacatccacatgcacctgttcgtgtccttcatccttcgtgccctgtccaacttcatcaaggacgccgtgctcttctcctcagatgatgtcacctactgcgatgcccacagggtaatatgtctgggtgccccaggatgtcgccaggcccgcctgccttccccagcctagctttggagaggggagtagcctagttgtccttcccccaagcccctgctgaggctgcacttaataccaaggataaagcagccagtgctgacactgggccaggaggttcagggagattccacagccacatgtgcacaatctgggtcatgtaggagagaagctcatgggggttgccgtaaactcccagtgtccaggagtgaactggtcactctaggaattagatatatagggagactcctcttttccctacttctgccagttcccagctgaagaaagatgacccagtctggagagggtgggggttggtcataaaaagaaaagggtgagcatgggccagtatgtctgtataaatgtatttgcaataaaacgttgtgttttctta

SEQ ID NO: 81328 - DNA, 1300 bp, Homo sapiens
tttctcactgcagcatgtagcaaattagactggccacctggagacccaggtcctcattcaggttatgctcacagaatgtgttacccggaaagagctgaagtctagggcctcagtttccccagtgcactggtggcaggtgggcctggctgagtcccagcccctcaggctctggcctctatgtccctacattctctccctgcaggaggctccactgcactcgcaactacatccacatgcacctgttcgtgtccttcatccttcgtgccctgtccaacttcatcaaggacgccgtgctcttctcctcagatgatgtcacctactgcgatgcccacagggcgggctgcaagctggtcatggtgctgttccagtactgcatcatggccaactactcctggctgctggtggaaggcctctaccttcacacactcctcgccatctccttcttctctgaaagaaagtacctccagggatttgtggcattcggatggggttctccagccatttttgttgctttgtgggctattgccagacactttctggaagatgttgggtgctgggacatcaatgccaacgcatccatctggtggatcattcgtggtcctgtgatcctctccatcctgattaatttcatccttttcataaacattctaagaatcctgatgagaaaacttagaacccaagaaacaagaggaaatgaagtcagccattataagcgcctggccaggtccactctcctgctgatccccctctttggcatccactacatcgtcttcgccttctccccagaggacgctatggagatccagctgttttttgaactagcccttggctcattccagggactggtggtggccgtcctctactgcttcctcaacggggaggtgcagctggaggttcagaagaagtggcagcaatggcacctccgtgagttcccactgcaccccgtggcctccttcagcaacagcaccaaggccagccacttggagcagagccagggcacctgcaggaccagcatcatctgagaggctggagcagggtcacccatggacagagaccaagagaggtcctgcgaaggctgggcactgctgtgggacagccagtcttcccagcagacaccctgtgtcctccttcagctgaagatgcccctccccaggccttggactcttccgaagggatgtgaggcactgtggggcaggacaagggcctgggatttggttcgtttgctcttctgggaagagaagttcaggggtcccagaaagggacagggaaataaatggtgcctgggatgagattcaatcta

SEQ ID NO: 81329 - DNA, 354 bp, Homo sapiens
ccaacagatgtgccatctgctccagagaaatccagacctttacttgcaaagcttataggagagggcgccttccttctttccttcttcccttcctccctccctttcttacttccttctatcttcaacactgagcactaccgtgtacatggcagagtccaagggtgcattagacaggataggttcctgatcctgaggagtcagcacctaatgagagctttgaaagtagtctagtgggaattccaggcaggcaagggtgtcggtgatgtggacaggatggtagggcagccctcggtccatcccccatccttgtctgatgctgcttttcttggcaggttgtgaggggatgtgggacaa

SEQ ID NO: 81330 - DNA, 461 bp, Homo sapiens
actgatggaggtgcatgatcagaaagtttggggctttgccatgagtcaaaaattgttgtatctgagtgatggatatgagggagttagaaactttcaaaataaaaaatgaaaacaaaaaagtttggggtactgctagccagcctcagcagtcagtcccgagctggggagtggcacagctgtgtgcctacaggaggagaaagggcgcagggaggcagagtggaggctacaggctttctgtgtccccaggcgcctggccaggtccactctcctgctgatccccctctttggcatccactacatcgtcttcgccttctccccagaggacgctatggagatccagctgttttttgaactagcccttggctcattccaggtaagtttccaggactggggctgccagctgaaaagaggagttctctgtgtccttagggagaagtggagggcatagagactgcgagcca

SEQ ID NO: 81331 - DNA, 1709 bp, Homo sapiens
acgaggccggccggagcccgggaccctgcgcggggcgctgagctcccgagcgggcagagggcacgggcaggcggacgtcggggcgccctcggggaacgtgcgggcaccatgcgtccccacctgtcgccgccgctgcagcagctactactgccggtgctgctcgcctgcgccgcgcactcgactggagcccttccccgactatgtgacgtgctacaagtgctgtgggaagagcaagaccagtgcctgcaggaactctccagagagcagacaggagacctgggcacggagcagccagtgccaggttgtgaggggatgtgggacaacataagctgctggccctcttctgtgccgggccggatggtggaggtggaatgcccgagattcctccggatgctcaccagcagaaatggttccttgttccgaaactgcacacaggatggctggtcagaaaccttccccaggcctaatctggcctgtggcgttaatgtgaacgactcttccaacgagaagcggcactcctacctgctgaagctgaaagtcatgtacaccgtgggctacagctcctccctggtcatgctcctggtcgcccttggcatcctctgtgctttccggaggctccactgcactcgcaactacatccacatgcacctgttcgtgtccttcatccttcgtgccctgtccaacttcatcaaggacgccgtgctcttctcctcagatgatgtcacctactgcgatgcccacagggcgggctgcaagctggtcatggtgctgttccagtactgcatcatggccaactactcctggctgctggtggaaggcctctaccttcacacactcctcgccatctccttcttctctgaaagaaagtacctccagggatttgtggcattcggatggggttctccagccatttttgttgctttgtgggctattgccagacactttctggaagatgttgggtgctgggacatcaatgccaacgcatccatctggtggatcattcgtggtcctgtgatcctctccatcctgattaatttcatccttttcataaacattctaagaatcctgatgagaaaacttagaacccaagaaacaagaggaaatgaagtcagccattataagcgcctggccaggtccactctcctgctgatccccctctttggcatccactacatcgtcttcgccttctccccagaggacgctatggagatccagctgttttttgaactagcccttggctcattccagggactggtggtggccgtcctctactgcttcctcaacggggaggtgcagctggaggttcagaagaagtggcagcaatggcacctccgtgagttcccactgcaccccgtggcctccttcagcaacagcaccaaggccagccacttggagcagagccagggcacctgcaggaccagcatcatctgagaggctggagcagggtcacccatggacagagaccaagagaggtcctgcgaaggctgggcactgctgtgggacagccagtcttcccagcagacaccctgtgtcctccttcagctgaagatgcccctccccaggccttggactcttccgaagggatgtgaggcactgtggggcaggacaagggcctgggatttggttcgtttgctcttctgggaagagaagttcaggggtcccagaaagggacagggaaataaatggtgcctgggatgagattcaatcta

SEQ ID NO: 81332 - DNA, 850 bp, Homo sapiens
gtagagtcctgtagcccagcccatgggtatggttcagcatagggggacagaggagggaaggcacatggggacacacaggaatcatctcatggatggaagcagtcccttggctggaagtaacatccacacggacagcccagggatgcccaaggctgcagaaccagttgaaaattaatttcatccttttcataaacattctaagaatcctgatgagaaaacttagaacccaagaaacaagaggaaatgaagtcagccattataagcgcctggccaggtccactctcctgctgatccccctctttggcatccactacatcgtcttcgccttctccccagaggacgctatggagatccagctgttttttgaactagcccttggctcattccagggactggtggtggccgtcctctactgcttcctcaacggggaggtgcagctggaggttcagaagaagtggcagcaatggcacctccgtgagttcccactgcaccccgtggcctccttcagcaacagcaccaaggccagccacttggagcagagccagggcacctgcaggaccagcatcatctgagaggctggagcagggtcacccatggacagagaccaagagaggtcctgcgaaggctgggcactgctgtgggacagccagtcttcccagcagacaccctgtgtcctccttcagctgaagatgcccctccccaggccttggactcttccgaagggatgtgaggcactgtggggcaggacaagggcctgggatttggttcgtttgctcttctgggaagagaagttcaggggtcccagaaagggacagggaaataaatggtgcctgggatgagattcaatcta

SEQ ID NO: 81333 - DNA, 331 bp, Homo sapiens
tgtagagactgttttgccatgttgcccaggctggtctctaactcctgggctcaggtgatctgcccaccttggccttcagaagtgctaggattacaggtgtgagccaccgagctggccccaaaacttttttaatgtttaagttttaccactgtactaaggaggagttacccatttttttaattgccttttttcttccttcttattagggaggggtaaggaagaagactttgtcagcagaaagcaggtcttaattgcttttttgtttgtttgttttgttgctattgagttgtttgagttccttatatgtattggatattaaacccttgtcaga

SEQ ID NO: 81334 - DNA, 137 bp, Homo sapiens
gtgtgttggtcaggtcctgaggaacgacccctcatctccacactcagcctcctccagaaagagctccttgcattggctctgggacttgtttccataaccttttatggtgaccgattcctagactctattctgttatc

SEQ ID NO: 81335 - DNA, 596 bp, Homo sapiens
gccaggcaccattcatgggaatcaacttttatccctgtccaagaacatggttcacttgagaaacttcatgcatgtgcagctttaagtgacctagtgtcagtgtcttagactagagaggttggggctggatcatgaagggtcttgtaagccatacttagtttagactttatgtgcagtgaataaatggagggagcacatggaggaaattgttctgcagaattttaaataaaaagagtgatatgatcagttttacatttgggacagataactgaaaatattatgaaaaaggtcctggagaaagggagaatgttggaggcaaagaatccagagaaaagctgagtagggtttaagctaaggttaattgcagggagaatgtagaagaaatatttaggcagtaaaatgcttaggaccagtctggacaacaaagcgagaccctgtctctacttaaaagaaaaaaaaaaaaaattagccaagcattgagggctgcacctatattcctggctacttgggaggctgaagcaggaggattccttgagcccaggagtttgaggctgcagtgagcagcctgggcgaaaagagcaagaccctgcctctta

SEQ ID NO: 81336 - DNA, 1841 bp, Homo sapiens
aactttctgatctatgaacttctcagttcagctgtcacattatgagaagtaaatcagaatttttttaaggagaagtcattcttagcactacaataattgtaccagtaattgaggaaaccaagacaatcttcacctgaataatagagggtctgagaactgtcagccttttgccattcaaaaacatttatgtccaacctgaaaaaaaagcatcaataaaacctatcccaagcattcaaaatagtcctttccaaatgttatttattttaaagtcaatcagctcttttagaaacagattctggtctggctgaaaactcccacaacaaatttactcatccagtggctaatatttaatgcccaccatgggcagagcacacaaatcttcagataaacaatactgaattgattcagcacagattgttcagatttgaatgaccagggagttgtatttgcacatgcaagaacactaagaatctcccagtcctcaaactagaaacctttcagctatgatgaaaaaaaaaaaggggtcttcatttttccaagagggggtggaggtggggatcactttttagctaaaagctatctctcacttcaaaattcttgtctttttctttgtggacaaacaccagtagtctatcacttggagatcttttaatatctcccatcatttaaaacatccacgagagtttgaagatttgtgttgattgccagatacagaagccccttgaaaataaggaaagggtggaggaagcatttttgtgtcctatccctacttatcgtagcagctctatagacaaaagggacacttactggtgagcctctggcccttaaaagaaaatcatctaagaatatgaaggcaatttgatttccccccacagccctcagctgccttcctcacagaaggaagttcccaaaattgctggtacacagtttgcaatcaaatatcagatatgagaaaacctgtagtgaagagtctgggttcttggttttctcataaatccaatataaatttgtaggttggttcagggtcaaaattgccagtgctttattagacagatgatactgatagacacacagagcccaggtcctggaacaagacaatcctgtagtgccaagatctggtcagttgcgttaaggagctgggtttgattctagagtccaggtttatagagaaaccctggctagattgagcctacccatggggagacgatttcaagacaggatgagatctgggaagaattttgttgtcatctgccagggaaattatcacaggactcattgaatgcaataacatgtgagtaagttcccttttgattctgggaatcagcgattttccctgtggattaagacaaaccaacgccagaaggtctcctgtgcttattttaaccatctgctcccatcgtgaaccctggagcatgcatttcctagaagtggtttcatagctcctgtgtgttcatggaaaaggggagtataatgatggggatgctggaagcttttttaatgttttccaaaggaaaggaacccacactgctccccagagttcctttccaatggccctgcagtaagaacggaggacaatgtattgctgggtgcttaaaatcctccctcagtgaagcacaaagagacactttgtaaagaaaaaaagagcaagcataggttctctgtgggaccttgtggagtggtgttttcacgttggtctctttggctcaattgagcataatcagaaagaaatgtgggttattgggaagagacaaaaagcagtggctaaaataccaaagttggcatgtgttctttttttaaaaaaaaaaaaatgcatatatttttaaataaaatgtttattttaa

SEQ ID NO: 81337 - DNA, 1803 bp, Homo sapiens
aactttctgatctatgaacttctcagttcagctgtcacattatgagaagtaaatcagaatttttttaaggagaagtcattcttagcactacaataattgtaccagtaattgaggaaaccaagacaatcttcacctgaataatagagggtctgagaactgtcagccttttgccattcaaaaacatttatgtccaacctgaaaaaaaagcatcaataaaacctatcccaagcattcaaaatagtcctttccaaatgttatttattttaaagtcaatcagctcttttagaaacagattctggtctggctgaaaactcccacaacaaatttactcatccagtggctaatatttaatgcccaccatgggcagagcacacaaatcttcagataaacaatactgaattgattcagcacagattgttcagatttgaatgaccagggagttgtatttgcacatgcaagaacactaagaatctcccagtcctcaaactagaaacctttcagctatgatgaaaaaaaaaaaggggtcttcatttttccaagagggggtggaggtggggatcactttttagctaaaagctatctctcacttcaaaattcttgtctttttctttgtggacaaacaccagtagtctatcacttggagatcttttaatatctcccatcatttaaaacatccacgagagtttgaagatttgtgttgattgccagatacagaagccccttgaaaataaggaaagggtggaggaagcatttttgtgtcctatccctacttatcgtagcagctctatagacaaaagggacacttactggtgagcctctggcccttaaaagaaaatcatctaagaatatgaaggcaatttgatttccccccacagccctcagctgccttcctcacagaaggaagttcccaaaattgctggtacacagtttgcaatcaaatatcagatatgagaaaacctgtagtgaagagtctgggttcttggttttctcataaatccaatataaatttgtaggttggttcagggtcaaaattgccagtgctttattagacagatgatactgatagacacacagagcccaggtcctggaacaagacaatcctgtagtgccaagatctggtcagttgcgttaaggagctgggtttgattctagagtccaggtttatagagaaaccctggctagattgagcctacccatggggagacgatttcaagacaggatgagatctgggaagaattttgttgtcatctgccagggaaattatcacaggactcattgaatgcaataacatgtgagtaagttcccttttgattctgggaatcagcgattttccctgtggattaagacaaaccaacgccagaaggtctcctgtgcttattttaaccatctgctcccatcgtgaaccctggagcatgcatttcctagaagtggtttcatagctcctgtgtgttcatggaaaaggggagtataatgatggggatgctggaagcttttttaatttcctttccaatggccctgcagtaagaacggaggacaatgtattgctgggtgcttaaaatcctccctcagtgaagcacaaagagacactttgtaaagaaaaaaagagcaagcataggttctctgtgggaccttgtggagtggtgttttcacgttggtctctttggctcaattgagcataatcagaaagaaatgtgggttattgggaagagacaaaaagcagtggctaaaataccaaagttggcatgtgttctttttttaaaaaaaaaaaaatgcatatatttttaaataaaatgtttattttaa

SEQ ID NO: 81338 - DNA, 507 bp, Homo sapiens
tttttttttaatttgccaggcatggtggtctgtgcctgtagtctcagctacttgggaggctgagaagggaggatcacttgagcccaggagttcaaggctgcagtgaccagcgcactccagcctgggcaacagagtgagatcctgcctccacaaaaacaaaaaacaaaacaaaaacaaagttgcaggtaggtgggtaaggagagaaagaaatctcaaaagtctcaccctaaagcagacaacctagactaaatcacatttcaaaatattttaaaatacctataagccggccgggcgcggtggctcatgcctgtaataccagcactttgggaggccgaggcaggtggatcacggggtcaggagttcaagatcagcctggccaagatggtgaaaccccgtctctactaaaaatacaaaaaattagctgggtgttgttgtgggcaccttgtaatcccagctactagggaggctgaggcagagaattgcttgaacccgggaggcagaggctgc

SEQ ID NO: 81339 - DNA, 629 bp, Homo sapiens
cggatgggggatggggcaggatggggcaggacaccgatatgctaaatacctaccaacagttggttaggaccccgtcggtgcgaccagggcaggacgtgcggctccaggctccaggaaccagaacggggctgctcaagctgctgtcgaccgtctctcaggacaagcaggtgagggaggcccagtgaggacacttccagctgcctagagccagggctgcctggggagtggtgatggtgtgccaaatcaagacctgcagcagaggtctcagagctcaaggcagacagcaaagaaggaccgcaagcccaggggccagagcaagaaaggacagggctctgaagagtctgaagagtaagcagcagtgggatgggtcaggaggctgttgggggtcagggccctctggggctggcgccgaccctgacccccaccctttccttcttcagtcacttcccgcttcttcctcggaaaccctccttccccttccagtgggcctgggagagcatcgccacagatgtccgggctgtgcttcagccaagctccccaacccctggccaccaagccctgcccatgccctcctcgttctcccagcgtcagtccaggcgcaagtccacggccaacctcccagaggccca

SEQ ID NO: 81340 - DNA, 476 bp, Homo sapiens
ctgggaacatgggagatagatctagagatgtagtgtgaaacttatcccatgggatgacagttgggacagtggaattgtatgtaccaggaaagagatagcaaaacagtattgagagagaacgagttctgaggagacagaacctgggaacatcctgtggagaaccaatcaatgttcttccactccttgatagaaagcacgtttcttcatcaagtcaatacaacaaacctaaccccagaaatatgctcttgtggctaagaagttaggacacaccaaagagataatgtccatttagacatccatttctccttgactctgtcacttctatgtgtgaagcagaattagaccaaagccacgtatgattttgtataatagctggtctatttggtttcctcagaaaggtctttaataagtaccagtgatacgtataaaatacgtatgggtggcttcccaagtgaactgccagtccctcaaatctt

SEQ ID NO: 81341 - DNA, 537 bp, Homo sapiens
ggcaggcgactccactgggcgccatcttcggggaacgactcagcgcaggattgtaaatacaccgctggggtggggcggggaggacggtggcctgcaggacgcaaaaagcggaagccgaagcatgaggcctgcgaccgttaggcgggcgcgcgctcagggattagccccgccccgtccgtgcccccggcgcgcgcgctcccccattctcccgctcggcaacgacggcggccttgtgcgcgtgcgcgcgaaataacggccgctggcggagggagggggagtggaatcgttggcggggggaagaggagagaagccgccctgtctcccgcgcgcccaccacctgcgccatcgtcagccaatcagcagccgtctcaggggtctcgcgctcggggcgactcgggctgctgggtggctcccccgtccctcctcccgccagagtccctctcgcgcctgcccctcccgctggccacgcgcgcgctcgcgctagcgctcgcgcccgctccagcctcttgtgtgtcctcgcgccccccgcccgccctc

SEQ ID NO: 81342 - DNA, 518 bp, Homo sapiens
tgctgaagtgacagctgattatacaacctgggagaagcgcggcacaccaggatctgacacttcccagggctctggccctcgccttctctcccttttgctccccagcatgggctgccttcctccttctccatgtgcccctgggttagggggaggctcctgtgtttagtctcctcttcccagctcccgtggaacaagacaaaatagccgttttcaccaaaagccagagtctcagcgcttttaatgtgatgtgaacagtccctgagactgtgatgctgttggggagacatcttccttcatggcacccactgcattgaaccctctgccaatagaagatcctgctcagaagcggggacccaaaccaaggcagtgacagcagcacactcagaccaggaacgccttctgaggcctcccccaaatcatcctcctcgtcctcctctgagcatgtcccacaccaggccccaacctgaacgcttcatcaaagatgaatgttggaatccaactcacaggcttcacatctg

SEQ ID NO: 81343 - DNA, 386 bp, Homo sapiens
cttttcctttgaattgtaatatgggagcagtaatatctgagtcacacccgggcagtgtaacctgctcctgagttaaacatacagtattagtttgccaatggcttgcctggctcttagggacttaaaagttcttgaactccatatgatcactccaggtaactagtaaggtaattaatatctctttaaatccccagaccagaactgctgctgttctccatccaccaactacagtggtctccatctaggagacccatcatatttaaacaacaccccgggccaggcacggtggctcacgcctgtaatcccagcactttgggaggctgaggagggcggatcacccgaggtcgggagttcaagaccaccctgaccaacatggagaaaccccc

SEQ ID NO: 81344 - DNA, 1494 bp, Homo sapiens
cggccgcggagcagcgaacgcgtgcctgccagggaaaagcagtcaccaggaacgcggcgttttggtcggctgcccatcgccagccctgtccgcgcgagatgccctgctccgaagctcttgtgagctccgcggcctgcggctccggaaggcgaagctcttccaggaagcagcggcggccccactggccctctcaggctgcggagaaagggcgggaggccgcggggctctccaggactcagtggtttcggagaaactcgacttcccaggctcggagggccagtttgggattgttatagaacaaaacgtgggcggcataaagtgctccgaagtggagatcaccttgaagactgggcccttggctctgtgacccagcagacccgaaattccaatctggcaaactttcagcctgacccttgggaaaggatcgctcccagagtgtgggggtggaggtgatgggacaaagatcttaaaatcctgaaaaacaaccgttattctcaactgaatttctgctaagtgcatccattcataaacagtacgtgcctggcgctctttacgtgtattaactggtttaattcccacaaccttaagtaggggctgttaatctcacaattgtagagccaccattcaaagccaggcagtctggccccagcctctgtgggcttaaccactacccgccgccaagcagctcctaggagcctggcagggaaaggcatggtgacgacagcagacgaggtccctcaagtagcttgcattctggaagcgaagaaagatcatgaacaagtttcaaattggtaaaataattgtcagtggagattcatcccataaaggaattgagtaaaaggaagaactactttcagtaagatggtttgggttggagtttctgttcataagggcagaaatggactctctctgacttaaagagaaaaaactttgttaagagtttggggtaacccacagaattatcaggatgtctcagaatacagacaagaacaaagggaggctccgcagccaaaagtccctcctctaaaccactttgatgaggaccaaacaggtgctactgctgaaagctagacaccacatcctactccacaaccaacgctggaactccccagacaccccgctggctctgccgcccctaaaccggatgcggcagccaccgcggaccccacagcggattctccaccaccccatttctttgcattgcatcaccacctccagagtgtgcctaattggcaccccgctgcttctgatgcaaaactccaagctgtactgggcaaacgcgcagcctctggcaccattcccagtgctgctgagcatacagacctgagcacagcggagggggagggcttggtggggagggggacttacaattcatccacgctgttgaaatcccatcaaacacacacgacccagtttggctggtgcagccttttctctcccctcctgatagcatttcagcctctcttccaataaaaaatagtagctactaaaaaa

SEQ ID NO: 81345 - DNA, 1551 bp, Homo sapiens
  misc_feature (1462)..(1462): n is a, c, g, or t
  misc_feature (1470)..(1470): n is a, c, g, or t
acttccgtcggcccgttgggaatccggcccctgggtggtccggaaacgattctggacctgcgggtatatccagggcccgcaccccctgggattgtgggaaatgtagttttttgcctccgtaagggaccaggcggagctgaggaaccgcgcgaggactgggaccgtgattccactaaccggaaaccgtcgcctttcgggcccggcggggcctgagccaatgcagaagcgggggccgcgaggacgccagcgggcgctgtgcgtaggaaccgccgggtggccgctgccgatcggggccgacttggggacggaccggaagtgcccgagggcggccgcagaacggtcaatttgagccgcgtcgaggtcgggcttgggaagggtcagcgggaggcctgagggcgccgggcgctgcggcaggcgggcccggggtccagccgagagggtccgggcgccaggcaacgcgattcgcgcgggggtgaacccggggagggggccggcctccccgttctgggacctttcgctcccctgggacctgtggccgccgcccacagaccatgctcctggggcgcctgacttcccagctgttgagggccgttccttgggcaggtaggaagccccgcgggggcggatgggaggatgcacacctggttaggagtgcgggtctcagcagctccgctggggcagggccggtggccacacacacactctttcccctctaagcttccgatgctcacagagggaacctcaggggttcaggccaggaatgaggtgcgggggatcctcgctgggacgaacctgctgctcctcaacccgacgggcctgtgtggtctcgcgagcggtgaccgtggcgtctggttttctgcaggcggccgcccgccttggcccgtctctggagtgctgggcagccgggtctgcgggcccctttacagcacatcgccggccggcccaggtagggcggcctctctccctcgcaagggggcccagctggagctggaggagatgctggtccccaggaagatgtccgtcagccccctggagagctggctcacggcccgctgcttcctgcccagactggataccgggaccgcagggactgtggctccaccgcaatcctaccagtgtccgcccagccagataggggaaggggccgagcagggggatgaaggcgtcgcggatgcgcctcaaattcagtgcaaaaacgtgctgaagatccgccggcggaagatgaaccaccacaagtaccggaagctggtgaagaagacgcggttcctgcggaggaaggtccaggagggacgcctgagacgcaagcagatcaagttcgagaaagacctgaggcgcatctggctgaaggcggggctaaaggaagcccccgaaggctggcagacccccaagatctacctgcggggcaaatgagtctggcgccgccttcccgcccgttgctgctgtgatcgagaataattcaggntcgaaaanaaaagtgggatattatgggggaagaagtaaggaagagaagaatggacgttgtgaggaactgggacaagagagaaaaaggtg

SEQ ID NO: 81346 - DNA, 591 bp, Homo sapiens
cgcagaacggtcaatttgagccgcgtcgaggtcgggcttgggaagggtcagcgggaggcctgagggcgccgggcgctgcggcaggcgggcccggggtccagccgagagggtccgggcgccaggcaacgcgattcgcgcgggggtgaacccggggagggggccggcctccccgttctgggacctttcggtgcgtccgagcgcgacaccgcccgcgtcgggggcttgggagcctcggggcgcgagctgtgttggaagcaaagtcctccttgtgggttggggtggcggagggagaagggaagcgagggtcgcggcgggaccagacgccccagtcccggcccgcccgcgactactgaaggcgctgccgcctgacctgaacgggcacttgtgttccagctcccctgggacctgtggccgccgcccacagaccatgctcctggggcgcctgacttcccagctgttgagggccgttccttgggcaggtaggaagccccgcgggggcggatgggaggatgcacacctggttaggagtgcgggtctcagcagctccgctggggcagggccggtggccacacacacactctttcccctcta

SEQ ID NO: 81347 - DNA, 1135 bp, Homo sapiens
  misc_feature (1046)..(1046): n is a, c, g, or t
  misc_feature (1054)..(1054): n is a, c, g, or t
acttccgtcggcccgttgggaatccggcccctgggtggtccggaaacgattctggacctgcgggtatatccagggcccgcaccccctgggattgtgggaaatgtagttttttgcctccgtaagggaccaggcggagctgaggaaccgcgcgaggactgggaccgtgattccactaaccggaaaccgtcgcctttcgggcccggcggggcctgagccaatgcagaagcgggggccgcgaggacgccagcgggcgctgtgcgtaggaaccgccgggtggccgctgccgatcggggccgacttggggacggaccggaagtgcccgagggcggccgcagaacggtcaatttgagccgcgtcgagctcccctgggacctgtggccgccgcccacagaccatgctcctggggcgcctgacttcccagctgttgagggccgttccttgggcaggcggccgcccgccttggcccgtctctggagtgctgggcagccgggtctgcgggcccctttacagcacatcgccggccggcccaggtagggcggcctctctccctcgcaagggggcccagctggagctggaggagatgctggtccccaggaagatgtccgtcagccccctggagagctggctcacggcccgctgcttcctgcccagactggataccgggaccgcagggactgtggctccaccgcaatcctaccagtgtccgcccagccagataggggaaggggccgagcagggggatgaaggcgtcgcggatgcgcctcaaattcagtgcaaaaacgtgctgaagatccgccggcggaagatgaaccaccacaagtaccggaagctggtgaagaagacgcggttcctgcggaggaaggtccaggagggacgcctgagacgcaagcagatcaagttcgagaaagacctgaggcgcatctggctgaaggcggggctaaaggaagcccccgaaggctggcagacccccaagatctacctgcggggcaaatgagtctggcgccgccttcccgcccgttgctgctgtgatcgagaataattcaggntcgaaaanaaaagtgggatattatgggggaagaagtaaggaagagaagaatggacgttgtgaggaactgggacaagagagaaaaaggtg

SEQ ID NO: 81348 - DNA, 1292 bp, Homo sapiens
  misc_feature (1203)..(1203): n is a, c, g, or t
  misc_feature (1211)..(1211): n is a, c, g, or t
acttccgtcggcccgttgggaatccggcccctgggtggtccggaaacgattctggacctgcgggtatatccagggcccgcaccccctgggattgtgggaaatgtagttttttgcctccgtaagggaccaggcggagctgaggaaccgcgcgaggactgggaccgtgattccactaaccggaaaccgtcgcctttcgggcccggcggggcctgagccaatgcagaagcgggggccgcgaggacgccagcgggcgctgtgcgtaggaaccgccgggtggccgctgccgatcggggccgacttggggacggaccggaagtgcccgagggcggccgcagaacggtcaatttgagccgcgtcgaggtcgggcttgggaagggtcagcgggaggcctgagggcgccgggcgctgcggcaggcgggcccggggtccagccgagagggtccgggcgccaggcaacgcgattcgcgcgggggtgaacccggggagggggccggcctccccgttctgggacctttcgctcccctgggacctgtggccgccgcccacagaccatgctcctggggcgcctgacttcccagctgttgagggccgttccttgggcaggcggccgcccgccttggcccgtctctggagtgctgggcagccgggtctgcgggcccctttacagcacatcgccggccggcccaggtagggcggcctctctccctcgcaagggggcccagctggagctggaggagatgctggtccccaggaagatgtccgtcagccccctggagagctggctcacggcccgctgcttcctgcccagactggataccgggaccgcagggactgtggctccaccgcaatcctaccagtgtccgcccagccagataggggaaggggccgagcagggggatgaaggcgtcgcggatgcgcctcaaattcagtgcaaaaacgtgctgaagatccgccggcggaagatgaaccaccacaagtaccggaagctggtgaagaagacgcggttcctgcggaggaaggtccaggagggacgcctgagacgcaagcagatcaagttcgagaaagacctgaggcgcatctggctgaaggcggggctaaaggaagcccccgaaggctggcagacccccaagatctacctgcggggcaaatgagtctggcgccgccttcccgcccgttgctgctgtgatcgagaataattcaggntcgaaaanaaaagtgggatattatgggggaagaagtaaggaagagaagaatggacgttgtgaggaactgggacaagagagaaaaaggtg

SEQ ID NO: 81349 - DNA, 479 bp, Homo sapiens
aatcctccctaactcattttatgaggccagcatcatcctgataccaaagcctggcagagacacaaccaaaaaagagaattttagaccaatatccttgatgaacattgatacaaaaatcctcaataaaatagtggcaaactgaatctatatgactttagtgtaatatcattgaagacttagagagggttagtgtgagttagaaaaactctctatttttaatattctgcccagtctaaaatttttacctgtcataaactaaatctgtatatctctcacctgtcttatatttatttcagtacatgatataagggtggactctatttttttctcaatggcgagcccatcatctcatctccatttattagataatccatttttttctcactgattgtggataacacatatacatatttgcgcttttaggatttagtctttttttcccctttgacctttctgtactctagcattaacaccacatg

SEQ ID NO: 81350 - DNA, 272 bp, Homo sapiens
gcaggaacccttggcctgccattttcatgttcaggtcttgatccttggtaaataatgaaagccaggcccaaacacgtagctacttttttttattttgtttttgtttttgtagagacggggtctgatacggtttggctctgtgtccccaccgaaatctcatcttgaattgtactcccataattctcacgtgttgtgggagggacccaatgggaaatattttgaatcatgggggcagtttcccccatattgttctcatggtagtgaatatgtct

SEQ ID NO: 81351 - DNA, 224 bp, Homo sapiens
atggtttttgccatgttgcccaggccagtcttgaacttctggcttcaagtgttccgcttgcctcagcctcccaaatgctgggactacaggtatgagccactgcacctggctaaaaacttcacttttctaatctcttatttaattttgtggtagaaatatttgagttttataatgttgttttttctttttctttttgtttttttctttgagacagggtcttgctc

SEQ ID NO: 81352 - DNA, 422 bp, Homo sapiens
catcatcattatacattatttttccaggcacaaaaggctcattcttatagaagtcattatattcttccccaaaaacaaaagcacatgctttttttgaaaaatggaaaacttgggaaatatagagaagattaaagaggaaaataaaaatcatccataatccttttggtcagagataactgttgttaatattttgcatatattttttttcattcttaatgactaaatttatgttgcacattactttcttgccagtaggcacacatgcatatttttaacatttgtaatcttagcaaacacagttaaatattctttctccaaatatctacagccttcataattattttaagactgagtaatacttcaacatgttgatgtaccataatttattaaactactttccctttatggaaggaaaatctatg

SEQ ID NO: 81353 - DNA, 368 bp, Homo sapiens
ggtacctacaagaaagaattaaaagagaaagttgtgacttagtgcagtggagacacacacaatcatggtatgtggagctagcttgaatcaaatatggaagaagctggctaaatttttgagagacatgccaaaatagctatcagtcaagactaaaggaaactgtaaatagactccaagtgggagtggggcttcaaccttctgtggacagagttgtctgagaacgctgctcagactttaaggagatcacattttccagtgctcacttaaggacaaggaggccgggtatagtggctcatgcctgtaatcccagcactttgggaggtcgaggcgggtgaatcacgaggtcaggagtttgagaccagcctggc

SEQ ID NO: 81354 - DNA, 6452 bp, Homo sapiens
gaaattttgagaagtggtgggatgaagaagatccctgaagagaggagtaactgagacaaaggcgaggctagcaatagagagacaagtgagggaattagacctttggtatcatcatgaaaaggcctggaagaaacgctggtttatcctgcggagtggccggatgagcggtgacccagatgttctggaatactacaagaacgatcactccaagaagcctctgcggatcatcaacctgaacttctgtgagcaggtagatgcaggcctgacctttaacaagaaggagctgcaggatagttttgtgtttgacatcaagaccagtgaacgcaccttttacctggtggctgagacagaagaggacatgaataagtgggtccagagcatctgccagatctgtggcttcaatcaggctgaggagagcacagactccctgagaaatgtttcctcagccggtcatggcccccgctcttctccagctgagctcagcagctctagccagcaccttctccgagagcgcaagtcctcagccccatcacactccagccagccaactctgttcacgtttgaaccccctgtgtcaaaccacatgcagcccaccttgtccaccagcgcacctcaggagtatctctacttgcaccagtgcataagccgaagagcagaaaatgcaaggagtgccagcttctctcagggcaccagagcctcttttctcatgaggagtgacacagctgtacaaaaacttgcccagggcaatggacactgtgtcaacgggatcagtggtcaagtccatggcttctatagccttcccaagccgagccggcacaatacagaattcagagacagtacctacgacctcccccgcagcctggcctcccatggccacaccaagggcagcctcacaggctccgagacagataatgaggatgtgtacaccttcaagacgcccagcaacaccctgtgcagggagttcggggacctcctggtagacaatatggatgttccggccaccccactctcagcctaccagatccctaggacattcactctggacaaaaaccacaatgccatgacagtggccactcctggggactcagccatagctcccccaccccgcccccccaagccaagtcaggcagaaacacctcgatggggcagtcctcagcagagaccgccaatcagtgaaaatagcagatctgtcgctgccaccatccccagacgcaacaccctccctgcaatggacaacagccgacttcaccgagcttcttcctgtgagacctacgagtacccacagcgtggtggagagagtgcaggccggtctgctgaatccatgagtgatggagttggctctttcctgccagggaaaatgattgtgggccgatcggacagcaccaattctgaagacaactatgtgcccatgaatccaggttcttccaccctgttggccatggaacgagcaggtgataattcccagagcgtctacatcccaatgagcccaggggcccatcactttgactcacttggctacccatcaacaacccttcctgtgcaccgaggccccagcagaggaagtgagattcagccaccccctgtcaaccgcaacctcaaacctgatcggaaagcaaagccaacaccacttgacctgaggaacaacaccgtcatcgatgaactccccttcaagtcacctatcaccaagtcttggtctagggccaaccacaccttcaactccagctcctcccagtactgccgccccatctccacccagagcatcaccagcacagactcaggagacagcgaagagaactatgtccctatgcaaaacccagtgtctgcatctcccgttcccagtggcacgaacagtcctgcccctaagaagagcaccggcagcgttgattatctggccctggacttccagccgagctccccaagcccccaccgcaagccatctacttcatccgtcacctctgatgagaaggtggactacgttcaggtggacaaggagaagacccaggccctgcagaacaccatgcaggagtggacagacgtgcggcagtcctcagagccttccaagggtgccaagctgtgatgagagggccaccgcagagcccaggaggcagcatctccagagctggcccttcccatctcccctctcccctctcccgttcttcctcccatccacctcctctctactctgccagtctcagccttcaaagcacttgacatcagggaccctgaacccttcccctgggaggtgagggcctgatcaaggcacctcctctgcccactcggggcccagctgtgatttttatcagtaatggccatgcctccacccaccttagttaggagctacttccaaaaagcatccttcagcctcttcctgtcctttagacctgactctctaccagatgtttggagggaagggctggggctctgagccagattccacacctcacgttcagtcacagccctcagctatcttccctccggccactgggctacctctccttcagtcccagaagacaagtctcaccaacccagggagtcaaggaccagcaaaccaaagtggataatggactttttcattcctgtttttcttggcaggagagaagcaaggccactaaaagaggagatggtggagacggaggctcagcagtggtcttgaggggtaaaggacttagatgcccagatgaagagggaaagctgacatctgcagggaacccactttgaggctgaggccatggcaggacagctgctgtggggtgcagaggcagaagatgaaggacaaaaggaagggaaaactgatggccaacctagagcagcaaggagcagggcttggagctcgggtggtggagatgacaaggacactgtggggtctgggtccccagaactctggagctacaggccactctaggcccaagggctagtcctcttccccagtcccctcagaggcccccgccagccccaccttgaaagcagcatacaggggaaggcttggaccaagctgggcgaccaagcacatggggcaggaacacatggtaaaggggtggggaatatgggagggagtgtggtgtggatgggggtgatgcagggactgaggggaaccctgggacaggcacaggctgggcagaggcacagggcagtgcaggggactctgcagtggggtcgggaagtgagtttctttgcagtgagcagtgcagtggaagtcgggcacagaggtagcagacagatgtgaagcagtggtgaaggccatgtagcaagtggggaaatacatccaaagggcctgggagttggggggtgcccaacgcaatccttgggggtgcagggtggagcagaaagtgaaggagggacacgtgcaagagtggtgtgcatggtggtgtgacatgaggaccgttcctaggatgggacagtgggtcaggcaggacaaggagaaagcagggcagaatgatgcctagaggaccacatcaggcatggctgacagcttgtgcccatgggctgtggcgtatgtcagatcgcagggtaggaacgagtctggcctggtgccggcccagtgtttcctcagctcatccgccctctgttgctccctagcattccaggagccatcttggactctcctccccaggtttgaaaggccatcagattagcagggacggggtgtagggcatcacccaaggttccttctcttaaactaagggtgggggatctgaatgtttttatgttgactgttcttgactaaattttcaagagtttcagaagcaacaggacagaccagacgtttcattctaccctggggcgaacagaacttcttcctcccaaacaatgacttcctgccatgtttgatggggacagctaccactgtcctctgcccccattcccctttcagctcccatgagcatgcatagttcaccagaccaatggcctagccattctctaagtcccatcctggaagaagttatttcttcaagagctgcacctctcctcctagcattagtttagatcaactcaaggagtatttattaatggctgctgtctccagtttctggggttaagcactaaggacacaagaatcaatcagaccttctccctgaacttaagatagccacaatcagaaaaaggacaaggacatgagacagtggtgatggccatcagacagagacttcaaatgctgatggagggcagaggaagtacttagggaggttggtgtcagaggcaggagtgggggatcagggaaggtggattctaggaaaagggagtgcctgaggtaggccttagaaggggatgagtcagatttttacagaggaggagggcagggcttgggtccagtggaggaagaaggaaggagaggcttggaaagccttgtgtcttgggaaaaaaaggcctttgagcatatgggtccagccactcagaagtgcaggggccatgccttggtgttccaataagtgaatggaagcagtggtggtagctacactgggcagagttggcagggtgctggttcactctgcccagccctgaatgtgtgccttaaaggccccctacaaggggccccatacgacagagcttttaactggtgccttccctgtacccgcagcagccacaagtgggcccagactattgcagcctcccataaacatgtgagcatgttctgagtgtgccatgatgtgagtggacctggctggaatcttcggagagcgactgaggtgttcaaatcgaatctcccaggaggcttccttccagccccctattctggtaactaccaggaggcttccttccagccccctattctggtaactaccaaaatccctcgggtgcaagtgtaggggtagagatggaaggatgagaggtgaaattgaccttttgaaagcaaagctctggctcacaggccccaaactaccagccgtatctagcatatccccaccctccacccactacctcctccaacaaaggagtcaactcagttgaaaaaactggtcctttggcctatccatgggtcaaagtccacctctcctgggggcctggagaggactgagcctacggaaaggggataccttcccactcagcactgcttcacacaggccccctgcctggggctctccaaggagccttcttcacccacttccagctccacttctgcaaggttaagtcaagtgagaacgatgagaaatagggagatggtgtctccttaagtccttgatctgcctgtctgtggaatgggaggttggattagctgcgctgaggtcccatccacagctggtgctcagctgcttgaaggggagactccctcctctgtaacttctttctgggggattggggtgggcagtacctatccccagtcccctcctagcttgactttagtggtttccaatgtagaagttaacaaagtatgccccattcctgtgacaaaagcacaaccattctgaagttactggagcatgggctcagctcatcctccctctggccccttctcccatggggacatctcggcccagcacccctatcccatttccagagttcttccttccccatctgggccttcataaaatgcaggggaagccagactggtctcaggagcgctaaagcccttccgtggggggtcgtctttctgggactagccctgctgtttaggacctgggaccacaatggggtacctgccgagggggtccccaagagatccaggctgtcatgtgatttatggtggcatgtgttgtgtatttgttggctacttgtgtcttgaaatctagaattatttcacgcagaattgtcactgtttgtcaggaagagaaaatgggctagtggaagcccagtcttgagttcttgtcttgttaccatttaaaattgacatttaattttcaaatcactgttggtgcctaatcacttaagttattaatttattctgttgtattcttttttttaaattgtaacatatttatccggtgggtgggacaggagtgtgttcaagtgggtcatgtttttgctgtggtgacacatggtacaggcttggagcttgcaggtccctttctactgtggtgttggagcaggacaataaagtccactagaaatgcaccccagaaccagctgccgtgtccatcttgtcttgaggggcttggtggtggaacccgttctcactccagtctgttccaatttttgctttatttggaaataattgggtatttttcttggctgtgaataagaacaaatgctctctacctcagcgtctgttgtaaagtggaaatcatactagcatttacccatccagctttcttaggcgtctagagatgggttctgggcgtgtctgtctgctgctttcacaggtcacttagatgtgacatcttgagggtctgtgacattgggcccaaactccacaccaccatcacagcaggcagcccctggggaaggaggtaggtaaaggcttgagagctgcctcccaggtgcatcctctccacgggcagcatcacccagccctcagt

SEQ ID NO: 81355 - DNA, 406 bp, Homo sapiens
gggttagcacaggtttggaagtcagaaaacagacctgattcccatcactcaacagctgtgcagccacaggcaaagtcacttctctgaaagtaaagtgaaccacagtttcatctttgctttaaacagtatcaacagtaatcatacctaccttacaggattgtcatgaggattaaaatgaaaacatgaaaagtccttagcatggtgcatgtgtcagagtagggctcagggaaacagtgttcttactcccagaggtgtttttctgggtggtgggttagtctgttttctgcagtcactcacagttttttcctcctcgtgacagcaaaacccagtgtctgcatctccaagacatcgagacatgatcagctaatgatagcgttagcatcagaaccagcaatccaccgacgca

SEQ ID NO: 81356 - DNA, 501 bp, Homo sapiens
ataaagagctaactatctaaatatatatgcacccaaatacaggagcacccagattcataaagcgagtccttagagaactacaaagggacttagacgcccacacaataataatgggagactttaacaccccactgtcaacattagacagatcaatgagacagaaagttaactaggatatccaggaattgaactcagctctgcaaggaacccacgcgcgtgggttccttgcagaggaagtgagattcagccaccccctgtcaaccgcaacctcaaacctgatcggaaagcaaagccaacaccacttgacctgaggaacaacaccgtcatcgatgaactccccttcaagtcacctatcaccaagtcttggtctagggccaaccacaccttcaactccagctcctcccagtactgccgccccatctccacccagagcatcaccagcacagactcaggagacagcgaagagaactatgtccctatggtgagtccttcgggcttcgc

SEQ ID NO: 81357 - DNA, 3107 bp, Homo sapiens
ggcggtacctcggctctaccttgtcttgcctgaccgttcctaggatgggacagtgggtcaggcaggacaaggagaaagcagggcagaatgatgcctagaggaccacatcaggcatggctgacagcttgtgcccatgggctgtggcgtatgtcagatcgcagggtaggaacgagtctggcctggtgccggcccagtgtttcctcagctcatccgccctctgttgctccctagcattccaggagccatcttggactctcctccccaggtttgaaaggccatcagattagcagggacggggtgtagggcatcacccaaggttccttctcttaaactaagggtgggggatctgaatgtttttatgttgactgttcttgactaaattttcaagagtttcagaagcaacaggacagaccagacgtttcattctaccctggggcgaacagaacttcttcctcccaaacaatgacttcctgccatgtttgatggggacagctaccactgtcctctgcccccattcccctttcagctcccatgagcatgcatagttcaccagaccaatggcctagccattctctaagtcccatcctggaagaagttatttcttcaagagctgcacctctcctcctagcattagtttagatcaactcaaggagtatttattaatggctgctgtctccagtttctggggttaagcactaaggacacaagaatcaatcagaccttctccctgaacttaagatagccacaatcagaaaaaggacaaggacatgagacagtggtgatggccatcagacagagacttcaaatgctgatggagggcagaggaagtacttagggaggttggtgtcagaggcaggagtgggggatcagggaaggtggattctaggaaaagggagtgcctgaggtaggccttagaaggggatgagtcagatttttacagaggaggagggcagggcttgggtccagtggaggaagaaggaaggagaggcttggaaagccttgtgtcttgggaaaaaaaggcctttgagcatatgggtccagccactcagaagtgcaggggccatgccttggtgttccaataagtgaatggaagcagtggtggtagctacactgggcagagttggcagggtgctggttcactctgcccagccctgaatgtgtgccttaaaggccccctacaaggggccccatacgacagagcttttaactggtgccttccctgtacccgcagcagccacaagtgggcccagactattgcagcctcccataaacatgtgagcatgttctgagtgtgccatgatgtgagtggacctggctggaatcttcggagagcgactgaggtgttcaaatcgaatctcccaggaggcttccttccagccccctattctggtaactaccaggaggcttccttccagccccctattctggtaactaccaaaatccctcgggtgcaagtgtaggggtagagatggaaggatgagaggtgaaattgaccttttgaaagcaaagctctggctcacaggccccaaactaccagccgtatctagcatatccccaccctccacccactacctcctccaacaaaggagtcaactcagttgaaaaaactggtcctttggcctatccatgggtcaaagtccacctctcctgggggcctggagaggactgagcctacggaaaggggataccttcccactcagcactgcttcacacaggccccctgcctggggctctccaaggagccttcttcacccacttccagctccacttctgcaaggttaagtcaagtgagaacgatgagaaatagggagatggtgtctccttaagtccttgatctgcctgtctgtggaatgggaggttggattagctgcgctgaggtcccatccacagctggtgctcagctgcttgaaggggagactccctcctctgtaacttctttctgggggattggggtgggcagtacctatccccagtcccctcctagcttgactttagtggtttccaatgtagaagttaacaaagtatgccccattcctgtgacaaaagcacaaccattctgaagttactggagcatgggctcagctcatcctccctctggccccttctcccatggggacatctcggcccagcacccctatcccatttccagagttcttccttccccatctgggccttcataaaatgcaggggaagccagactggtctcaggagcgctaaagcccttccgtggggggtcgtctttctgggactagccctgctgtttaggacctgggaccacaatggggtacctgccgagggggtccccaagagatccaggctgtcatgtgatttatggtggcatgtgttgtgtatttgttggctacttgtgtcttgaaatctagaattatttcacgcagaattgtcactgtttgtcaggaagagaaaatgggctagtggaagcccagtcttgagttcttgtcttgttaccatttaaaattgacatttaattttcaaatcactgttggtgcctaatcacttaagttattaatttattctgttgtattcttttttttaaattgtaacatatttatccggtgggtgggacaggagtgtgttcaagtgggtcatgtttttgctgtggtgacacatggtacaggcttggagcttgcaggtccctttctactgtggtgttggagcaggacaataaagtccactagaaatgcaccccagaaccagctgccgtgtccatcttgtcttgaggggcttggtggtggaacccgttctcactccagtctgttccaatttttgctttatttggaaataattgggtatttttcttggctgtgaataagaacaaatgctctctacctcagcgtctgttgtaaagtggaaatcatactagcatttacccatccagctttcttaggcgtctagagatgggttctgggcgtgtctgtctgctgctttcacaggtcacttagatgtgacatcttgagggtctgtgacattgggcccaaactccacaccaccatcacagcaggcagcccctggggaaggaggtaggtaaaggcttgagagctgcctcccaggtgcatcctctccacgggcagcatcacccagccctcagt

SEQ ID NO: 81358 - DNA, 6024 bp, Homo sapiens
  misc_feature (5959)..(5959): n is a, c, g, or t
  misc_feature (5993)..(5993): n is a, c, g, or t
  misc_feature (5996)..(5996): n is a, c, g, or t
atgagcggcggcggcgacgtggtgtgcaccggctggctgaggaaatcgcctcccgagaagaagttgaggcgctatgcctggaagaaacgctggtttatcctgcggagtggccggatgagcggtgacccagatgttctggaatactacaagaacgatcactccaagaagcctctgcggatcatcaacctgaacttctgtgagcaggtagatgcaggcctgacctttaacaagaaggagctgcaggatagttttgtgtttgacatcaagaccagtgaacgcaccttttacctggtggctgagacagaagaggacatgaataagtgggtccagagcatctgccagatctgtggcttcaatcaggctgaggagagcacagactccctgagaaatgtttcctcagccggtcatggcccccgctcttctccagctgagctcagcagctctagccagcaccttctccgagagcgcaagtcctcagccccatcacactccagccagccaactctgttcacgtttgaaccccctgtgtcaaaccacatgcagcccaccttgtccaccagcgcacctcaggagtatctctacttgcaccagtgcataagccgaagagcagaaaatgcaaggagtgccagcttctctcagggcaccagagcctcttttctcatgaggagtgacacagctgtacaaaaacttgcccagggcaatggacactgtgtcaacgggatcagtggtcaagtccatggcttctatagccttcccaagccgagccggcacaatacagaattcagagacagtacctacgacctcccccgcagcctggcctcccatggccacaccaagggcagcctcacaggctccgagacagataatgaggatgtgtacaccttcaagacgcccagcaacaccctgtgcagggagttcggggacctcctggtagacaatatggatgttccggccaccccactctcagcctaccagatccctaggacattcactctggacaaaaaccacaatgccatgacagtggccactcctggggactcagccatagctcccccaccccgcccccccaagccaagtcaggcagaaacacctcgatggggcagtcctcagcagagaccgccaatcagtgaaaatagcagatctgtcgctgccaccatccccagacgcaacaccctccctgcaatggacaacagccgacttcaccgagcttcttcctgtgagacctacgagtacccacagcgtggtggagagagtgcaggccggtctgctgaatccatgagtgatggagttggctctttcctgccagggaaaatgattgtgggccgatcggacagcaccaattctgaagacaactatgtgcccatgaatccaggttcttccaccctgttggccatggaacgagcaggtgataattcccagagcgtctacatcccaatgagcccaggggcccatcactttgactcacttggctacccatcaacaacccttcctgtgcaccgaggccccagcagaggaagtgagattcagccaccccctgtcaaccgcaacctcaaacctgatcggaaagcaaagccaacaccacttgacctgaggaacaacaccgtcatcgatgaactccccttcaagtcacctatcaccaagtcttggtctagggccaaccacaccttcaactccagctcctcccagtactgccgccccatctccacccagagcatcaccagcacagactcaggagacagcgaagagaactatgtccctatgcaaaacccagtgtctgcatctcccgttcccagtggcacgaacagtcctgcccctaagaagagcaccggcagcgttgattatctggccctggacttccagccgagctccccaagcccccaccgcaagccatctacttcatccgtcacctctgatgagaaggtggactacgttcaggtggacaaggagaagacccaggccctgcagaacaccatgcaggagtggacagacgtgcggcagtcctcagagccttccaagggtgccaagctgtgatgagagggccaccgcagagcccaggaggcagcatctccagagctggcccttcccatctcccctctcccctctcccgttcttcctcccatccacctcctctctactctgccagtctcagccttcaaagcacttgacatcagggaccctgaacccttcccctgggaggtgagggcctgatcaaggcacctcctctgcccactcggggcccagctgtgatttttatcagtaatggccatgcctccacccaccttagttaggagctacttccaaaaagcatccttcagcctcttcctgtcctttagacctgactctctaccagatgtttggagggaagggctggggctctgagccagattccacacctcacgttcagtcacagccctcagctatcttccctccggccactgggctacctctccttcagtcccagaagacaagtctcaccaacccagggagtcaaggaccagcaaaccaaagtggataatggactttttcattcctgtttttcttggcaggagagaagcaaggccactaaaagaggagatggtggagacggaggctcagcagtggtcttgaggggtaaaggacttagatgcccagatgaagagggaaagctgacatctgcagggaacccactttgaggctgaggccatggcaggacagctgctgtggggtgcagaggcagaagatgaaggacaaaaggaagggaaaactgatggccaacctagagcagcaaggagcagggcttggagctcgggtggtggagatgacaaggacactgtggggtctgggtccccagaactctggagctacaggccactctaggcccaagggctagtcctcttccccagtcccctcagaggcccccgccagccccaccttgaaagcagcatacaggggaaggcttggaccaagctgggcgaccaagcacatggggcaggaacacatggtaaaggggtggggaatatgggagggagtgtggtgtggatgggggtgatgcagggactgaggggaaccctgggacaggcacaggctgggcagaggcacagggcagtgcaggggactctgcagtggggtcgggaagtgagtttctttgcagtgagcagtgcagtggaagtcgggcacagaggtagcagacagatgtgaagcagtggtgaaggccatgtagcaagtggggaaatacatccaaagggcctgggagttggggggtgcccaacgcaatccttgggggtgcagggtggagcagaaagtgaaggagggacacgtgcaagagtggtgtgcatggtggtgtgacatgaggaccgttcctaggatgggacagtgggtcaggcaggacaaggagaaagcagggcagaatgatgcctagaggaccacatcaggcatggctgacagcttgtgcccatgggctgtggcgtatgtcagatcgcagggtaggaacgagtctggcctggtgccggcccagtgtttcctcagctcatccgccctctgttgctccctagcattccaggagccatcttggactctcctccccaggtttgaaaggccatcagattagcagggacggggtgtagggcatcacccaaggttccttctcttaaactaagggtgggggatctgaatgtttttatgttgactgttcttgactaaattttcaagagtttcagaagcaacaggacagaccagacgtttcattctaccctggggcgaacagaacttcttcctcccaaacaatgacttcctgccatgtttgatggggacagctaccactgtcctctgcccccattcccctttcagctcccatgagcatgcatagttcaccagaccaatggcctagccattctctaagtcccatcctggaagaagttatttcttcaagagctgcacctctcctcctagcattagtttagatcaactcaaggagtatttattaatggctgctgtctccagtttctggggttaagcactaaggacacaagaatcaatcagaccttctccctgaacttaagatagccacaatcagaaaaaggacaaggacatgagacagtggtgatggccatcagacagagacttcaaatgctgatggagggcagaggaagtacttagggaggttggtgtcagaggcaggagtgggggatcagggaaggtggattctaggaaaagggagtgcctgaggtaggccttagaaggggatgagtcagatttttacagaggaggagggcagggcttgggtccagtggaggaagaaggaaggagaggcttggaaagccttgtgtcttgggaaaaaaaggcctttgagcatatgggtccagccactcagaagtgcaggggccatgccttggtgttccaataagtgaatggaagcagtggtggtagctacactgggcagagttggcagggtgctggttcactctgcccagccctgaatgtgtgccttaaaggccccctacaaggggccccatacgacagagcttttaactggtgccttccctgtacccgcagcagccacaagtgggcccagactattgcagcctcccataaacatgtgagcatgttctgagtgtgccatgatgtgagtggacctggctggaatcttcggagagcgactgaggtgttcaaatcgaatctcccaggaggcttccttccagccccctattctggtaactaccaggaggcttccttccagccccctattctggtaactaccaaaatccctcgggtgcaagtgtaggggtagagatggaaggatgagaggtgaaattgaccttttgaaagcaaagctctggctcacaggccccaaactaccagccgtatctagcatatccccaccctccacccactacctcctccaacaaaggagtcaactcagttgaaaaaactggtcctttggcctatccatgggtcaaagtccacctctcctgggggcctggagaggactgagcctacggaaaggggataccttcccactcagcactgcttcacacaggccccctgcctggggctctccaaggagccttcttcacccacttccagctccacttctgcaaggttaagtcaagtgagaacgatgagaaatagggagatggtgtctccttaagtccttgatctgcctgtctgtggaatgggaggttggattagctgcgctgaggtcccatccacagctggtgctcagctgcttgaaggggagactccctcctctgtaacttctttctgggggattggggtgggcagtacctatccccagtcccctcctagcttgactttagtggtttccaatgtagaagttaacaaagtatgccccattcctgtgacaaaagcacaaccattctgaagttactggagcatgggctcagctcatcctccctctggccccttctcccatggggacatctcggcccagcacccctatcccatttccagagttcttccttccccatctgggccttcataaaatgcaggggaagccagactggtctcaggagcgctaaagcccttccgtggggggtcgtctttctgggactagccctgctgtttaggacctgggaccacaatggggtacctgccgagggggtccccaagagatccaggctgtcatgtgatttatggtggcatgtgttgtgtatttgttggctacttgtgtcttgaaatctagaattatttcacgcagaattgtcactgtttgtcaggaagagaaaatgggctagtggaagcccagtcttgagttcttgtcttgttaccatttaaaattgacatttaattttcaaatcactgttggtgcctaatcacttaagttattaatttattctgttgtattcttttttttaaattgtaacatatttatccggtgggtgggacaggagtgtgttcaagtgggtcatgtttttgctgtggtgacacatggtactaactgcaggtgcagtccctcttctantctcgtatagactgccttgtgaggggcccgagcnccnacatgaatagtacacacatatagatgta

SEQ ID NO: 81359 - DNA, 5800 bp, Homo sapiens
  misc_feature (5753)..(5753): n is a, c, g, or t
atgagcggcggcggcgacgtggtgtgcaccggctggctgaggaaatcgcctcccgagaagaagttgaggcgctatgcctggaagaaacgctggtttatcctgcggagtggccggatgagcggtgacccagatgttctggaatactacaagaacgatcactccaagaagcctctgcggatcatcaacctgaacttctgtgagcaggtagatgcaggcctgacctttaacaagaaggagctgcaggatagttttgtgtttgacatcaagaccagtgaacgcaccttttacctggtggctgagacagaagaggacatgaataagtgggtccagagcatctgccagatctgtggcttcaatcaggctgaggagagcacagactccctgagaaatgtttcctcagccggtcatggcccccgctcttctccagctgagctcagcagctctagccagcaccttctccgagagcgcaagtcctcagccccatcacactccagccagccaactctgttcacgtttgaaccccctgtgtcaaaccacatgcagcccaccttgtccaccagcgcacctcaggagtatctctacttgcaccagtgcataagccgaagagcagaaaatgcaaggagtgccagcttctctcagggcaccagagcctcttttctcatgaggagtgacacagctgtacaaaaacttgcccagggcaatggacactgtgtcaacgggatcagtggtcaagtccatggcttctatagccttcccaagccgagccggcacaatacagaattcagagacagtacctacgacctcccccgcagcctggcctcccatggccacaccaagggcagcctcacaggctccgagacagataatgaggatgtgtacaccttcaagacgcccagcaacaccctgtgcagggagttcggggacctcctggtagacaatatggatgttccggccaccccactctcagcctaccagatccctaggacattcactctggacaaaaaccacaatgccatgacagtggccactcctggggactcagccatagctcccccaccccgcccccccaagccaagtcaggcagaaacacctcgatggggcagtcctcagcagagaccgccaatcagtgaaaatagcagatctgtcgctgccaccatccccagacgcaacaccctccctgcaatggacaacagccgacttcaccgagcttcttcctgtgagacctacgagtacccacagcgtggtggagagagtgcaggccggtctgctgaatccatgagtgatggagttggctctttcctgccagggaaaatgattgtgggccgatcggacagcaccaattctgaagacaactatgtgcccatgaatccaggttcttccaccctgttggccatggaacgagcaggtgataattcccagagcgtctacatcccaatgagcccaggggcccatcactttgactcacttggctacccatcaacaacccttcctgtgcaccgaggccccagcagaggaagtgagattcagccaccccctgtcaaccgcaacctcaaacctgatcggaaagcaaagccaacaccacttgacctgaggaacaacaccgtcatcgatgaactccccttcaagtcacctatcaccaagtcttggtctagggccaaccacaccttcaactccagctcctcccagtactgccgccccatctccacccagagcatcaccagcacagactcaggagacagcgaagagaactatgtccctatgcaaaacccagtgtctgcatctcccgttcccagtggcacgaacagtcctgcccctaagaagagcaccggcagcgttgattatctggccctggacttccagccgagctccccaagcccccaccgcaagccatctacttcatccgtcacctctgatgagaaggtggactacgttcaggtggacaaggagaagacccaggccctgcagaacaccatgcaggagtggacagacgtgcggcagtcctcagagccttccaagggtgccaagctgtgatgagagggccaccgcagagcccaggaggcagcatctccagagctggcccttcccatctcccctctcccctctcccgttcttcctcccatccacctcctctctactctgccagtctcagccttcaaagcacttgacatcagggaccctgaacccttcccctgggaggtgagggcctgatcaaggcacctcctctgcccactcggggcccagctgtgatttttatcagtaatggccatgcctccacccaccttagttaggagctacttccaaaaagcatccttcagcctcttcctgtcctttagacctgactctctaccagatgtttggagggaagggctggggctctgagccagattccacacctcacgttcagtcacagccctcagctatcttccctccggccactgggctacctctccttcagtcccagaagacaagtctcaccaacccagggagtcaaggaccagcaaaccaaagtggataatggactttttcattcctgtttttcttggcaggagagaagcaaggccactaaaagaggagatggtggagacggaggctcagcagtggtcttgaggggtaaaggacttagatgcccagatgaagagggaaagctgacatctgcagggaacccactttgaggctgaggccatggcaggacagctgctgtggggtgcagaggcagaagatgaaggacaaaaggaagggaaaactgatggccaacctagagcagcaaggagcagggcttggagctcgggtggtggagatgacaaggacactgtggggtctgggtccccagaactctggagctacaggccactctaggcccaagggctagtcctcttccccagtcccctcagaggcccccgccagccccaccttgaaagcagcatacaggggaaggcttggaccaagctgggcgaccaagcacatggggcaggaacacatggtaaaggggtggggaatatgggagggagtgtggtgtggatgggggtgatgcagggactgaggggaaccctgggacaggcacaggctgggcagaggcacagggcagtgcaggggactctgcagtggggtcgggaagtgagtttctttgcagtgagcagtgcagtggaagtcgggcacagaggtagcagacagatgtgaagcagtggtgaaggccatgtagcaagtggggaaatacatccaaagggcctgggagttggggggtgcccaacgcaatccttgggggtgcagggtggagcagaaagtgaaggagggacacgtgcaagagtggtgtgcatggtggtgtgacatgaggaccgttcctaggatgggacagtgggtcaggcaggacaaggagaaagcagggcagaatgatgcctagaggaccacatcaggcatggctgacagcttgtgcccatgggctgtggcgtatgtcagatcgcagggtaggaacgagtctggcctggtgccggcccagtgtttcctcagctcatccgccctctgttgctccctagcattccaggagccatcttggactctcctccccaggtttgaaaggccatcagattagcagggacggggtgtagggcatcacccaaggttccttctcttaaactaagggtgggggatctgaatgtttttatgttgactgttcttgactaaattttcaagagtttcagaagcaacaggacagaccagacgtttcattctaccctggggcgaacagaacttcttcctcccaaacaatgacttcctgccatgtttgatggggacagctaccactgtcctctgcccccattcccctttcagctcccatgagcatgcatagttcaccagaccaatggcctagccattctctaagtcccatcctggaagaagttatttcttcaagagctgcacctctcctcctagcattagtttagatcaactcaaggagtatttattaatggctgctgtctccagtttctggggttaagcactaaggacacaagaatcaatcagaccttctccctgaacttaagatagccacaatcagaaaaaggacaaggacatgagacagtggtgatggccatcagacagagacttcaaatgctgatggagggcagaggaagtacttagggaggttggtgtcagaggcaggagtgggggatcagggaaggtggattctaggaaaagggagtgcctgaggtaggccttagaaggggatgagtcagatttttacagaggaggagggcagggcttgggtccagtggaggaagaaggaaggagaggcttggaaagccttgtgtcttgggaaaaaaaggcctttgagcatatgggtccagccactcagaagtgcaggggccatgccttggtgttccaataagtgaatggaagcagtggtggtagctacactgggcagagttggcagggtgctggttcactctgcccagccctgaatgtgtgccttaaaggccccctacaaggggccccatacgacagagcttttaactggtgccttccctgtacccgcagcagccacaagtgggcccagactattgcagcctcccataaacatgtgagcatgttctgagtgtgccatgatgtgagtggacctggctggaatcttcggagagcgactgaggtgttcaaatcgaatctcccaggaggcttccttccagccccctattctggtaactaccaggaggcttccttccagccccctattctggtaactaccaaaatccctcgggtgcaagtgtaggggtagagatggaaggatgagaggtgaaattgaccttttgaaagcaaagctctggctcacaggccccaaactaccagccgtatctagcatatccccaccctccacccactacctcctccaacaaaggagtcaactcagttgaaaaaactggtcctttggcctatccatgggtcaaagtccacctctcctgggggcctggagaggactgagcctacggaaaggggataccttcccactcagcactgcttcacacaggccccctgcctggggctctccaaggagccttcttcacccacttccagctccacttctgcaaggttaagtcaagtgagaacgatgagaaatagggagatggtgtctccttaagtccttgatctgcctgtctgtggaatgggaggttggattagctgcgctgaggtcccatccacagctggtgctcagctgcttgaaggggagactccctcctctgtaacttctttctgggggattggggtgggcagtacctatccccagtcccctcctagcttgactttagtggtttccaatgtagaagttaacaaagtatgccccattcctgtgacaaaagcacaaccattctgaagttactggagcatgggctcagctcatcctccctctggccccttctcccatggggacatctcggcccagcacccctatcccatttccagagttcttccttccccatctgggccttcataaaatgcaggggaagccagactggtctcaggagcgctaaagcccttccgtggggggtcgtctttctgggactagccctgctgtttaggacctgggaccacaatggggtacctgccgagggggtccccaagagatccaggctgtcatgtgatttatggtggcatgtgttgtgtatttgttggctacttgtgtcttgaaatctagaattatttcacgcagaattgtcactgtttgtcaggaagagaaaatgggctagtggaagcccagtctgtataangcgtcggtaccattaaatacataccgtcgcggggggggcgggtccgt

SEQ ID NO: 81360 - DNA, 5863 bp, Homo sapiens
atgagcggcggcggcgacgtggtgtgcaccggctggctgaggaaatcgcctcccgagaagaagttgaggcgctatgcctggaagaaacgctggtttatcctgcggagtggccggatgagcggtgacccagatgttctggaatactacaagaacgatcactccaagaagcctctgcggatcatcaacctgaacttctgtgagcaggtagatgcaggcctgacctttaacaagaaggagctgcaggatagttttgtgtttgacatcaagaccagtgaacgcaccttttacctggtggctgagacagaagaggacatgaataagtgggtccagagcatctgccagatctgtggcttcaatcaggctgaggagagcacagactccctgagaaatgtttcctcagccggtcatggcccccgctcttctccagctgagctcagcagctctagccagcaccttctccgagagcgcaagtcctcagccccatcacactccagccagccaactctgttcacgtttgaaccccctgtgtcaaaccacatgcagcccaccttgtccaccagcgcacctcaggagtatctctacttgcaccagtgcataagccgaagagcagaaaatgcaaggagtgccagcttctctcagggcaccagagcctcttttctcatgaggagtgacacagctgtacaaaaacttgcccagggcaatggacactgtgtcaacgggatcagtggtcaagtccatggcttctatagccttcccaagccgagccggcacaatacagaattcagagacagtacctacgacctcccccgcagcctggcctcccatggccacaccaagggcagcctcacaggctccgagacagataatgaggatgtgtacaccttcaagacgcccagcaacaccctgtgcagggagttcggggacctcctggtagacaatatggatgttccggccaccccactctcagcctaccagatccctaggacattcactctggacaaaaaccacaatgccatgacagtggccactcctggggactcagccatagctcccccaccccgcccccccaagccaagtcaggcagaaacacctcgatggggcagtcctcagcagagaccgccaatcagtgaaaatagcagatctgtcgctgccaccatccccagacgcaacaccctccctgcaatggacaacagccgacttcaccgagcttcttcctgtgagacctacgagtacccacagcgtggtggagagagtgcaggccggtctgctgaatccatgagtgatggagttggctctttcctgccagggaaaatgattgtgggccgatcggacagcaccaattctgaagacaactatgtgcccatgaatccaggttcttccaccctgttggccatggaacgagcaggtgataattcccagagcgtctacatcccaatgagcccaggggcccatcactttgactcacttggctacccatcaacaacccttcctgtgcaccgaggccccagcagaggaagtgagattcagccaccccctgtcaaccgcaacctcaaacctgatcggaaagcaaagccaacaccacttgacctgaggaacaacaccgtcatcgatgaactccccttcaagtcacctatcaccaagtcttggtctagggccaaccacaccttcaactccagctcctcccagtactgccgccccatctccacccagagcatcaccagcacagactcaggagacagcgaagagaactatgtccctatgcaaaacccagtgtctgcatctcccgttcccagtggcacgaacagtcctgcccctaagaagagcaccggcagcgttgattatctggccctggacttccagccgagctccccaagcccccaccgcaagccatctacttcatccgtcacctctgatgagaaggtggactacgttcaggtggacaaggagaagacccaggccctgcagaacaccatgcaggagtggacagacgtgcggcagtcctcagagccttccaagggtgccaagctgtgatgagagggccaccgcagagcccaggaggcagcatctccagagctggcccttcccatctcccctctcccctctcccgttcttcctcccatccacctcctctctactctgccagtctcagccttcaaagcacttgacatcagggaccctgaacccttcccctgggaggtgagggcctgatcaaggcacctcctctgcccactcggggcccagctgtgatttttatcagtaatggccatgcctccacccaccttagttaggagctacttccaaaaagcatccttcagcctcttcctgtcctttagacctgactctctaccagatgtttggagggaagggctggggctctgagccagattccacacctcacgttcagtcacagccctcagctatcttccctccggccactgggctacctctccttcagtcccagaagacaagtctcaccaacccagggagtcaaggaccagcaaaccaaagtggataatggactttttcattcctgtttttcttggcaggagagaagcaaggccactaaaagaggagatggtggagacggaggctcagcagtggtcttgaggggtaaaggacttagatgcccagatgaagagggaaagctgacatctgcagggaacccactttgaggctgaggccatggcaggacagctgctgtggggtgcagaggcagaagatgaaggacaaaaggaagggaaaactgatggccaacctagagcagcaaggagcagggcttggagctcgggtggtggagatgacaaggacactgtggggtctgggtccccagaactctggagctacaggccactctaggcccaagggctagtcctcttccccagtcccctcagaggcccccgccagccccaccttgaaagcagcatacaggggaaggcttggaccaagctgggcgaccaagcacatggggcaggaacacatggtaaaggggtggggaatatgggagggagtgtggtgtggatgggggtgatgcagggactgaggggaaccctgggacaggcacaggctgggcagaggcacagggcagtgcaggggactctgcagtggggtcgggaagtgagtttctttgcagtgagcagtgcagtggaagtcgggcacagaggtagcagacagatgtgaagcagtggtgaaggccatgtagcaagtggggaaatacatccaaagggcctgggagttggggggtgcccaacgcaatccttgggggtgcagggtggagcagaaagtgaaggagggacacgtgcaagagtggtgtgcatggtggtgtgacatgaggaccgttcctaggatgggacagtgggtcaggcaggacaaggagaaagcagggcagaatgatgcctagaggaccacatcaggcatggctgacagcttgtgcccatgggctgtggcgtatgtcagatcgcagggtaggaacgagtctggcctggtgccggcccagtgtttcctcagctcatccgccctctgttgctccctagcattccaggagccatcttggactctcctccccaggtttgaaaggccatcagattagcagggacggggtgtagggcatcacccaaggttccttctcttaaactaagggtgggggatctgaatgtttttatgttgactgttcttgactaaattttcaagagtttcagaagcaacaggacagaccagacgtttcattctaccctggggcgaacagaacttcttcctcccaaacaatgacttcctgccatgtttgatggggacagctaccactgtcctctgcccccattcccctttcagctcccatgagcatgcatagttcaccagaccaatggcctagccattctctaagtcccatcctggaagaagttatttcttcaagagctgcacctctcctcctagcattagtttagatcaactcaaggagtatttattaatggctgctgtctccagtttctggggttaagcactaaggacacaagaatcaatcagaccttctccctgaacttaagatagccacaatcagaaaaaggacaaggacatgagacagtggtgatggccatcagacagagacttcaaatgctgatggagggcagaggaagtacttagggaggttggtgtcagaggcaggagtgggggatcagggaaggtggattctaggaaaagggagtgcctgaggtaggccttagaaggggatgagtcagatttttacagaggaggagggcagggcttgggtccagtggaggaagaaggaaggagaggcttggaaagccttgtgtcttgggaaaaaaaggcctttgagcatatgggtccagccactcagaagtgcaggggccatgccttggtgttccaataagtgaatggaagcagtggtggtagctacactgggcagagttggcagggtgctggttcactctgcccagccctgaatgtgtgccttaaaggccccctacaaggggccccatacgacagagcttttaactggtgccttccctgtacccgcagcagccacaagtgggcccagactattgcagcctcccataaacatgtgagcatgttctgagtgtgccatgatgtgagtggacctggctggaatcttcggagagcgactgaggtgttcaaatcgaatctcccaggaggcttccttccagccccctattctggtaactaccaggaggcttccttccagccccctattctggtaactaccaaaatccctcgggtgcaagtgtaggggtagagatggaaggatgagaggtgaaattgaccttttgaaacacaaccattctgaagttactggagcatgggctcagctcatcctccctctggccccttctcccatggggacatctcggcccagcacccctatcccatttccagagttcttccttccccatctgggccttcataaaatgcaggggaagccagactggtctcaggagcgctaaagcccttccgtggggggtcgtctttctgggactagccctgctgtttaggacctgggaccacaatggggtacctgccgagggggtccccaagagatccaggctgtcatgtgatttatggtggcatgtgttgtgtatttgttggctacttgtgtcttgaaatctagaattatttcacgcagaattgtcactgtttgtcaggaagagaaaatgggctagtggaagcccagtcttgagttcttgtcttgttaccatttaaaattgacatttaattttcaaatcactgttggtgcctaatcacttaagttattaatttattctgttgtattcttttttttaaattgtaacatatttatccggtgggtgggacaggagtgtgttcaagtgggtcatgtttttgctgtggtgacacatggtacaggcttggagcttgcaggtccctttctactgtggtgttggagcaggacaataaagtccactagaaatgcaccccagaaccagctgccgtgtccatcttgtcttgaggggcttggtggtggaacccgttctcactccagtctgttccaatttttgctttatttggaaataattgggtatttttcttggctgtgaataagaacaaatgctctctacctcagcgtctgttgtaaagtggaaatcatactagcatttacccatccagctttcttaggcgtctagagatgggttctgggcgtgtctgtctgctgctttcacaggtcacttagatgtgacatcttgagggtctgtgacattgggcccaaactccacaccaccatcacagcaggcagcccctggggaaggaggtaggtaaaggcttgagagctgcctcccaggtgcatcctctccacgggcagcatcacccagccctcagt

SEQ ID NO: 81361 - DNA, 1853 bp, Homo sapiens
atgagcggcggcggcgacgtggtgtgcaccggctggctgaggaaatcgcctcccgagaagaagttgaggcgctatgcctggaagaaacgctggtttatcctgcggagtggccggatgagcggtgacccagatgttctggaatactacaagaacgatcactccaagaagcctctgcggatcatcaacctgaacttctgtgagcaggtagatgcaggcctgacctttaacaagaaggagctgcaggatagttttgtgtttgacatcaagaccagtgaacgcaccttttacctggtggctgagacagaagaggacatgaataagtgggtccagagcatctgccagatctgtggcttcaatcaggctgaggagagcacagactccctgagaaatgtttcctcagccggtcatggcccccgctcttctccagctgagctcagcagctctagccagcaccttctccgagagcgcaagtcctcagccccatcacactccagccagccaactctgttcacgtttgaaccccctgtgtcaaaccacatgcagcccaccttgtccaccagcgcacctcaggagtatctctacttgcaccagtgcataagccgaagagcagaaaatgcaaggagtgccagcttctctcagggcaccagagcctcttttctcatgaggagtgacacagctgtacaaaaacttgcccagggcaatggacactgtgtcaacgggatcagtggtcaagtccatggcttctatagccttcccaagccgagccggcacaatacagaattcagagacagtacctacgacctcccccgcagcctggcctcccatggccacaccaagggcagcctcacaggctccgagacagataatgaggatgtgtacaccttcaagacgcccaagttcttccttccccatctgggccttcataaaatgcaggggaagccagactggtctcaggagcgctaaagcccttccgtggggggtcgtctttctgggactagccctgctgtttaggacctgggaccacaatggggtacctgccgagggggtccccaagagatccaggctgtcatgtgatttatggtggcatgtgttgtgtatttgttggctacttgtgtcttgaaatctagaattatttcacgcagaattgtcactgtttgtcaggaagagaaaatgggctagtggaagcccagtcttgagttcttgtcttgttaccatttaaaattgacatttaattttcaaatcactgttggtgcctaatcacttaagttattaatttattctgttgtattcttttttttaaattgtaacatatttatccggtgggtgggacaggagtgtgttcaagtgggtcatgtttttgctgtggtgacacatggtacaggcttggagcttgcaggtccctttctactgtggtgttggagcaggacaataaagtccactagaaatgcaccccagaaccagctgccgtgtccatcttgtcttgaggggcttggtggtggaacccgttctcactccagtctgttccaatttttgctttatttggaaataattgggtatttttcttggctgtgaataagaacaaatgctctctacctcagcgtctgttgtaaagtggaaatcatactagcatttacccatccagctttcttaggcgtctagagatgggttctgggcgtgtctgtctgctgctttcacaggtcacttagatgtgacatcttgagggtctgtgacattgggcccaaactccacaccaccatcacagcaggcagcccctggggaaggaggtaggtaaaggcttgagagctgcctcccaggtgcatcctctccacgggcagcatcacccagccctcagt

SEQ ID NO: 81362 - DNA, 863 bp, Homo sapiens
ctcgataagggccaagggatgctggtccgagatgtcaccatgggagaaggggccagagggaggatgagctgagcccatgctccagtaacttcagaatgtgttgtgtatttgttggctacttgtgtcttgaaatctagaattatttcacgcagaattgtcactgtttgtcaggaagagaaaatgggctagtggaagcccagtcttgagttcttgtcttgttaccatttaaaattgacatttaattttcaaatcactgttggtgcctaatcacttaagttattaatttattctgttgtattcttttttttaaattgtaacatatttatccggtgggtgggacaggagtgtgttcaagtgggtcatgtttttgctgtggtgacacatggtacaggcttggagcttgcaggtccctttctactgtggtgttggagcaggacaataaagtccactagaaatgcaccccagaaccagctgccgtgtccatcttgtcttgaggggcttggtggtggaacccgttctcactccagtctgttccaatttttgctttatttggaaataattgggtatttttcttggctgtgaataagaacaaatgctctctacctcagcgtctgttgtaaagtggaaatcatactagcatttacccatccagctttcttaggcgtctagagatgggttctgggcgtgtctgtctgctgctttcacaggtcacttagatgtgacatcttgagggtctgtgacattgggcccaaactccacaccaccatcacagcaggcagcccctggggaaggaggtaggtaaaggcttgagagctgcctcccaggtgcatcctctccacgggcagcatcacccagccctcagt

SEQ ID NO: 81363 - DNA, 597 bp, Homo sapiens
atgagcggcggcggcgacgtggtgtgcaccggctggctgaggaaatcgcctcccgagaagaagttgaggcgctatgcctggaagaaacgctggtttatcctgcggagtggccggatgagcggtgacccagatgttctggaatactacaagaacgatcactccaagaagcctctgcggatcatcaacctgaacttctgtgagcaggtagatgcaggcctgacctttaacaagaaggagctgcaggatagttttgtgtttgacatcaagaccagtgaacgcaccttttacctggtggctgagacagaagaggacatgaataagtgggtccagagcatctgccagatctgtggcttcaatcaggctgaggagagcacagactccctgagaaatgtttcctcagccggtcatggcccccgctcttctccagctgagctcagcagctctagccagcaccttctccgagagcgcaagtcctcagccccatcacactccagccagccaactctgttcacgtttgaaccccctgtgtcaaaccacatgcagctcgcccctgagttaaccactcgcccctgtattaaccgctcgcccctgatcacg

SEQ ID NO: 81364 - DNA, 389 bp, Homo sapiens
gttgtcaaaccctgtgtccccacttttgattctgaaaatataattaccatagatacagcagaaagaatatataatttggaatctgaagacatgacttcaaggctcatcaatatgggcaaagattatacaacctcgctgagcgtcagtttccctgtgtgaaactggaatgactttgcaggcctttataaacatgctcatgtgttatatataaggtgtgtatgtgtagcattatcattactggctgattaccagactttcttttcctgctccagcaaagccaacaccacttgacctgaggaacaacaccgtcatcgatgaactccccttcaagtcacctatcaccaagtcttggtctagggccaagtaagtgcgtatgtgtgggggtggga

SEQ ID NO: 81365 - DNA, 451 bp, Homo sapiens
agtcctcagccccatcacactccagccagccaactctgttcacgtttgaaccccctgtgtcaaaccacatgcagcccaccttgtccaccagcgcacctcaggagtatctctacttgcaccagtgcataagccgaagagcagaaaatgcaaggtaggaggctgccacagccattaggtgggttagtgaccgctcacagggcctagtacttttcagtccttgcttttttaaagacaagcaaaacattatatcgtttcaggtagacaaacacgtctatgacaaaacataattttttgcttctgtagccttcatattttattggcatcatctgtgttgctacacagtgataactgggtgccagagaaacttttcattatcaaaaatcatgctataaaaaatgtttgatttggaggcaggggtgaaggcattaggggacacagtttccgaattgca

SEQ ID NO: 81366 - DNA, 6406 bp, Homo sapiens
atgagcggcggcggcgacgtggtgtgcaccggctggctgaggaaatcgcctcccgagaagaagttgaggcgctatgcctggaagaaacgctggtttatcctgcggagtggccggatgagcggtgacccagatgttctggaatactacaagaacgatcactccaagaagcctctgcggatcatcaacctgaacttctgtgagcaggtagatgcaggcctgacctttaacaagaaggagctgcaggatagttttgtgtttgacatcaagaccagtgaacgcaccttttacctggtggctgagacagaagaggacatgaataagtgggtccagagcatctgccagatctgtggcttcaatcaggctgaggagagcacagactccctgagaaatgtttcctcagccggtcatggcccccgctcttctccagctgagctcagcagctctagccagcaccttctccgagagcgcaagtcctcagccccatcacactccagccagccaactctgttcacgtttgaaccccctgtgtcaaaccacatgcagcccaccttgtccaccagcgcacctcaggagtatctctacttgcaccagtgcataagccgaagagcagaaaatgcaaggagtgccagcttctctcagggcaccagagcctcttttctcatgaggagtgacacagctgtacaaaaacttgcccagggcaatggacactgtgtcaacgggatcagtggtcaagtccatggcttctatagccttcccaagccgagccggcacaatacagaattcagagacagtacctacgacctcccccgcagcctggcctcccatggccacaccaagggcagcctcacaggctccgagacagataatgaggatgtgtacaccttcaagacgcccagcaacaccctgtgcagggagttcggggacctcctggtagacaatatggatgttccggccaccccactctcagcctaccagatccctaggacattcactctggacaaaaaccacaatgccatgacagtggccactcctggggactcagccatagctcccccaccccgcccccccaagccaagtcaggcagaaacacctcgatggggcagtcctcagcagagaccgccaatcagtgaaaatagcagatctgtcgctgccaccatccccagacgcaacaccctccctgcaatggacaacagccgacttcaccgagcttcttcctgtgagacctacgagtacccacagcgtggtggagagagtgcaggccggtctgctgaatccatgagtgatggagttggctctttcctgccagggaaaatgattgtgggccgatcggacagcaccaattctgaagacaactatgtgcccatgaatccaggttcttccaccctgttggccatggaacgagcaggtgataattcccagagcgtctacatcccaatgagcccaggggcccatcactttgactcacttggctacccatcaacaacccttcctgtgcaccgaggccccagcagaggaagtgagattcagccaccccctgtcaaccgcaacctcaaacctgatcggaaagcaaagccaacaccacttgacctgaggaacaacaccgtcatcgatgaactccccttcaagtcacctatcaccaagtcttggtctagggccaaccacaccttcaactccagctcctcccagtactgccgccccatctccacccagagcatcaccagcacagactcaggagacagcgaagagaactatgtccctatgcaaaacccagtgtctgcatctcccgttcccagtggcacgaacagtcctgcccctaagaagagcaccggcagcgttgattatctggccctggacttccagccgagctccccaagcccccaccgcaagccatctacttcatccgtcacctctgatgagaaggtggactacgttcaggtggacaaggagaagacccaggccctgcagaacaccatgcaggagtggacagacgtgcggcagtcctcagagccttccaagggtgccaagctgtgatgagagggccaccgcagagcccaggaggcagcatctccagagctggcccttcccatctcccctctcccctctcccgttcttcctcccatccacctcctctctactctgccagtctcagccttcaaagcacttgacatcagggaccctgaacccttcccctgggaggtgagggcctgatcaaggcacctcctctgcccactcggggcccagctgtgatttttatcagtaatggccatgcctccacccaccttagttaggagctacttccaaaaagcatccttcagcctcttcctgtcctttagacctgactctctaccagatgtttggagggaagggctggggctctgagccagattccacacctcacgttcagtcacagccctcagctatcttccctccggccactgggctacctctccttcagtcccagaagacaagtctcaccaacccagggagtcaaggaccagcaaaccaaagtggataatggactttttcattcctgtttttcttggcaggagagaagcaaggccactaaaagaggagatggtggagacggaggctcagcagtggtcttgaggggtaaaggacttagatgcccagatgaagagggaaagctgacatctgcagggaacccactttgaggctgaggccatggcaggacagctgctgtggggtgcagaggcagaagatgaaggacaaaaggaagggaaaactgatggccaacctagagcagcaaggagcagggcttggagctcgggtggtggagatgacaaggacactgtggggtctgggtccccagaactctggagctacaggccactctaggcccaagggctagtcctcttccccagtcccctcagaggcccccgccagccccaccttgaaagcagcatacaggggaaggcttggaccaagctgggcgaccaagcacatggggcaggaacacatggtaaaggggtggggaatatgggagggagtgtggtgtggatgggggtgatgcagggactgaggggaaccctgggacaggcacaggctgggcagaggcacagggcagtgcaggggactctgcagtggggtcgggaagtgagtttctttgcagtgagcagtgcagtggaagtcgggcacagaggtagcagacagatgtgaagcagtggtgaaggccatgtagcaagtggggaaatacatccaaagggcctgggagttggggggtgcccaacgcaatccttgggggtgcagggtggagcagaaagtgaaggagggacacgtgcaagagtggtgtgcatggtggtgtgacatgaggaccgttcctaggatgggacagtgggtcaggcaggacaaggagaaagcagggcagaatgatgcctagaggaccacatcaggcatggctgacagcttgtgcccatgggctgtggcgtatgtcagatcgcagggtaggaacgagtctggcctggtgccggcccagtgtttcctcagctcatccgccctctgttgctccctagcattccaggagccatcttggactctcctccccaggtttgaaaggccatcagattagcagggacggggtgtagggcatcacccaaggttccttctcttaaactaagggtgggggatctgaatgtttttatgttgactgttcttgactaaattttcaagagtttcagaagcaacaggacagaccagacgtttcattctaccctggggcgaacagaacttcttcctcccaaacaatgacttcctgccatgtttgatggggacagctaccactgtcctctgcccccattcccctttcagctcccatgagcatgcatagttcaccagaccaatggcctagccattctctaagtcccatcctggaagaagttatttcttcaagagctgcacctctcctcctagcattagtttagatcaactcaaggagtatttattaatggctgctgtctccagtttctggggttaagcactaaggacacaagaatcaatcagaccttctccctgaacttaagatagccacaatcagaaaaaggacaaggacatgagacagtggtgatggccatcagacagagacttcaaatgctgatggagggcagaggaagtacttagggaggttggtgtcagaggcaggagtgggggatcagggaaggtggattctaggaaaagggagtgcctgaggtaggccttagaaggggatgagtcagatttttacagaggaggagggcagggcttgggtccagtggaggaagaaggaaggagaggcttggaaagccttgtgtcttgggaaaaaaaggcctttgagcatatgggtccagccactcagaagtgcaggggccatgccttggtgttccaataagtgaatggaagcagtggtggtagctacactgggcagagttggcagggtgctggttcactctgcccagccctgaatgtgtgccttaaaggccccctacaaggggccccatacgacagagcttttaactggtgccttccctgtacccgcagcagccacaagtgggcccagactattgcagcctcccataaacatgtgagcatgttctgagtgtgccatgatgtgagtggacctggctggaatcttcggagagcgactgaggtgttcaaatcgaatctcccaggaggcttccttccagccccctattctggtaactaccaggaggcttccttccagccccctattctggtaactaccaaaatccctcgggtgcaagtgtaggggtagagatggaaggatgagaggtgaaattgaccttttgaaagcaaagctctggctcacaggccccaaactaccagccgtatctagcatatccccaccctccacccactacctcctccaacaaaggagtcaactcagttgaaaaaactggtcctttggcctatccatgggtcaaagtccacctctcctgggggcctggagaggactgagcctacggaaaggggataccttcccactcagcactgcttcacacaggccccctgcctggggctctccaaggagccttcttcacccacttccagctccacttctgcaaggttaagtcaagtgagaacgatgagaaatagggagatggtgtctccttaagtccttgatctgcctgtctgtggaatgggaggttggattagctgcgctgaggtcccatccacagctggtgctcagctgcttgaaggggagactccctcctctgtaacttctttctgggggattggggtgggcagtacctatccccagtcccctcctagcttgactttagtggtttccaatgtagaagttaacaaagtatgccccattcctgtgacaaaagcacaaccattctgaagttactggagcatgggctcagctcatcctccctctggccccttctcccatggggacatctcggcccagcacccctatcccatttccagagttcttccttccccatctgggccttcataaaatgcaggggaagccagactggtctcaggagcgctaaagcccttccgtggggggtcgtctttctgggactagccctgctgtttaggacctgggaccacaatggggtacctgccgagggggtccccaagagatccaggctgtcatgtgatttatggtggcatgtgttgtgtatttgttggctacttgtgtcttgaaatctagaattatttcacgcagaattgtcactgtttgtcaggaagagaaaatgggctagtggaagcccagtcttgagttcttgtcttgttaccatttaaaattgacatttaattttcaaatcactgttggtgcctaatcacttaagttattaatttattctgttgtattcttttttttaaattgtaacatatttatccggtgggtgggacaggagtgtgttcaagtgggtcatgtttttgctgtggtgacacatggtacaggcttggagcttgcaggtccctttctactgtggtgttggagcaggacaataaagtccactagaaatgcaccccagaaccagctgccgtgtccatcttgtcttgaggggcttggtggtggaacccgttctcactccagtctgttccaatttttgctttatttggaaataattgggtatttttcttggctgtgaataagaacaaatgctctctacctcagcgtctgttgtaaagtggaaatcatactagcatttacccatccagctttcttaggcgtctagagatgggttctgggcgtgtctgtctgctgctttcacaggtcacttagatgtgacatcttgagggtctgtgacattgggcccaaactccacaccaccatcacagcaggcagcccctggggaaggaggtaggtaaaggcttgagagctgcctcccaggtgcatcctctccacgggcagcatcacccagccctcagt

SEQ ID NO: 81367 - DNA, 833 bp, Homo sapiens
ccactcagccctaggtactttaggccaatctgctgatcaaggccataagtgcctcataaccaatcagcagggtaccttcccggcagcctcaagggtgactaggtttctaccacaccctgatcccaggccttcctctcagccagtcctacccagaacaccctatttcacagtgcacttcacccctagcctacctggccattccctatccccatagctggctctaagttttcttatcacctctaacctgctctaaatgctaaggatatgcatctgttgttgatttgtatttagtaggctctgcaagcagggatctttggctcttcggttcactcatgtatgttaagtgcccagaacaagcctgacagatattaggtgctcggtaagtgcgtgttgagtgagtaaacaacagacagccagtttgggtattcccagtagggcaggaacagagaagagacacgttttattgggaagctaacaaatcttaagcttcaaagttcctctttcccctgcaccagcaccttacaaaaaaaaaaaaacctactgtggttttacaatttatattttgcaaacaggctctgaaatgtatttacctcaggctccaaaaaacctggatcttccttgagggcagtgctgcctactggatgaaatacagattttagagtcagagttgggttcaaatcctagctctgcctcctgcaggtgtcttaacctctctgacccccctctcctaatttgtgcaagggaataatatccccacatgtgtaagactcaacagggtgggaagggcacatttgtatctaacctgaatattaatatatgcattccacagtttc

SEQ ID NO: 81368 - DNA, 354 bp, Homo sapiens
tattcaacaattcaccattattgaaactccagtctaggcagctatagaattctgcgattgaatcaggtgataacaaatagtcttagatggggttttgcccagtggctaagtggagattatattttcaactgggacattttgaacaatttcttgttctttttacataagcatctttttaattcttgttaatcattaatacatcttcctgaacacaggaagttttgtatttctatagctaacatttctatacctataataatatttagaattttccagataaatttcaatccttaagcaagcataagaaactaaacatcattccagtggtatacatttgggaagcttggtgtctca

SEQ ID NO: 81369 - DNA, 567 bp, Homo sapiens
gcaccaggaagagtggctctaggagggagaggagcccagggactgacccaagatgccgttgactccagagccgccctctgggcgcgtggaggggccccccgcatgggaagcagccccatggccctcactgccctgtgggccctgcatccccatcatgctggtcctggccaccctggctgcgctcttcatcctcaccaccgctgtgttggctgaacgcctgttccgccgtgctctccgcccagaccccagccaccgtgcacccaccctggtgtggcgcccaggaggagagctgtggattgagcccatgggcaccgcccgagagcgctctgaggactggtatggctctgcggtccccctgctgacagatcgggcccctgagcctcccacccaggtgggcactttggaggcccgagcaacagccccacctgccccctcagccccaaattctgctcccagcaacttgggcccccagaccgtactggaggtcccagcccggagcaccttctgggggccccagccctgggaggggaggccccccgccacaggcctggtgagctgggctgaacc

SEQ ID NO: 81370 - DNA, 585 bp, Homo sapiens
gcgcaagctctctcagggttttcagaggccccaagcccatggaatgatgccaacagagacaactggccctttgctaagctgccactgagaatctgagcagaatgagatgaacgtcagagatactctttcctcctcgatcctcacaggcaggaaatgagcagggagtgagacacagggatttgctccttctaatggaaaatgctgtcagagtcctgagtccagattctgcctctgacattgattctgtgtctggagttaaccctctgagactcatcctgggtaaggtccattctgaataaagcctaccggaggcagctgctgtgggcatcatggagatcatggatgcaaaaggagtttgtagacacaaaaatgaaaggattctcattaccctgcaacacctgggctcctagggctaaacctgacgcaaggtttctgggctcaccctgccttgccctgtgcagccgaccccagaggagccagctgtgcccatggaagggggctgtggttctggcccatgcccaccctcctgctgatgcctggggtgcaacacaacctcccaaccccaccggcagcccaggctccagg

SEQ ID NO: 81371 - DNA, 583 bp, Homo sapiens
tataataaaaataaggcagaagtcaagaagttacttgtagctagtgagaacaaagatatgacataccagaatccctgggacacagctaaggcagtgttaagagggaaatttatagcactaaatgcccacatcaaaaagttagaaagatctcaatttaacaacctaatatcacaactaaaaggactggagaaccaagagaaaaccaaccccaaaactaacagaagataagaaaaaaaaaaattagagctgaactgaaggagatcaagacacaaaaaaacactcaaaaaatgaggctgggcatagtgactcaatggctgtaatcccagcagttaggaaggtggaggcagacggatcacttgagaccaggtgttcaagaccagcctgaccaacatggcaaaactccatctctactaaaaatataaaattagctgggcggggtggcgcatgcctgttatcccaggtacttcagacgctgaggcacaagaatagattgaacctgggaggcggaggttgcagtgagccgagattgcagcactgcactccaacctgggaaacggagtgagaccctgtctcaaaaaaaaaa

SEQ ID NO: 81372 - DNA, 221 bp, Homo sapiens
aatagtttcattcccttgctctcccaaaataggttccaacgaccctggctctgacttacataatgtacaaaaataagtctgctttaatgttgtatgcagtaggtgttctgtccagggacaaccttgtagtagggacagagtgacctttcaagaaaaaaaaaaaaaggaaatgaaatatactttcattttccagaaatatgcatgcaagtaaaaatttgaca

SEQ ID NO: 81373 - DNA, 494 bp, Homo sapiens
caagcaatcctcccgtctcggcctccaaaagtgttcggattacaggagtgccaccacatgcgttcaccaatatagtatcataaagagtaaaaatcctctcttcggcctagccattcctctaccacccctgtccccaagtgtggcaaccactgatctttttactgactccatagttttgccataacacttgatttggagcaacaaaatgaatatttgcttgtgaaaatattggcattttttgagattgtctcaaaaacagttcctgttctttcttacattgatgaaacaatcatagttttaaagatgataggattgctttccaaaaaaagccccagtgaatttcaggttgaacagtttttttaatttttatttttagagcagttttaggttcacagccaaattgaacagaaagtacagagggttcccatatacctccacacttgtgcagctctaccattatcaacattcgccagcaccagcagggtggtacattt

SEQ ID NO: 81374 - DNA, 495 bp, Homo sapiens
tttttttgtatcaaatttttccagaaatcaacccatcctgtcacttttcatttctttttgctcagaattttaccaagagatttttactatttcaaaacatcatgttactttgattctgccaaaacaacacacctgaatcagtccacactactaagtgcagctctaggcagaagtacacatgttcaagtacttcatacatgtagttgcttccaagcatttgaatactgaaatgcatattatgttattacaaattgttttcctttaatttccctttatattacaactatgaaataatactgtggggtttttcgtttgagacagagtctcactctgtcacccaggctggagtccaaatggtgcaatcttggctcattgcaacctctgcctccccagctcaagccatcctcctacctcaggaggcggagcttgcagtgagccgagactgcaccactgcaatccaccctgggtgacaaagtgagactccatctaatattt

SEQ ID NO: 81375 - DNA, 642 bp, Homo sapiens
agttggtccaaaaggttttctaacctctttaaatttgttaactgcgatagatgaaaaatacatacatccagatgtctggtcaaggaaactgaggaaagctacgaattcctccaatacatatttggttaaaaactccaggggaggtagtaaggagaaagcaataccgtattcctttataaggaagaatagggttaaagcctgtaattgaaggacttattaaagatgggctgctcaaaccttgtatgtcctcatccaatactccaattttaccagtcaagtaatcagacgggtcatactgattagtgcaagaccttagagctatcaatcagatagtctagacgactcatcctgttgtacctaatgctatttctaattggctagaaggatggtccggtcaatagaaagaaactgtagcctcaattcttacttctatagcaactgtaataggcatactccttcttcttgggtgttgtattataccatgcatctgggaattagtaataagattaacaaaaacaactcttactaaaacccatcttaactctcctccaccttattcagaaaaaattctccttttagaaattcaatcagagcaattaagccaagaaatattaaaacagtttgaagaggaaaaactataaa

SEQ ID NO: 81376 - DNA, 308 bp, Homo sapiens
gtctaactagattgtctccctgtaacagacttcttgattcaacaaagcagctctgaatcagcctgaaacctatggcacactgcaaaatggcaaacattcaataggtatttgcccagtaaatgttaatgaaaggaaaaaaattcaaacttcagttggaataggattagagacaagttaaaaaaaagtttcccatagaaatcttcctcatcgtaaatatcatcatcctaaatgtcccgagtctttccatgggtctaatttaccaaatcatgaagactctctttctcactgtgtatgtgtagtgggagagg

SEQ ID NO: 81377 - DNA, 549 bp, Homo sapiens
tctgttaagtgacagggatagattttttcatgatctttgagggctctttcaagctatagcatttttataattttaataactaccacttccacccttgttagattacatttcttgaacaaaataattaccctttcctcccttgcttttacgtcactgccccaaagcagttagttgacttgaaggtgttcttttggagtctcttccagctataaaatctgtgactctaagaaatccacagtttacttaattccttagcaatacaaaagaatagtcattatatcaaatccagcaagtcttcatttaggtgaacctatccacctttcaaaatgtatcaagtctcgcctatgaggaagttgacattttatcaagcatttccaagagaatttcacagctacccctttggagtttatcaatgagcagatgatattagtaacagaatccatttgattctgagagacgaggtctatgaagaaagggaggcagcagtttattaatttccattgttaaaggaggccgggcgcagtggctcgcgcctgtaatcccagcact

SEQ ID NO: 81378 - DNA, 676 bp, Homo sapiens
gtctctactaaaaaactagccacgcatggtggcgggcgcgtagtcccagctactcaggaggccaaagctggaggattccttaaacccagaagcttgagaccagacaaggcaatgtagtgagactccgtctcaaaaaataaataaataaataaataaaaagaaccatgtataaaatatttaaattaataaaggaatctaaaatatatcaaggaacaactcttagacagttatgcaaatttgaaaaagaaccaaagagaaatgttagaaataaaagtataactgttgaaattgaaaacttagtggatgatttgaacaacagataagaccattggcaaagggagaattcatgaactgaaagatctgaagtaatttcccagaatgtaatgttaagaaataagttaaaaggaagagcataatgagtctaacatgtgtgattgaagtcttataaggagagaattaagaacaggcaatattttaaaggaataatggagaaaatggaataattgatgaaatatgtgaatatatatagggaccatatgcatatgaaggaagggggttaaataaaaagaaatctacttgtacatactttatagataactgaagaatatcaaagtcaaagagaagctcttaaaaacagtaggagaggatgggtattctatcctcagtatacagtatt

SEQ ID NO: 81379 - DNA, 603 bp, Homo sapiens
ctttataacaaataatgaaacatttcccaataatgaaaagcccagaaccaagctaagctggtgaattctatcaaatattaaaagaagaatgaacacaagtcattctcacatgcttccaataaatagaacactcagattcattttttgaagccagtattacactgataccaaagccaagggaaagtatcacaagaaaactacagatccaaatcctttatgactagatacaaaaatcctcaacaaaatagtgacaaactgaattcagcaggttattacaaggatttatacatcaagaccaagtgggatttatcccaggaatgcaagattgcttcaacatatgaaaatcaatatgatataccatattagaagaatgaggagacccacataatcagctcagtagatacaaaaaaaagttgcacggaacccaaaatgctttgatgatttaaaaaaaaaaaaaaaagaaaagtgtggaatgggcaaagctttaatttccagtattttttggattcatgaagctgtttaaccagacaaggtgatctgtgtggggatagggctgccgtataccatgtggctgtgggagttttctatatggaagaggggcat

SEQ ID NO: 81380 - DNA, 1147 bp, Homo sapiens
ctttataacaaataatgaaacatttcccaataatgaaaagcccagaaccaagctaagctggtgaattctatcaaatattaaaagaagaatgaacacaagtcattctcacatgcttccaataaatagaacactcagattcattttttgaagccagtattacactgataccaaagccaagggaaagtatcacaagaaaactacagatccaaatcctttatgactagatacaaaaatcctcaacaaaatagtgacaaactgaattcagcaggttattacaaggatttatacatcaagaccaagtgggatttatcccaggaatgcaagattgcttcaacatatgaaaatcaatatgatataccatattagaagaatgaggagacccacataatcagctcagtagatacaaaaaaaagttgcacggaacccaaaatgctttgatgatttaaaaaaaaaaaaagaatacaaaggaactttttttattaataaaaggcatttacaaaaaactcatagctaacgttatacttcatggtaagaatgaaagcctttcctctaagatcaggagagatgtttgaaactcttaatgctttttttcaacattgtactagaggttttagccagagcagttaagtaaggaaaataaataaaaagcatctttactggaaagaaaaaagtaaaactctctcttcataggtggcatgatcttatttctagaaaccctaacaaagccattcaaaggcactattagagataataagcttagcaggatacaagattaatatgtgaaagttgattatattttgatgcaactagcaatgaacaatctgaaaaggaagttgaaacaattccatttacaatagcatcaaaaagaataaaacacttcggaataaatagaaccaaagaagtataagacttgtacgctgaaaactgcaaaacgttgttgaaaggaattaaagaacacctaaataggccgggtgcagtggctcatgcctgtaatcccaaagtgctggcattacgtgtgttagccactgcacacagcctgggagggtttattttgttggttttgttttgtttttttgttttcagggaaaatttgtatttttgatatttggtgcaggagaagtgtgatacttttctgaatgggttagga

SEQ ID NO: 81381 - DNA, 912 bp, Homo sapiens
tcagactgctgtgctagcaatcagcgagactccctgtgagtaggaccctccgagccaggtgcggcttataatctcgtggtgcgccgttttttaagccggtcggaaaagcgcagtattcgagtgggagtgacccgattttccagggatggaagaagatacttggaaaaatcagggaagagtgaagaagatacttcaaaaaatcggggaagattttcatcataaggtccaagcaaagattcctgagcctgagtctactgacaaatataccacatccccagagtaagttggagtctcttaaaattgtcttgctggcatctagcggagattgtccccacaagcatgttccttatgacggatgcctgggtcagaacacataatacattcctttttataagcacaaagattctgagaagcactgcccctcccacgtgtcacactctggggagagattattggaatgcctcttggatcaggtatctttggtgatcattccacctagttaagatgaagctggtgatagcctttggcttgtttcaggtaatgtaaccagattttccagtgacttgtgaattaacaggctaaaaactagttttcagtttctggagaagggttcccaatctcatttgaggctattggaggaaaaatcccttcagaaaataaagcatgacagtaagattttagtatgcaggaagtaaattcagttcctttggagatcagcatgcctctattcaatcctctccttaatcccttatgagtcagatctagtagagggttggaccaggaaattgagtgtagggttataggtgataagatgaggagaggcactcccctcaggagttaagatgcaggaaatttggtttgcactttagccagtacaaggcatttcaccaggatggagaatatgtgctctct

SEQ ID NO: 81382 - DNA, 637 bp, Homo sapiens
atttttttaaagaaacaaaacattaaaaagttttaaactctatagaagtattatgccatagggctttataaagattaagtgaggtaatatataacaagtgcttaaaacatacacagtattacagtagagttagctttattattaatagtaactcaagcctatgatgaccaaaactgagtttttgattcctgcaagttcaacatctgctcctccccttgtctttctgtttaataagttgttacaccatctaccctaattcctgaattccaaaaccttggagtcttctttgatttctttctcatgttctccacgttagtaggccctgctgctttccctcctcagtgtatgctaaactcatttaactttctccatttttactgacaatgcacaccatcatactctgtcatctatgccactgtaacacattcttaaatggtccctctgttcaactgttgcccctgcaattcattctatatgtagtggtgaaagtgaatacatataaacacaaatcaagttttgttacttgatggaaaccctccaataatcattcactatgaataaaatccagaccttttgctatgaccctcaagaccccatgtgacctggtccttgcctacctctctggccttggctctca

SEQ ID NO: 81383 - DNA, 478 bp, Homo sapiens
gaagaaatcaaccagtccagaaacgaaacagcgagtttttggccaacgtcagcaccatcacctcagattattccaccacatcgtctgctgcatacttgactagcctggactccagtcgactgagccctgaggtgcaatccgcggcagagagcaagggggacgaggcagatgacgagagaagcgaactcatcagcaaagggcggcctgtggaaaccgacagcgagagtgagtttcccgtgttccccacagccttgacttcagagaggcttttccgaggaaaactgcaagaagtgactaagagcagccggagaaattctgaaggaagtgaattaagttgcaccgagggaagtttaacatcaagtttagatagccggagacagctcttcagttcccataaactcatcgaatgtgatactctttccaggaaaaaatcagctagattcaagtcagatagtggaagtctaggagatgccaagaa

SEQ ID NO: 81384 - DNA, 795 bp, Homo sapiens
ccgaaatcctcactaagctctgcaaagacaacaagctggatggaccctactttcaccctgggaaaatacagataggaaaccaagtcttttctggaaaaactatcttcactgaagaggacactgatgagacagtggagtcttatgaacacctggccctcaaggttttacactcttgggaggatatcccggaagtcgggtgtaggctggttcctgaacacatagaaactcggccactgtaccacaaggataagccacgaatggagcagggccgcctgcagatgtgggtggacatgtttcccaaggatatgcctcaacctggacctcctgttgacatctctccaaggcgacccaaaggatacgaattgagagtgaccatctggaacactgaagatgtcattttagaggatgagaatatcttcacaggccaaaaatcaagtgatatttatgtgaaagggtggttaaagggcttggaggatgacaagcaggagacagatgtgcattacaactccctgactggagagggcaacttcaactggcgcttcctgtttccctttcagtatctcccagctgagaagcaaatggtcattaccaagagggagaacatcttctctttagagaagatggagtgtaagactcctgctgtgttggtgctgcaggtttgggattttgaaaggctgtcctcagatgacttcctgggcaccctggaaatgaacctcaacagtttccctcgagcagctaagtctgccaaagcctgtgatcttgccaagtttgaaaatgcaagtgaggagaccaaga

SEQ ID NO: 81385 - DNA, 460 bp, Homo sapiens
atcagcagatttttctctggtgaatgtctaatcagtgtgatttccataggctatacttaccttttgggggctacttgccaatgatgtttggtcagtatccttgcaaacaacagagtgacagattctaaaaatgactttgcaggccagtactaagaaagacaccaaggttcatgggcttgcaaataaaaagtccataacttccctgccctacttcaccaagtgaaatcgagttcctcacacttctgcacacagctctttcaggatcttcccttcccttcaaggctgtctgatgttcagtttaatttgattgtatttgtataaagtgctgagtgttgagtcctcaaagaaatttactttcagtctaagcccccttggacaagaaagtggcaaccaggcaaatgattgattacttatttgttgagtatcactttgtgattgtcccagggctgtattacacata

SEQ ID NO: 81386 - DNA, 880 bp, Homo sapiens
gcgtgtttacccaatcctgtttctccaatgcaacgtccacccactttaccaccaaaaactccagggcctgacggcagcccggtcccccagcactcaccagcagcccagtgttctccaccaagccacagtgtgcatgcctggtatcctccggattcccttccttctgcccgctgagtcactgggcagagaatgatgacatgtgtaggtggtgtggttgggggtggaaaggggaaggggttgatcctcaggactctgagggagcatcgttgaattttcctgttcagtgtgaccaagacccacctggaaatggaatttggaactggcttcaggagacatcattcctgaacacactgtagggtgaattggtgcatcttccccaccatacacacacacacacacacacacacacacacacacacacacacacacacccccaaaccttttcatggggaatgtgtggcaaccttgccaaacagcaccactcagagtgtgactctgactgtgaccttggccttaatgaggaacttcttaggagagtttgaggacaaggccaacatcgtcatctgggctcgctgcgtcccagcacatcaaactctgtccagagacaaggccaactgcaaatgaaagccagggaacattgctaagggtctgtggctctgtggtggtgttcatcgccttcctgagataggatttcccttgccagtcccaacctgtatatattctgtacagaagacatccctgaatatactgtaggtgagtcgtccagccaaatttatatctccaaaacatttttagctttttctacatgctatgaattgagatgacatgctcaacttgtaaataagtctttttgtacattaaaaaagtaattttttcataa

SEQ ID NO: 81387 - DNA, 1849 bp, Homo sapiens
gcgtgtttacccaatcctgtttctccaatgcaacgtccacccactttaccaccaaaaactccagggcctgacggcagcccggtcccccagcactcaccagcagcccagtgttctccaccaagccacagtgtgcatgcctggtatcctccggattcccttccttctgcccgctgagtcactgggcagagaatgatgacatgtgtaggtggtgtggttgggggtggaaaggggaaggggttgatcctcaggactctgagggagcatcgttgaattttcctgttcagtgtgaccaagacccacctggaaatggaatttggaactggcttcaggagacatcattcctgaacacactgtagggtgaattggtgcatcttccccaccatacacacacacacacacacacacacacacacacacacacacacacacacccccaaaccttttcatggggaatgtgtggcaaccttgccaaacagcaccactcagagtgtgactctgactgtgaccttggccttaatgaggaacttcttaggagagtttgaggacaaggccaacatcgtcatctgggctcgctgcgtcccagcacatcaaactctgtccagagacaaggccaactgcaaatgaaagccagggaacattgctaagggtctgtggctctgtggtggtgttcatcgccttcctgagataggatttcccttgccagtcccaacctgtatatattctgtacagaagacatccctgaatatactgtaggtgagtcgtccagccaaatttatatctccaaaacatttttagctttttctacatgctatgaattgagatgacatgctcaacttgtaaataagtctttttgtacattaaaaaagtaattttttcataaaaaaaaaaaaaaaaaaaaaaaaaaataaaaaaaaaaaaaaaaaaaaaacaaaaaaaaaaacaaaaaaaaaaagaccacaaatactctaattcattaccctatagatcgaccaaacaaacttaagctcactcaatatttattctaataacaacgctcgctattctacatttactactaactatcaactaataatctcactcatacctctacaatctaatatccatcgccacaatactctaacatacgctatcatcataacaccacatcataatttaatctacaggcgccatcagttggaggaaacaacgcgaccaagccggaacaatctcggccctcatctgcacgggatcataccgcacaaccaccaccaccacgctctgctcaatgcactgaacacacacgacgactaacatatgcagagcatgaggaacagacaagatggctggacgacaaaatgctatgagctgcaacgataagcatcacgatcagggatgcgctacgtacgaccaagagaagagagccacagaagaatagaagggagagactacgacgagcactgaccatcggctgaatagcactcgctacgatgcggagcggggcggaggagggaggcaggagagggctgggcggagtcgcgacggcgtcaccagcgtgcgtctaagctgctggtgattcaagacatatgatagcgctcggaccagcactaacgcaacgtaggcgagcggagcgcaaagatgatcggagtcaaggcagactaaacggaaccaattacgacgagacatcaacacatatccaatgatctaacagacgataagactaggagacggaaagacaagacaaagggagattattgaagagaatgcaagcgacgaagttgctaagcacgtaccaacaaagaaaaagtacggtaagtacagggaatgatcagttatatgacttagaaggtaatggaattacacgagggttgat

SEQ ID NO: 81388 - DNA, 520 bp, Homo sapiens
aacacaaaaaattaaaaaaaaaacaacacacacacacacacacacacacacacacacacacacacacacacccccaaaccttttcatggggaatgtgtggcaaccttgccaaacagcaccactcagagtgtgactctgactgtgaccttggccttaatgaggaacttcttaggagagtttgaggacaaggccaacatcgtcatctgggctcgctgcgtcccagcacatcaaactctgtccagagacaaggccaactgcaaatgaaagccagggaacattgctaagggtctgtggctctgtggtggtgttcatcgccttcctgagataggatttcccttgccagtcccaacctgtatatattctgtacagaagacatccctgaatatactgtaggtgagtcgtccagccaaatttatatctccaaaacatttttagctttttctacatgctatgaattgagatgacatgctcaacttgtaaataagtctttttgtacattaaaaaagtaattttttcataa

SEQ ID NO: 81389 - DNA, 177 bp, Homo sapiens
ttaaaaaagtaattttttcataatttatcttgtctatctgcttcccccttgacagtagttaatgagaacctgggcagtaaatttggtgcattcgagcagaaattaggctgtattttttcttaacagtgtcaaaattgactatcccgcctttgccaagaaatgtttaatgctgaggca

SEQ ID NO: 81390 - DNA, 348 bp, Homo sapiens
cctttaaagcagcggatcccctggtccccacccccaactttatattcattaggcctgaggtggggcctgggaatctggatttataaattgctcccctatgattccaatgccagtgggttttagaccacattttgagaaacagtgctgtaaactgttttccatttgcagtgaaggaaaatgtagggtttgtgtcgtgaaactatgcagagaaattgaatagtattttagtctaatcttgcttttaaataacacggaaattttgaaagtcggctttagggagttccagaacctgtccatgaacagcaacaagaaagatccctgtgtgaaaatgaacactggttggtaaaa

SEQ ID NO: 81391 - DNA, 780 bp, Homo sapiens
gccagccacctgaaaggagctgagttctagcctctactgattttgcgtgtgagctccttgccactccaaaatttttcttagccagagggccttgctgtcacttcttttgacttgctcatccatgctccctcagaaggtcctggggctcttcctttgatagccccttggcaagactgcaagctctgagctcctctcagctgcacccaaggtcttaattatcagaaagtttactcttcctgacaaggcttccatcttgccaaatattcagtagggggtggactggcaaactactgtcccaattctcgatacacatcccttagatcagggattccttgttcctttgtcgggtgacagacccattggagaagttgatgaaagccaaacactctttttttcagaagacacagataagagactcctgcttgttatgcagatcaaaacctagcagattacaacatgaaagaaccttgatgacattatgccaagtgaaaggcccaaacccaaaagatcacacgttgtttgactcccatttatatgaaatgtccagagtaggcaaatctgcagagtcagagagcaagttagtggttgccagggtctggggggagggcagaatggggagtgactactggtgaatatggggttcttttttggggtgatgaaaatgttctggaattcgtagtgatagatgcacaactttgtgaacatactaaaaacacttacacgaggatgaacttatggtatgtgagttagatctcaataaagctgttgtttaaaaactga

SEQ ID NO: 81392 - DNA, 915 bp, Homo sapiens
  misc_feature (779)..(779): n is a, c, g, or t
ccgcagccgccgctgtcaggcgcagcaacgggcaaccccgtagaagtcggtcggcaggtcctctccaacccgccgctaccgcgccgctgtgggagagaccccagcaggagcccaagggcagctacgggggcgcgaaggccgctggcgccgcctcggccagcccttcccgcgcggttccactgccttaaggatgacagtcgtagggaaccctcgaagttggagctgccagtggttgccaatcctgatactgttgctgggcacaggccatgggccaggggtggaaggcgtgacacactacaaggccggcgaccctgttattctgtatgtcaacaaagtgggaccctaccataaccctcaggaaacttaccactactatcagcttccagtctgctgccctgagaagatacgtcacaaaagccttagcctgggtgaagtgctggatggggaccgaatggctgagtctttgtatgagatccgctttcgggaaaacgtggagaagagaattctgtgccacatgcagctcagttctgcacaggtggagcagctgcgccaggccattgaagaactgtactactttgaatttgtggtagatgacttgccaatccggggctttgtgggctacatggaggagagtggtttcctgccacacagccacaagataggactctggacccatttggacttccacctagaattccatggagaccgaattatatttgccaatgtttcagtgcgggacgtcaagccccacagcttggatgggttacgacctgacgagntcctaggccttacccacacttatagcgtgcgcgggtctgagacttcagtggagcgtcggagtgacaggcgccgtggtgacgatggtggttctttcctcgaacctgggaaatccattggttgtccatcatcaagtcc

SEQ ID NO: 81393 - DNA, 709 bp, Homo sapiens
  misc_feature (573)..(573): n is a, c, g, or t
ccgcagccgccgctgtcaggcgcagcaacgggcaaccccgtagaagtcggtcggcaggtcctctccaacccgccgctaccgcgccgctgtgggagagaccccagcaggagcccaagggcagctacgggggcgcgaaggccgctggcgccgcctcggccagcccttcccgcgcgcttccagtctgctgccctgagaagatacgtcacaaaagccttagcctgggtgaagtgctggatggggaccgaatggctgagtctttgtatgagatccgctttcgggaaaacgtggagaagagaattctgtgccacatgcagctcagttctgcacaggtggagcagctgcgccaggccattgaagaactgtactactttgaatttgtggtagatgacttgccaatccggggctttgtgggctacatggaggagagtggtttcctgccacacagccacaagataggactctggacccatttggacttccacctagaattccatggagaccgaattatatttgccaatgtttcagtgcgggacgtcaagccccacagcttggatgggttacgacctgacgagntcctaggccttacccacacttatagcgtgcgcgggtctgagacttcagtggagcgtcggagtgacaggcgccgtggtgacgatggtggttctttcctcgaacctgggaaatccattggttgtccatcatcaagtcc

SEQ ID NO: 81394 - DNA, 663 bp, Homo sapiens
atttgagagaagttgtgatttcgtagataaagggaacatgctgtgaaaagtgtggccatatggcataatgacataaaccctgcagttctaatcaggaggcctgagttctcacacaggttttgccactacctagttgtgtaattgtgaacaactcatttaacctctccaggagattttcctaatatgggcatttctgaggatgcttcaggaccaaattgcatgctacttgaatcataatttaaaatataattttactgctaagccatttttgggtaaaatcataatttcgtctctttgaaataatctgattggaaagatgggcttcttgtgcagatattatgtttttcactcatttctatgaacaaaagattaagttccaaagtgcttatgtttttttgaaggccaggtaatttattgcaaactgtactgggctatacattttgtgtttcagctttcagaagaatctatttacatttaaaataatacccccttttctcccttttatcatgaagttatcttttccattatcttttaaacttaaatacagttaatacttgattatctaaaatggagccttttatgagtcaatcccactttctaattcttaacaaatatggaataaaatagggaattatgccatttttacattacctgtataatcat

SEQ ID NO: 81395 - DNA, 407 bp, Homo sapiens
ggtggtaaaggcagccagaaatgcagagtgtagatgtttattaggcagtgttgaattagtagaacagtaaaccatcagaaacctaattcaggggtagggagaaagttatcttttgccttctttttattcctttaattttttcctgtaaagtgaagagaacataagttttgaagtcagtttatattcgtgacttcattttattttacttacttgctgtgtgatcttgaatgagatttggaattgttatactctcctttacccagttcacaaagatttaaagtagatatgatagttatctcagtttatttttgagaaaatctaatgatataacataggtaacacatttctgttttttactgttcacattggaggagggggtgagtagataagtagcagctattcgtaag

SEQ ID NO: 81396 - DNA, 787 bp, Homo sapiens
gatctacaggatcctatgccccattcctgaggcaaccggcgggagaaaatctacgaagagcagaatcgaggcatctacatgttccgaataaacaatgaacatgtgattgatgctacgttgaccggcggccctgccaggtacattaaccattcctgtgcccctaactgtgtggccgaagtcgtgacatttgacaaagaggacaaaatcatcatcatctccagccggcgaatccccaaaggagaggagctaacctatgactatcagtttgattttgaggacgatcagcacaagatcccctgccactgtggagcctggaattgtcggaaatggatgaactaagaagctttgaggctaccaggcaggggagtccccctacccacaacctcttccctgaaagggatgagggggaagagaggtagcagccagagccaggacccagggttggggctgccggctgacccggagcccctggagcaggaggctggggcagagggccctaggccaagcccaccctgggcaccagggacaatcctcttccccaccaccggccctcaggctggcatctctgcccccagctccaggaggggccagacagaagcagccattgggcatctcaggtttgagggggatatgggccgggaactacccagaagcatctgggaggcagcagggtgggggaagaggatgtgtggccgggcctcacagccctgctgctcccactgacctctccggcccaactcacggctgcaaagagacttgactaagcttgacaatcccaaagggccgg

SEQ ID NO: 81397 - DNA, 608 bp, Homo sapiens
cttgtcccttcttctgcaacctctgcctttctagaatcgaggcatctacatgttccgaataaacaatgaacatgtgattgatgctacgttgaccggcggccctgccaggtgagagatgacgaggaaggagggatttagtggtccctgagagtggcactctgggggatagacgaacaaggaatcaaaattgtcccaagttagttgcctgacatccctgactctgtcccactgcccaggtacattaaccattcctgtgcccctaactgtgtggccgaagtcgtgacatttgacaaagaggacaaaatcatcatcatctccagccggcgaatccccaaaggagaggaggtgagaggaagtatcctgactgagtgacaaagcagctcctcctcctttcaccccttctctgccattccctaaatgtggattcctaggctgggcacctcagatcatatcttctctggcctcccctcttcctgtgggggactagcattgattctgccctcttctcttttcagctaacctatgactatcagtttgattttgaggacgatcagcacaagatcccctgccactgtggagcctggaattgtcggaaatggatgaactaa

SEQ ID NO: 81398 - DNA, 891 bp, Homo sapiens
agagttgctgcatgctagtccttcagctcagaatatttagtgctgtttttcttgcttctgcacaattttttcagttagctgttactattaaataaatggccccaaacacagtagtacaaaactacaaattattgtttctaatgtttctgtgattctgtggaagggctaagaggttgttttgttttgcattgtcttagctgggcctgaatgatctcccactaactcacttacatatctgggtgacacagtttggctctgtgaccccatccaaatctcatttcgaattgtaatctccacatgtcaagggagggaggtgactggatcctgggagtggttttccacatgctgttctcatgatagtgagtgagttttcatgaaatggttttattagcgtctggcacttctcctgtaagcacttttcaaatctctgcttgtggccatttttgttattgccccactggcaaaagcaagtcatatgccaatccagacttggaagatgcggaaatcaaccccactcatcaataggggaagtagtggcaaagtcacagcacaaaaagatgtatacaaacggattagaggcgtcattgcagctttttttgaaaatgatcttccacatcaatcttttagcctcccttcaagtttctcttctttaagatgaagtttaggaagaacctactcatcccatccataagttttgtgtgacttcctactctcagagaatcttttattgttttcctttctggcattaattatatttatcagcaaatattttagaacttgtgtatgtattaatgcttatccagtataatcaagtcaactcagtgtctactgagctggcaatgctcaatatttttttaaatgaatgaatgattgaattctaccaatgggtga

SEQ ID NO: 81399 - DNA, 255 bp, Homo sapiens
gaaactgaggtgcagcttttcctctgagccccggggaatagcatctttgctcgagtcagctgctgggttcgtccatggtcctggctggccttcctcaccagcggggaacctaagtgcagacctcagggtggcctcactcccttgtaagtggcaggttcctggtgggtgggcaggtgggtggccagtggccctgtgccactgccacccgtgtctctggggcttgaagtacatggcggagcgtgcctgtcctgcctc

SEQ ID NO: 81400 - DNA, 936 bp, Homo sapiens
gggatcttggactccctggaccctccctccagcccagcctcgctagctccgcctgcggtacgtgctcccgcctccgactcaaaatgcctgtctggggaggtggaaacaagtgtggggcctgtgggaggaccgtgtaccacgcagaagaggtgcagtgtgatggcaggagcttccaccgctgctgctttctctgcatggtttgcaggaaaaatttagatagcacaacagtggcaattcacgatgaagagatctactgcaaatcctgctacggaaagaagtatgggccaaaaggctacggttatggccagggcgctggcacgcttaacatggaccgtggcgagaggctgggcatcaaaccagagagtgttcagcctcacaggcctacaacaaatccaaacacttctaaatttgctcagaaatatggaggtgctgagaagtgttccagatgtggggattctgtatatgctgccgagaagataattggagctggaaagccctggcacaaaaactgtttccgatgtgcaaagtgtgggaagagtcttgaatcaacaactctgactgaaaaagaaggtgaaatctattgtaaaggatgctatgcaaagaactttgggcccaagggatttggctatggccaaggagcaggggctcttgttcatgcccagtaagatgtaaaccctgaactaaacatcacacactgagaatctcttcataatctagggcacagataatctttaacactaaactactgtgaaattctaccagcattaagtactgtatatcgccctgtacttggataggctggctactcgtaggagagagcacgttggtatccttttgctttattcaccagcatttgggggaacattccttttatgttttaaataaaacttcagcatgaagaaaaaaagtaaaaacaataagttagtaaatattcat

SEQ ID NO: 81401 - DNA, 642 bp, Homo sapiens
gggatcttggactccctggaccctccctccagcccagcctcgctagctccgcctgcggtacgtgtctggggaggtggaaacaagtgtggggcctgtgggaggaccgtgtaccacgcagaagaggtgcagtgtgatggcaggagcttccaccgctcccgcctccgactcaatggtttgcaggaaaaatttagatagcacaacagtggcaattcacgatgaagagatctactgcaaatcctgctacggaaagaagtatgggccaaaaggctacggttatggccagggcgctggcacgcttaacatggaccgtggcgagaggctgggcatcaaaccagagagtgttcagcctcacaggcctacaacaaatccaaacacttctaaatttgctcagaaatatggaggtgctgagaagtgttccagatgtggggattctgtatatgctgccgagaagataattggagctggaaagccctggcacaaaaactgtttccgatgtgcaaagtgtgggaagagtcttgaatcaacaactctgactgaaaaagaaggtgaaatctattgtaaaggataaaattcatttcagttactgctgtccatatgaatattccacactggttcttgtttaatgaaatgtcactggcatta

SEQ ID NO: 81402 - DNA, 911 bp, Homo sapiens
gggatcttggactccctggaccctccctccagcccagcctcgctagctccgcctgcggtacgtgtctggggaggtggaaacaagtgtggggcctgtgggaggaccgtgtaccacgcagaagaggtgcagtgtgatggcaggagcttccaccgctcccgcctccgactcaatggtttgcaggaaaaatttagatagcacaacagtggcaattcacgatgaagagatctactgcaaatcctgctacggaaagaagtatgggccaaaaggctacggttatggccagggcgctggcacgcttaacatggaccgtggcgagaggctgggcatcaaaccagagagtgttcagcctcacaggcctacaacaaatccaaacacttctaaatttgctcagaaatatggaggtgctgagaagtgttccagatgtggggattctgtatatgctgccgagaagataattggagctggaaagccctggcacaaaaactgtttccgatgtgcaaagtgtgggaagagtcttgaatcaacaactctgactgaaaaagaaggtgaaatctattgtaaaggatgctatgcaaagaactttgggcccaagggatttggctatggccaaggagcaggggctcttgttcatgcccagtaagatgtaaaccctgaactaaacatcacacactgagaatctcttcataatctagggcacagataatctttaacactaaactactgtgaaattctaccagcattaagtactgtatatcgccctgtacttggataggctggctactcgtaggagagagcacgttggtatccttttgctttattcaccagcatttgggggaacattccttttatgttttaaataaaacttcagcatgaagaaaaaaagtaaaaacaataagttagtaaatattcat

SEQ ID NO: 81403 - DNA, 334 bp, Homo sapiens
  misc_feature (322)..(322): n is a, c, g, or t
ctcatgttcaatctagtgtgatcagtgaccagttgagggggaaaacgattctctctgagctttgcttggcttttccttttgccaccaagccactgaaaagtataggaagaggcaaggcattgcaacatgggatagctgcctcctatacgagactgttaatactgtgtatcagtaagtgaggtggaagagggagttaggttatcagtttgtttctcaccattttggccagactggtctcgaactcctgaccttaggtgatccgcctgcctccacctcccaaagtgctgggattacagggcatgagccaccattcctggcctanccctggcatttt

SEQ ID NO: 81404 - DNA, 382 bp, Homo sapiens
ggtggaggaggctaaaataaatatggagtagcatatttacctttcaaggagtgtatcatccaataagtgaattatgctttaaaatataagtagaatattaatgagctgtaataaaggaacatttttcctgggaggaagaacattaacaaagtaaagagatcttaatatgaatgctatgtaagatgttatatgagtgtcatgtatgagatatttttgatctatttagataaaccataagactcttgttagagcatagtagaaaaaatgatatgactcagctttctaaagccttgaatattgggcagaagaggttagagtttataaaaaagaaatattggtttcttgcagattcttgatcaatgaataaaaagtattaaagttt

SEQ ID NO: 81405 - DNA, 376 bp, Homo sapiens
caggaaaacagaaatgcctgtcctcacctagatccgtgggcacagaaccggggatggagccctcgcgagggaccatgcccttcccttcccagcgcttgcctgcacacttctgtatcagtagggtcttactctttctcaggggattggagccctagccagggaccatgcccttttcttcccagcacttccttgcctccctccatatcaatagagtctcattttgttgctcaggctggagtgcagtggtgtgatcttggctcactgcaacctccacttcccgggctcaagcaatccttccgcctcagtgtcccaagtagctgggaccacaggtacgagccaccatgcctggctgatttttttatttttagtagggacg

SEQ ID NO: 81406 - DNA, 393 bp, Homo sapiens
cattatcttaccttgaatttttatttttgtaactaataatttgagagttcaataagtatgcagtgtttaagacatagtttgttgcaaaaagtgttaacttactatttctttttacaataaaattagcctttattctagttgatttcataactgtccataatatttagctgtggctattatgaaagtatatttgatagccaaattttgaaagctattatgaaatgatacaattcactacatgatttattatttcatgctggttggggcagtgctgtgacttatgaccttatgattgtcacatgctgaacactaaagctctaccagtttgttatggacactgttttactttatgttatcgttttaatgttttcttttataattattgaggataag

SEQ ID NO: 81407 - DNA, 669 bp, Homo sapiens
ccctttagtaaaatagaaataatgtcagtcttgaaagaatgtcatgaggctttcatgaggacacatggaaatggcagacatttgtcttgctggaaggttctcccgtttccccgcccctattccaggtaggttgctgtcctcagtacctgaggttttatgtggaatcaccattctccttcccatgattgtaagtcagattataagcagcatttgagtagatggaaatgtgattaggtctatgtccctcatcccaacattctttatgccagctttcattcccacagctccagctggagacatgcacccacaacttagctgtgccttggggtgtcctgtctactgcaggacgtctttcagtgcccataacgttcttctccaaattaggtttctgagcctttgcatattacatcacagggctgggcccatgggactgcaatccgggaggatggtcctaggcacaaaattgaatcttgagataggtctaaggtttgccatcaggattaatgaaaataagtgtacaccggggcatgcttcactaactggaagtcactattattaaactgagaaccggaagggctagatctggtcataattctgttaaccaactgcataacctttaagccggaacctttacctgtaaaataaaggagtagatgatttctccagttc

SEQ ID NO: 81408 - DNA, 190 bp, Homo sapiens
gtgcagattctgggaaagtgaactccacggaagactcagaaaccaagttctaattcagttgccatgaaaacttaaggtgagaggattgtcaaccagtgaaaaatacggaggaaaacactaacagaatatgatgaagaagccaagacttgggctgcttgcattacattaaccgaggtttacccgcagcgag

SEQ ID NO: 81409 - DNA, 269 bp, Homo sapiens
cccatttgtttgttctaataaaaatgtaggactgaatttgactcacagttgactaatttacattctaaagtggccagaaaacttctattggtagtttccttcataggaaaattgggaggttctcactcaaaattggcttatatttgggcatatgttaggatacatgtaatgtttaagtaaaagtaatactttgaatatcaagctaactagtgataagtttatggttatttatactgttaggtaatagggtattttaatctaccccttat

SEQ ID NO: 81410 - DNA, 783 bp, Homo sapiens
agctcagtgtccacatctgtaaattggaaatgataacacccacctgaacacccacctgcaaggctgagaagagaattgaataagacttctcctgtaggaagcccagcccatcttaagctctttggaaaggttttaatgtgtaagaagattttttgcaattggttctcccatatgtgaaatggggttaaccctgttccttgccttaccaacctctccaggctgctgtgaggattaaatgaaataacacattctgagaactttgatgggtcataagtggggtgcctgtgttagttctggctactggaggcacagggtcccttccagcctcatctctacaggtacagagtcatggttgggcccaagctgccaaggcctgtgcacagttgctctgtttgcctacagtagccttcatgcctcctgattcagcatcagaagtgcccttgggaccctttcctaggtcagcactgcatgctgtgtagcaacatccagttctgctagtttggattacctggccccaccatacccccaacacattaccccgtggctaaagtgtagatgttagcggcaagttctagagcccagtttaagcagctgccccttcctcctgtcaagtgtgtgaccctgggcaacctgaagagcctctgcctgctcctctgaatatgggatgatgtatggtaaacgtacccaccccttaggcttgtcaagagcatggaatgagatgatgcttacaaagctcctagcatgtggtgagtgctaataaatagtagctgtttttacacagga

SEQ ID NO: 81411 - DNA, 504 bp, Homo sapiens
caagtaccaacagatgccaccaagtaccaacagatgccaccaagtatccttactgtcgttctgaaactgagtctgtgactgcagataatatgtcactatttgagaataagaggtcccaccctctccattcttttcaggtcttcagtcacaaggtcacaccttactttcattgtttaacaggataaattaatcaggttgaagtaggacttaggaggtacattgaagataaaagcaaaacgcagcaaacatttttacaagtagatcatcgcggttaccttaaaagttaagtttcagattaatttacagagtagtgacagaatcataatttcagtgaaaatcaacaatagagttgtatcattgaaaaaagataaatttggaaatactaagtcaggcaagcacgcgaaattcagaatattaaaaaaggcaaggcctggttgccaacatacgttcctcagatgaaggtggatatgaagatactaaacagaaccaaatgaccgagaagct

SEQ ID NO: 81412 - DNA, 387 bp, Homo sapiens
ctggtttgggccagtctggatctcaaactcccggtctcaggtgatcggcccacctcagcctcccgaagggcggggattacaggcatgaaccaccgcgccggaccatctttccgggattataatagattctggatgggcctccttcccgttttccacggttggatatatatattatggccccacatgctctgactctctcaccaggaacaccggaaccactcacatgggttcccagccacttaggacttctccagcgtggctgagtctggttctggggattcccaagggggcctgaggaaggctctttggactctcaccccaccccaggtccctcagaacagccccatttccccttttttctctgtacagaattcccacatgttattc

SEQ ID NO: 81413 - DNA, 299 bp, Homo sapiens
gcttgatcaatcaacattttaatgcatctagtgtattaaatttgtgtatttaattcacaacaatggtaatctttccagggcagtttctttctagggatcctttgaagttagcagcaagatgaaatattagataattaatcaatatccaattacttaatgtacgtaaatatgacagacttcttatctttgcccagagtactaggatttaaattctgataaatatctattttgtgccatcactagtatttttgttgtctttcatcttttccactcttattctatttctttacatggtgcgg

SEQ ID NO: 81414 - DNA, 484 bp, Homo sapiens
cccccctgtggattggcatcgtacgtcttagaggtggagatgagggatcaagaaagaccagcagtgagggtccttagagacctgaaggctgacacagcaggtagagacgagggcagggggcaggagccgtgctcagatttgacttggtggcaatattccgagggggcagaaactcacattcctgggacagggccctgtacggcctgtggtgggttccgtcctggtcccaggagagatcccggatgagccaggccaggcccatgcaggaggtgcatggagctgagatccagggttgacaccagctggccgcacgcgttgggcccttctccgccaggccacaggcagcctgtccacctgccgccccaaagccagtgctgggccccagcagaactgcaaggcccacccattctccgtcggcacctgcacggcctctccctctcctgccctgggggtgggtcctgaaggtgcctcacacacctccagt

SEQ ID NO: 81415 - DNA, 178 bp, Homo sapiens
tttgttgtctttatgatcttgatgcttttttgaagagtactggtcgttactttgtagaatgtctttcaatttgggtttctctgatgctttcttatgattaatgtgggattatacatttttggcaatataccgaagtaatggtatcatatcaggaggtatgtttatatcaggggctaca

SEQ ID NO: 81416 - DNA, 3262 bp, Homo sapiens
  misc_feature (1516)..(1516): n is a, c, g, or t
  misc_feature (1605)..(1605): n is a, c, g, or t
  misc_feature (1733)..(1733): n is a, c, g, or t
  misc_feature (2516)..(2516): n is a, c, g, or t
  misc_feature (2531)..(2531): n is a, c, g, or t
atattttcagcatcacattttaagaataatatgtgaaatacaatatgttttattagtcacctttggaaaatacagtcttccacaatctggaaccacctctttggttcaaaatgtgccattcttctgtaatgtgtgtgataaacttaaaaaaaatctgtatcctttatcctaatcatcttacttggacatcatcctgaaacaaatgacaaaaacattcacagttttatatacaaagttattggtaacaatgttcttaatagaattcaattagaaaacatataaaggcaaaggtagagttatttgatgttatggtttgaaaggattcccacaccctcatgaatattctttattatgccagagggaacctaattcccctgcctttgagtgtgggatggcattgatgagttacttgtaccacatataataggcaggaagtgatggcacgtgacattggaaacaacttcgtaaaagtcaccgagactcattccttgctttctcctatgtctcccacctggcaggaagacatttgccatcatgtaaggagagttctgcttagtgaggcattgacatctccagccagcagtgccgtgagggaggtgggcagctcaagcctcagtcaaaccctgagatgaccatggtcccactcaacatctcagctgtgaccatgtgggagaatccaagcctgagccaatcagcctagctgctcccagagtcctgactctcagaaaccatgccagattatacatatctgcagctttaagcttctgagattttggaatgactgatgacagagcaataaataactaatacatttcaccacatatcacttagcagaatgccatggagctattaaacacaatattttatgaagattagtctatgatatggagatatactcacaatgttattagcaacacaactagaccaactgagtataggtagtataatctcaatttgttctaaaaatataaatctgtacaaagatagaaagaccagaagaaaaaaaccatttaatacttgatagataattacaatggtaaagaatttagccttgatcacttgatttgagatggaatctaacttgctagctgtatacccatagttgtggatgtgtaaccaatgatttgtaaactaattctcagtttactcgtctatataaaagagctagtaatattacctatttcatgcggcttgggagaaatgaatcaataatatatagaagggcttagttctcatattgtggcaagtacttcacaaatgataatttttactattacaatttttataaggctttctgtaattcacaaattttctaatatctattttatgacttttgaaataattcttacaatatcccttttagtaacctttattacaaaatctattgtaatctcttaaaataatattcctttttgtttttctccgagatagtctatctaatgatgttacaatagagttaccaacaaatgccatatttcattcctgagcgtctatattcttgagttcctagcaacanagaacaaagtagcaaccatttcttaagaaaatgctgagatggacaccagagtttcaagcaattttcatccagaaggtcacatgttaggngtaaaagctatatggaatcttgaacaagcatagcatctaatagccttatttgattaaaaaaatgaatacacacaaaaattttttgaagactaactaccccttagaaatgttcgttaacttggtcagtnatataagcctacctcccatttattcaatagatcaggtaactcccctctttgttatgagcctagttttctagaggtggaccagattccatcatatgtacatcactcagctagttgagctctctaaatgaaaacttcagccgtagccactggatagaagaatacaagaaggaatgccgacttgaggagcaagttgtgttgagttcaggcattgctttggagaatctgcttcttcacctgctggcttaaagggttggatgacctgaggcagcagcagaagtttagacaattatggttggatgattcttaactgtcctaatcccaagtcctcaatttataagtgaggaactggaaaatcattcacacagctagctgcaagcaatgacagccttggagagaaatcaacctgtgtacagctcagtcccatctgagttctttggagaacaaactccagcagctacttctagaaaatatagacagcatattcagccaatctcctgagctggtgggacatttttacatgaacaaggcctccctccacatgaattgcaaagattcagtggactttgcatgattattcttctaatcttacattaagctttattttggattttaaaaaaatctgccacgtgtaagggcaccaatgtccaccaatattgttatataaaataacattattaatccttcctgtttatcttttaatcagaactaagagggatggtggatgatgaatgcatgagtcatacttacttcatgattctataaatcctaattttcacttttttnaaataaaaattgcangcaaaccaaaaagaagctgcctaaaacagacgtggagatactctacttaggtttcccagggaaagacaattttaaaaaacaattttagcaacaaaaatacatgggcagggaatacacgcatttattatcatttttcctcttaaagcagctatgatgagacacgtccaaaacacctgctcttgtgtactgcccagtttcacgtgagttctgtgggataacactgaatccactcttcaactacagtgaggaagtgatagaactgcttctggcacaccaaagaacagcacagaggtccaaatacatcttccttaggtgcccatgaatttaaatttatttctgctttatcctttaaaaaaaaatctaacgatttcaaatgccttgctgaaatcaacaccctctgcaacagccctctcaggatagttcatcctagtaggtctgtcaaaactgaaacaccaacatgtgagttcctcctctgggttttaaatgttagtactgtgactacttctttgtttgttttcacttttaattgacaaataataactgtatatgttatacagtaaatctgacattttgatataaaatgataactagtgactatttattgctgtgatgttgtccccgcttgtttattggctctgatggaacttttcaggggaatggttataactgaaaaatctgtaatgctaggaatttaacttttctacataaaatgcattttttcttactgatat

SEQ ID NO: 81417 - DNA, 723 bp, Homo sapiens
tttttttagcgaatgaaatattgaagtataagattccttttatttttcaaaccaatggggctgtgtctattgtccccctcggtccccaggggtggggggccttggaaggcagggcggtgttggggggctggggggcaggctgaatgtgtgtgtgtgggtgtgtatgtgtggagtgtgagtgtgtgtttccatggtaggactccagtcccagctgctgcctaggctcctgtgggtcctgtgggtccccctcccctgttcaccttccccaacagggctatagtttaagggtgtcccaggccttggctggttggctgggcccagctcctgggggctgggcagggcagggcagggccgggtccacttccattgttagcagttgtttgcagaattttctcttttaccattcctctctttttgttctcgcccagagtgggtggttttttgttgttgttttagattttcatgtgaaggcagttttttttcttttttaactccccatccccctatgcagggtgtcatttcaccatccacatccacatccttgtttgtgtttctggccctcgtcctccctgcctctcatctgcctccccaacccccacctgggcccccaagtgagattgcacatttaactactgtaaggagaggagcggcgttggcaaatgtgaaccatgagaatatcagtgatactgatgagaataaactaaacgcctttgtaacagcaaa

SEQ ID NO: 81418 - DNA, 1805 bp, Homo sapiens
tttttttagcgaatgaaatattgaagtataagattccttttatttttcaaaccaatggggctgtgtctattgtccccctcggtccccaggggtggggggccttggaaggcagggcggtgttggggggctggggggcaggctgaatgtgtgtgtgtgggtgtgtatgtgtggagtgtgagtgtgtgtttccatggtaggactccagtcccagctgctgcctaggctcctgtgggtcctgtgggtccccctcccctgttcaccttccccaacagggctatagtttaagggtgtcccaggccttggctggttggctgggcccagctcctgggggctgggcagggcagggcagggccgggtccacttccattgttagcagttgtttgcagaattttctcttttaccattcctctctttttgttctcgcccagagtgggtggttttttgttgttgttttagattttcatgtgaaggcagttttttttcttttttaactccccatccccctatgcagggtgtcatttcaccatccacatccacatccttgtttgtgtttctggccctcgtcctccctgcctctcatctgcctccccaacccccacctacccactgctcccaggggtctctccaggggcagggggattttaggagatggggtgggggccagcccctactggacccttgtaatctgatttggagaccatccccccgatgggaccagcagccccgccggcccactgggggtccctcttaacatctgcttgttgcgggggtcagtcatgagtgccagggtctggctggggtcttggcactgtcttcctggccggggcctgaaaccttagcccccagccggcctgagtgggggatattgacacccccagctaaagcacaagcaccttagtcacccctcctctccccccgcctcctggcctgccaccccaccccagcgtttaccccaaagcacaatgccctggtcacttggcaagcggctgggcctgacggaggccgaggggcagaccggggctccagccagacccctgaaaggaagcaggtgctcccccacttccaggccttagttggggtgggggggccagctcctgggcctggggtcttctcacccccacccccttgtcctgggtaggcccctgcctgcccctctctgccttttcctcgggtgtccctcctcgagcccctgtggcattggcttgggtggcagagcccacttgtttcagggaccccaggaggtgccccctggctcccaggactgtgtgtgggtccggggggtgggggggtggggagaagggtcgggcagggggtgcaggggaggaaactcctcaccaggagagccaaagacagggttgtgccttaccccaggagccacccctgtaccccccttgccctgccattcaccctccacccctacccctgggcggcctgctgctttttccttctcttcctcccctgccctgagctgcatggttcccccaccctgggcagccaggaaggaatctgaatggagaatcaccaaccaccagagaaaaaagactgtggggccctcccctgccaactccccttccctggccgcccactcaacccacacctctttcacgcaggacaggctgcccaccctgtccacgtgaagtgccaacgccctccccaccctgggccgagcccccacccctccctgggcccccaagtgagattgcacatttaactactgtaaggagaggagcggcgttggcaaatgtgaaccatgagaatatcagtgatactgatgagaataaactaaacgcctttgtaacagcaaa

SEQ ID NO: 81419 - DNA, 1583 bp, Homo sapiens
tttttttagcgaatgaaatattgaagtataagattccttttatttttcaaaccaatggggctgtgtctattgtccccctcggtccccaggggtggggggccttggaaggcagggcggtgttggggggctggggggcaggctgaatgtgtgtgtgtgggtgtgtatgtgtggagtgtgagtgtgtgtttccatggtaggactccagtcccagctgctgcctaggctcctgtgggtcctgtgggtccccctcccctgttcaccttccccaacagggctatagtttaagggtgtcccaggccttggctggttggctgggcccagctcctgggggctgggcagggcagggcagggccgggtccacttccattgttagcagttgtttgcagaattttctcttttaccattcctctctttttgttctcgcccagagtgggtggttttttgttgttgttttagattttcatgtgaaggcagttttttttcttttttaactccccatccccctatgcagggtgtcatttcaccatccacatccacatccttgtttgtgtttctggccctcgtcctccctgcctctcatctgcctccccaacccccacctacccactgctcccaggggtctctccaggggcagggggattttaggagatggggtgggggccagcccctactggacccttgtaatctgatttggagaccatccccccgatgggaccagcagccccgccggcccactgggggtccctcttaacatctgcttgttgcgggggtcagtcatgagtgccagggtctggctggggtcttggcactgtcttcctggccggggcctgaaaccttagcccccagccggcctgagtgggggatattgacacccccagctaaagcacaagcaccttagtcacccctcctctccccccgccctgcctgcccctctctgccttttcctcgggtgtccctcctcgagcccctgtggcattggcttgggtggcagagcccacttgtttcagggaccccaggaggtgccccctggctcccaggactgtgtgtgggtccggggggtgggggggtggggagaagggtcgggcagggggtgcaggggaggaaactcctcaccaggagagccaaagacagggttgtgccttaccccaggagccacccctgtaccccccttgccctgccattcaccctccacccctacccctgggcggcctgctgctttttccttctcttcctcccctgccctgagctgcatggttcccccaccctgggcagccaggaaggaatctgaatggagaatcaccaaccaccagagaaaaaagactgtggggccctcccctgccaactccccttccctggccgcccactcaacccacacctctttcacgcaggacaggctgcccaccctgtccacgtgaagtgccaacgccctccccaccctgggccgagcccccacccctccctgggcccccaagtgagattgcacatttaactactgtaaggagaggagcggcgttggcaaatgtgaaccatgagaatatcagtgatactgatgagaataaactaaacgcctttgtaacagcaaa

SEQ ID NO: 81420 - DNA, 1611 bp, Homo sapiens
tttttttagcgaatgaaatattgaagtataagattccttttatttttcaaaccaatggggctgtgtctattgtccccctcggtccccaggggtggggggccttggaaggcagggcggtgttggggggctggggggcaggctgaatgtgtgtgtgtgggtgtgtatgtgtggagtgtgagtgtgtgtttccatggtaggactccagtcccagctgctgcctaggctcctgtgggtcctgtgggtccccctcccctgttcaccttccccaacagggctatagtttaagggtgtcccaggccttggctggttggctgggcccagctcctgggggctgggcagggcagggcagggccgggtccacttccattgttagcagttgtttgcagaattttctcttttaccattcctctctttttgttctcgcccagagtgggtggttttttgttgttgttttagattttcatgtgaaggcagttttttttcttttttaactccccatccccctatgcagggtgtcatttcaccatccacatccacatccttgtttgtgtttctggccctcgtcctccctgcctctcatctgcctccccaacccccacctacccactgctcccaggggtctctccaggggcagggggattttaggagatggggtgggggccagcccctactggacccttgtaatctgatttggagaccatccccccgatgggaccagcagccccgccggcccactgggggtccctcttaacatctgcttgttgcgggggtcagtcatgagtgccagggtctggctggggtcttggcactgtcttcctgaccggggctccagccagacccctgaaaggaagcaggtgctcccccacttccaggccttagttggggtgggggggccagctcctgggcctggggtcttctcacccccacccccttgtcctgggtaggcccctgcctgcccctctctgccttttcctcgggtgtccctcctcgagcccctgtggcattggcttgggtggcagagcccacttgtttcagggaccccaggaggtgccccctggctcccaggactgtgtgtgggtccggggggtgggggggtggggagaagggtcgggcagggggtgcaggggaggaaactcctcaccaggagagccaaagacagggttgtgccttaccccaggagccacccctgtaccccccttgccctgccattcaccctccacccctacccctgggcggcctgctgctttttccttctcttcctcccctgccctgagctgcatggttcccccaccctgggcagccaggaaggaatctgaatggagaatcaccaaccaccagagaaaaaagactgtggggccctcccctgccaactccccttccctggccgcccactcaacccacacctctttcacgcaggacaggctgcccaccctgtccacgtgaagtgccaacgccctccccaccctgggccgagcccccacccctccctgggcccccaagtgagattgcacatttaactactgtaaggagaggagcggcgttggcaaatgtgaaccatgagaatatcagtgatactgatgagaataaactaaacgcctttgtaacagcaaa

SEQ ID NO: 81421 - DNA, 1741 bp, Homo sapiens
tttttttagcgaatgaaatattgaagtataagattccttttatttttcaaaccaatggggctgtgtctattgtccccctcggtccccaggggtggggggccttggaaggcagggcggtgttggggggctggggggcaggctgaatgtgtgtgtgtgggtgtgtatgtgtggagtgtgagtgtgtgtttccatggtaggactccagtcccagctgctgcctaggctcctgtgggtcctgtgggtccccctcccctgttcaccttccccaacagggctatagtttaagggtgtcccaggccttggctggttggctgggcccagctcctgggggctgggcagggcagggcagggccgggtccacttccattgttagcagttgtttgcagaattttctcttttaccattcctctctttttgttctcgcccagagtgggtggttttttgttgttgttttagattttcatgtgaaggcagttttttttcttttttaactccccatccccctatgcagggtgtcatttcaccatccacatccacatccttgtttgtgtttctggccctcgtcctccctgcctctcatctgcctccccaacccccacctacccactgctcccaggggtctctccaggggcagggggattttaggagatggggtgggggccagcccctactggacccttgtaatctgatttggagaccatccccccgatgggaccagcagccccgccggcccactgggggtccctcttaacatctgcttgttgcgggggtcagtcatgagtgccagggtctggctggggtcttggcactgtcttcctggccggggcctgaaaccttagcccccagccggcctgagtgggggatattgacacccccagctaaagcacaagcaccttagtcacccctcctctccccccgcctcctggcctgccaccccaccccagcgtttaccccaaagcacaatgccctggtcacttggcaagcggctgggcctgacggaggccgaggggcagaccggggctccagccagacccctgaaaggaagcaggtgctcccccacttccaggccttagttggggtgggggggccagctcctgggcctggggtcttctcacccccacccccttgtcctgggtaggcccctgcctgcccctctctgccttttcctcgggtgtccctcctcgagcccctgtggcattggcttgggtggcagagcccacttgtttcagggaccccaggaggtgccccctggctcccaggactgtgtgtgggtccggggggtgggggggtggggagaagggtcgggcagggggtgcaggggaggaaactcctcaccaggagagccaaagacagggttgtgccttaccccaggagccacccctgtaccccccttgccctgccattcaccctccacccctacccctgggcggcctgctgctttttccttctcttcctcccctgccctgagctgcatggttcccccaccctgggcagccaggaaggaatctgaatggagaatcactcaacccacacctctttcacgcaggacaggctgcccaccctgtccacgtgaagtgccaacgccctccccaccctgggccgagcccccacccctccctgggcccccaagtgagattgcacatttaactactgtaaggagaggagcggcgttggcaaatgtgaaccatgagaatatcagtgatactgatgagaataaactaaacgcctttgtaacagcaaa

SEQ ID NO: 81422 - DNA, 1044 bp, Homo sapiens
tttttttagcgaatgaaatattgaagtataagattccttttatttttcaaaccaatggggctgtgtctattgtccccctcggtccccaggggtggggggccttggaaggcagggcggtgttggggggctggggggcaggctgaatgtgtgtgtgtgggtgtgtatgtgtggagtgtgagtgtgtgtttccatggtaggactccagtcccagctgctgcctaggctcctgtgggtcctgtgggtccccctcccctgttcaccttccccaacagggctatagtttaagggtgtcccaggccttggctggttggctgggcccagctcctgggggctgggcagggcagggcagggccgggtccacttccattgttagcagttgtttgcagaattttctcttttaccattcctctctttttgttctcgcccagagtgggtggttttttgttgttgttttagattttcatgtgaaggcagttttttttcttttttaactccccatccccctatgcagggtgtcatttcaccatccacatccacatccttgtttgtgtttctggccctcgtcctccctgcctctcatctgcctccccaacccccacctacccactgctcccaggggtctctccaggggcagggggattttaggagatggggtgggggccagcccctactggacccttgtaatctgatttggagaccatccccccgatgggaccagcagccccgccggcccactgggggtccctcttaacatctgcttgttgcgggggtcagtcatgagtgccagggtctggctggggtcttggcactgtcttcctggccggggcctgaaaccttagcccccagccggcctgagtgggggatattgacacccccagctaaagcacaagcaccttagtcacccctcctctccccccgccctgggcccccaagtgagattgcacatttaactactgtaaggagaggagcggcgttggcaaatgtgaaccatgagaatatcagtgatactgatgagaataaactaaacgcctttgtaacagcaaa

SEQ ID NO: 81423 - DNA, 5218 bp, Homo sapiens
aggcattgaacaaacatttattttttgccttccacatgccaggacctactgcgtctcctccggatgggtgctcctcgccgacaaagtctagattgtgattatctcaaggacttgagttaccctcacttccgacctcctctctcacaaactggttccaggcggggagactgaggatgggctggggaggctggcagaggcgatccccacctcgcggagcacaacatctgctgtgttctgcggcgagcgcctgtcaagcagtgggaggaaaaagcgcttggagccaccagcccactcttaagcgaaactcgcctggaaaacaccccgcctcccagcagagtttctgccggtttctttagaagggtggtgcggaaaagcaacttttgggaacttgaaggagtggggtgtggggcgaagtggaaagagcacacaacgcgaccccactcagtccccgcttgggactcccatcccggcatcaggcgtagtgggcggtccgggccagggccagggccagagcggcggcggcgaggccatgccgagggcccgtcggccgcagttccccgtccggcctcgcgggggcgccggcgctgccgatcaggtgaccgagggcccgttcggggctgcgggaagcggcctcgttctcagccgccggagacgccgccgccgccgccgccgccgccacacctagtggagcagccggggaaggcggctcgttgggggctggggcggagagcgccgggggtgggggcggaagggcggcgggcggaaggcaggaggctgccggggcgcgggctgctgcgggagaaggggctccgaggagtccgccgcggctcgctctgtcgccggcgcgggattggggcgcgagggccatgggcgcgctctcctaaggcggaggtcgcgggcgggaggggaggaggcccgagagaggctgctgcgaaggccgcgggcccgtgactgggcgcgaggcggccggcggcggcggcggcaccagcaccaccatgtcgcgctcagtgctgcagcccagtcagcagaagctggcggagaagctcaccatcctcaacgaccggggcgtcggcatgctcacccgcctctacaacatcaagaagcaaggacaagtttggaaggcatgtggagaccccaaggcaaaaccatcctatcttatcgacaaaaacctggaatctgctgtgaaattcatagtcagaaaattccctgctgtagaaacccgcaacaacaatcaacagcttgcacaactacagaaagaaaaatcagagattctgaaaaatctggcattatattacttcacatttgtagatgttatggaatttaaggaccatgtttgtgaattgctgaatactattgacgtttgccaagtcttctttgatattactgtaaactttgatttaacaaagaactacttagatttaattataacctatacaacactaatgatactgctgtctcgaattgaagaaaggaaggcaatcattggattatacaactatgcccatgaaatgactcatggagcaagtgacagagaatacccacgccttggccagatgattgtggattatgaaaaccctttaaagaagatgatggaagaatttgtaccccatagcaagtctctttcagatgcactaatttctcttcaaatggtatatcctcgaaggaatctttcagctgaccagtggagaaatgcccagttattgagcctcatcagtgcacctagtacaatgcttaatccagcacagtccgacactatgccttgtgaatacctctctttggatgcaatggaaaagtggattatctttggctttattttgtgccatgggatcctaaatactgacgctacagcactgaacctttggaaactagctcttcaaagtagctcttgcctctctctctttcgggatgaagttttccacattcacaaagctgcagaagacttatttgtaaacatacgaggctataataaacgtattaatgacataagagaatgcaaggaggcagccgtgtcacatgctggttcaatgcacagagaaagacgcaagtttttaagatctgcactgaaggaattggctactgtcctctctgatcaacctggattgctaggtcccaaggcactttttgtttttatggcattatcctttgcccgtgatgaaatcatctggctacttcgtcatgcagataacatgccaaagaagagtgcagacgactttatagataagcacattgctgaattaatattttacatggaagaacttagagcacatgtgaggaaatacggacctgtaatgcagaggtattacgtgcagtacctttctggctttgatgctgttgtcctcaatgaactcgtgcagaatctttctgtttgccctgaagatgaatcaatcatcatgtcctcttttgttaacactatgacttccctaagtgtaaaacaagttgaagatggggaagtatttgatttcagaggaatgagattagattggtttaggttacaggcatatactagtgtctcaaaggcttcacttggccttgcagatcacagagaacttggaaagatgatgaatacaataatttttcatacaaaaatggtagattccttggtggaaatgttggtggaaacatcagatctctccatattttgtttttatagtcgtgcttttgagaagatgtttcaacagtgtttggagttaccctctcaatcaagatactcaattgcatttccactactttgcactcattttatgagttgcacgcatgaactatgtccagaagagcgacatcatattggagatcgcagtctttccttatgtaatatgttcctagatgaaatggccaaacaagctcgaaatctcatcactgatatttgcacagaacagtgtacccttagtgaccagttgctacccaagcattgtgccaaaactatcagtcaagcagtgaataagaaatcaaaaaagcagactggtaagaaaggggaacctgaaagggagaaaccaggtgttgagagcatgaggaaaaacaggctggttgtgaccaaccttgataaattgcacactgcactttctgagttatgcttctctataaattatgtaccaaacatggtggtatgggaacatacctttaccccacgagaatatttgacttctcatctggaaatacgctttaccaagtcaattgttgggatgactatgtataatcaagccacacaggaaattgcaaaaccttcagaacttctaacaagtgtaagagcatacatgaccgtactccagtcaatagaaaactatgtgcagattgatattacaagagtatttaataatgtgcttcttcaacaaacacaacatttagacagtcatggagagccaaccattacaagtctatacacaaattggtatttggaaactttgttacgacaagtcagcaatggccatatagcatattttcctgcaatgaaagcgtttgtgaacttacctacagaaaatgaattaacattcaatgcagaggaatattctgacatatcagaaatgaggtcattatcagaactactaggcccatatggtatgaagtttctaagtgaaagccttatgtggcatatttcatcacaagttgctgaacttaagaaacttgtggtggagaatgttgatgtgttaacacaaatgaggaccagctttgacaaaccagaccagatggctgcactgtttaaaagattatcatctgttgacagtgtcttgaagaggatgacaataattggtgtaattttatccttccgatcattggcacaagaagcacttagagatgtgttatcctaccacattccttttcttgtaagttcaattgaagattttaaggatcacattccaagggaaactgatatgaaggttgcaatgaatgtgtatgagttatcatcagctgccggattaccttgtgagattgatcctgcattggtcgtagctctttcttcacaaaaatcggaaaacattagtccagaagaagagtataaaattgcctgccttctcatggtgtttgtggcagtttctttgccaacactggccagtaatgtgatgtctcagtacagccctgctatagaagggcattgcaacaacatacattgcttggccaaagccatcaaccagattgctgcagctttgtttacaattcacaaaggaagcattgaagaccgtcttaaagaatttctggcgcttgcatcctccagtctactgaaaattggccaggagacagataaaactacaacaagaaatagagaatctgtttatttactgctagatatgattgtacaagaatctccattccttacaatggatcttttggaatcttgttttccttatgtcttgctgagaaatgcataccatgctgtctacaaacaaagtgttacatcttctgcataaaattacctacttaatcaagataagcacgcatttttgttgccttggttttacctgtagactgtggaactattttaccttaagacctgaaaaagttttgtggattataaatttctttcatacggttgtattttctgatcattggtttcttaatatggttgtactacagtatacttggttgatttaggttgcacattcactgaattcactgagattattcctataattttaaagtatcatttatttgaaaaacatacattatcaacatgtttttgatatttgataatgaaaaaaatctttgcttgtttatttctgaaaaagaactgtatttagtgattattttagatagtgatattatagcattcatctgtgtgtaaattatttcatatagggaagagttctgatctgtacctatggttcttattgaaaacaacattggatgtgcatttctgtgatgttatgaatacatttctactttattttgaaacatttgccaaactaaatactgtaacactgtataacatttaaaaatgttaaagaactgcttagtattagaagcagatcatttcccaaaattctaagagcagcagcatatgttgttgcttgtataaagcctagcgataatttttagactaacttccatggtgccctgttggcattagcactaccattgtaccctgctgtataataaacaatcttagacatttatcaactgttgatacaaatgttagtccctaaccactttttatatatgttttaaatttttgaaattcaagtgtaccttccataacataaaataaacactagactgtatcacactt

SEQ ID NO: 81424 - DNA, 4304 bp, Homo sapiens
aggcattgaacaaacatttattttttgccttccacatgccaggacctactgcgtctcctccggatgggtgctcctcgccgacaaagtctagattgtgattatctcaaggacttgagttaccctcacttccgacctcctctctcacaaactggttccaggcggggagactgaggatgggctggggaggctggcagaggcgatccccacctcgcggagcacaacatctgctgtgttctgcggcgagcgcctgtcaagcagtgggaggaaaaagcgcttggagccaccagcccactcttaagcgaaactcgcctggaaaacaccccgcctcccagcagagtttctgccggtttctttagaagggtggtgcggaaaagcaacttttgggaacttgaaggagtggggtgtggggcgaagtggaaagagcacacaacgcgaccccactcagtccccgcttgggactcccatcccggcatcaggcgtagtgggcggtccgggccagggccagggccagagcggcggcggcgaggccatgccgagggcccgtcggccgcagttccccgtccggcctcgcgggggcgccggcgctgccgatcaggtgaccgagggcccgttcggggctgcgggaagcggcctcgttctcagccgccggagacgccgccgccgccgccgccgccgccacacctagtggagcagccggggaaggcggctcgttgggggctggggcggagagcgccgggggtgggggcggaagggcggcgggcggaaggcaggaggctgccggggcgcgggctgctgcgggagaaggggctccgaggagtccgccgcggctcgctctgtcgccggcgcgggattggggcgcgagggccatgggcgcgctctcctaaggcggaggtcgcgggcgggaggggaggaggcccgagagaggctgctgcgaaggccgcgggcccgtgactgggcgcgaggcggccggcggcggcggcggcaccagcaccaccatgtcgcgctcagtgctgcagcccagtcagcagaagctggcggagaagctcaccatcctcaacgaccggggcgtcggcatgctcacccgcctctacaacatcaagaaggcatgtggagaccccaaggcaaaaccatcctatcttatcgacaaaaacctggaatctgctgtgaaattcatagtcagaaaattccctgctgtagaaacccgcaacaacaatcaacagcttgcacaactacagaaagaaaaatcagagattctgaaaaatctggcattatattacttcacatttgtagatgttatggaatttaaggcacattgctgaattaatattttacatggaagaacttagagcacatgtgaggaaatacggacctgtaatgcagaggtattacgtgcagtacctttctggctttgatgctgttgtcctcaatgaactcgtgcagaatctttctgtttgccctgaagatgaatcaatcatcatgtcctcttttgttaacactatgacttccctaagtgtaaaacaagttgaagatggggaagtatttgatttcagaggaatgagattagattggtttaggttacaggcatatactagtgtctcaaaggcttcacttggccttgcagatcacagagaacttggaaagatgatgaatacaataatttttcatacaaaaatggtagattccttggtggaaatgttggtggaaacatcagatctctccatattttgtttttatagtcgtgcttttgagaagatgtttcaacagtgtttggagttaccctctcaatcaagatactcaattgcatttccactactttgcactcattttatgagttgcacgcatgaactatgtccagaagagcgacatcatattggagatcgcagtctttccttatgtaatatgttcctagatgaaatggccaaacaagctcgaaatctcatcactgatatttgcacagaacagtgtacccttagtgaccagttgctacccaagcattgtgccaaaactatcagtcaagcagtgaataagaaatcaaaaaagcagactggtaagaaaggggaacctgaaagggagaaaccaggtgttgagagcatgaggaaaaacaggctggttgtgaccaaccttgataaattgcacactgcactttctgagttatgcttctctataaattatgtaccaaacatggtggtatgggaacatacctttaccccacgagaatatttgacttctcatctggaaatacgctttaccaagtcaattgttgggatgactatgtataatcaagccacacaggaaattgcaaaaccttcagaacttctaacaagtgtaagagcatacatgaccgtactccagtcaatagaaaactatgtgcagattgatattacaagagtatttaataatgtgcttcttcaacaaacacaacatttagacagtcatggagagccaaccattacaagtctatacacaaattggtatttggaaactttgttacgacaagtcagcaatggccatatagcatattttcctgcaatgaaagcgtttgtgaacttacctacagaaaatgaattaacattcaatgcagaggaatattctgacatatcagaaatgaggtcattatcagaactactaggcccatatggtatgaagtttctaagtgaaagccttatgtggcatatttcatcacaagttgctgaacttaagaaacttgtggtggagaatgttgatgtgttaacacaaatgaggaccagctttgacaaaccagaccagatggctgcactgtttaaaagattatcatctgttgacagtgtcttgaagaggatgacaataattggtgtaattttatccttccgatcattggcacaagaagcacttagagatgtgttatcctaccacattccttttcttgtaagttcaattgaagattttaaggatcacattccaagggaaactgatatgaaggttgcaatgaatgtgtatgagttatcatcagctgccggattaccttgtgagattgatcctgcattggtcgtagctctttcttcacaaaaatcggaaaacattagtccagaagaagagtataaaattgcctgccttctcatggtgtttgtggcagtttctttgccaacactggccagtaatgtgatgtctcagtacagccctgctatagaagggcattgcaacaacatacattgcttggccaaagccatcaaccagattgctgcagctttgtttacaattcacaaaggaagcattgaagaccgtcttaaagaatttctggcgcttgcatcctccagtctactgaaaattggccaggagacagataaaactacaacaagaaatagagaatctgtttatttactgctagatatgattgtacaagaatctccattccttacaatggatcttttggaatcttgttttccttatgtcttgctgagaaatgcataccatgctgtctacaaacaaagtgttacatcttctgcataaaattacctacttaatcaagataagcacgcatttttgttgccttggttttacctgtagactgtggaactattttaccttaagacctgaaaaagttttgtggattataaatttctttcatacggttgtattttctgatcattggtttcttaatatggttgtactacagtatacttggttgatttaggttgcacattcactgaattcactgagattattcctataattttaaagtatcatttatttgaaaaacatacattatcaacatgtttttgatatttgataatgaaaaaaatctttgcttgtttatttctgaaaaagaactgtatttagtgattattttagatagtgatattatagcattcatctgtgtgtaaattatttcatatagggaagagttctgatctgtacctatggttcttattgaaaacaacattggatgtgcatttctgtgatgttatgaatacatttctactttattttgaaacatttgccaaactaaatactgtaacactgtataacatttaaaaatgttaaagaactgcttagtattagaagcagatcatttcccaaaattctaagagcagcagcatatgttgttgcttgtataaagcctagcgataatttttagactaacttccatggtgccctgttggcattagcactaccattgtaccctgctgtataataaacaatcttagacatttatcaactgttgatacaaatgttagtccctaaccactttttatatatgttttaaatttttgaaattcaagtgtaccttccataacataaaataaacactagactgtatcacactt

SEQ ID NO: 81425 - DNA, 4811 bp, Homo sapiens
aggcattgaacaaacatttattttttgccttccacatgccaggacctactgcgtctcctccggatgggtgctcctcgccgacaaagtctagattgtgattatctcaaggacttgagttaccctcacttccgacctcctctctcacaaactggttccaggcggggagactgaggatgggctggggaggctggcagaggcgatccccacctcgcggagcacaacatctgctgtgttctgcggcgagcgcctgtcaagcagtgggaggaaaaagcgcttggagccaccagcccactcttaagcgaaactcgcctggaaaacaccccgcctcccagcagagtttctgccggtttctttagaagggtggtgcggaaaagcaacttttgggaacttgaaggagtggggtgtggggcgaagtggaaagagcacacaacgcgaccccactcagtccccgcttgggactcccatcccggcatcaggcgtagtgggcggtccgggccagggccagggccagagcggcggcggcgaggccatgccgagggcccgtcggccgcagttccccgtccggcctcgcgggggcgccggcgctgccgatcaggtgaccgagggcccgttcggggctgcgggaagcggcctcgttctcagccgccggagacgccgccgccgccgccgccgccgccacacctagtggagcagccggggaaggcggctcgttgggggctggggcggagagcgccgggggtgggggcggaagggcggcgggcggaaggcaggaggctgccggggcgcgggctgctgcgggagaaggggctccgaggagtccgccgcggctcgctctgtcgccggcgcgggattggggcgcgagggccatgggcgcgctctcctaaggcggaggtcgcgggcgggaggggaggaggcccgagagaggctgctgcgaaggccgcgggcccgtgactgggcgcgaggcggccggcggcggcggcggcaccagcaccaccatgtcgcgctcagtgctgcagcccagtcagcagaagctggcggagaagctcaccatcctcaacgaccggggcgtcggcatgctcacccgcctctacaacatcaagaaggcatgtggagaccccaaggcaaaaccatcctatcttatcgacaaaaacctggaatctgctgtgaaattcatagtcagaaaattccctgctgtagaaacccgcaacaacaatcaacagcttgcacaactacagaaagaaaaatcagagattctgaaaaatctggcattatattacttcacatttgtagatgttatggaatttaaggaccatgtttgtgaattgctgaatactattgacgtttgccaagtcttctttgatattactgtaaactttgatttaacaaagaactacttagatttaattataacctatacaacactaatgatactgctgtctcgaattgaagaaaggaaggcaatcattggattatacaactatgcccatgaaatgactcatggagcaagtgacagagaatacccacgccttggccagatgattgtggattatgaaaaccctttaaagaagatgatggaagaatttgtaccccatagcaagtctctttcagatgcactaatttctcttcaaatggtatatcctcgaaggaatctttcagctgaccagtggagaaatgcccagttattgagcctcatcagtgcacctagtacaatgcttaatccagcacagtccgacactatgccttgtgaatacctctctttggatgcaatggaaaagtggattatctttggctttattttgtgccatgggatcctaaatactgacgctacagcactgaacctttggaaactagctcttcaaagtagctcttgcctctctctctttcgggatgaagttttccacattcacaaagctgcagaagacttatttgtaaacatacgaggctataataaacgtattaatgacataagagaatgcaaggaggcagccgtgtcacatgctggttcaatgcacagagaaagacgcaagtttttaagatctgcactgaaggaattggctactgtcctctctgatcaacctggattgctaggtcccaaggcactttttgtttttatggcattatcctttgcccgtgatgaaatcatctggctacttcgtcatgcagataacatgccaaagaagagtgcagacgactttatagataagcacattgctgaattaatattttacatggaagaacttagagcacatgtgaggaaatacggacctgtaatgcagaggtattacgtgcagtacctttctggctttgatgctgttgtcctcaatgaactcgtgcagaatctttctgtttgccctgaagatgaatcaatcatcatgtcctcttttgttaacactatgacttccctaagtgtaaaacaagttgaagatggggaagtatttgatttcagaggaatgagattagattggtttaggttacaggcatatactagtgtctcaaaggcttcacttggccttgcagatcacagagaacttggaaagatgatgaatacaataatttttcatacaaaaatggtagattccttggtggaaatgttggtggaaacatcagatctctccatattttgtttttatagtcgtgcttttgagaagatgtttcaacagtgtttggagttaccctctcaatcaagatactcaattgcatttccactactttgcactcattttatgagttgcacgcatgaactatgtccagaagagcgacatcatattggagatcgcagtctttccttatgtaatatgttcctagatgaaatggccaaacaagctcgaaatctcatcactgatatttctggccaaacccaagggaaaaaaaaccaaaaagggggggttttggggggcttttaaacccccgtttagtgaccagttgctacccaagcattgtgccaaaactatcagtcaagcagtgaataagaaatcaaaaaagcagactggtaagaaaggggaacctgaaagggagaaaccaggtgttgagagcatgaggaaaaacaggctggttgtgaccaaccttgataaattgcacactgcactttctgagttatgcttctctataaattatgtaccaaacatggtggtatgggaacatacctttaccccacgagaatatttgacttctcatctggaaatacgctttaccaagtcaattgttgggatgactatgtataatcaagccacacaggaaattgcaaaaccttcagaacttctaacaagtgtaagagcatacatgaccgtactccagtcaatagaaaactatgtgcagattgatattacaagagtatttaataatgtgcttcttcaacaaacacaacatttagacagtcatggagagccaaccattacaagtctatacacaaattggtatttggaaactttgttacgacaagtcagcaatggccatatagcatattttcctgcaatgaaagcgtttgtgaacttacctacagaaaatgaattaacattcaatgcagaggaatattctgacatatcagaaatgaggtcattatcagaactactaggcccatatggtatgaagtttctaagtgaaagccttatgtggcatatttcatcacaagttgctgaacttaagaaacttgtggtggagaatgttgatgtgttaacacaaatgaggaccagctttgacaaaccagaccagatggctgcactgtttaaaagattatcatctgttgacagtgtcttgaagaggatgacaataattggagaatttctggcgcttgcatcctccagtctactgaaaattggccaggagacagataaaactacaacaagaaatagagaatctgtttatttactgctagatatgattgtacaagaatctccattccttacaatggatcttttggaatcttgttttccttatgtcttgctgagaaatgcataccatgctgtctacaaacaaagtgttacatcttctgcataaaattacctacttaatcaagataagcacgcatttttgttgccttggttttacctgtagactgtggaactattttaccttaagacctgaaaaagttttgtggattataaatttctttcatacggttgtattttctgatcattggtttcttaatatggttgtactacagtatacttggttgatttaggttgcacattcactgaattcactgagattattcctataattttaaagtatcatttatttgaaaaacatacattatcaacatgtttttgatatttgataatgaaaaaaatctttgcttgtttatttctgaaaaagaactgtatttagtgattattttagatagtgatattatagcattcatctgtgtgtaaattatttcatatagggaagagttctgatctgtacctatggttcttattgaaaacaacattggatgtgcatttctgtgatgttatgaatacatttctactttattttgaaacatttgccaaactaaatactgtaacactgtataacatttaaaaatgttaaagaactgcttagtattagaagcagatcatttcccaaaattctaagagcagcagcatatgttgttgcttgtataaagcctagcgataatttttagactaacttccatggtgccctgttggcattagcactaccattgtaccctgctgtataataaacaatcttagacatttatcaactgttgatacaaatgttagtccctaaccactttttatatatgttttaaatttttgaaattcaagtgtaccttccataacataaaataaacactagactgtatcacactt

SEQ ID NO: 81426 - DNA, 5200 bp, Homo sapiens
aggcattgaacaaacatttattttttgccttccacatgccaggacctactgcgtctcctccggatgggtgctcctcgccgacaaagtctagattgtgattatctcaaggacttgagttaccctcacttccgacctcctctctcacaaactggttccaggcggggagactgaggatgggctggggaggctggcagaggcgatccccacctcgcggagcacaacatctgctgtgttctgcggcgagcgcctgtcaagcagtgggaggaaaaagcgcttggagccaccagcccactcttaagcgaaactcgcctggaaaacaccccgcctcccagcagagtttctgccggtttctttagaagggtggtgcggaaaagcaacttttgggaacttgaaggagtggggtgtggggcgaagtggaaagagcacacaacgcgaccccactcagtccccgcttgggactcccatcccggcatcaggcgtagtgggcggtccgggccagggccagggccagagcggcggcggcgaggccatgccgagggcccgtcggccgcagttccccgtccggcctcgcgggggcgccggcgctgccgatcaggtgaccgagggcccgttcggggctgcgggaagcggcctcgttctcagccgccggagacgccgccgccgccgccgccgccgccacacctagtggagcagccggggaaggcggctcgttgggggctggggcggagagcgccgggggtgggggcggaagggcggcgggcggaaggcaggaggctgccggggcgcgggctgctgcgggagaaggggctccgaggagtccgccgcggctcgctctgtcgccggcgcgggattggggcgcgagggccatgggcgcgctctcctaaggcggaggtcgcgggcgggaggggaggaggcccgagagaggctgctgcgaaggccgcgggcccgtgactgggcgcgaggcggccggcggcggcggcggcaccagcaccaccatgtcgcgctcagtgctgcagcccagtcagcagaagctggcggagaagctcaccatcctcaacgaccggggcgtcggcatgctcacccgcctctacaacatcaagaaggcatgtggagaccccaaggcaaaaccatcctatcttatcgacaaaaacctggaatctgctgtgaaattcatagtcagaaaattccctgctgtagaaacccgcaacaacaatcaacagcttgcacaactacagaaagaaaaatcagagattctgaaaaatctggcattatattacttcacatttgtagatgttatggaatttaaggaccatgtttgtgaattgctgaatactattgacgtttgccaagtcttctttgatattactgtaaactttgatttaacaaagaactacttagatttaattataacctatacaacactaatgatactgctgtctcgaattgaagaaaggaaggcaatcattggattatacaactatgcccatgaaatgactcatggagcaagtgacagagaatacccacgccttggccagatgattgtggattatgaaaaccctttaaagaagatgatggaagaatttgtaccccatagcaagtctctttcagatgcactaatttctcttcaaatggtatatcctcgaaggaatctttcagctgaccagtggagaaatgcccagttattgagcctcatcagtgcacctagtacaatgcttaatccagcacagtccgacactatgccttgtgaatacctctctttggatgcaatggaaaagtggattatctttggctttattttgtgccatgggatcctaaatactgacgctacagcactgaacctttggaaactagctcttcaaagtagctcttgcctctctctctttcgggatgaagttttccacattcacaaagctgcagaagacttatttgtaaacatacgaggctataataaacgtattaatgacataagagaatgcaaggaggcagccgtgtcacatgctggttcaatgcacagagaaagacgcaagtttttaagatctgcactgaaggaattggctactgtcctctctgatcaacctggattgctaggtcccaaggcactttttgtttttatggcattatcctttgcccgtgatgaaatcatctggctacttcgtcatgcagataacatgccaaagaagagtgcagacgactttatagataagcacattgctgaattaatattttacatggaagaacttagagcacatgtgaggaaatacggacctgtaatgcagaggtattacgtgcagtacctttctggctttgatgctgttgtcctcaatgaactcgtgcagaatctttctgtttgccctgaagatgaatcaatcatcatgtcctcttttgttaacactatgacttccctaagtgtaaaacaagttgaagatggggaagtatttgatttcagaggaatgagattagattggtttaggttacaggcatatactagtgtctcaaaggcttcacttggccttgcagatcacagagaacttggaaagatgatgaatacaataatttttcatacaaaaatggtagattccttggtggaaatgttggtggaaacatcagatctctccatattttgtttttatagtcgtgcttttgagaagatgtttcaacagtgtttggagttaccctctcaatcaagatactcaattgcatttccactactttgcactcattttatgagttgcacgcatgaactatgtccagaagagcgacatcatattggagatcgcagtctttccttatgtaatatgttcctagatgaaatggccaaacaagctcgaaatctcatcactgatatttgcacagaacagtgtacccttagtgaccagttgctacccaagcattgtgccaaaactatcagtcaagcagtgaataagaaatcaaaaaagcagactggtaagaaaggggaacctgaaagggagaaaccaggtgttgagagcatgaggaaaaacaggctggttgtgaccaaccttgataaattgcacactgcactttctgagttatgcttctctataaattatgtaccaaacatggtggtatgggaacatacctttaccccacgagaatatttgacttctcatctggaaatacgctttaccaagtcaattgttgggatgactatgtataatcaagccacacaggaaattgcaaaaccttcagaacttctaacaagtgtaagagcatacatgaccgtactccagtcaatagaaaactatgtgcagattgatattacaagagtatttaataatgtgcttcttcaacaaacacaacatttagacagtcatggagagccaaccattacaagtctatacacaaattggtatttggaaactttgttacgacaagtcagcaatggccatatagcatattttcctgcaatgaaagcgtttgtgaacttacctacagaaaatgaattaacattcaatgcagaggaatattctgacatatcagaaatgaggtcattatcagaactactaggcccatatggtatgaagtttctaagtgaaagccttatgtggcatatttcatcacaagttgctgaacttaagaaacttgtggtggagaatgttgatgtgttaacacaaatgaggaccagctttgacaaaccagaccagatggctgcactgtttaaaagattatcatctgttgacagtgtcttgaagaggatgacaataattggtgtaattttatccttccgatcattggcacaagaagcacttagagatgtgttatcctaccacattccttttcttgtaagttcaattgaagattttaaggatcacattccaagggaaactgatatgaaggttgcaatgaatgtgtatgagttatcatcagctgccggattaccttgtgagattgatcctgcattggtcgtagctctttcttcacaaaaatcggaaaacattagtccagaagaagagtataaaattgcctgccttctcatggtgtttgtggcagtttctttgccaacactggccagtaatgtgatgtctcagtacagccctgctatagaagggcattgcaacaacatacattgcttggccaaagccatcaaccagattgctgcagctttgtttacaattcacaaaggaagcattgaagaccgtcttaaagaatttctggcgcttgcatcctccagtctactgaaaattggccaggagacagataaaactacaacaagaaatagagaatctgtttatttactgctagatatgattgtacaagaatctccattccttacaatggatcttttggaatcttgttttccttatgtcttgctgagaaatgcataccatgctgtctacaaacaaagtgttacatcttctgcataaaattacctacttaatcaagataagcacgcatttttgttgccttggttttacctgtagactgtggaactattttaccttaagacctgaaaaagttttgtggattataaatttctttcatacggttgtattttctgatcattggtttcttaatatggttgtactacagtatacttggttgatttaggttgcacattcactgaattcactgagattattcctataattttaaagtatcatttatttgaaaaacatacattatcaacatgtttttgatatttgataatgaaaaaaatctttgcttgtttatttctgaaaaagaactgtatttagtgattattttagatagtgatattatagcattcatctgtgtgtaaattatttcatatagggaagagttctgatctgtacctatggttcttattgaaaacaacattggatgtgcatttctgtgatgttatgaatacatttctactttattttgaaacatttgccaaactaaatactgtaacactgtataacatttaaaaatgttaaagaactgcttagtattagaagcagatcatttcccaaaattctaagagcagcagcatatgttgttgcttgtataaagcctagcgataatttttagactaacttccatggtgccctgttggcattagcactaccattgtaccctgctgtataataaacaatcttagacatttatcaactgttgatacaaatgttagtccctaaccactttttatatatgttttaaatttttgaaattcaagtgtaccttccataacataaaataaacactagactgtatcacactt

SEQ ID NO: 81427 - DNA, 4765 bp, Homo sapiens
aggcattgaacaaacatttattttttgccttccacatgccaggacctactgcgtctcctccggatgggtgctcctcgccgacaaagtctagattgtgattatctcaaggacttgagttaccctcacttccgacctcctctctcacaaactggttccaggcggggagactgaggatgggctggggaggctggcagaggcgatccccacctcgcggagcacaacatctgctgtgttctgcggcgagcgcctgtcaagcagtgggaggaaaaagcgcttggagccaccagcccactcttaagcgaaactcgcctggaaaacaccccgcctcccagcagagtttctgccggtttctttagaagggtggtgcggaaaagcaacttttgggaacttgaaggagtggggtgtggggcgaagtggaaagagcacacaacgcgaccccactcagtccccgcttgggactcccatcccggcatcaggcgtagtgggcggtccgggccagggccagggccagagcggcggcggcgaggccatgccgagggcccgtcggccgcagttccccgtccggcctcgcgggggcgccggcgctgccgatcaggtgaccgagggcccgttcggggctgcgggaagcggcctcgttctcagccgccggagacgccgccgccgccgccgccgccgccacacctagtggagcagccggggaaggcggctcgttgggggctggggcggagagcgccgggggtgggggcggaagggcggcgggcggaaggcaggaggctgccggggcgcgggctgctgcgggagaaggggctccgaggagtccgccgcggctcgctctgtcgccggcgcgggattggggcgcgagggccatgggcgcgctctcctaaggcggaggtcgcgggcgggaggggaggaggcccgagagaggctgctgcgaaggccgcgggcccgtgactgggcgcgaggcggccggcggcggcggcggcaccagcaccaccatgtcgcgctcagtgctgcagcccagtcagcagaagctggcggagaagctcaccatcctcaacgaccggggcgtcggcatgctcacccgcctctacaacatcaagaaggcatgtggagaccccaaggcaaaaccatcctatcttatcgacaaaaacctggaatctgctgtgaaattcatagtcagaaaattccctgctgtagaaacccgcaacaacaatcaacagcttgcacaactacagaaagaaaaatcagagattctgaaaaatctggcattatattacttcacatttgtagatgttatggaatttaaggaccatgtttgtgaattgctgaatactattgacgtttgccaagtcttctttgatattactgtaaactttgatttaacaaagaactacttagatttaattataacctatacaacactaatgatactgctgtctcgaattgaagaaaggaaggcaatcattggattatacaactatgcccatgaaatgactcatggagcaagtgacagagaatacccacgccttggccagatgattgtggattatgaaaaccctttaaagaagatgatggaagaatttgtaccccatagcaagtctctttcagatgcactaatttctcttcaaatggtatatcctcgaaggaatctttcagctgaccagtggagaaatgcccagttattgagcctcatcagtgcacctagtacaatgcttaatccagcacagtccgacactatgccttgtgaatacctctctttggatgcaatggaaaagtggattatctttggctttattttgtgccatgggatcctaaatactgacgctacagcactgaacctttggaaactagctcttcaaagtagctcttgcctctctctctttcgggatgaagttttccacattcacaaagctgcagaagacttatttgtaaacatacgaggctataataaacgtattaatgacataagagaatgcaaggaggcagccgtgtcacatgctggttcaatgcacagagaaagacgcaagtttttaagatctgcactgaaggaattggctactgtcctctctgatcaacctggattgctaggtcccaaggcactttttgtttttatggcattatcctttgcccgtgatgaaatcatctggctacttcgtcatgcagataacatgccaaagaagagtgcagacgactttatagataagcacattgctgaattaatattttacatggaagaacttagagcacatgtgaggaaatacggacctgtaatgcagaggtattacgtgcagtacctttctggctttgatgctgttgtcctcaatgaactcgtgcagaatctttctgtttgccctgaagatgaatcaatcatcatgtcctcttttgttaacactatgacttccctaagtgtaaaacaagttgaagatggggaagtatttgatttcagaggaatgagattagattggtttaggttacaggcatatactagtgtctcaaaggcttcacttggccttgcagatcacagagaacttggaaagatgatgaatacaataatttttcatacaaaaatggtagattccttggtggaaatgttggtggaaacatcagatctctccatattttgtttttatagtcgtgcttttgagaagatgtttcaacagtgtttggagttaccctctcaatcaagatactcaattgcatttccactactttgcactcattttatgagttgcacgcatgaactatgtccagaagagcgacatcatattggagatcgcagtctttccttatgtaatatgttcctagatgaaatggccaaacaagctcgaaatctcatcactgatatttgcacagaacagtgtacccttagtgaccagttgctacccaagcattgtgccaaaactatcagtcaagcagtgaataagaaatcaaaaaagcagactggtaagaaaggggaacctgaaagggagaaaccaggtgttgagagcatgaggaaaaacaggctggttgtgaccaaccttgataaattgcacactgcactttctgagttatgcttctctataaattatgtaccaaacatggtggtatgggaacatacctttaccccacgagaatatttgacttctcatctggaaatacgctttaccaagtcaattgttgggatgactatgtataatcaagccacacaggaaattgcaaaaccttcagaacttctaacaagtgtaagagcatacatgaccgtactccagtcaatagaaaactatgtgcagattgatattacaagagtatttaataatgtgcttcttcaacaaacacaacatttagacagtcatggagagccaaccattacaagtctatacacaaattggtatttggaaactttgttacgacaagtcagcaatggccatatagcatattttcctgcaatgaaagcgtttgtgaacttacctacagaaaatgaattaacattcaatgcagaggaatattctgacatatcagaaatgaggtcattatcagaactactaggcccatatggtatgaagtttctaagtgaaagccttatgtggcatatttcatcacaagttgctgaacttaagaaacttgtggtggagaatgttgatgtgttaacacaaatgaggaccagctttgacaaaccagaccagatggctgcactgtttaaaagattatcatctgttgacagtgtcttgaagaggatgacaataattggagaatttctggcgcttgcatcctccagtctactgaaaattggccaggagacagataaaactacaacaagaaatagagaatctgtttatttactgctagatatgattgtacaagaatctccattccttacaatggatcttttggaatcttgttttccttatgtcttgctgagaaatgcataccatgctgtctacaaacaaagtgttacatcttctgcataaaattacctacttaatcaagataagcacgcatttttgttgccttggttttacctgtagactgtggaactattttaccttaagacctgaaaaagttttgtggattataaatttctttcatacggttgtattttctgatcattggtttcttaatatggttgtactacagtatacttggttgatttaggttgcacattcactgaattcactgagattattcctataattttaaagtatcatttatttgaaaaacatacattatcaacatgtttttgatatttgataatgaaaaaaatctttgcttgtttatttctgaaaaagaactgtatttagtgattattttagatagtgatattatagcattcatctgtgtgtaaattatttcatatagggaagagttctgatctgtacctatggttcttattgaaaacaacattggatgtgcatttctgtgatgttatgaatacatttctactttattttgaaacatttgccaaactaaatactgtaacactgtataacatttaaaaatgttaaagaactgcttagtattagaagcagatcatttcccaaaattctaagagcagcagcatatgttgttgcttgtataaagcctagcgataatttttagactaacttccatggtgccctgttggcattagcactaccattgtaccctgctgtataataaacaatcttagacatttatcaactgttgatacaaatgttagtccctaaccactttttatatatgttttaaatttttgaaattcaagtgtaccttccataacataaaataaacactagactgtatcacactt

SEQ ID NO: 81428 - DNA, 1784 bp, Homo sapiens
  misc_feature (14)..(15): n is a, c, g, or t
aaagaaagaaaaannggaaagggaaaagaaaatacaaaattgaaaaaaaaaggaatcttggtaccacttactgcaaaacttctgcaaggcctcagctacagaaagcccagagacagaaagtaaactctttcatgacccttgatcatcagatcatcaatccaactcttaaatggtcacaacctgcagtgccaagtggtgggcctcttgtgcagcatgcacacacaactctggacagtgatgctggcctcacagaaaacccactcaccaagttactagctattgggaaagaagatgacaatgcacaatggcatatggaggacgttattgaggatataatcggtatggaatcaagttttaaagaggaaggagcagactctcctctgctaatgcaaagaacattatctggaagtattttggatgtgtatagcggtgaacaaggaatttcaccaattaacatggggcttacaagtgcttcttgtccaagtagtctaccaatgaaaagagaaattacagaaactgacactagagctttagcaaaagagagacaaaaaaaggacaaccacaacctcattgaaagaagaagaaggtataatattaattaccgaatcaaggagcttggcactcttattccaaagtctaatgatcctgatatgcgctggaacaaaggaaccattctaaaagcatcagtggagtacatcaagtggctacaaaaagaacaacagagagcccgagaattggaacacagacagaagaaattagagcaggctaacaggcgacttctacttcggattcaggaactagaaattcaggctcgtactcatggtctgccaaccctggcttcacttggcacggttgatttaggtgctcatgtcaccaaacagcagagccatcctgagcagaattcagtagactattgccaacaactgactgtgtctcaggggccaagccctgagctctgtgatcaagctatagccttttctgatcctttgtcatacttcacagatttatcatttagtgctgcattgaaagaggaacaaagattggatggcatgctattggatgacacaatctctccatttggaacagatcctctgctatctgccacttcccctgcagtttcccaagaaagcagtaggagaagtagctttagctcagatgatggtgatgaattataagaaataaacagacccaattcatcaactggaaagcaattctatgctggtgctatgcaattatgctctgtgtttcatatgttgctttggcttattttttttcttaaaggaatgtgttgttcatgaaaaactgatagaagcaacagaagaattcgcaggaagaaaaatcatagtgttaatgaattattgagggcgaaaaaaaggtgttttcttctttgactacggagtccaaatccacttaaattctgttttcctgaaaagaggtacagcataagaaatagctctttattgatgttttaaaagcagcaacttggtggtgtactactggaactaatgactgcaaagtgttaaacgactgaaatatacaaacagtctcttagttactcatttccatcttctcttcaactttcacatcagtcttccggaatcaagatcaacatatcaggtggtcattgcctttctccattgtctagtagacatgtctaaagttcaaactttataggataaataaatgtataatagattatctgtcacttgtggttgaaaggcaaatctacaataaatgtgagaattttccacaataaaatatggataacttataaaaacattggt

SEQ ID NO: 81429 - DNA, 1487 bp, Homo sapiens
tcttggttattgtttgcaagtttaaggaaaagaaaatgatgaaggagaaagagaaaaccattgctattgtgaaggttatagacacttcaaagttaaaactgttatctggaagtattttggatgtgtatagcggtgaacaaggaatttcaccaattaacatggggcttacaagtgcttcttgtccaagtagtctaccaatgaaaagagaaattacagaaactgacactagagctttagcaaaagagagacaaaaaaaggacaaccacaacctcattgaaagaagaagaaggtataatattaattaccgaatcaaggagcttggcactcttattccaaagtctaatgatcctgatatgcgctggaacaaaggaaccattctaaaagcatcagtggagtacatcaagtggctacaaaaagaacaacagagagcccgagaattggaacacagacagaagaaattagagcaggctaacaggcgacttctacttcggattcaggaactagaaattcaggctcgtactcatggtctgccaaccctggcttcacttggcacggttgatttaggtgctcatgtcaccaaacagcagagccatcctgagcagaattcagtagactattgccaacaactgactgtgtctcaggggccaagccctgagctctgtgatcaagctatagccttttctgatcctttgtcatacttcacagatttatcatttagtgctgcattgaaagaggaacaaagattggatggcatgctattggatgacacaatctctccatttggaacagatcctctgctatctgccacttcccctgcagtttcccaagaaagcagtaggagaagtagctttagctcagatgatggtgatgaattataagaaataaacagacccaattcatcaactggaaagcaattctatgctggtgctatgcaattatgctctgtgtttcatatgttgctttggcttattttttttcttaaaggaatgtgttgttcatgaaaaactgatagaagcaacagaagaattcgcaggaagaaaaatcatagtgttaatgaattattgagggcgaaaaaaaggtgttttcttctttgactacggagtccaaatccacttaaattctgttttcctgaaaagaggtacagcataagaaatagctctttattgatgttttaaaagcagcaacttggtggtgtactactggaactaatgactgcaaagtgttaaacgactgaaatatacaaacagtctcttagttactcatttccatcttctcttcaactttcacatcagtcttccggaatcaagatcaacatatcaggtggtcattgcctttctccattgtctagtagacatgtctaaagttcaaactttataggataaataaatgtataatagattatctgtcacttgtggttgaaaggcaaatctacaataaatgtgagaattttccacaataaaatatggataacttataaaaacattggt

SEQ ID NO: 81430 - DNA, 1423 bp, Homo sapiens
atcgtttactttggttgtcccttctggcatggtgcatatgttatgggaagagggattataatttggtgctgtttgtagagatgacaacactgataaaatccactcattgctggtcccagcacacctggaaagttctgcaaggcctcagctacagaaagcccagagacagaaagtaaactctttcatgacccttgatcatcagatcatcaatccaactcttaaatggtcacaacctgcagtgccaagtggtgggcctcttgtgcagcatgcacacacaactctggacagtgatgctggcctcacagaaaacccactcaccaagttactagctattgggaaagaagatgacaatgcacaatggcatatggaggacgttattgaggatataatcggtatggaatcaagttttaaagaggaaggagcagactctcctctgctaatgcaaagaacattatctggaagtattttggatgtgtatagcggtgaacaaggaatttcaccaattaacatggggcttacaagtgcttcttgtccaagtagtctaccaatgaaaagagaaattacagaaactgacactagagctttagcaaaagagagacaaaaaaaggacaaccacaacctcattgaaagaagaagaaggtataatattaattaccgaatcaaggagcttggcactcttattccaaagtctaatgatcctgatatgcgctggaacaaaggaaccattctaaaagcatcagtggagtacatcaagtggctacaaaaagaacaacagagagcccgagaattggaacacagacagaagaaattagagcaggctaacaggcgacttctacttcggattcaggaactagaaattcaggctcgtactcatggtctgccaaccctggcttcacttggcacggttgatttaggtgctcatgtcaccaaacagcagagccatcctgagcagaattcagtagactattgccaacaactgactgtgtctcaggggccaagccctgagctctgtgatcaagctatagccttttctgatcctttgtcatacttcacagatttatcatttagtgctgcattgaaagaggaacaaagattggatggcatgctattggatgacacaatctctccatttggaacagatcctctgctatctgccacttcccctgcagtttcccaagaaagcagtaggagaagtagctttagctcagatgatggtgatgaattataagaaataaacagacccaattcatcaactggaaagcaattctatgctggtgctatgcaattatgctctgtgtttcatatgttgctttggcttattttttttcttaaaggaatgtgttgttcatgaaaaactgatagaagcaacagaagaattcgcaggaagaatatctaccgtggggaatcctcgggtcaccgagcg

SEQ ID NO: 81431 - DNA, 754 bp, Homo sapiens
tgcaaggcctcagctacagaaagcccagagacagaaagtaaactctttcatgacccttgatcatcagatcatcaatccaactcttaaatggtcacaacctgcagtgccaagtggtgggcctcttgtgcagcatgcacacacaactctggacagtgatgctggcctcacagaaaacccactcaccaagttactagctattgggaaagaagatgacaatgcacaatggcatgtatgtctaatggctggttataaaaatatatcatcagtttttgaaaaaacctctattaaagtaattgaagtcaacattttacagtaaacattctgattgcaaatgtaacaaaagaaatgtgcttttaattaattattctctatttattaactatatgcatataaattcctatgcataataaattataaaaattcttgtttaatatgcacttcaaatatgtattaatgtgaattaaaatagacactaatagtggtatgtgtttagaagatttagccctaattgtaaatgttttctgataaatttagttgaaatatttatcagtagttaaattgtcttaaatatccattaacataaaacagacagaaattacttaaatagcagtaaatttttgctgtagaaattgactattagaataagactaataattttattgcacttatatgaaattatatctggatcttttaacttttgcttttctatacattcaattctatttttaataaatagttggctactatttactaa

SEQ ID NO: 81432 - DNA, 1837 bp, Homo sapiens
atcgtttactttggttgtcccttctggcatggtgcatatgttatgggaagagggattataatttggtgctgtttgtagagatgacaacactgataaaatccactcattgctggtcccagcacacctggaaagttctgcaaggcctcagctacagaaagcccagagacagaaagtaaactctttcatgacccttgatcatcagatcatcaatccaactcttaaatggtcacaacctgcagtgccaagtggtgggcctcttgtgcagcatgcacacacaactctggacagtgatgctggcctcacagaaaacccactcaccaagttactagctattgggaaagaagatgacaatgcacaatggcatatggaggacgttattgaggatataatcggtatggaatcaagttttaaagaggaaggagcagactctcctctgctaatgcaaagaacattatctggaagtattttggatgtgtatagcggtgaacaaggaatttcaccaattaacatggggcttacaagtgcttcttgtccaagtagtctaccaatgaaaagagaaattacagaaactgacactagagctttagcaaaagagagacaaaaaaaggacaaccacaacctcattgaaagaagaagaaggtataatattaattaccgaatcaaggagcttggcactcttattccaaagtctaatgatcctgatatgcgctggaacaaaggaaccattctaaaagcatcagtggagtacatcaagtggctacaaaaagaacaacagagagcccgagaattggaacacagacagaagaaattagagcaggctaacaggcgacttctacttcggattcaggaactagaaattcaggctcgtactcatggtctgccaaccctggcttcacttggcacggttgatttaggtgctcatgtcaccaaacagcagagccatcctgagcagaattcagtagactattgccaacaactgactgtgtctcaggggccaagccctgagctctgtgatcaagctatagccttttctgatcctttgtcatacttcacagatttatcatttagtgctgcattgaaagaggaacaaagattggatggcatgctattggatgacacaatctctccatttggaacagatcctctgctatctgccacttcccctgcagtttcccaagaaagcagtaggagaagtagctttagctcagatgatggtgatgaattataagaaataaacagacccaattcatcaactggaaagcaattctatgctggtgctatgcaattatgctctgtgtttcatatgttgctttggcttattttttttcttaaaggaatgtgttgttcatgaaaaactgatagaagcaacagaagaattcgcaggaagaaaaatcatagtgttaatgaattattgagggcgaaaaaaaggtgttttcttctttgactacggagtccaaatccacttaaattctgttttcctgaaaagaggtacagcataagaaatagctctttattgatgttttaaaagcagcaacttggtggtgtactactggaactaatgactgcaaagtgttaaacgactgaaatatacaaacagtctcttagttactcatttccatcttctcttcaactttcacatcagtcttccggaatcaagatcaacatatcaggtggtcattgcctttctccattgtctagtagacatgtctaaagttcaaactttataggataaataaatgtataatagattatctgtcacttgtggttgaaaggcaaatctacaataaatgtgagaattttccacaataaaatatggataacttataaaaacattggt

SEQ ID NO: 81433 - DNA, 1867 bp, Homo sapiens
ggagagaagacttcaaatcagccaggaaatcagtgcccatagaacagagttccacatgcagttttcatacaaaccagtgttgcatagacttgtcccagcaagaccacaaatttattcaagtcaattaccatcctttaccagggtcccagcacacctggaaagttctgcaaggcctcagctacagaaagcccagagacagaaagtaaactctttcatgacccttgatcatcagatcatcaatccaactcttaaatggtcacaacctgcagtgccaagtggtgggcctcttgtgcagcatgcacacacaactctggacagtgatgctggcctcacagaaaacccactcaccaagttactagctattgggaaagaagatgacaatgcacaatggcatatggaggacgttattgaggatataatcggtatggaatcaagttttaaagaggaaggagcagactctcctctgctaatgcaaagaacattatctggaagtattttggatgtgtatagcggtgaacaaggaatttcaccaattaacatggggcttacaagtgcttcttgtccaagtagtctaccaatgaaaagagaaattacagaaactgacactagagctttagcaaaagagagacaaaaaaaggacaaccacaacctcattgaaagaagaagaaggtataatattaattaccgaatcaaggagcttggcactcttattccaaagtctaatgatcctgatatgcgctggaacaaaggaaccattctaaaagcatcagtggagtacatcaagtggctacaaaaagaacaacagagagcccgagaattggaacacagacagaagaaattagagcaggctaacaggcgacttctacttcggattcaggaactagaaattcaggctcgtactcatggtctgccaaccctggcttcacttggcacggttgatttaggtgctcatgtcaccaaacagcagagccatcctgagcagaattcagtagactattgccaacaactgactgtgtctcaggggccaagccctgagctctgtgatcaagctatagccttttctgatcctttgtcatacttcacagatttatcatttagtgctgcattgaaagaggaacaaagattggatggcatgctattggatgacacaatctctccatttggaacagatcctctgctatctgccacttcccctgcagtttcccaagaaagcagtaggagaagtagctttagctcagatgatggtgatgaattataagaaataaacagacccaattcatcaactggaaagcaattctatgctggtgctatgcaattatgctctgtgtttcatatgttgctttggcttattttttttcttaaaggaatgtgttgttcatgaaaaactgatagaagcaacagaagaattcgcaggaagaaaaatcatagtgttaatgaattattgagggcgaaaaaaaggtgttttcttctttgactacggagtccaaatccacttaaattctgttttcctgaaaagaggtacagcataagaaatagctctttattgatgttttaaaagcagcaacttggtggtgtactactggaactaatgactgcaaagtgttaaacgactgaaatatacaaacagtctcttagttactcatttccatcttctcttcaactttcacatcagtcttccggaatcaagatcaacatatcaggtggtcattgcctttctccattgtctagtagacatgtctaaagttcaaactttataggataaataaatgtataatagattatctgtcacttgtggttgaaaggcaaatctacaataaatgtgagaattttccacaataaaatatggataacttataaaaacattggt

SEQ ID NO: 81434 - DNA, 1750 bp, Homo sapiens
atcgtttactttggttgtcccttctggcatggtgcatatgttatgggaagagggattataatttggtgctgtttgtagagatgacaacactgataaaatccactcattgctggtcccagcacacctggaaagttctgcaaggcctcagctacagaaagcccagagacagaaagtaaactctttcatgacccttgatcatcagatcatcaatccaactcttaaatggtcacaacctgcagtgccaagtggtgggcctcttgtgcagcatgcacacacaactctggacagtgatgctggcctcacagaaaacccactcaccaagttactagctattgggaaagaagatgacaatgcacaatggcatttatctggaagtattttggatgtgtatagcggtgaacaaggaatttcaccaattaacatggggcttacaagtgcttcttgtccaagtagtctaccaatgaaaagagaaattacagaaactgacactagagctttagcaaaagagagacaaaaaaaggacaaccacaacctcattgaaagaagaagaaggtataatattaattaccgaatcaaggagcttggcactcttattccaaagtctaatgatcctgatatgcgctggaacaaaggaaccattctaaaagcatcagtggagtacatcaagtggctacaaaaagaacaacagagagcccgagaattggaacacagacagaagaaattagagcaggctaacaggcgacttctacttcggattcaggaactagaaattcaggctcgtactcatggtctgccaaccctggcttcacttggcacggttgatttaggtgctcatgtcaccaaacagcagagccatcctgagcagaattcagtagactattgccaacaactgactgtgtctcaggggccaagccctgagctctgtgatcaagctatagccttttctgatcctttgtcatacttcacagatttatcatttagtgctgcattgaaagaggaacaaagattggatggcatgctattggatgacacaatctctccatttggaacagatcctctgctatctgccacttcccctgcagtttcccaagaaagcagtaggagaagtagctttagctcagatgatggtgatgaattataagaaataaacagacccaattcatcaactggaaagcaattctatgctggtgctatgcaattatgctctgtgtttcatatgttgctttggcttattttttttcttaaaggaatgtgttgttcatgaaaaactgatagaagcaacagaagaattcgcaggaagaaaaatcatagtgttaatgaattattgagggcgaaaaaaaggtgttttcttctttgactacggagtccaaatccacttaaattctgttttcctgaaaagaggtacagcataagaaatagctctttattgatgttttaaaagcagcaacttggtggtgtactactggaactaatgactgcaaagtgttaaacgactgaaatatacaaacagtctcttagttactcatttccatcttctcttcaactttcacatcagtcttccggaatcaagatcaacatatcaggtggtcattgcctttctccattgtctagtagacatgtctaaagttcaaactttataggataaataaatgtataatagattatctgtcacttgtggttgaaaggcaaatctacaataaatgtgagaattttccacaataaaatatggataacttataaaaacattggt

SEQ ID NO: 81435 - DNA, 4979 bp, Homo sapiens
gtggctttgggtccccaggattctggatcgtggttgcatctggagagaaaaaaggatcaatcgacacgttttagaagtgtccgtgggtgaataaaaaaggagggggggggtgcaaaactggggttgcggatgcttaaagcaaaaaaagagaaaaggaagcgtcttgaatcctggaacaagaattaccgggtgctcgagatttcaaaaaagcgtctagaaactggtaaatacttggaccatttcagcttgaatttgacggcgaagtgttgtagagaccgtctccttgaatcattgcaaagggaccggggaaagatgagggggctccctctgtggatttatcttgctgagggatatagacctgcagctaactggatttgatttataagagagaaatctgcagtcaatgcccactcttgccacactgctaatatggaaaacagaatgttcaataggatatggtctgataaatagtgatgattgaagatgctgctccaatacatgtgaaatcaatgggagatatctgctgtccgaagatctttcagagcttttctcgacaagctcccctgtaagaaatcggaggtatattctaccattatacagtctttctcaagtggatataaatacgtttgcctcactgtaaccagacaactagacaactaatgtgggaccatggcactgcccagatgcacgtggccaaattatgtttggagagcagtgatggcatgcttggtacaccggggattgggtgccccattgactctctgtatgttgggatgtttgcttcaggctggccatgtgctatcacaaaaattggatgatgtggacccactggtggctaccaactttggaaagataagagggattaagaaggaactcaataatgaaattttggggcctgttattcaatttcttggggttccatatgcagccccaccaacaggggaacgtcgttttcagcctccagaaccaccatctccctggtcagatatcagaaatgccactcaatttgctcctgtgtgtccccagaatatcattgatggcagattgccagaagtcatgcttcctgtgtggtttactaataacttggatgtggtttcatcatatgtgcaagaccagagcgaagactgcctatatttaaatatatatgtcccgactgaggatgatattcgggacagtgggggtcccaaaccagtgatggtgtatatccatggtggctcatatatggaaggtactggaaatttatatgatggaagtgtcttggcaagttatggcaatgtgatcgtcatcacagtcaactatcgacttggagtactcggtttcttgagtacaggcgatcaggctgcaaaggggaactatggactccttgatctcatacaagctttaagatggactagtgaaaacattggattctttggtggtgaccccttaagaatcactgtttttggatctggtgctgggggttcatgtgtcaacctgctgactttatcccattattctgaaggtaaccgttggagcaattcaaccaaaggactttttcaacgagcaatagctcaaagtggaacagccctttccagctgggctgttagttttcaacctgcaaaatatgctagaatgttggccacaaaagttggttgcaatgtttcagatacagtagagttagtggaatgcctacagaagaagccttacaaagaacttgttgaccaagatattcaaccagctcgataccacatagcctttggacctgtgattgatggtgatgtaataccagacgacccccagatattgatggagcaaggagagtttctcaactatgatataatgttaggagtgaaccaaggggaagggttaaaatttgttgaaaatatagtagatagcgatgatggtatatcagctagtgattttgactttgctgtttcaaattttgttgataatttatatggatatcctgaaggcaaagatgttttgagagaaaccattaagttcatgtatactgactgggctgaccgtcataaccctgaaaccagaagaaagacattactggctttgtttacggaccatcagtgggtggcaccagctgtagccacagcggatcttcactcaaactttggttcacctacgtacttctatgccttttaccatcattgccaaacagatcaggttccagcttgggctgatgcagcccacggagacgaggttccctatgtactgggaatccccatgattggccctacagagttatttccttgcaatttctccaaaaatgatgtgatgctgagtgcagttgtaatgacatactggacaaattttgctaaaactggtgacccaaatcaaccagtccctcaagacacgaaattcattcataccaaacccaaccgttttgaagaagtagcatggaccagatattcccagaaagaccaactttatctccatattggattaaaaccaagagttaaagaacattacagagccaataaggtgaacctctggttggagttggtacctcatctgcataatctcaatgacatttctcagtatacctctacaacaactaaagtgccatcaactgacatcactttcagacctacgagaaaaaattctgtacctgtcacgtcagcctttcccactgccaagcaggatgatcccaaacaacaaccaagtccattttcagtggatcaaagggactactcaacagagctgagtgtcactattgcagttggagcatcactgctgtttctgaacatcttggcctttgcagccctgtactacaaaaaggataagaggagacatgatgttcacaggagatgcagccctcagcgcactactaccaatgatctaacccatgcacaagaagaggaaatcatgtccctccaaatgaagcacactgatttggatcatgaatgtgagtccattcatccacatgaggtggttcttcggaccgcctgtcccccagattacacactagctatgaggaggtcacctgatgatgttcccttaatgacacccaacaccattacaatgattcccaacactataccagggattcagcccttacacacattcaatacatttactggaggacagaacaatactctgccccatccccatccccacccccattcacattcaacaaccagggtatagccagataagagaaacaaactattttttttgatggattgcagtaaacgatcactgaagattccttggctttcaacctacaagacttactatttaaataaggaggaatattatgtgaatatacatatcaagaactttgggggttttgaaaaaaatgaattgtatatatacaaatcaactttaaaaacaaatttcaattgcttgaagcaattgttctgaatgatactttttcattcacattcaagaattaattttttgaagatttaagttacataatggaattaggcatgtggaacaccaaacaggaaagaactatgtctgaaatataaaaaataaaaataaaaaaacaactatgaatatgcacaagggacacaccagtggaatgtcagataattttcaccagtttttatttggagccgttttattgtgtagaccatatttacatatttggataagtacacaaagcgtcaatgctgttaatggccttagcaaaggctcatgctgaaatttgccagtaaaacaaagaagtttaaagactggcaggtacaccattatcacataagtgctgtcagtataaagttgtggggataaaggaaactggatatttttagcacgatgtgcatgataatttatatgcttggtggctgtgctgctgattaagccgtaattaaaattcttctcatcccattggagtttttaatagaagcttcctccatcaattggcagaacctaaagaagattttaaggggcaaaagtaattacaataaaataattcacagtagtttcaatatagaaggaattagctattaaaggtatttgaagaaactataggtatagtggtgaatactcgctgatatgaatcccagaaaaaaatttcctgtttttaatgttcttttcaatcccatctagataatttatagaaatataaccctaattggacatgtggtacaggatctataagttgctgtgtttttttgttactctgtattttgttccttttggtaaggtgaagtgtgtccaaagagttacttgcaacagtctttcatgatatgaggatgcccccgtattaccactctgattatagttctgagttctttgatttactcatgctgcatgacaaaatgtttactaataacaattcattataaagttatatccctctttacatcacttatctttctcactgaggttcattcactggaatttactcacgcaatctcagtagagtacaacgtagatacagaacctaggagagtcaacatctggaggattttagtctttcttacacatatgtgtgattttaaacgaatattctcagaccacaggaaactcttcatccccctgttgtttaccagtaacagtatatcacagacctttccaaatgtttgtatatgtaatcagatgtacatttatattgaaaaacaaatgagatggacttaaagagcacatcctgataaatactttctctctcacctgtactatatttctattagactaaagttatgtgattttttttttacattttttcagatgactagcaattttgatagtttataagataatgcaaagaactttctctgacaaactaactgcagtaacagaaacctttcttttcagttactctttttcaagaatgaaagattattatacaaaaaattgtatactacttgatggaaccaactttgtacatcttggccatgtcactggtcattgtgtgaaataaagataatctggataatgactattagtccaatgctaagaaacatgatctttgctcattaaagagctaaaatgtttattgctgttttgtctttcttttttctaaaaaaagaaaaaaaaga

SEQ ID NO: 81436 - DNA, 3788 bp, Homo sapiens
tgggtgggcagagcaacattgttttgacagtgaaaattaccaatttataattttttaagaaaagcatgcctagcacagaccacctgattaccaagaggaagctgaagaggagattctactagaggtttcttgagtacaggcgatcaggctgcaaaggggaactatggactccttgatctcatacaagctttaagatggactagtgaaaacattggattctttggtggtgaccccttaagaatcactgtttttggatctggtgctgggggttcatgtgtcaacctgctgactttatcccattattctgaaggtaaccgttggagcaattcaaccaaaggactttttcaacgagcaatagctcaaagtggaacagccctttccagctgggctgttagttttcaacctgcaaaatatgctagaatgttggccacaaaagttggttgcaatgtttcagatacagtagagttagtggaatgcctacagaagaagccttacaaagaacttgttgaccaagatattcaaccagctcgataccacatagcctttggacctgtgattgatggtgatgtaataccagacgacccccagatattgatggagcaaggagagtttctcaactatgatataatgttaggagtgaaccaaggggaagggttaaaatttgttgaaaatatagtagatagcgatgatggtatatcagctagtgattttgactttgctgtttcaaattttgttgataatttatatggatatcctgaaggcaaagatgttttgagagaaaccattaagttcatgtatactgactgggctgaccgtcataaccctgaaaccagaagaaagacattactggctttgtttacggaccatcagtgggtggcaccagctgtagccacagcggatcttcactcaaactttggttcacctacgtacttctatgccttttaccatcattgccaaacagatcaggttccagcttgggctgatgcagcccacggagacgaggttccctatgtactgggaatccccatgattggccctacagagttatttccttgcaatttctccaaaaatgatgtgatgctgagtgcagttgtaatgacatactggacaaattttgctaaaactggtgacccaaatcaaccagtccctcaagacacgaaattcattcataccaaacccaaccgttttgaagaagtagcatggaccagatattcccagaaagaccaactttatctccatattggattaaaaccaagagttaaagaacattacagagccaataaggtgaacctctggttggagttggtacctcatctgcataatctcaatgacatttctcagtatacctctacaacaactaaagtgccatcaactgacatcactttcagacctacgagaaaaaattctgtacctgtcacgtcagcctttcccactgccaagcaggatgatcccaaacaacaaccaagtccattttcagtggatcaaagggactactcaacagagctgagtgtcactattgcagttggagcatcactgctgtttctgaacatcttggcctttgcagccctgtactacaaaaaggataagaggagacatgatgttcacaggagatgcagccctcagcgcactactaccaatgatctaacccatgcacaagaagaggaaatcatgtccctccaaatgaagcacactgatttggatcatgaatgtgagtccattcatccacatgaggtggttcttcggaccgcctgtcccccagattacacactagctatgaggaggtcacctgatgatgttcccttaatgacacccaacaccattacaatgattcccaacactataccagggattcagcccttacacacattcaatacatttactggaggacagaacaatactctgccccatccccatccccacccccattcacattcaacaaccagggtatagccagataagagaaacaaactattttttttgatggattgcagtaaacgatcactgaagattccttggctttcaacctacaagacttactatttaaataaggaggaatattatgtgaatatacatatcaagaactttgggggttttgaaaaaaatgaattgtatatatacaaatcaactttaaaaacaaatttcaattgcttgaagcaattgttctgaatgatactttttcattcacattcaagaattaattttttgaagatttaagttacataatggaattaggcatgtggaacaccaaacaggaaagaactatgtctgaaatataaaaaataaaaataaaaaaacaactatgaatatgcacaagggacacaccagtggaatgtcagataattttcaccagtttttatttggagccgttttattgtgtagaccatatttacatatttggataagtacacaaagcgtcaatgctgttaatggccttagcaaaggctcatgctgaaatttgccagtaaaacaaagaagtttaaagactggcaggtacaccattatcacataagtgctgtcagtataaagttgtggggataaaggaaactggatatttttagcacgatgtgcatgataatttatatgcttggtggctgtgctgctgattaagccgtaattaaaattcttctcatcccattggagtttttaatagaagcttcctccatcaattggcagaacctaaagaagattttaaggggcaaaagtaattacaataaaataattcacagtagtttcaatatagaaggaattagctattaaaggtatttgaagaaactataggtatagtggtgaatactcgctgatatgaatcccagaaaaaaatttcctgtttttaatgttcttttcaatcccatctagataatttatagaaatataaccctaattggacatgtggtacaggatctataagttgctgtgtttttttgttactctgtattttgttccttttggtaaggtgaagtgtgtccaaagagttacttgcaacagtctttcatgatatgaggatgcccccgtattaccactctgattatagttctgagttctttgatttactcatgctgcatgacaaaatgtttactaataacaattcattataaagttatatccctctttacatcacttatctttctcactgaggttcattcactggaatttactcacgcaatctcagtagagtacaacgtagatacagaacctaggagagtcaacatctggaggattttagtctttcttacacatatgtgtgattttaaacgaatattctcagaccacaggaaactcttcatccccctgttgtttaccagtaacagtatatcacagacctttccaaatgtttgtatatgtaatcagatgtacatttatattgaaaaacaaatgagatggacttaaagagcacatcctgataaatactttctctctcacctgtactatatttctattagactaaagttatgtgattttttttttacattttttcagatgactagcaattttgatagtttataagataatgcaaagaactttctctgacaaactaactgcagtaacagaaacctttcttttcagttactctttttcaagaatgaaagattattatacaaaaaattgtatactacttgatggaaccaactttgtacatcttggccatgtcactggtcattgtgtgaaataaagataatctggataatgactattagtccaatgctaagaaacatgatctttgctcattaaagagctaaaatgtttattgctgttttgtctttcttttttctaaaaaaagaaaaaaaaga

SEQ ID NO: 81437 - DNA, 2689 bp, Homo sapiens
  misc_feature (2689)..(2689): n is a, c, g, or t
tgggtgggcagagcaacattgttttgacagtgaaaattaccaatttataattttttaagaaaagcatgcctagcacagaccacctgattaccaagaggaagctgaagaggagattctactagaggtttcttgagtacaggcgatcaggctgcaaaggggaactatggactccttgatctcatacaagctttaagatggactagtgaaaacattggattctttggtggtgaccccttaagaatcactgtttttggatctggtgctgggggttcatgtgtcaacctgctgactttatcccattattctgaaggtaaccgttggagcaattcaaccaaaggactttttcaacgagcaatagctcaaagtggaacagccctttccagctgggctgttagttttcaacctgcaaaatatgctagaatgttggccacaaaagttggttgcaatgtttcagatacagtagagttagtggaatgcctacagaagaagccttacaaagaacttgttgaccaagatattcaaccagctcgataccacatagcctttggacctgtgattgatggtgatgtaataccagacgacccccagatattgatggagcaaggagagtttctcaactatgatataatgttaggagtgaaccaaggggaagggttaaaatttgttgaaaatatagtagatagcgatgatggtatatcagctagtgattttgactttgctgtttcaaattttgttgataatttatatggatatcctgaaggcaaagatgttttgagagaaaccattaagttcatgtatactgactgggctgaccgtcataaccctgaaaccagaagaaagacattactggctttgtttacggaccatcagtgggtggcaccagctgtagccacagcggatcttcactcaaactttggttcacctacgtacttctatgccttttaccatcattgccaaacagatcaggttccagcttgggctgatgcagcccacggagacgaggttccctatgtactgggaatccccatgattggccctacagagttatttccttgcaatttctccaaaaatgatgtgatgctgagtgcagttgtaatgacatactggacaaattttgctaaaactggtgacccaaatcaaccagtccctcaagacacgaaattcattcataccaaacccaaccgttttgaagaagtagcatggaccagatattcccagaaagaccaactttatctccatattggattaaaaccaagagttaaagaacattacagagccaataaggtgaacctctggttggagttggtacctcatctgcataatctcaatgacatttctcagtatacctctacaacaactaaagtgccatcaactgacatcactttcagacctacgagaaaaaattctgtacctgtcacgtcagcctttcccactgccaagcaggatgatcccaaacaacaaccaagtccattttcagtggatcaaagggactactcaacagagctgagtgtcactattgcagttggagcatcactgctgtttctgaacatcttggcctttgcagccctgtactacaaaaaggataagaggagacatgatgttcacaggagatgcagccctcagcgcactactaccaatgatctaacccatgcacaagaagaggaaatcatgtccctccaaatgaagcacactgatttggatcatgaatgtgagtccattcatccacatgaggtggttcttcggaccgcctgtcccccagattacacactagctatgaggaggtcacctgatgatgttcccttaatgacacccaacaccattacaatgattcccaacactataccagggattcagcccttacacacattcaatacatttactggaggacagaacaatactctgccccatccccatccccacccccattcacattcaacaaccagggtatagccagataagagaaacaaactattttttttgatggattgcagtaaacgatcactgaagattccttggctttcaacctacaagacttactatttaaataaggaggaatattatgtgaatatacatatcaagaactttgggggttttgaaaaaaatgaattgtatatatacaaatcaactttaaaaacaaatttcaattgcttgaagcaattgttctgaatgatactttttcattcacattcaagaattaattttttgaagatttaagttacataatggaattaggcatgtggaacaccaaacaggaaagaactatgtctgaaatataaaaaataaaaataaaaaaacaactatgaatatgcacaagggacacaccagtggaatgtcagataattttcaccagtttttatttggagccgttttattgtgtagaccatatttacatatttggataagtacacaaagcgtcaatgctgttaatggccttagcaaaggctcatgctgaaatttgccagtaaaacaaagaagtttaaagactggcaggtacaccattatcacataagtgctgtcagtataaagttgtggggataaaggaaactggatatttttagcacgatgtgcatgataatttatatgcttggtggctgtgctgctgattaagccgtaattaaaattcttctcatcccattggagtttttaatagaaccatctcctgtgcgcaagagctacaacgtgttgattn

SEQ ID NO: 81438 - DNA, 368 bp, Homo sapiens
ataatcattagatcacacccctgtcttccaatcatacttcccactactgtccactcttcaacaaaccagagcataaaagtacacagctttttctgtttctttggtcttctttatttctgaagacccctgtgatatgtaaaacttatcttaaataagtttgtcagcttttctcttattaatcttttgttataggcatctcagccatgaaccttccaataggttagaaaaaggtattacttcttctcccctacagaagcttattgatcaacagagataatactttggaattatgctatctcaagagaagccatgtaggaaggattaagagtatctaatttttttacacaattatacagggatctcctatg

SEQ ID NO: 81439 - DNA, 329 bp, Homo sapiens
gatgtagttcacttataaataccattagattgtgccatgaaatgccttgtatgcaagggaatgttcacatatcaatggcttcctgattttacctctgtttccatttgcctgtgttaaactctagagttctatcattagaataccacattttagaccctggtaaggatgaaggcgcaatgccttgagcataatgagtattaaatatttccctctagttcatgccaaggaagcagtacttttatcaaatggagttctcataggattttcagtattctttaaatttctgaaaaagggtagaggaaatatgaaaacagaactttgaaatgaca

SEQ ID NO: 81440 - DNA, 161 bp, Homo sapiens
ccaaattgcagcatggccaaagtgttgacttgtctatcatactaaaacagcagcaaaccttacactaatacatccttgaacttggacattcattcagcaatcttgactgggctccaaccttggagtgagtgatgatgcctgttaccgaagtggggtacaaa

SEQ ID NO: 81441 - DNA, 550 bp, Homo sapiens
gcatgcatctagtacttgagctatcttaaattctggtgttcatgtggttttatatggcactgagttgtgatgacttttttcctgctattagcctctcagatggatgagaattatttaaagtctgcagtatagtaagatacatttagatacatttagagcactgtataattgactttgcttatattctttgttttggttaaatttgtttctaatcgtagtttaaatcttccctgacaacttaattctggtttatgaagcattattaaaagtgtgtgtggccaggcgtggtgactcataccttcaatccagttttggaggccaaggtgggtggatcacttgagcccaggagtttgagatcaacccgggcaacatggtgaaaccttgtctctacaaaaaattagccaggtgtggtagtacgtgcctgtggtcccagttactcgggaggctgacatgggaggatcacctgagtctggggaggtcgaagctgcagttagctgagattgtgccacagtggtctagcctgggtgacagagtgagaccctgtctccaa

SEQ ID NO: 81442 - DNA, 400 bp, Homo sapiens
agaaaaatgaacaaaaaatataaacagatctatagataaaggaaacaaataaatggctcttttatctacctattggaaagacacttaagaaaactattcctattaaactgacaatttaaataacgtttgataacccactccgttaccaaaagaacaaggaagacagcactcgaacaacaacagggaaacataaacttgaaatttgacagaatctatcaaaatttaagcagtaaacataaatcctttgacccagaaactgtacttctacaaatttatcctaaagaaagactctctcatgtgcaaaagttatatatgtatagggctattcattgtatcactatttgtattagcaagattgtaaacatcttaaatacccatccaaacaaaggaatgctaccat

SEQ ID NO: 81443 - DNA, 796 bp, Homo sapiens
tttcactgcagcagaaggcaaaagagctgacttagtaagcagcaagtgataggatggtgaggtggaggacaacatcctttacacggggcacccgactgtgctatggggctcaagagctgtgggtctaactttctggggttaatttccttgatttcctgtcttctgcacaatcagatcagttttgtgagactaaagccaaaatcctagaagcagaataggttctgatccatccactatcccttcaacccgtccctggtccaacctgtcttactaactaacacttctccttcctcccaacaccactagatcactacaacccatctcacagccccgacaaaaaaggtcacagcactcagctccctccaaggtacagagttcacagtgctggtatcttttcccatgagaagccaggaaaggagagggccatgtgccagctgctgccccacacagtcctctagggcttctggacgagtgtgtagtcccctcgcggcaggtcctgtacatctggtggaccactctatctctgcacagtgtgtctccagccagcacagtgtccagtatgtagcaggtactcatgacacgcttgtggaacaaaggcctggttgcccccacccctaccgttcctctttcctttctgctagatactcatctaggggtaactctatttttagggcctcacccatgactaaatcccagacatcagaactgcttcccagagctgtttggtctgtttttgttttaatctcacgccacagcaaaaattctcatgcaacacccccaaaagctgggaacccag

SEQ ID NO: 81444 - DNA, 465 bp, Homo sapiens
tggcctatccctcagaaatcccacagaatttcctggatggtgttgcattgtttccatacaatagccaaccattgttgtttgtttattttggcctggcaaatcccagctcctccaccccagttgctttctacttaggatgtcttaaaaaggacaaaattctttttctttctctgaatattttaaattcatttgaacacaacagtttgaaacatagttatgctattgtttctttactgaattaaggaaaaagagacttcctttttggcccataatttggtgggttgggggcggggagtaccatgtcatccatctgtttagcatttgcagaaagcctgttcttctcatattaacatactaaggcaaaatccagttccacaaagcccacagtgagagcaaacacctggtggagcccaaagccctggtcagcacttagggtaggagtacaagggccactggctcccttac

SEQ ID NO: 81445 - DNA, 318 bp, Homo sapiens
tcatcttaatgactttttaaaaaattttattttaagttccatgatacacatgcagggcgtgcagccttgttacataggtaaacatgttccatggtagtttgtcgcacctatcaacccatcacttaggcgttaagccccacatgcattagctgtttattctaattttgatagttaccttgactctttgcactgtgttgttatcttgccttttacatgcttcagaggcctattagtgggaagctaagcattctataatcttataataaaatcgctgtcttgtagagggcctctttctctggactgtgacctttgcatagc

SEQ ID NO: 81446 - DNA, 285 bp, Homo sapiens
cacatctcactgtcccaatcagggacaaaagagcatggctgaggattccccaaggggatgtgaattctcaagcacttccatctctccatgttcatgcaaagaaggtgccaggagccccgtggccatcctcccacaaaagacacacaggtggtggcatctggggggtcaatgtgcatggttgtgcatggtagagacccctggatggagctccatgatgtgggatttacatcccgcccatactctgctgtgagagagatggtatgcagccagtccagccatctgaag

SEQ ID NO: 81447 - DNA, 785 bp, Homo sapiens
gtttcgctgtgatctgtgggggcttaaagagcaaagcagatccaccattctgatgattctcaagccaattctttttaactagagagttagtaatcaggataaccccattaggttactggggtgggacagtaaactcttcaagctatctactccccacccccctcctccaaacacacaataacacatggtccccttgacaagctccaaggctggttaatgagtaaaaacctgtcaactgccaggacactgtgtctttcaggccagggctcacaccagccttgcactccacagtctctggagcagtagctagcctctgactccaatgctgtgccatctactcaaagaacagcagcttccccaggctaaggggtatttggaatttggaagccagatctcttggcttatagaggataagaactggacaaaacaaggcttagctctccacaatttgacttaataactagtttttgttttgtttttgagacagtctcactttgacacccaggctggaatgcagtggagtgatctcggctcactgcaacgtccacctcctgggttcaagcaattcttgtgcctcagcctcccaagtagctgggattacaggcatgtgccaccacacctggctaatttttgtatttttagtagagacggggtttcactatgttggccacactagtctcgaactcctggcttcaagtgatctgcccacctcagtctcccaactgctgggattacaggcatgagccacagcacccggccaataactagatttttaaaactcacca

SEQ ID NO: 81448 - DNA, 513 bp, Homo sapiens
gaggaaagtcatgagaagtacgaggaaaaagtaatagctgattagtatgcagatgaggtctacatctgtggttaggggtcatttcaagataaatgaactcgagcataagagtcattgtaataaataaataaataagtaaataaataaagtaaagggaattcatgaagctatatctgaagctacactaacaggcccagaaaccttgcacatttcgtgaaatacctttgctattttgtattgaaaatgcatcttttggctgggtgcggtggctcacgcctgtaatcccagcacttagggaggccgaggcaggcggatcacaaggtcaggagatcaagaccatcctggctaacacggtgaaaccccgtctctactaaaaatacaaaaaattagcagggcgtggtggcgggcgcctgtagtcccagctactggggaggctgaggcaggagaatggtgtgaacccgggaggcggaggttgcagtgagccaagatcacgtcactgcactccagcctagg

SEQ ID NO: 81449 - DNA, 974 bp, Homo sapiens
agctggacttggatgctggcttcatgaccgtgctccccagcgttcccacctggtgatgtccctcccctggaatctgccggaggcccaggactttctgacccacaggatgccccaggaatgacaccatatgacatctgaggccaggtcacacaaagcctggcagcttggcctggcctggtgaacgtgctctggagggagccagctgccacgggagaatccaactaccccgagaccaccatgctgcagggaagcccacgccagccacatgggaggccagccggccctagctgttccagccacccaactgagggcgggggcgaagaggccatcctggacggtccaccccgtttggccttcagacgactccagccccagctgccacctgattacaactgcagagagaccccaagacagggctgcctggctgagctgggcaacccacaggccaggcgataacggggtgctttaaggcactaagctttggaggagtgtttgttacacggcaatagttaacagggaactgggagtcgatttcaagctcacatggccagtccaccctgagcatgtcccctgggccatagttcagaaagcaggtgcaggtcagggttcagggccagtgtgggcctcaatattgtttcctgcccccgtggaggccgtggtggcatttggagggggtccttggaatccatgcccaaggaagcactgaagctgcctgggaccctcccaaacccaggaagggccgtcatcaagaatggtgcccaagaaagtcctgggacttcactgacacacggcacttgcaccagccgtgtagccggatcgtcttactacagactacttcctcagaagggagccctgctggttgggagatagcacctcccggaccacactgcggctatacccggcgctacacgtcagaaagcgccacgcacaccccagagatctccctatactgcgcatacaccacgcacagggca

SEQ ID NO: 81450 - DNA, 437 bp, Homo sapiens
gggaatttctgaggtccaattacagggctagtctcataataagaactaataattcataatgaaattatttgcttttaaacctcatccagacgctgttgtgaaaaatatactaacccaaccacattcctatagggtcattaacacggccagtacaaacaggtgaggtctgctgaagtcatagttctcagagcttctgtgaagagctggatgttggttctgtgacagtatcactacagggcaaccctttcataccagtcctttcatagtatggcatcctgttcttgatgtatggattttgatatccttctcagctcaggtaaatgcccaatgggtatttaacaaatatacaaatagaaactgaatccttgcatcactaaactttgtgttgccttcacacattaagacaacttagctgaaaataaagttcttgggttata

SEQ ID NO: 81451 - DNA, 3047 bp, Homo sapiens
acggggcggggcggccgcgggtcgcgggcggatgacgcgccggggccggcggaggagcagccacttcctggggccgccggccggggccgctggctgcactcagcgccggagccgggagctagcggccgccgccatgtcccaccagaccggcatccaagcaagtgaagatgttaaagagatctttgccagagccagaaatggaaagtacagacttctgaaaatatctattgaaaatgagcaacttgtgattggatcatatagtcagccttcagattcctgggataaggattatgattcctttgttttacccctgttggaggacaaacaaccatgctatatattattcaggttagattctcagaatgcccagggatatgaatggatattcattgcatggtctccagatcattctcatgttcgtcaaaaaatgttgtatgcagcaacaagagcaactctgaagaaggaatttggaggtggccacattaaagatgaagtatttggaacagtaaaggaagatgtatcattacatggatataaaaaatacttgctgtcacaatcttcccctgccccactgactgcagctgaggaagaactacgacagattaaaatcaatgaggtacagactgacgtgggtgtggacactaagcatcaaacactacaaggagtagcatttcccatttctcgagaagcctttcaggctttggaaaaattgaataatagacagctcaactatgtgcagttggaaatagatataaaaaatgaaattataattttggccaacacaacaaatacagaactgaaagatttgccaaagaggattcccaaggattcagctcgttaccatttctttctgtataaacattcccatgaaggagactatttagagtccatagtttttatttattcaatgcctggatacacatgcagtataagagagcggatgctgtattctagctgcaagagccgtctgctagaaattgtagaaagacaactacaaatggatgtaattagaaagatcgagatagacaatggggatgagttgactgcagacttcctttatgaagaagtacatcccaagcagcatgcacacaagcaaagttttgcaaaaccaaaaggtcctgcaggaaaaagaggaattcgaagactaattaggggcccagcggaaactgaagctactactgattaaagtcatcacattaaacattgtaatactagttttttaaaagtccagcttttagtacaggagaactgaaatcattccatgttgatataaagtagggaaaaaaattgtactttttggaaaatagcacttttcacttctgtgtgtttttaaaattaatgttatagaagactcatgatttctatttttgagttaaagctagaaaagggttcaacataatgtttaattttgtcacactgttttcatagcgttgattccacacttcaaatacttcttaaaattttatacagttgggccagttctagaaagtctgatgtctcaaagggtaaacttactactttcttgtgggacagaaagaccttaaaatattcatattacttaatgaatatgttaaggaccaggctagagtattttctaagctggaaacttagtgtgccttggaaaaggccgcaagttgcttactccgagtagctgtgctagctctgtcagactgtaggatcatgtctgcaacttttagaaatagtgctttatattgcagcagtcttttatatttgacttttttttaatagcattaaaattgcagatcagctcactctgaaactttaagggtaccagatattttctatactgcaggatttctgatgacattgaaagactttaaacagccttagtaaattatctttctaatgctctgtgaggccaaacatttatgttcagattgaaatttaaattaatatcattcaaaaggaaacaaaaaatgttgagttttaaaaatcaggattgacttttttctccaaaaccatacatttatgggcaaattgtgttctttatcacttccgagcaaatactcagatttaaaattactttaaagtcctggtacttaacaggctaacgtagataaacaccttaataatctcagttaatactgtatttcaaaacacatttaactgttttctaatgctttgcattatcagttacaacctagagagattttgagcctcatatttctttgatacttgaaatagagggagctagaacacttaatgtttaatctgttaaacctgctgcaagagccataactttgaggcattttctaaatgaactgtggggatccaggatttgtaatttcttgatctaaactttatgctgcataaatcacttatcggaaatgcacatttcatagtgtgaagcactcatttctaaaccttattatctaaggtaatatatgcacctttcagaaatttgtgttcgagtaagtaaagcatattagaataattgtgggttgacagatttttaaaatagaatttagagtatttggggttttgtttgtttacaaataatcagactataatatttaaacatgcaaaataactgacaataatgttgcacttgtttactaaagatataagttgttccatgggtgtacacgtagacagacacacatacacccaaattattgcattaagaatcctggagcagaccatagctgaagctgttattttcagtcaggaagactacctgtcatgaaggtataaaataatttagaagtgaatgtttttctgtaccatctatgtgcaattatactctaaattccactacactacattaaagtaaatggacattccagaatatagatgtgattatagtcttaaactaattattattaaaccaatgattgctgaaaatcagtgatgcatttgttatagagtataactcatcgtttacagtatgttttagttggcagtatcatacctagatggtgaataacatattcccagtaaatttatatagcagtgaagaattacatgccttctggtggacattttataagtgcattttatatcacaataaaaattttttctcttta

SEQ ID NO: 81452 - DNA, 769 bp, Homo sapiens
cggacgcgtgggtcgacccacgcgtcctataatatttaaacatgcaaaataactgacaataatgttgcacttgtttactaaagatataagttgttccatgggtgtacacgtagacagacacacatacacccaaattattgcattaagaatcctggagcagaccatagctgaagctgttattttcagtcaggaagactacctgtcatgaaggtataaaataatttagaagtgaatgtttttctgtaccatctatgtgcaattatactctaaattccactacactacattaaagtaaatggacattccagaatatagatgtgattatagtcttaaactaattattattaaaccaatgattgctgaaaatcagtgatgcatttgttatagagtataactcatcgtttacagtatgttttagttggcagtatcatacctagatggtgaataacatattcccagtaaatttatatagcagtgaagaattacatgccttctggtggacattttataagtgcattttatatcacaataaaaattttttctctttaagttgtgtatgttctgttggtttttctactatagtttttttaattgtttgtgtaatgtttcataattcagtacctggtgttaggttaggaatcccattcatttatttgttaattagtctgcctaagtccaaaaaggattttaagtagctttaaacctaggcaagaataattgtgactatagagtgcttagattaaaaatttgccactgttgtagcaataat

SEQ ID NO: 81453 - DNA, 3268 bp, Homo sapiens
acggggcggggcggccgcgggtcgcgggcggatgacgcgccggggccggcggaggagcagccacttcctggggccgccggccggggccgctggctgcactcagcgccggagccgggagctagcggccgccgccatgtcccaccagaccggcatccaagcaagtgaagatgttaaagagatctttgccagagccagaaatggaaagtacagacttctgaaaatatctattgaaaatgagcaacttgtgattggatcatatagtcagccttcagattcctgggataaggattatgattcctttgttttacccctgttggaggacaaacaaccatgctatatattattcaggttagattctcagaatgcccagggatatgaatggatattcattgcatggtctccagatcattctcatgttcgtcaaaaaatgttgtatgcagcaacaagagcaactctgaagaaggaatttggaggtggccacattaaagatgaagtatttggaacagtaaaggaagatgtatcattacatggatataaaaaatacttgctgtcacaatcttcccctgccccactgactgcagctgaggaagaactacgacagattaaaatcaatgaggtacagactgacgtgggtgtggacactaagcatcaaacactacaaggagtagcatttcccatttctcgagaagcctttcaggctttggaaaaattgaataatagacagctcaactatgtgcagttggaaatagatataaaaaatgaaattataattttggccaacacaacaaatacagaactgaaagatttgccaaagaggattcccaaggattcagctcgttaccatttctttctgtataaacattcccatgaaggagactatttagagtccatagtttttatttattcaatgcctggatacacatgcagtataagagagcggatgctgtattctagctgcaagagccgtctgctagaaattgtagaaagacaactacaaatggatgtaattagaaagatcgagatagacaatggggatgagttgactgcagacttcctttatgaagaagtacatcccaagcagcatgcacacaagcaaagttttgcaaaaccaaaaggtcctgcaggaaaaagaggaattcgaagactaattaggggcccagcggaaactgaagctactactgattaaagtcatcacattaaacattgtaatactagttttttaaaagtccagcttttagtacaggagaactgaaatcattccatgttgatataaagtagggaaaaaaattgtactttttggaaaatagcacttttcacttctgtgtgtttttaaaattaatgttatagaagactcatgatttctatttttgagttaaagctagaaaagggttcaacataatgtttaattttgtcacactgttttcatagcgttgattccacacttcaaatacttcttaaaattttatacagttgggccagttctagaaagtctgatgtctcaaagggtaaacttactactttcttgtgggacagaaagaccttaaaatattcatattacttaatgaatatgttaaggaccaggctagagtattttctaagctggaaacttagtgtgccttggaaaaggccgcaagttgcttactccgagtagctgtgctagctctgtcagactgtaggatcatgtctgcaacttttagaaatagtgctttatattgcagcagtcttttatatttgacttttttttaatagcattaaaattgcagatcagctcactctgaaactttaagggtaccagatattttctatactgcaggatttctgatgacattgaaagactttaaacagccttagtaaattatctttctaatgctctgtgaggccaaacatttatgttcagattgaaatttaaattaatatcattcaaaaggaaacaaaaaatgttgagttttaaaaatcaggattgacttttttctccaaaaccatacatttatgggcaaattgtgttctttatcacttccgagcaaatactcagatttaaaattactttaaagtcctggtacttaacaggctaacgtagataaacaccttaataatctcagttaatactgtatttcaaaacacatttaactgttttctaatgctttgcattatcagttacaacctagagagattttgagcctcatatttctttgatacttgaaatagagggagctagaacacttaatgtttaatctgttaaacctgctgcaagagccataactttgaggcattttctaaatgaactgtggggatccaggatttgtaatttcttgatctaaactttatgctgcataaatcacttatcggaaatgcacatttcatagtgtgaagcactcatttctaaaccttattatctaaggtaatatatgcacctttcagaaatttgtgttcgagtaagtaaagcatattagaataattgtgggttgacagatttttaaaatagaatttagagtatttggggttttgtttgtttacaaataatcagactataatatttaaacatgcaaaataactgacaataatgttgcacttgtttactaaagatataagttgttccatgggtgtacacgtagacagacacacatacacccaaattattgcattaagaatcctggagcagaccatagctgaagctgttattttcagtcaggaagactacctgtcatgaaggtataaaataatttagaagtgaatgtttttctgtaccatctatgtgcaattatactctaaattccactacactacattaaagtaaatggacattccagaatatagatgtgattatagtcttaaactaattattattaaaccaatgattgctgaaaatcagtgatgcatttgttatagagtataactcatcgtttacagtatgttttagttggcagtatcatacctagatggtgaataacatattcccagtaaatttatatagcagtgaagaattacatgccttctggtggacattttataagtgcattttatatcacaataaaaattttttctctttaagttgtgtatgttctgttggtttttctactatagtttttttaattgtttgtgtaatgtttcataattcagtacctggtgttaggttaggaatcccattcatttatttgttaattagtctgcctaagtccaaaaaggattttaagtagctttaaacctaggcaagaataattgtgactatagagtgcttagattaaaaatttgccactgttgtagcaataat

SEQ ID NO: 81454 - DNA, 3437 bp, Homo sapiens
acggggcggggcggccgcgggtcgcgggcggatgacgcgccggggccggcggaggagcagccacttcctggggccgccggccggggccgctggctgcactcagcgccggagccgggagctagcggccgccgccatgtcccaccagaccggcatccaaggtaacagcgcccggcgcgactcgcagggaaggggcttccgggagagccgggagagccgggagggctgcaggaccggcagggctggagtcgggccgggagctccggaagtcggtctcgcggggcgagccgggcctcggcgcctctccgcgctcctgcttcccgggcgctgccggcctgcgtcctcctccagcccggtccctgctgccgtcacgttgcagattgatccgaaattcgggggagcgaaggaaattggctttcgaggcggcctggttgaagggggcgtgccttccaccgtccccgacagtcgcccaactttcccccttttggtcacgtagggaagagctgggacagtggaggcgactggggcttcagtacgctgtcgagaaccagcaagtgaagatgttaaagagatctttgccagagccagaaatggaaagtacagacttctgaaaatatctattgaaaatgagcaacttgtgattggatcatatagtcagccttcagattcctgggataaggattatgattcctttgttttacccctgttggaggacaaacaaccatgctatatattattcaggttagattctcagaatgcccagggatatgaatggatattcattgcatggtctccagatcattctcatgttcgtcaaaaaatgttgtatgcagcaacaagagcaactctgaagaaggaatttggaggtggccacattaaagatgaagtatttggaacagtaaaggaagatgtatcattacatggatataaaaaatacttgctgtcacaatcttcccctgccccactgactgcagctgaggaagaactacgacagattaaaatcaatgaggtacagactgacgtgggtgtggacactaagcatcaaacactacaaggagtagcatttcccatttctcgagaagcctttcaggctttggaaaaattgaataatagacagctcaactatgtgcagttggaaatagatataaaaaatgaaattataattttggccaacacaacaaatacagaactgaaagatttgccaaagaggattcccaaggattcagctcgttaccatttctttctgtataaacattcccatgaaggagactatttagagtccatagtttttatttattcaatgcctggatacacatgcagtataagagagcggatgctgtattctagctgcaagagccgtctgctagaaattgtagaaagacaactacaaatggatgtaattagaaagatcgagatagacaatggggatgagttgactgcagacttcctttatgaagaagtacatcccaagcagcatgcacacaagcaaagttttgcaaaaccaaaaggtcctgcaggaaaaagaggaattcgaagactaattaggggcccagcggaaactgaagctactactgattaaagtcatcacattaaacattgtaatactagttttttaaaagtccagcttttagtacaggagaactgaaatcattccatgttgatataaagtagggaaaaaaattgtactttttggaaaatagcacttttcacttctgtgtgtttttaaaattaatgttatagaagactcatgatttctatttttgagttaaagctagaaaagggttcaacataatgtttaattttgtcacactgttttcatagcgttgattccacacttcaaatacttcttaaaattttatacagttgggccagttctagaaagtctgatgtctcaaagggtaaacttactactttcttgtgggacagaaagaccttaaaatattcatattacttaatgaatatgttaaggaccaggctagagtattttctaagctggaaacttagtgtgccttggaaaaggccgcaagttgcttactccgagtagctgtgctagctctgtcagactgtaggatcatgtctgcaacttttagaaatagtgctttatattgcagcagtcttttatatttgacttttttttaatagcattaaaattgcagatcagctcactctgaaactttaagggtaccagatattttctatactgcaggatttctgatgacattgaaagactttaaacagccttagtaaattatctttctaatgctctgtgaggccaaacatttatgttcagattgaaatttaaattaatatcattcaaaaggaaacaaaaaatgttgagttttaaaaatcaggattgacttttttctccaaaaccatacatttatgggcaaattgtgttctttatcacttccgagcaaatactcagatttaaaattactttaaagtcctggtacttaacaggctaacgtagataaacaccttaataatctcagttaatactgtatttcaaaacacatttaactgttttctaatgctttgcattatcagttacaacctagagagattttgagcctcatatttctttgatacttgaaatagagggagctagaacacttaatgtttaatctgttaaacctgctgcaagagccataactttgaggcattttctaaatgaactgtggggatccaggatttgtaatttcttgatctaaactttatgctgcataaatcacttatcggaaatgcacatttcatagtgtgaagcactcatttctaaaccttattatctaaggtaatatatgcacctttcagaaatttgtgttcgagtaagtaaagcatattagaataattgtgggttgacagatttttaaaatagaatttagagtatttggggttttgtttgtttacaaataatcagactataatatttaaacatgcaaaataactgacaataatgttgcacttgtttactaaagatataagttgttccatgggtgtacacgtagacagacacacatacacccaaattattgcattaagaatcctggagcagaccatagctgaagctgttattttcagtcaggaagactacctgtcatgaaggtataaaataatttagaagtgaatgtttttctgtaccatctatgtgcaattatactctaaattccactacactacattaaagtaaatggacattccagaatatagatgtgattatagtcttaaactaattattattaaaccaatgattgctgaaaatcagtgatgcatttgttatagagtataactcatcgtttacagtatgttttagttggcagtatcatacctagatggtgaataacatattcccagtaaatttatatagcagtgaagaattacatgccttctggtggacattttataagtgcattttatatcacaataaaaattttttctcttta

SEQ ID NO: 81455 - DNA, 3502 bp, Homo sapiens
acggggcggggcggccgcgggtcgcgggcggatgacgcgccggggccggcggaggagcagccacttcctggggccgccggccggggccgctggctgcactcagcgccggagccgggagctagcggccgccgccatgtcccaccagaccggcatccaaggtaacagcgcccggcgcgactcgcagggaaggggcttccgggagagccgggagagccgggagggctgcaggaccggcagggctggagtcgggccgggagctccggaagtcggtctcgcggggcgagccgggcctcggcgcctctccgcgctcctgcttcccgggcgctgccggcctgcgtcctcctccagcccggtccctgctgccgtcacgttgcagattgatccgaaattcgggggagcgaaggaaattggctttcgaggcggcctggttgaagggggcgtgccttccaccgtccccgacagtcgcccaactttcccccttttggtcacgtagggaagagctgggacagtggaggcgactggggcttcagtacgctgtcgagaaccagcaagtgaagatgttaaagagatctttgccagagccagaaatggaaagtacagacttctgaaaatatctattgaaaatgtttctgcaccacagtccatttctaatgtcagtgcttccatctctggaatggaaatcactaaacagagcaacttgtgattggatcatatagtcagccttcagattcctgggataaggattatgattcctttgttttacccctgttggaggacaaacaaccatgctatatattattcaggttagattctcagaatgcccagggatatgaatggatattcattgcatggtctccagatcattctcatgttcgtcaaaaaatgttgtatgcagcaacaagagcaactctgaagaaggaatttggaggtggccacattaaagatgaagtatttggaacagtaaaggaagatgtatcattacatggatataaaaaatacttgctgtcacaatcttcccctgccccactgactgcagctgaggaagaactacgacagattaaaatcaatgaggtacagactgacgtgggtgtggacactaagcatcaaacactacaaggagtagcatttcccatttctcgagaagcctttcaggctttggaaaaattgaataatagacagctcaactatgtgcagttggaaatagatataaaaaatgaaattataattttggccaacacaacaaatacagaactgaaagatttgccaaagaggattcccaaggattcagctcgttaccatttctttctgtataaacattcccatgaaggagactatttagagtccatagtttttatttattcaatgcctggatacacatgcagtataagagagcggatgctgtattctagctgcaagagccgtctgctagaaattgtagaaagacaactacaaatggatgtaattagaaagatcgagatagacaatggggatgagttgactgcagacttcctttatgaagaagtacatcccaagcagcatgcacacaagcaaagttttgcaaaaccaaaaggtcctgcaggaaaaagaggaattcgaagactaattaggggcccagcggaaactgaagctactactgattaaagtcatcacattaaacattgtaatactagttttttaaaagtccagcttttagtacaggagaactgaaatcattccatgttgatataaagtagggaaaaaaattgtactttttggaaaatagcacttttcacttctgtgtgtttttaaaattaatgttatagaagactcatgatttctatttttgagttaaagctagaaaagggttcaacataatgtttaattttgtcacactgttttcatagcgttgattccacacttcaaatacttcttaaaattttatacagttgggccagttctagaaagtctgatgtctcaaagggtaaacttactactttcttgtgggacagaaagaccttaaaatattcatattacttaatgaatatgttaaggaccaggctagagtattttctaagctggaaacttagtgtgccttggaaaaggccgcaagttgcttactccgagtagctgtgctagctctgtcagactgtaggatcatgtctgcaacttttagaaatagtgctttatattgcagcagtcttttatatttgacttttttttaatagcattaaaattgcagatcagctcactctgaaactttaagggtaccagatattttctatactgcaggatttctgatgacattgaaagactttaaacagccttagtaaattatctttctaatgctctgtgaggccaaacatttatgttcagattgaaatttaaattaatatcattcaaaaggaaacaaaaaatgttgagttttaaaaatcaggattgacttttttctccaaaaccatacatttatgggcaaattgtgttctttatcacttccgagcaaatactcagatttaaaattactttaaagtcctggtacttaacaggctaacgtagataaacaccttaataatctcagttaatactgtatttcaaaacacatttaactgttttctaatgctttgcattatcagttacaacctagagagattttgagcctcatatttctttgatacttgaaatagagggagctagaacacttaatgtttaatctgttaaacctgctgcaagagccataactttgaggcattttctaaatgaactgtggggatccaggatttgtaatttcttgatctaaactttatgctgcataaatcacttatcggaaatgcacatttcatagtgtgaagcactcatttctaaaccttattatctaaggtaatatatgcacctttcagaaatttgtgttcgagtaagtaaagcatattagaataattgtgggttgacagatttttaaaatagaatttagagtatttggggttttgtttgtttacaaataatcagactataatatttaaacatgcaaaataactgacaataatgttgcacttgtttactaaagatataagttgttccatgggtgtacacgtagacagacacacatacacccaaattattgcattaagaatcctggagcagaccatagctgaagctgttattttcagtcaggaagactacctgtcatgaaggtataaaataatttagaagtgaatgtttttctgtaccatctatgtgcaattatactctaaattccactacactacattaaagtaaatggacattccagaatatagatgtgattatagtcttaaactaattattattaaaccaatgattgctgaaaatcagtgatgcatttgttatagagtataactcatcgtttacagtatgttttagttggcagtatcatacctagatggtgaataacatattcccagtaaatttatatagcagtgaagaattacatgccttctggtggacattttataagtgcattttatatcacaataaaaattttttctcttta

SEQ ID NO: 81456 - DNA, 2219 bp, Homo sapiens
cttcgtgggaaaaacattccccaggagggaattttgttagacgccaaaggttttagatttaattcaaggccctggatacctcatgcctgttataagtggacgcgattgctgttattctacttccatgaacctttttgctagaagttggtaagaaagcccacttacaaatggagtaaattagaaaaggatcgagatagacaatggggatgagttgactgcagacttcctttatgaagaagtacatcccaagcagcatgcacacaagcaaagttttgcaaaaccaaaaggtcctgcaggaaaaagaggaattcgaagactaattaggggcccagcggaaactgaagctactactgattaaagtcatcacattaaacattgtaatactagttttttaaaagtccagcttttagtacaggagaactgaaatcattccatgttgatataaagtagggaaaaaaattgtactttttggaaaatagcacttttcacttctgtgtgtttttaaaattaatgttatagaagactcatgatttctatttttgagttaaagctagaaaagggttcaacataatgtttaattttgtcacactgttttcatagcgttgattccacacttcaaatacttcttaaaattttatacagttgggccagttctagaaagtctgatgtctcaaagggtaaacttactactttcttgtgggacagaaagaccttaaaatattcatattacttaatgaatatgttaaggaccaggctagagtattttctaagctggaaacttagtgtgccttggaaaaggccgcaagttgcttactccgagtagctgtgctagctctgtcagactgtaggatcatgtctgcaacttttagaaatagtgctttatattgcagcagtcttttatatttgacttttttttaatagcattaaaattgcagatcagctcactctgaaactttaagggtaccagatattttctatactgcaggatttctgatgacattgaaagactttaaacagccttagtaaattatctttctaatgctctgtgaggccaaacatttatgttcagattgaaatttaaattaatatcattcaaaaggaaacaaaaaatgttgagttttaaaaatcaggattgacttttttctccaaaaccatacatttatgggcaaattgtgttctttatcacttccgagcaaatactcagatttaaaattactttaaagtcctggtacttaacaggctaacgtagataaacaccttaataatctcagttaatactgtatttcaaaacacatttaactgttttctaatgctttgcattatcagttacaacctagagagattttgagcctcatatttctttgatacttgaaatagagggagctagaacacttaatgtttaatctgttaaacctgctgcaagagccataactttgaggcattttctaaatgaactgtggggatccaggatttgtaatttcttgatctaaactttatgctgcataaatcacttatcggaaatgcacatttcatagtgtgaagcactcatttctaaaccttattatctaaggtaatatatgcacctttcagaaatttgtgttcgagtaagtaaagcatattagaataattgtgggttgacagatttttaaaatagaatttagagtatttggggttttgtttgtttacaaataatcagactataatatttaaacatgcaaaataactgacaataatgttgcacttgtttactaaagatataagttgttccatgggtgtacacgtagacagacacacatacacccaaattattgcattaagaatcctggagcagaccatagctgaagctgttattttcagtcaggaagactacctgtcatgaaggtataaaataatttagaagtgaatgtttttctgtaccatctatgtgcaattatactctaaattccactacactacattaaagtaaatggacattccagaatatagatgtgattatagtcttaaactaattattattaaaccaatgattgctgaaaatcagtgatgcatttgttatagagtataactcatcgtttacagtatgttttagttggcagtatcatacctagatggtgaataacatattcccagtaaatttatatagcagtgaagaattacatgccttctggtggacattttataagtgcattttatatcacaataaaaattttttctcttta

SEQ ID NO: 81457 - DNA, 3104 bp, Homo sapiens
acggggcggggcggccgcgggtcgcgggcggatgacgcgccggggccggcggaggagcagccacttcctggggccgccggccggggccgctggctgcactcagcgccggagccgggagctagcggccgccgccatgtcccaccagaccggcatccaagcaagtgaagatgttaaagagatctttgccagagccagaaatggaaagtacagacttctgaaaatatctattgaaaatgagcaacttgtgattggatcatatagtcagccttcagattcctgggataaggattatgattcctttgttttacccctgttggaggacaaacaaccatgctatatattattcaggttagattctcagaatgcccagggatatgaatggatattcattgcatggtctccagatcattctcatgttcgtcaaaaaatgttgtatgcagcaacaagagcaactctgaagaaggaatttggaggtggccacattaaagatgaagtatttggaacagtaaaggaagatgtatcattacatggatataaaaaatacttgctgtcacaatcttcccctgccccactgactgcagctgaggaagaactacgacagattaaaatcaatgaggtacagactgacgtgggtgtggacactaagcatcaaacactacaaggagtagcatttcccatttctcgagaagcctttcaggctttggaaaaattgaataatagacagctcaactatgtgcagttggaaatagatataaaaaatgaaattataattttggccaacacaacaaatacagaactgaaagatttgccaaagaggattcccaaggattcagctcgttaccatttctttctgtataaacattcccatgaaggagactatttagagtccatagtttttatttattcaatgcctggatacacatgcagtataagagagcggatgctgtattctagctgcaagagccgtctgctagaaattgtagaaagacaactacaaatggatgtaattagaaagatcgagatagacaatggggatgagttgactgcagacttcctttatgaagaagtacatcccaagcagcatgcacacaagcaaagttttgcaaaaccaaaaggtcctgcaggaaaaagaggaattcgaagactaattaggggcccagcggaaactgaagctactactgattaaagtcatcacattaaacattgtaatactagttttttaaaagtccagcttttagtacaggagaactgaaatcattccatgttgatataaagtagggaaaaaaattgtactttttggaaaatagcacttttcacttctgtgtgtttttaaaattaatgttatagaagactcatgatttctatttttgagttaaagctagaaaagggttcaacataatgtttaattttgtcacactgttttcatagcgttgattccacacttcaaatacttcttaaaattttatacagttgggccagttctagaaagtctgatgtctcaaagggtaaacttactactttcttgtgggacagaaagaccttaaaatattcatattacttaatgaatatgttaaggaccaggctagagtattttctaagctggaaacttagtgtgccttggaaaaggccgcaagttgcttactccgagtagctgtgctagctctgtcagactgtaggatcatgtctgcaacttttagaaatagtgctttatattgcagcagtcttttatatttgacttttttttaatagcattaaaattgcagatcagctcactctgaaactttaagggtaccagatattttctatactgcaggatttctgatgacattgaaagactttaaacagccttagtaaattatctttctaatgctctgtgaggccaaacatttatgttcagattgaaatttaaattaatatcattcaaaaggaaacaaaaaatgttgagttttaaaaatcaggattgacttttttctccaaaaccatacatttatgggcaaattgtgttctttatcacttccgagcaaatactcagatttaaaattactttaaagtcctggtacttaacaggctaacgtagataaacaccttaataatctcagttaatactgtatttcaaaacacatttaactgttttctaatgctttgcattatcagttacaacctagagagattttgagcctcatatttctttgatacttgaaatagagggagctagaacacttaatgtttaatctgttaaacctgctgcaagagccataactttgaggcattttctaaatgaactgtggggatccaggatttgtaatttcttgatctaaactttatgctgcataaatcacttatcggaaatgcacatttcatagtgtgaagcactcatttctaaaccttattatctaaggtaatatatgcacctttcagaaatttgtgttcgagtaagtaaagcatattagaataattgtgggttgacagatttttaaaatagaatcctggagcagaccatagctgaagctgttattttcagtcaggaagactacctgtcatgaaggtataaaataatttagaagtgaatgtttttctgtaccatctatgtgcaattatactctaaattccactacactacattaaagtaaatggacattccagaatatagatgtgattatagtcttaaactaattattattaaaccaatgattgctgaaaatcagtgatgcatttgttatagagtataactcatcgtttacagtatgttttagttggcagtatcatacctagatggtgaataacatattcccagtaaatttatatagcagtgaagaattacatgccttctggtggacattttataagtgcattttatatcacaataaaaattttttctctttaagttgtgtatgttctgttggtttttctactatagtttttttaattgtttgtgtaatgtttcataattcagtacctggtgttaggttaggaatcccattcatttatttgttaattagtctgcctaagtccaaaaaggattttaagtagctttaaacctaggcaagaataattgtgactatagagtgcttagattaaaaatttgccactgttgtagcaataat

SEQ ID NO: 81458 - DNA, 795 bp, Homo sapiens
cgggctgcaggaattcggcacgagaatgaactgtggggatccaggatttgtaatttcttgatctaaactttatgctgcataaatcacttatcggaaatgcacatttcatagtgtgaagcactcatttctaaaccttattatctaaggtaatatatgcacctttcagaaatttgtgttcgagtaagtaaagcatattagaataattgtgggttgacagatttttaaaatagaatttagagtatttggggttttgtttgtttacaaataatcagactataatatttaaacatgcaaaataactgacaataatgttgcacttgtttactaaagatataagttgttccatgggtgtacacgtagacagacacacatacacccaaattattgcattaagaatcctggagcagaccatagctgaagctgttattttcagtcaggaagactacctgtcatgaaggtataaaataatttagaagtgaatgtttttctgtaccatctatgtgcaattatactctaaattccactacactacattaaagtaaatggacattccagaatatagatgtgattatagtcttaaactaattattattaaaccaatgattgctgaaaatcagtgatgcatttgttatagagtataactcatcgtttacagtatgttttagttggcagtatcatacctagatggtgaataacatattcccagtaaatttatatagcagtgaagaattacatgccttctggtggacattttataagtgcattttatatcacaataaaaattttttctcttta

SEQ ID NO: 81459 - DNA, 1225 bp, Homo sapiens
acggggcggggcggccgcgggtcgcgggcggatgacgcgccggggccggcggaggagcagccacttcctggggccgccggccggggccgctggctgcactcagcgccggagccgggagctagcggccgccgccatgtcccaccagaccggcatccaagcaagtgaagatgttaaagagatctttgccagagccagaaatggaaagtacagacttctgaaaatatctattgaaaatgagcaacttgtgattggatcatatagtcagccttcagattcctgggataaggattatgattcctttgttttacccctgttggaggacaaacaaccatgctatatattattcaggttagattctcagaatgcccagggatatgaatggatattcattgcatggtctccagatcattctcatgttcgtcaaaaaatgttgtatgcagcaacaagagcaactctgaagaaggaatttggaggtggccacattaaagatgaagtatttggaacagtaaaggaagatgtatcattacatggatataaaaaatacttgctgtcacaatcttcccctgccccactgactgcagctgaggaagaactacgacagattaaaatcaatgaggtacagactgacgtgggtgtggacactaagcatcaaacactacaaggagtagcatttcccatttctcgagaagcctttcaggctttggaaaaattgaataatagacagctcaactatgtgcagttggaaatagatataaaaaatgaaattataattttggccaacacaacaaatacagaactgaaagatttgccaaagaggattcccaaggattcagctcgttaccatttctttctgtataaacattcccatgaaggagactatttagagtccatagtttttatttattcaatgcctggatacacatgcagtataagagagcggatgctgtattctagctgcaagagccgtctgctagaaattgtagaaagacaactacaaatggatgtaattagaaagatcgagatagacaatggggatgagttgactgcagacttcctttatgaagaagtacatcccaagcagcatgcacacaagcaaagttttgcaaaaccaaaaggtcctgcaggaaaaagaggaattcgaagactaattaggggcccagcggaaactgaagctactactgattaaagtcatcacatagttcagcgtatgacgggtgcgagttcg

SEQ ID NO: 81460 - DNA, 551 bp, Homo sapiens
  misc_feature (27)..(27): n is a, c, g, or t
tgcgcggtgactctgaggatccccgtnacatctatgtgcaattatactctaaattccactacactacattaaagtaaatggacattccagaatatagatgtgattatagtcttaaactaattattattaaaccaatgattgctgaaaatcagtgatgcatttgttatagagtataactcatcgtttacagtatgttttagttggcagtatcatacctagatggtgaataacatattcccagtaaatttatatagcagtgaagaattacatgccttctggtggacattttataagtgcattttatatcacaataaaaattttttctctttaagttgtgtatgttctgttggtttttctactatagtttttttaattgtttgtgtaatgtttcataattcagtacctggtgttaggttaggaatcccattcatttatttgttaattagtctgcctaagtccaaaaaggattttaagtagctttaaacctaggcaagaataattgtgactatagagtgcttagattaaaaatttgccactgttgtagcaataat

SEQ ID NO: 81461 - DNA, 509 bp, Homo sapiens
agttcgacggaagcatgtaattcttcactgctatataaatttactgggaatatagatgtgattatagtcttaaactaattattattaaaccaatgattgctgaaaatcagtgatgcatttgttatagagtataactcatcgtttacagtatgttttagttggcagtatcatacctagatggtgaataacatattcccagtaaatttatatagcagtgaagaattacatgccttctggtggacattttataagtgcattttatatcacaataaaaattttttctctttaagttgtgtatgttctgttggtttttctactatagtttttttaattgtttgtgtaatgtttcataattcagtacctggtgttaggttaggaatcccattcatttatttgttaattagtctgcctaagtccaaaaaggattttaagtagctttaaacctaggcaagaataattgtgactatagagtgcttagattaaaaatttgccactgttgtagcaataat

SEQ ID NO: 81462 - DNA, 417 bp, Homo sapiens
tacgagtttgatagtttgttttatttcttgcaatcagagcccagaggatcatattggggtatgcattcgcatatgttctatgatgttttcattaaccaatatcatttatgctgtagaatctccattcatttttttaaaagtaaaatttctattggactttctgttgcaacactgcgaatgagactctctactagctatcatttatcaagtataaaaatcttaaacatgtgcattgaatgctttcttatctttctcctcttccagtacatgcacaccatgttcttagtaaagaaatctcttaagtctggaacttctgcagtagtataacttgttgagctgtgttgtctttgtacactgtttgtactcctttcaattcagtgcatgatgtttgtgttgcattttctgtccaacagaaca

SEQ ID NO: 81463 - DNA, 830 bp, Homo sapiens
atgcagttatatctgacctccattatttcctggtttgaaattgggcagcctgcagcaagtgaagatgttaaagagatctttgccagagccagaaatggaaagtacagacttctgaaaatatctattgaaaatgagcaacttgtgattggatcatatagtcagccttcagattcctgggataaggattatgattcctttgttttacccctgttggaggacaaacaaccatgctatatattattcaggttagattctcagaatgcccagggatatgaatggatattcattgcatggtctccagatcattctcatgttcgtcaaaaaatgttgtatgcagcaacaagagcaactctgaagaaggaatttggaggtggccacattaaagatgaagtatttggaacagtaaaggaagatgtatcattacatggatataaaaaatacttgctgtcacaatcttcccctgccccactgactgcagctgaggaagaactacgacagattaaaatcaatgaggtacagactgacgtgggtgtggacactaagcatcaaacactacaaggagtagcatttcccatttctcgagaagcctttcaggctttggaaaaattgaataatagacagctcaactatgtgcagttggaaatagatataaaaaatgaaattataattttggccaacacaacaaatacagaactgaaagatttgccaaagaggattcccaaggattcagctcgttaccatttctttctgtataaacattcccatgaaggagactatttagagtccataggtatatgatacattgtttttaacacattactttcagtttg

SEQ ID NO: 81464 - DNA, 3756 bp, Homo sapiens
acggggcggggcggccgcgggtcgcgggcggatgacgcgccggggccggcggaggagcagccacttcctggggccgccggccggggccgctggctgcactcagcgccggagccgggagctagcggccgccgccatgtcccaccagaccggcatccaaggtaacagcgcccggcgcgactcgcagggaaggggcttccgggagagccgggagagccgggagggctgcaggaccggcagggctggagtcgggccgggagctccggaagtcggtctcgcggggcgagccgggcctcggcgcctctccgcgctcctgcttcccgggcgctgccggcctgcgtcctcctccagcccggtccctgctgccgtcacgttgcagattgatccgaaattcgggggagcgaaggaaattggctttcgaggcggcctggttgaagggggcgtgccttccaccgtccccgacagtcgcccaactttcccccttttggtcacgtagggaagagctgggacagtggaggcgactggggcttcagtacgctgtcgagaaccagcaagtgaagatgttaaagagatctttgccagagccagaaatggaaagtacagacttctgaaaatatctattgaaaatggttagttaaatattttaaaatattttctgttcctggattagtggctgttgtatttttaaacttactgtgtgttgtcagtgatttgaactattaattaatatgaagcaagttcaaatcttacggtaacttggattcctcatattttgtgcaggtccctatgggcccctaatttcattctgaattatgtgactatcagggaaacagaaagatgttttttgatgtgacttcttcctcttttactttttgtgtctcagtttctgcaccacagtccatttctaatgtcagtgcttccatctctggaatggaaatcactaaacagagcaacttgtgattggatcatatagtcagccttcagattcctgggataaggattatgattcctttgttttacccctgttggaggacaaacaaccatgctatatattattcaggttagattctcagaatgcccagggatatgaatggatattcattgcatggtctccagatcattctcatgttcgtcaaaaaatgttgtatgcagcaacaagagcaactctgaagaaggaatttggaggtggccacattaaagatgaagtatttggaacagtaaaggaagatgtatcattacatggatataaaaaatacttgctgtcacaatcttcccctgccccactgactgcagctgaggaagaactacgacagattaaaatcaatgaggtacagactgacgtgggtgtggacactaagcatcaaacactacaaggagtagcatttcccatttctcgagaagcctttcaggctttggaaaaattgaataatagacagctcaactatgtgcagttggaaatagatataaaaaatgaaattataattttggccaacacaacaaatacagaactgaaagatttgccaaagaggattcccaaggattcagctcgttaccatttctttctgtataaacattcccatgaaggagactatttagagtccatagtttttatttattcaatgcctggatacacatgcagtataagagagcggatgctgtattctagctgcaagagccgtctgctagaaattgtagaaagacaactacaaatggatgtaattagaaagatcgagatagacaatggggatgagttgactgcagacttcctttatgaagaagtacatcccaagcagcatgcacacaagcaaagttttgcaaaaccaaaaggtcctgcaggaaaaagaggaattcgaagactaattaggggcccagcggaaactgaagctactactgattaaagtcatcacattaaacattgtaatactagttttttaaaagtccagcttttagtacaggagaactgaaatcattccatgttgatataaagtagggaaaaaaattgtactttttggaaaatagcacttttcacttctgtgtgtttttaaaattaatgttatagaagactcatgatttctatttttgagttaaagctagaaaagggttcaacataatgtttaattttgtcacactgttttcatagcgttgattccacacttcaaatacttcttaaaattttatacagttgggccagttctagaaagtctgatgtctcaaagggtaaacttactactttcttgtgggacagaaagaccttaaaatattcatattacttaatgaatatgttaaggaccaggctagagtattttctaagctggaaacttagtgtgccttggaaaaggccgcaagttgcttactccgagtagctgtgctagctctgtcagactgtaggatcatgtctgcaacttttagaaatagtgctttatattgcagcagtcttttatatttgacttttttttaatagcattaaaattgcagatcagctcactctgaaactttaagggtaccagatattttctatactgcaggatttctgatgacattgaaagactttaaacagccttagtaaattatctttctaatgctctgtgaggccaaacatttatgttcagattgaaatttaaattaatatcattcaaaaggaaacaaaaaatgttgagttttaaaaatcaggattgacttttttctccaaaaccatacatttatgggcaaattgtgttctttatcacttccgagcaaatactcagatttaaaattactttaaagtcctggtacttaacaggctaacgtagataaacaccttaataatctcagttaatactgtatttcaaaacacatttaactgttttctaatgctttgcattatcagttacaacctagagagattttgagcctcatatttctttgatacttgaaatagagggagctagaacacttaatgtttaatctgttaaacctgctgcaagagccataactttgaggcattttctaaatgaactgtggggatccaggatttgtaatttcttgatctaaactttatgctgcataaatcacttatcggaaatgcacatttcatagtgtgaagcactcatttctaaaccttattatctaaggtaatatatgcacctttcagaaatttgtgttcgagtaagtaaagcatattagaataattgtgggttgacagatttttaaaatagaatttagagtatttggggttttgtttgtttacaaataatcagactataatatttaaacatgcaaaataactgacaataatgttgcacttgtttactaaagatataagttgttccatgggtgtacacgtagacagacacacatacacccaaattattgcattaagaatcctggagcagaccatagctgaagctgttattttcagtcaggaagactacctgtcatgaaggtataaaataatttagaagtgaatgtttttctgtaccatctatgtgcaattatactctaaattccactacactacattaaagtaaatggacattccagaatatagatgtgattatagtcttaaactaattattattaaaccaatgattgctgaaaatcagtgatgcatttgttatagagtataactcatcgtttacagtatgttttagttggcagtatcatacctagatggtgaataacatattcccagtaaatttatatagcagtgaagaattacatgccttctggtggacattttataagtgcattttatatcacaataaaaattttttctcttta

SEQ ID NO: 81465 - DNA, 2942 bp, Homo sapiens
tgattgttgactcctagaggatcccccttaacattcctagtctcttaactagtggaacgtaatctctggtgttatatcgatctttgattgaaatcagctttagctgtagcatgttgatgtgttctttacctgcccggtctctggtcctgactagcaggctccacattcctggaaattatgatgtttatgcctctgtgagaaccctattgtacaggaggtacagacctccaatacataatccaggtcatattctcagaatgcccagggatatgaatggatattcattgcatggtctccagatcattctcatgttcgtcaaaaaatgttgtatgcagcaacaagagcaactctgaagaaggaatttggaggtggccacattaaagatgaagtatttggaacagtaaaggaagatgtatcattacatggatataaaaaatacttgctgtcacaatcttcccctgccccactgactgcagctgaggaagaactacgacagattaaaatcaatgaggtacagactgacgtgggtgtggacactaagcatcaaacactacaaggagtagcatttcccatttctcgagaagcctttcaggctttggaaaaattgaataatagacagctcaactatgtgcagttggaaatagatataaaaaatgaaattataattttggccaacacaacaaatacagaactgaaagatttgccaaagaggattcccaaggattcagctcgttaccatttctttctgtataaacattcccatgaaggagactatttagagtccatagtttttatttattcaatgcctggatacacatgcagtataagagagcggatgctgtattctagctgcaagagccgtctgctagaaattgtagaaagacaactacaaatggatgtaattagaaagatcgagatagacaatggggatgagttgactgcagacttcctttatgaagaagtacatcccaagcagcatgcacacaagcaaagttttgcaaaaccaaaaggtcctgcaggaaaaagaggaattcgaagactaattaggggcccagcggaaactgaagctactactgattaaagtcatcacattaaacattgtaatactagttttttaaaagtccagcttttagtacaggagaactgaaatcattccatgttgatataaagtagggaaaaaaattgtactttttggaaaatagcacttttcacttctgtgtgtttttaaaattaatgttatagaagactcatgatttctatttttgagttaaagctagaaaagggttcaacataatgtttaattttgtcacactgttttcatagcgttgattccacacttcaaatacttcttaaaattttatacagttgggccagttctagaaagtctgatgtctcaaagggtaaacttactactttcttgtgggacagaaagaccttaaaatattcatattacttaatgaatatgttaaggaccaggctagagtattttctaagctggaaacttagtgtgccttggaaaaggccgcaagttgcttactccgagtagctgtgctagctctgtcagactgtaggatcatgtctgcaacttttagaaatagtgctttatattgcagcagtcttttatatttgacttttttttaatagcattaaaattgcagatcagctcactctgaaactttaagggtaccagatattttctatactgcaggatttctgatgacattgaaagactttaaacagccttagtaaattatctttctaatgctctgtgaggccaaacatttatgttcagattgaaatttaaattaatatcattcaaaaggaaacaaaaaatgttgagttttaaaaatcaggattgacttttttctccaaaaccatacatttatgggcaaattgtgttctttatcacttccgagcaaatactcagatttaaaattactttaaagtcctggtacttaacaggctaacgtagataaacaccttaataatctcagttaatactgtatttcaaaacacatttaactgttttctaatgctttgcattatcagttacaacctagagagattttgagcctcatatttctttgatacttgaaatagagggagctagaacacttaatgtttaatctgttaaacctgctgcaagagccataactttgaggcattttctaaatgaactgtggggatccaggatttgtaatttcttgatctaaactttatgctgcataaatcacttatcggaaatgcacatttcatagtgtgaagcactcatttctaaaccttattatctaaggtaatatatgcacctttcagaaatttgtgttcgagtaagtaaagcatattagaataattgtgggttgacagatttttaaaatagaatttagagtatttggggttttgtttgtttacaaataatcagactataatatttaaacatgcaaaataactgacaataatgttgcacttgtttactaaagatataagttgttccatgggtgtacacgtagacagacacacatacacccaaattattgcattaagaatcctggagcagaccatagctgaagctgttattttcagtcaggaagactacctgtcatgaaggtataaaataatttagaagtgaatgtttttctgtaccatctatgtgcaattatactctaaattccactacactacattaaagtaaatggacattccagaatatagatgtgattatagtcttaaactaattattattaaaccaatgattgctgaaaatcagtgatgcatttgttatagagtataactcatcgtttacagtatgttttagttggcagtatcatacctagatggtgaataacatattcccagtaaatttatatagcagtgaagaattacatgccttctggtggacattttataagtgcattttatatcacaataaaaattttttctcttta

SEQ ID NO: 81466 - DNA, 3068 bp, Homo sapiens
acggggcggggcggccgcgggtcgcgggcggatgacgcgccggggccggcggaggagcagccacttcctggggccgccggccggggccgctggctgcactcagcgccggagccgggagctagcggccgccgccatgtcccaccagaccggcatccaagcaagtgaagatgttaaagagatctttgccagagccagaaatggaaagtacagacttctgaaaatatctattgaaaatgagcaacttgtgattggatcatatagtcagccttcagattcctgggataaggattatgattcctttgttttacccctgttggaggacaaacaaccatgctatatattattcaggttagattctcagaatgcccagggatatgaatggatattcattgcatggtctccagatcattctcatgttcgtcaaaaaatgttgtatgcagcaacaagagcaactctgaagaaggaatttggaggtggccacattaaagatgaagtatttggaacagtaaaggaagatgtatcattacatggatataaaaaatacttgctgtcacaatcttcccctgccccactgactgcagctgaggaagaactacgacagattaaaatcaatgagagcccagaggatcatattggggtacagactgacgtgggtgtggacactaagcatcaaacactacaaggagtagcatttcccatttctcgagaagcctttcaggctttggaaaaattgaataatagacagctcaactatgtgcagttggaaatagatataaaaaatgaaattataattttggccaacacaacaaatacagaactgaaagatttgccaaagaggattcccaaggattcagctcgttaccatttctttctgtataaacattcccatgaaggagactatttagagtccatagtttttatttattcaatgcctggatacacatgcagtataagagagcggatgctgtattctagctgcaagagccgtctgctagaaattgtagaaagacaactacaaatggatgtaattagaaagatcgagatagacaatggggatgagttgactgcagacttcctttatgaagaagtacatcccaagcagcatgcacacaagcaaagttttgcaaaaccaaaaggtcctgcaggaaaaagaggaattcgaagactaattaggggcccagcggaaactgaagctactactgattaaagtcatcacattaaacattgtaatactagttttttaaaagtccagcttttagtacaggagaactgaaatcattccatgttgatataaagtagggaaaaaaattgtactttttggaaaatagcacttttcacttctgtgtgtttttaaaattaatgttatagaagactcatgatttctatttttgagttaaagctagaaaagggttcaacataatgtttaattttgtcacactgttttcatagcgttgattccacacttcaaatacttcttaaaattttatacagttgggccagttctagaaagtctgatgtctcaaagggtaaacttactactttcttgtgggacagaaagaccttaaaatattcatattacttaatgaatatgttaaggaccaggctagagtattttctaagctggaaacttagtgtgccttggaaaaggccgcaagttgcttactccgagtagctgtgctagctctgtcagactgtaggatcatgtctgcaacttttagaaatagtgctttatattgcagcagtcttttatatttgacttttttttaatagcattaaaattgcagatcagctcactctgaaactttaagggtaccagatattttctatactgcaggatttctgatgacattgaaagactttaaacagccttagtaaattatctttctaatgctctgtgaggccaaacatttatgttcagattgaaatttaaattaatatcattcaaaaggaaacaaaaaatgttgagttttaaaaatcaggattgacttttttctccaaaaccatacatttatgggcaaattgtgttctttatcacttccgagcaaatactcagatttaaaattactttaaagtcctggtacttaacaggctaacgtagataaacaccttaataatctcagttaatactgtatttcaaaacacatttaactgttttctaatgctttgcattatcagttacaacctagagagattttgagcctcatatttctttgatacttgaaatagagggagctagaacacttaatgtttaatctgttaaacctgctgcaagagccataactttgaggcattttctaaatgaactgtggggatccaggatttgtaatttcttgatctaaactttatgctgcataaatcacttatcggaaatgcacatttcatagtgtgaagcactcatttctaaaccttattatctaaggtaatatatgcacctttcagaaatttgtgttcgagtaagtaaagcatattagaataattgtgggttgacagatttttaaaatagaatttagagtatttggggttttgtttgtttacaaataatcagactataatatttaaacatgcaaaataactgacaataatgttgcacttgtttactaaagatataagttgttccatgggtgtacacgtagacagacacacatacacccaaattattgcattaagaatcctggagcagaccatagctgaagctgttattttcagtcaggaagactacctgtcatgaaggtataaaataatttagaagtgaatgtttttctgtaccatctatgtgcaattatactctaaattccactacactacattaaagtaaatggacattccagaatatagatgtgattatagtcttaaactaattattattaaaccaatgattgctgaaaatcagtgatgcatttgttatagagtataactcatcgtttacagtatgttttagttggcagtatcatacctagatggtgaataacatattcccagtaaatttatatagcagtgaagaattacatgccttctggtggacattttataagtgcattttatatcacaataaaaattttttctcttta

SEQ ID NO: 81467 - DNA, 644 bp, Homo sapiens
acggggcggggcggccgcgggtcgcgggcggatgacgcgccggggccggcggaggagcagccacttcctggggccgccggccggggccgctggctgcactcagcgccggagccgggagctagcggccgccgccatgtcccaccagaccggcatccaaggtaacagcgcccggcgcgactcgcagggaaggggcttccgggagagccgggagagccgggagggctgcaggaccggcagggctggagtcgggccgggagctccggaagtcggtctcgcggggcgagccgggcctcggcgcctctccgcgctcctgcttcccgggcgctgccggcctgcgtcctcctccagcccggtccctgctgccgtcacgttgcagattgatccgaaattcgggggagcgaaggaaattggctttcgaggcggcctggttgaagggggcgtgccttccaccgtccccgacagtcgcccaactttcccccttttggtcacgtagggaagagctgggacagtggaggcgactggggcttcagtacgctgtcgagaaccaggcgagttttctttttcatggtccaaaggagaatattacaggactttgattacaaaaagaaccatgccagaatctttctcacatcagtaggggtgct

SEQ ID NO: 81468 - DNA, 527 bp, Homo sapiens
cttaatacacaaatgcacacttttaaaaagtgtggctcatatggttcacatttttccttttgtcttgttggttttaggtttctagctctatactttctaatccatttctacccctaccgttgtacccagaatccagccttctagtgaatggaacagggtttattcgttcaaacattattgaaccagctaagggacgggattctaaggcctctaatgaataaggcagagttctgcactcaagaaataaggaagatgaacattttaggagagttcagagttgccagttagtaactgcctttgggagtcaggagtttgagaccagcctggccagcatggcgaaaccccatttttgagactctgtctcaaaaataaataaataaataaaataaaaaataagtcacgactgggcacagtggctcacacctgttatcccagcactttgggagtctgaggtgggaggactgcttgagctgaggaggtagagccagcttgggcaatacagcaagacctcatctctactaaaaatt

SEQ ID NO: 81469 - DNA, 413 bp, Homo sapiens
cttaatacacaaatgcacacttttaaaaagtgtggctcatatggttcacatttttccttttgtcttgttggttttaggtttctagctctatactttctaatccatttctacccctaccgttgtacccagaatccagccttctagtgaatggaacagggtttattcgttcaaacattattgaaccagctaagggacgggattctaaggcctctaatgaataaggcagagttctgcactcaagaaataaggaagatgaacattttaggagagttcagagttgccagttagtaactgcctttgggagtcaggcttcacattgcagataacatttgactttgttcttgaataagattccacgaggccaggaaatggcacaccagaatgcacaacacaaagtaaaagtgcactgaggc

SEQ ID NO: 81470 - DNA, 199 bp, Homo sapiens
tatattcttaaaaggtgatggtagaaaatgagtctaaaaggtttcagggaagtcggggacggggtggggggagattcagcagctacaaaatttaaaactactgggcttgactcccctcccctactcccttccaccttctgtttcctccccttatttaccccctccccaggctggaggaaagggaacagctctagccaac

SEQ ID NO: 81471 - DNA, 851 bp, Homo sapiens
cacacacacacatactgatatatgcacacacatataaacttaaccttggggttggctgctgtcaaacagttctgtcatccattcctgatgactcacaccagagaaatagatatataagtaaactggaaaactacaaatcacccctaaatcatttctttccaggaatgaggatgtgatttttcagcaactcaacatttctattagcttatttatcccacacatcttctccttcccaatactgaaactagttgaaattccctgaagtgacggcaagtgaaagaaacaggttagagatgagtggaaaaaagaaacagtccaggattttaacagattttcatggttgggaggtcatcaacattcagacacccaaaaatcaacaatatctatagacccctacactgcaggggaggtaaatgactacaataactcttctgtatctcagagaacatacaggcataaagaatggccaagtaatgtgctatctgacaaataggacaatcagcagtatacaacattatcacatggtcttacaacatcacagcaaaattataacattgctttacaatgagcaaaaatccttttcgttcctggccagcaacttgattgtaatacagatacccaatattttaagaatcatggaagaggatgcctacccaaaacacttagaatttccactacttttagtggtacaactgattctgtgaatacagacaaacaggaatgcaggaaatgctagaattcattcgtcaacctgaaataatttcccccaaataaaccctgaatgtgttagaattcaagagtgatgcaaaccattgtctaagcccatagtctcagaggaaagcacatttatt

SEQ ID NO: 81472 - DNA, 1025 bp, Homo sapiens
attttaataatatgagcgtgttaaacattaaacagaacatgatactggctgggataagattagagaattgaaacaaatttggggaatttccaataaatactagaaaattagactagaaaaatagctgttatataaataactttgttggaatatgctaattttagtgtcttgaaagtttacaatttatctgattgctctgcagtacagtagcaactgagctgatcaataaaggtgaaattactttttcattaattcgcaatttcaaaatctgtccaaatgttcttggtttttaaactttatgtagcattcttttttttttttttagacagagtcttgctctgtcgcccaggctggagtgcaatggcgtgatctcagcttactgcaacctccacctcctacctcagcctcccgagtagctgggactacaggcacctgccaccacatccagctaattttttatatttttagtagctatggggtttcaccgtgttagccaggatggtctcgatctcctgaccttgtgatccaaccacctcagcctcccgtagttctgggattacaggcgtgagccaccgcgcctggctttatgtagcattcttaaagtcactagggagatggcaggtgaagtaaaggcagatttccaaaatcactaattttttttagttttttgtcacttaacctttcttgcatatacttctttccacagctcattttcttacttgtatattaataaagctaactcatcttcctgaatatacatgattttacatgagaagagcaggaagcttaggcttggttagctaaaactaagatattgctgcccactaatcacacagggataaaactaatagactgttaagattgtcagtactcaataggaagtataaagcgttctagtctattgtgtgaatcaggttccaaaaaatcttaaatacataaaatggataaaaaggctgggcgccgtggctcacgcctgtaatcccagcactttgagaaacccaggtgggcggatcacctgaggtcag

SEQ ID NO: 81473 - DNA, 437 bp, Homo sapiens
atgtagaaacataaatttttcaagatttggtttttctatgagtatggccaagaaggaggtaaacggaactgtcagactttttttctttctttagacagataactgtgatgtctgttatacagatccctgccagaagtactgaacatagctttaaaaattgtgactgttggggtttcgttattaattagctttgtttatatagtggttacacattaatgtcttctaacttttagtatatgttaggctgtttgccctgttggtaactggcctccagttatgaatggagtgtaacaaacagaaaagtgaaccactcatagtgtgcagctaaactaccaaccagtcttgttttggtataaattattgctctgtggttctttcccattcagtctctcctggggtgtccatttctttctagctttctgtaatggctccctcat

SEQ ID NO: 81474 - DNA, 136 bp, Homo sapiens
ggggaggcggggggccgggcgcactcccccgcgccggcggccgggcccccgccggactgcggagagcgaggctgggagagagcgagcgcgacggcggcggcggcggagagaggctctttgttgcctccctaccccg

SEQ ID NO: 81475 - DNA, 822 bp, Homo sapiens
caggtatatggcatgaagtctagagatctaatgtataatatgaggactatagttaatgatactgtattgtattcaggatttttgccaaaggagagtatcattgctcttgccacaaaaaataaaggaggtaactatgtgagatgatggatatgctaatttacctgactatagtagccatttctctatgtacatgtattaatatatcaaaacatcaagttgtataacttaaatatacacacaaaaaataaatttgtatgttttatactccttccacaatggtcaagattccttaaatcttagttgaaattatggtcatactatgtaagaggcaaaaacatgacttaagggaacattagagaggagtaaatataatataaaagccctactgaaaatgaggagaaaacaaagtgtctgtacccttataaagagtgaaagccctgcccccttctcctatagaacccctagcaaggagactggaagaatcaaaaacaatccacccaaaaaatggcctgcagggacacagtcccagagaaagagactatgtacaacaaggtacagtaagtaagacctgcccacacacaggacttccaatcgacttcttagtgcttactcctacagatgaacagatcaaccagggccaccagatgctccaggaaagacaggagtccaaaaagaaaattcggtaagtttgaatatattttgagcaaattttcagttctgttgaagtattggggggacattcaacagtgagtagtagtttagggggaacagctggcacctctggcagtcgcctcagaggtcaaccagcgtgtaggttgcttt

SEQ ID NO: 81476 - DNA, 193 bp, Homo sapiens
tctgttagcagccactgttctagtgcttcatatacgtccgtgaacaaaacaaaccattacacaataagtgtttattgagtgctaactgcttgtcagagcccatgctattaagtgctgtcatctgtttaacatttattgatcacctgtgtaaggtactattctaatctgggatatgtcagggaacaaaacaaaa

SEQ ID NO: 81477 - DNA, 839 bp, Homo sapiens
agtcgcggggcctcctccctggggtgtgagcaggtcggcgcgccacacttctctaggtggccggacgcgcgcccagggaggagctggcggcggggcccaggctgttccggctgcggcacgccaggggatgtggttagccctgagcctggaggccgaaggtgggcaggcaacactcccaccgtgtttcggaggagaatacactaggctagcctaacgacactcggagtgcgagctgcggctggggtaggggcacccctttccagcgggcgcgtgggtcaccaaggagcagttctccgggacccgttgcgtccgagggactgggcggggctgggcggggcaggacgggggcggcgctcaggagccctggaacccgctggccctgaggccacggaccgaggcgtggtgctgagcccctgcgcggtttctggtgcgtagagactgtaaatcgctgcgcttctcagtcatcatcatcccagcttttcccggctcgaattcagcctccaactcaagctcgcgggaaagactacctgagaggagaaaagcttctgtccctggaccttcttctgagggtggtgaggtttgtttagggtcgcagaagcagggaggactgactcagccctcacagagaagaggtctggaaagtcctggggaactcgcagggcacgggccgctgtcgcggttgggaggcgagggcgcagcgctggggttgtagattccaagacccctgagggtggctgtgttggtttctcgcaggagtcggaggctccctgctctccagccgcccagtgacccaagcttaatcttcagcaccacttggggcgaccttttcggtgcaaacc

SEQ ID NO: 81478 - DNA, 384 bp, Homo sapiens
aaaggggatcatgtcagtagagtatttataaataattcatgggaaaaggtcttggtagtatacttacaacttttctgttagtctgagatgtttcgtgatcaaatgaatgtttgacttattaaatttataaattaaaaaccctagtttcatacactttataatgtataaattttattattctatctatagatttgaccaaattttaacaatcacttctatgagtccttgtatagtttaactaaattcctttgaacattttaaattttaattataaactttattgtatttaattttctaagaattttaaatttttacctaaaaataagccttcccatgcatttaaatgactattgtaaatctaataaaataaatataatgaccctt

SEQ ID NO: 81479 - DNA, 267 bp, Homo sapiens
gtgccattgtactccagcctaggtgatgaatgaaactccgtctcaaaaaaaaaaaaaaattgaaagtgtttaagcccaagatgaaactgaattctatttaagagttgtgcttatgtgtataaagcaaagaataacataggcaaacggaacaaaactatagtaattggggaaacgcaactcatacctgtggaaaccagtggcatggtttgtgtcaaattctgaagcagccttcctggtaaggctactggacacagaatacccttcaag

SEQ ID NO: 81480 - DNA, 570 bp, Homo sapiens
gagtgcaggtggaagaaaggagagaaggtggatttaagagatactgaacataaaggactagggagaagaaagagtctagggtgactgcttccatgcttgagtgctgagtagacaatattgctcttaaccgaaattggtggggaatgaacaggtttggaggaccctaagtcagtgaattagtggtgtttgccggactttaggtagcaatgttagttggcaatttgaagtactcaagagacatggaaagcatgcgcatatgaggactgggtagagaaaggagaacccacaatggggatgataagtaatagagaggacggtaaagggagccaggcccacaggcaccgagagaccactgggcagatgctaccgtgcgtgtgcttaaatactattctatggcagaccgagtttctaaggtttgaacagaaaaacaacagagtctggctcatgcctgtaatcctagcactttgggaggctgaagtgggcagatcacttgagctcaggagtttgagaccagcttgggcaacatggcaaaactctgtctctacaaaaagttagccagacatggtgcca

SEQ ID NO: 81481 - DNA, 705 bp, Homo sapiens
ggcagacttggtttctgacagtgggcaccctgggcagggaagctgggcagggctgctgaagtctggtgggagccctggatctgtgaactctcacttctaggagggactgtgacccccacttctaggaggggctatcctctttctgctaaccttcagcctgctgtgcattcctgttagaagtcatagctactgtcatttgtgctggtggaactaggaaagcagtgttcctctcaagatattatggggtcccagggagatgcagtgtccagggaagcagaggcagcagcacagctgcaggaagaagtcagggtggaatccacacagagcgcattcccaggtgagcatgtaggcccaggggcgtgggctgtaattccttatgtattaaaataaagtagattctgtttcatagtcaccagctactgaagtcagcaatatatacaaaatatacattagcaaagcacaacttcttcttctgtctcaaatgtcttgttgctcctaccaattacttgccctgcttaatagatactcttcacaatggttaactcagtatactgtaggtcatacattagtagaaacatgctcttataatgagcgtgatcatggtaggtgccaggcaagtacactccaagcccagatgtctaggaagatatatagggtcgggtggcaattggcaagggaatttggacctgaggccagtgtcctcct

SEQ ID NO: 81482 - DNA, 432 bp, Homo sapiens
tgagccctgaaccctggacaagtagctaacttttgtttccttaaccttacagtctgtcttagtctataagggggcatgtattttcatctctcagatcacaccacattcctcctggactgggtgcctggccagctctgaagccttcgagtactgactctgagagaaacactggttgattgaagtcttggagtttgcttgagtgtccttttcagctctccctttctagaacagaggttttctgtctttaccctgtgggtaagagatttgtgtttcagggggaaataactgccttttccacctctgcatcaggacagaaggtttgggtcacagtcaggcaaagagctccccagagagcttctgccttttctgcctctattcctcagcaggaagttctgggtcaaggtattggcaggtaggccctggtggttttgt

SEQ ID NO: 81483 - DNA, 300 bp, Homo sapiens
cataatgttcccgtagtgtgccctgatgtctatggttgagcaaatttatttagggttgagcaactgaaaaggtaagccaggagagtgctaagaagctgcagcagatgtttccatttgtcctcctgaaggagcacttcctctctctacgatgtctccaggttggaaatatttcccgtgccaccctcctgggttacacatgtgtaggtgtgcaatgccttagaaaaagagattgatctcagctcactgcagcctctgcctcccagcttcaagccgggtgcagtggctcacacctataatccc

SEQ ID NO: 81484 - DNA, 599 bp, Homo sapiens
ggaggaaacgttgaggccaaatcccagtcataaagactgcacaaatgccatggggaggtaggcagaaagttgcaaacaagtgggtttgtatttcagataaccatcttggggctgcaattctaaagttagatataatcacacaggtgagaatagggctgctggtgcatggcaagcgccctccacattccctctggtactgcataggcatgagcctgcaggctaaatgtcttcccatacttcagacagaggctaggggagacagggctgactggtggccaaatgtcaaggaaagtaactttttaatacgatatattcctttaagtgacttgtccgtttttagccatcaaattacaaattaagagctagtgattctgcagtaacacacaccaattcctcgaaaaccttctaaagtcacaccagtttaataattccaaccttagggaaacaaagccaaacatattttaacaagtttgaactttgacctttctattgcttcatctctcctcagtgctgtttattctatatagtttttaaaatagtgttattatataactagtataaaatatttgaaaatccatgggactatataatttaaaaag

SEQ ID NO: 81485 - DNA, 922 bp, Homo sapiens
cggcgaggccgtgctggaacccgggcctcagccgcagccgcagcgtgggccgacatgacgacagctccccagtgagccccccgcccggcccctccaggcgggcagtggagctggcccggcgcctgggcgcgccatgcgcagcaccactgctcctggccctgctggcgctggtcttgctttacttggtgtctggtgccctggtgttccgggccctggagcagccccacgagcagcaggcccagagggagctgggggaggtccgagagaagttcctgagggcccatccgtgtgtgagcgaccaggagctgggcctcctcatcaaggaggtggctgatgccctgggagggggtgcggacccagaaaccaactcgaccagcaacagcagccactcagcctgggacctgggcagcgccttctttttctcagggaccatcatcaccaccatcggctatggcaatgtggccctgcgcacagatgccgggcgcctcttctgcatcttttatgcgctggtggggattccgctgtttgggatcctactggcaggggtcggggaccggctgggctcctccctgcgccatggcatcggtcacattgaagccatcttcttgtgacgcttaccaccgtgggctttggcgactatgtggccggcgcggaccccaggcaggactccccgggctatcagccgctggtgtggttctggatcctgctcgggcctggcttacttcgcctcagtgctcaccaccaatcgggaactggctgcgagtaggtgtcgcgccgcactcgggccagagatggggcgcgctcacggcttcagggctgccaagctggaactgggcacatgtgacagcgcggcgttgaccagcgagccggggcccgcccggcccggccgccgcacgaaggaccagcactggttgccttcagc

SEQ ID NO: 81486 - DNA, 938 bp, Homo sapiens
  misc_feature (673)..(673): n is a, c, g, or t
  misc_feature (682)..(682): n is a, c, g, or t
  misc_feature (684)..(685): n is a, c, g, or t
ccccgggctgcaggaattcggcacgagataagatagtgacacctccaccacacgtcaattccacacacatttattaggtacctgtgaagcaggatcttatcctcttaaacttccacttctcacactagagagaaagataaggaagatgagcaagtgcctggaatggggcaggctgagtggtcacacaggcacagaggcacactgagaacctacaggggagactgcagagtgccttccctgatgctgcagctggaagtcatccttccctccacctggcccctgagacactctactctgtagtgtgcagtctgatggcactgctagatttctttttcagctcagggccacagcttaaacagctttacctttcccctcagcacctgtcccactaccttgcacacaggtactctatccgtgtttattgaacaaaggagggaaactgatttcactttcacttggttcattatcattccaatttttatgtgaaaatggcacaacccatttggggtacactcatctcaaaagaaaagcccaagactacctctgactggtaccaccttttttgtgggttccttggtgagaaacctttatctttttcatacttttctattctccatcactttctcactagccatggattatcgctagtagaccttcctgtactggtatactnatattgtananngtggagcaaaggactggcccttacttgcgatgactggcacatagagcataggctcttccagagactgcggtgctcgggaaagcctatttcttcgggtcaggggcaaggatggttagacaattattgaacacccctccaaatagcccagtaggccagctgagaaggactggatgctaagtttaaattgaaattctaacttctctttccgggttaaggtgtttgaagaaagttttgccaagttcttggaatcaca

SEQ ID NO: 81487 - DNA, 1259 bp, Homo sapiens
ccccgggctgcaggaattcggcacgagataagatagtgacacctccaccacacgtcaattccacacacatttattaggtacctgtgaagcaggatcttatcctcttaaacttccacttctcacactagagagaaagataaggaagatgagcaagtgcctggaatggggcaggctgagtggtcacacaggcacagaggcacactgagaacctacaggggagactgcagagtgccttccctgatgctgcagctggaagtcatccttccctccacctggcccctgagacactctactctgtagtgtgcagtctgatggcactgctagatttctttttcagctcagggccacagcttaaacagctttacctttcccctcagcacctgtcccactaccttgcacacaggtactctatccgtgtttattgaacaaaggagggaaactgatttcactttcacttggttcattatcattccaatttttatgtgaaaatggcacaacccatttggggtacactcatctcaaaagaaaagcccaagactacctctgactggtaccaccttttttgtgggttccttggtgagaaacctttatctttttcatacttttctattctccatcacttctccaaaagtgtctctttccagctctgatttattcaaaacacacaaacattcctgtttagagattctagcccatggattatccggctagttagtacctctcctgttcacttggttatactttattattgctcagaggttggggaggcagaatgactgtgtcccctcaccctggcagaatgactgtgtcaccactaggagccattagggcttcttcccaggaggactgcctgcttgctttctggggactagcccttatttcccttctgtggtccagtggggcaagtgatttgtattagacaaatatttataagaaacaaccccctccccaaaatagagccaccaagtaaagcacaagcctgaaagatgatgaactatgaattgtctctagtggatataaatttctgcaaatatatctcagtctttctctcttttctctggtgattaaaaagttggtttttggtaaggaaaaggatttttgaccatagagttatgcatcatggaaattcaaacccgatttcttaatacctggtcttctccgaagagaaataatgatagtaatagtggtgctgggaacaatatggaagattattgaatgaaatggattaacttgaataaaatgctgtgaattatctctag

SEQ ID NO: 81488 - DNA, 386 bp, Homo sapiens
ggcagaagaatcgcttgaatttgggaggcaaaggttgtggtgagctgagatggtgctgctgcactccagcctgggagacagagcgagactccatctccaaaaaaaagaaattatgtaatttccatgcgtcttttttctttcactcgatagtgtaataggcagcttttaaatttccaagaggagaaactttgttgttgttaataatttacaggtttttttcattgtgatcagagaatattgcttttgttttgcaaaacctattgatactttctgaggcccagtgtatgtcagcttttgtaactcctccatgtgtacttgatagaagtgtattttcttgggtcttggtatagagttcactgtgtgtgtgtgtatatatatgtacgtat

SEQ ID NO: 81489 - DNA, 164 bp, Homo sapiens
ctcctgtgaaggtggccaggagggagaaggtgctggggctgtgcacctcgtgggcagcctcgggctgtgtcccccctctccccggacaccctctgcaaaggcccacacacacccctctcagttaatggcatccggtaccctaagagcactcatgaacccgggtg

SEQ ID NO: 81490 - DNA, 900 bp, Homo sapiens
aaggaattaatttgatctaaattgaactttaaaattctggtttttcttttttctttttttaagacggagtctccccctgtcacccaggctggaatgcagtggcacaatctcagctcattgcaacctccacctcccgagttcaagcaattctcctgcctcagactcctgagtagctgagattacaggcatgcaccaggacacctggctattttttttttttctttttttagtagagatggggtttcaccagttgatgaggctggtcttggactcctgacctcaagtgatccacccccctcagcctcccaaagtgctaggattacaggcatgagtcactgcgtcaggccaaaattctgtattttcaattagagtcaaagcccaaggatgtctctaccatcttgtagcccttgccaatagcctactcttgtcttccagggttcctccaaatctctctccaaatatttgttatctactcattcaatacccttcttcaaccatcctcttgctttggaattgacatgaaccaactaggcccgccttattggtaggaattcatttgccctgcctgccagcccccatagagacagaaccattgcctagtgaaagaagattttaatgacgtgatgaaaatattttagaaagcaccttgaagattagtatttttatgtaacttctgttggagagatgtcttcaggagactgaagtagaagagcgactgtcaaaatggaaagtcccagagacatccaatttatgtaaatcaacatcacctgaattcagaatctcatccagatttcaacaaagacttctgaatgccaacaaagaagaggactgaatttacagactctcactctaacaatatatgctgttcaatttgaaaacagaataaaattattttggcag

SEQ ID NO: 81491 - DNA, 392 bp, Homo sapiens
  misc_feature (376)..(376): n is a, c, g, or t
aggagcccgcgctgctgactattgttggagcggggtgcattggctctcctccctcaacccgtcttgacacccgcagctgacaaggagaggtaaaatagggcacccaaactactctgcgctttaccctctcaaacacttgtttttaaatcctttgcatctagtcagtcattcaacatgtatcaagcaccagcagctattcgtagcacagctgttaagacctggaataataaaaccttaagactatttggcaacttactcctgaaaggtagtatacggataatttcatctgtaacacgcagatgaggaaattgacctcacagatttaatgtaaattcagagtttacaccaatttaaccgcaacaaatagtcagcagcngggatcctctagagtc

SEQ ID NO: 81492 - DNA, 606 bp, Homo sapiens
aggagcccgcgctgctgactattgttggagcggggtgcattggctctcctccctcaacccgtcttgacacccgcagctgacaaggagaggtaaaatagggcacccaaactactctgcgctttaccctctcaaacacttgtttttaaatcctttgcatctagtcagtcattcaacatgtatcaagcaccagcagctattcgtagcacagctgttaagacctggaataataaaaccttaagactatttggcaacttactcctgaaaggtagtatacggataatttcatctgtaacacgcagatgaggaaattgacctcacagatttaatgtaaattcagagtttacaccaatttaaccgcaacaaataaggagctgtcaatatatatttaataaggaacacacaaaaaaaaagctgaataaatccacttcctaccttctgctccagttgcctctgccagctggtgaaagcttaaggaactgagccctcttagcctcgaggatgagaggtatagagaaacagatcacccaataaacattattcccaagttgaagagcccacatgccctttgagaatgggctggatggtagtaaacacagggccagaggg

SEQ ID NO: 81493 - DNA, 385 bp, Homo sapiens
tagaaggcttgttggacagggcaacattctgtaaagccggccccatggaggcggtctgtgatggaagcagtctttgatatggaactgacgctcctctgggaagcacctactgtgtacctggaccactggctcctgggtggatgcggcggcaaaaaccagacaccagtccttccttgcgctctctacctaccattatccttggccttgattactctgctctatatcatcatcttgcataccctaacacatgacttttatactcatggctccatctgttataaacatactgacaaataaggtttcctctttagcagtgatttcctgatctaatcaatatttgggtatcatataaactcatgggattatcagcgatcatcactaataa

SEQ ID NO: 81494 - DNA, 248 bp, Homo sapiens
aaataaataaataaatggatggatggatagatagcattctgggatgttatgtcagtgatcctgagaaatgttcaaggcctggcttaaggcaataacaaaggggaggggaagatttgaaagatacttaattggtttcagtgcctagtcagtgtcttgagtctagtatttactagattattaacatcataaagaccaagtttagtcctcatcattccttcagtagtaacaaatattaaatgcctgctatg

SEQ ID NO: 81495 - DNA, 413 bp, Homo sapiens
aacactaaagtatcactttataaattcagaaaatccagagtagggaatttctggcccaaggccggagctttccagttgaagtctttattttgcatattctgtggcttttctgttttagttctacttgcttacatttatttttgctttccatagcttgacataatataaaactgaatatatcttagttgtactttgcattgactatttaattttttgtctttttaacttaaaatgtgaaataaaattaatcttgtcttcattactgtatctctgatagtttttgtttcttcatctgttgcttaaatttattccattgtattactgaaaccctaaaaaaaccaagacaccttggaccaagactagtacagtttttattctagtacagttgctgactgtgtgtttgtatgtgtgtt

SEQ ID NO: 81496 - DNA, 411 bp, Homo sapiens
agtttatccaataagattaataaagatttgagaaatcctagcctacagaatatattcctacttgtacaaagtcaccggttataaagtttctgaataaatacttaaagtatttccaaatacaattcacaacgatcccaagcttgaataaaaatgatttttgcggccaggcacggtggctcacgcctgtaatcctagcactttgggaggccgaggtgggcggatcacgaggccaggagatcgagaccatgctggctaacacggtgaaaccccgtctctactaaaaatacaaaaaattagctaggcatggtggcaggcgcctgtagtcccagctactcgggaggctgaggcaggagaatggtgtgaacccgggaggcggagcttgcagtgagccgaaattgcaccagtgcactc

SEQ ID NO: 81497 - DNA, 499 bp, Homo sapiens
tagggtaggatgaggggtcgatagaggacacatggcaccacctggtaaccccaaactccagcagctagcaccagacctgacacacaggttctcaaaacatatgtatgatggaataaatcaatgcatgaaaccgagcacagccacttttttgcctttgcagactcagagaacagaaatcccagcccttcatctctcaggccagaaacccaggcatcatctggggattcctcctacccattctccaattccaatctccattcctgtggcatctcttgacctgcctgtttctccccatccccactgcccctgtcttggtccaggccaccatcatctctctcctggacattgtggcctcctcccaagttctcttccagcctcccatcctggcctcctctgtccatcttccactctatctctaaagtgacttttctaaagcactaatctgaccatgtgaatgctttcatccctcagttcaaaacactcccctgggctgggtgca

SEQ ID NO: 81498 - DNA, 143 bp, Homo sapiens
tataaaaaatgaagagaaaaaagcaaaaatcaaggtaataaaatgttaaagcaatgaagatcacttttatttattttaaataactatcataaatatttatgtattgaatgacagcatcagaatatataaataaataattttta

SEQ ID NO: 81499 - DNA, 205 bp, Homo sapiens
ccccaaatgaccatcagccctcatctaaaatatttcttttgtggttttggagcctctgcagaaatgtgtccagaaactggcaatttgctcccaattcttacggcagcctgttttaccttgaggcacccctgtcagaaatgtcgtcctcttttctcttttcttttttatttttttttttttttttttttttttttttttttttttt

SEQ ID NO: 81500 - DNA, 794 bp, Homo sapiens
agacaggcgacagttcgtgagcaccaacttctattccacggaggcagacagcgaaaaccatttcataaccatggcaaggcatgagagaagcacagggtagctgcaaagttttggaaaagacctctgcaacaactggaagcacagtgtacccaagtggcatggtgcagagggcagaaagaagacaaagaacgaagataaaagaagcctttttcctcaagaagattgtaatctagtggtggagctggaaaataaaggaaagcagtggccatgtatgtcatgaggacattccagtaaccccatgtggtaaggaaccaagtcagcctgccaacaaccactgaaaaactgagccctcctgctgacagccatgtgagaggaacacctgggaagtggatcctccaggcctggtcatacttcagatgactgcagcccaagccaacatcttgcttgagtggagcctcatgagtgactcagtcaaaaccacacagctgagatatttccaacccacagatactgagataataaatgtttattgctactaggtttccttccttccttccttccttcctttttctcttctcttctccttccttccttcctccctccctctcctcctcctccgtcttcttcctcttcctcttcttcctcttccccttccccttcctcttcctccttctttctttcttactttctttctctttctttctttctttctctatgaaaatatcaggtgtactatattttacctgccttcatgtatatttgaataattccataataaaactttttaaaattca

SEQ ID NO: 81501 - DNA, 324 bp, Homo sapiens
tggcaagttggtactaagttccaatgcaaagtctcacacacacttttctctctctctcccaaactgatagattctttctctgcactgtgctgtactgcccaagtttgggggagcagtgtacaggcaatgtgggactgtccttcctcccctctccaatgtgcctcttcttgttattatggtaaaatcaggtagtatgatctctcacctgatttctttagttcttgtgaaggtgttgtcttacatgaattattattcaatttgatgttcttgttgggggatacttgtcagagggttctattatgccatcttgctctaccttttcct

SEQ ID NO: 81502 - DNA, 141 bp, Homo sapiens
gggtgagaggagaattctgcccccatagcttgtcaacatctcttcagcttggtggcccacccagtccacccagcagagcgacctgccccacaccagtggctcgcatgggccttcttatctccttggcccagctgaatcttg

SEQ ID NO: 81503 - DNA, 748 bp, Homo sapiens
ctttctccaaccatgaaggagaccccaactcagcctcctaagaaagttgtaccccaacttcgagtatatcaaggggtaacaaatccaacaccaggtcaggatcaagctcagcatccagtgtcacccagcgttacagttcaacttttggacctgggacttaccatcactccagaacctactacggaggttggacattctacacccccgaagaggactatagtttctccaaagcatcctgaggtgacacttccacatccagaccaggttcagactcagcattcacacctgactcgagccacagttcaacctttggacctggggtttaccatcactccaaaatccatgacagaggttgaaccttctacagccctgatgactacagctcctcctccaggacaccctgaggtgacacttccaccttcagacaagggtcaggctcagcattcacacctgactcaagccaccgttcaacctctggacctggagcttaccataactacaaaacctactacagaggttaaaccatctccaaccacggaggagacctcaactcagcctccagacctgggacttgccatcattccagaacccactacagagactagacattctacagccctggagaagactacagctcctcgtccagaccgggttcagactctgcatcgaagcctgactgaagtcacaggtccacctactgaactagaacctgctcaggattcactggtgcagtctgaaagttacaccc

SEQ ID NO: 81504 - DNA, 286 bp, Homo sapiens
atatactaactgggtttgtgtacatatactttgtgatgttctcatgatgatgcaattgcctaacgacgtatttctcaaaacttattctcgctattatgcaacgcgcgactgtatctggaggaatggactgcataagccacctctctcccctctgctataccctcattgaccccaacctttctagcagaagctcataaatgtcatggtaggcctgagattgtctggctttagaggtttaacatcaactggttcctctgtaataggggttagtaaacttttcttaaac

SEQ ID NO: 81505 - DNA, 462 bp, Homo sapiens
tctggggacagatcccagctccaaatggcagagtctctacagattacaagccaaatacttcacactatgtgctgatcttcaggaagtcagtctatatttcataacaagtcacatggggataatgaaggaatggcctaaaatgctctcagtaatattcctgagtcatccctcagggctgggcttggtgttatgcatggcggggaagggagcagagctgtgtgcagaggaagatgcagttcttgccttgtcaggatccctgacctgatggcgacccatggtggagtcttcatagtgacagacaccactgtaaaagcagatccaggttgtgcaaccctcaaagcaggtctcctcactcaccgggatagatagactattggccgtacctgcatccaccgcttgccatggtttcgttgtgggtggaggatactttcctgtcccctggctttgggtttgcccacgtgg

SEQ ID NO: 81506 - DNA, 684 bp, Homo sapiens
tggtgcaggagaaagtctcactaagcctggagagaaggcactttaatatttttcacactgttatccctgttaacacatcttgcctcagttgacaaatttctgcttctttcacaggggtcaaacatcagactaaacgtggaacagtgtgcctcagactaagactgcaatcatacaacggaaataaaattgttttatttaaccaattagtgacaagggagcaatcaagttgttttcttggcactgtgtatccaattctatgactatgattttcacctttgaagaagttgcattctgttttcaggaagacaatctttggttgccttcctcacatcattttctgccttttcaaagtcatgactagcgaatatattagaaattttctatataaatcataaatttgcctctgaatattataacaatattttattcattttcatacatcatttgactcttctgccctcattattttgttctactttgattgtatgtttggcccagaacactgagtgaaggaggcatgcaattgctgttttgagggtaaccagcaggccaaagttaatttacacttggtggatttccaactgcagaggagttggtgaaattgtcattggagcttttattttgaaatattatgcagttttgtgctaccacatgtttaataagattgaactaactgagcacttg

SEQ ID NO: 81507 - DNA, 472 bp, Homo sapiens
  misc_feature (46)..(46): n is a, c, g, or t
  misc_feature (58)..(58): n is a, c, g, or t
  misc_feature (97)..(97): n is a, c, g, or t
  misc_feature (114)..(114): n is a, c, g, or t
  misc_feature (152)..(152): n is a, c, g, or t
gggaaggagaagtctgctatgggcatctagcaggtacagggcaggnatgctgacaaangtctacaatgaacaggacagccccacaccacaaagaatnatctagcccaaagtgtnatagtgccggagttgagaaaccgtgtttcacagtgatnacacatgacatcactaaatacaaaagaaagaatttgaatctgcatatcttgccagatgccttaagggacaaaatcacttcagcctgaaccactgctgtaaagattcaaacaataaataaatatatgacttaagtagtgaaagaccctcctccatttgttttggggggaggactctccataggttctagttatctactcaaatgattgtcacccccacacattttatttatttatttcaatagctttggggtacaagtcgtttgtggttacatggatgaattctatagtggtgaattctgagaccacctcccccgccccca

SEQ ID NO: 81508 - DNA, 942 bp, Homo sapiens
agactgaaatgtgttgaaccctgaaggcactgaaggcatcgagtgtgcagtgttttctgtttaataggagatggagtctcgctctgtcgcccaggctggagtgcagtggcgtgatctcggctcacttcaaccttcgcctcccaggttcaagtgatgctgctgcctcagcctcctgagtagctgggattacaggcatgagccactgcccccggcctttactttagagtctcccagacatttcctagtcattcaagcaatacctttacaatttaaccagctggactatcacatacttaatatttttctttcaaatcatttttcattcattttgtttaacctaagcaataatacctgaagtcatgggtttgatggactacttatgtattttcaagtgcccattaagataacaaaatattaaaatgagaaaagattattcatctactctctaagatttccttagttaccaccagttgcacatttggcactctaagaaacaattgctttactggattcctgcacctgcagcctcctgcactttttgagtgatactctgttgatgtttcctttgtctttcctcagacaggagctatactccagaacactgtggaatctctcagcaagacctggtgtgctcaggattccagcttagcttatgagagagcttttctggcagtgtcagtgaaacttcttgagtacatggctcacattgctcctgaagtagtgggacaggtggctatccccatgacgggtatgatcaatgggaaccaagccatccgggagttcatccagggccagggaggttgggaaaatctggagagctgaagagttggagctattcacgagactgaacatcacttccttgttgactgattgggtgattgattcctgggaattcaaacaaacaaataaaaaagcacttttttcattttatcagaactgaac

SEQ ID NO: 81509 - DNA, 294 bp, Homo sapiens
cagaacttatgctgtcatagagcactcctttccatttacagggtcagtgaaagccttaataagagctacatttcctggagctatctgcagatcatttcctggtttcttaggaagttcctgaaagcaattcctttgactgtaggattttctctgtcttccctaggaaaatctggagagctgaagagttggagctattcacgagactgaacatcacttccttgttgactgattgggtgattgattcctgggaattcaaacaaacaaataaaaaagcacttttttcattttatcaga

SEQ ID NO: 81510 - DNA, 784 bp, Homo sapiens
cctttctgagcagctgtgtttgaagaaagctagtgggaaaagttccaggattacatgtcaggaaactacaagaggtagaaacatttgttgatttaccagtgtttttaacttcctgctgggctgaaaactgcttgtttcgtggaaaagcaaaacttgacagcaaacatctaaaatgaagagctcccaaacttttgaggaacaaacggaatgcattgtgaacactctactcatggacttcttgagcccaacattgcaggttgccagccggaacctatgctgtgtagatgaagtagattcaggagagccttgttcttttgatgtggctatcattgctggtcgccttcggatgttgggtgaccagttcaacggagaattggaagcttctgccaaaaacgtcattgcagaaaccattaagggacagacaggagctatactccagaacactgtggaatctctcagcaagacctggtgtgctcaggattccagcttagcttatgagagagcttttctggcagtgtcagtgaaacttcttgagtacatggctcacattgctcctgaagtagtgggacaggtggctatccccatgacgggtatgatcaatgggaaccaagccatccgggagttcatccagggccagggaggttgggaaaatctggagagctgaagagttggagctattcacgagactgaacatcacttccttgttgactgattgggtgattgattcctgggaattcaaacaaacaaataaaaaagcacttttttcattttatcagaactgaac

SEQ ID NO: 81511 - DNA, 451 bp, Homo sapiens
gaatttctgccgaaaactgattccatcttatcggatccaacagaccacttggggattgaattcatggagagtgaagaagtttatcaaaggcaggtgctgtcaatttcatgtatcatctttggaattgtcatcgtgggcatgttctgtgcagcattctacttcaaaagcaagaaacaagctaaacaaatccaagagcagctgaaagtgccacaaaatggtaaaagctacagtctcaaagcatccagcacaatggcaaagtcagagaacttggtgaagagccatgtccagctgcaaaataaaatgtcaggcttctgagcccaagctaagccatcatatcccctgtggacctgcacgtgcacatccagatgggccggtttcctgccttttctgatgacattccaccacaaatgaagtgaaaatggcctgttcctgccttaactgatgacattct

SEQ ID NO: 81512 - DNA, 251 bp, Homo sapiens
atcaacgaacccattattttcctaatgaccaatgcatgttacaaaatcatatgtggataaaagattcactcaaagtacaagacagactaatggttttaatgtaatataatacaaaaagttcactgatatggtttcagattctacactgcaactaacctttaaagaaccaccactggccaggtacacggctcatgcctgtaatctcagcactttggggggctacagtgggcagatcgcttgagcccaggagt

SEQ ID NO: 81513 - DNA, 331 bp, Homo sapiens
ccaggctgctggggctctaagagactagagggggaaaagtgctgagtgtctcagtatatactatgcctaggtttacttttctttttagtatagggaccctggcatcctccaatccagagaccctccgttttaccctcttctgagaacaaacttccagacctctgctggaagaagggagggtagtttcccaatggcatggttgaggggtggggtatgatctagggatctaactgcttcttaaacagcttccaaccagtcttatttttagcctccccctcctttaactcccatttccataggtatctggtgccaattattcctaagccttttg

SEQ ID NO: 81514 - DNA, 761 bp, Homo sapiens
cccggccgggggcagcctcgccgccgctcagctcgggaatccctgccccccaccagcacctcagtgggggatactgcaagttcaagaattggggccaggatcaggtggtgacagagccacctgggtttccggagactctcaagccaaccccaagtcatgacaaatgccagtcgccttggacagaggcaagggcctggacgcagagaccagaggcctgaactggcagactgtcctcacaggctgtgtgacgctggctggtcgtcccatctctctggggccccacaggactggggaccaggtcgtggaatgacagtggaccacagtggtccggggaccccgctcgttggtggcaggcacaggcccgtgtgatggggacaatgagctttggtggtttaaggcgtgaatgaatgaaggagcaagcagtaagccccgacagcaaggccaccacagccctcgccccacagggacgcctgagcaaggacccaagcaggggacaagcaggctcaccccgcccttgcggggctgaccacgaggccccgtccggtggaacacgccatgacgcttcaggaggctcatgtagctggcgccgtatgggacagcgggggagagagaaaatgcacagcccagggaatgtggagacaggcccagcgccaggcatgggggccggaaggagcagccggggagcagggggcagggcctggagtcccgccttgcagatctgaagcgtgcccagcccaggactctgaggtgcagcaagaggg

SEQ ID NO: 81515 - DNA, 647 bp, Homo sapiens
cctgtatgagctgggtattctgtataagctgtgatatcccttataaactagggtatcctgtatgaactggggtatcctgtatgagctgggtatcctttatgaactggggtatcctgtatgagctggggtatcctgtatgagctgggtatcctttatgaactggggtatcctgtatgagctggggtatcctgcatgagctggatatcggttatgagctgagctattttgtatgaactggggtatcctgtatgagctggggtatcctttatgaactggggtatcctgtatgagctagggtatgctgcatgggcctggtatcctgtatgagctggggtacgctgtgagacctgggtaccctgtaagatctggggtgccctctgcaagctagggtaacaaatggacccgtgtgtgttctgaggactgtagaggtttatccctctcaggtaaaaatccacaggaatattccagccccacaagtggctctgctccaacgaagtcattcaagaagcaggctctgtccaagttgtgagatcctttttctgtctttccctatggcaatgtctatctctgcatggccagaagttttcatcaagaaagcagggagagggtgtggatgagacacatccataggttaagagctaggtgtg

SEQ ID NO: 81516 - DNA, 1004 bp, Homo sapiens
tcaaattattacaattaaatggttgggcaacacagtgcaaacacatttggcacgctcttgttgcccaactttcaaagtattggatctcctcccaagttttagactgggaatgtccagcaaactctgtgccagtgataagagaagagctggtagtatccagttcagttcatggtaaaatctaatctccactagaaatctgccatcttgaattgtcccttgcaatgtttcaattagcaagtaagtacaatccatatgtctgcagctgtctgtcacacctttctttttcctgttataaaagtgcatgtatgtgcatttgcacatacacacacgctcctaagcagccaacaactcttaaacaatcctatctatgagtacattctaatacctgtaaatttaatttggcaagcaaaactggagcaataaatcacaaacccaattctatcatgtatttccagagaaggttaaaggcgaaagaccatgcggaatgctctatatttcctatggttaaagtgggagggagagaaggacaaagggagagagggaaagagaaggaagagaaggaggagaacaggagcgtggagggagggaagaagagaaagaagatgaagggaggggataaaagaagctaggtaatatcttttatttctgtaagaatatacccaatgtttctcagttaaaccaagtgctgggtcttatcagacaccagctccttcagccaccataggaacaccagatgggaggtagatgctcagcgcaaaacaaaagagcaagggtatcagacagccacagaccactccacagcaagggcccgtatggagttacttggtttgtcactaccccctatcattttagtacaagacctagtagaatcttttgacacatcttactatttgttgtaatttagcgccttggttgtgtttggtgggaaattatgtaggcatacaataaaatctcagcaatctacatttacctgaagttatttactatatttattattgtctagt

SEQ ID NO: 81517 - DNA, 655 bp, Homo sapiens
ccaggctggagtgcaatggcactatctccgttcactgcaactttcacccccccgggttgaagctattctccggccttagcctccggagtagcttggattataggtgcctgccaccacacctggctagtttttgaacttttagtagagacagggttttgccatgttggtcatgcttgtcttgaactcctgacctcaagtgatctgcccacctaggcttcccaaagtgctgggtttaccggcgtgagccaccgcacctggccctaattttgttttctacatttgccaggtatcattgaatgagggggtttaacagcttaaaggaaaacaactaagaacactacttaagaaagataagaggccaggcgaggtggctcatgcctgtaatcccagcactttgggaggccgaggcgggcagatcacgaggtcaagaaatcaacaccatcctggctaacaaggtgaaaccccgtctctactaaaaatacaaaaattagccagacgtggtggcgggtgcctgtagtcccagctactcaggaggctgaggcaggagaatggtgtgaacccaggaggcagagcttgcagtgagctgagattgcgccactgcactccagcctgggcagcagagcgagactccgtctcaacaaaaggaaagataaga

SEQ ID NO: 81518 - DNA, 280 bp, Homo sapiens
gtctttacaaagctgggtcttgggcctctgggaagagccccgtctagtaccttgaaggggtgcaacatgagactgattttaggagtggaaaataactggaaattggaaataactgccatttccaaagcgaagggctgtagctggggtgatgccgactagaacagtgagcaaacaggaagaagcatgccccttctgcctcttgatgttttctgtcactcccattagtagaacacagtaggaagccagctagccaaggagaaatgatgtttgtagagtccca

SEQ ID NO: 81519 - DNA, 2775 bp, Homo sapiens
acagccagcgccgccgggtgcctcgagggcgcgaggccagcccgcctgcccagcccgggaccagcctccccgcgcagcctggcaggtctcctggaggcaaggcgaccttgcttgccctctattgcagaataacaaggggcttagccacaggagttgctggcaagtggaaagaagaacaaatgagtcaatcccgacgtgtcaatcccgacgatagagagctcggaggtgatccacaaatccaagcacccagagatcaattgggatccttggcagatggacatcagtgtcatttactaaccagcaggatggagacgacgcccttgaattctcagaagcagctatcagcgtgtgaagatggagaagattgtcaggaaaacggagttctacagaaggttgttcccaccccaggggacaaagtggagtccgggcaaatatccaatgggtactcagcagttccaagtcctggtgcgggagatgacacacggcactctatcccagcgaccaccaccaccctagtggctgagcttcatcaaggggaacgggagacctggggcaagaaggtggatttccttctctcagtgattggctatgctgtggacctgggcaatgtctggcgcttcccctacatatgttaccagaatggagggggggcattcctcctcccctacaccatcatggccatttttgggggaatcccgctcttttacatggagctcgcactgggacagtaccaccgaaatggatgcatttcaatatggaggaaaatctgcccgattttcaaagggattggttatgccatctgcatcattgccttttacattgcttcctactacaacaccatcatggcctgggcgctatactacctcatctcctccttcacggaccagctgccctggaccagctgcaagaactcctggaacactggcaactgcaccaattacttctccgaggacaacatcacctggaccctccattccacgtcccctgctgaagaattttacacgcgccacgtcctgcagatccaccggtctaaggggctccaggacctggggggcatcagctggcagctggccctctgcatcatgctgatcttcactgttatctacttcagcatctggaaaggcgtcaagacctctggcaaggtggtgtgggtgacagccaccttcccttatatcatcctttctgtcctgctggtgaggggtgccaccctccctggagcctggaggggtgttctcttctacttgaaacccaattggcagaaactcctggagacaggggtgtggatagatgcagccgctcagatcttcttctctcttggtccgggctttggggtcctgctggcttttgctagctacaacaagttcaacaacaactgctaccaagatgccctggtgaccagcgtggtgaactgcatgacgagcttcgtttcgggatttgtcatcttcacagtgctcggttacatggctgagatgaggaatgaagatgtgtctgaggtggccaaagacgcaggtcccagcctcctcttcatcacgtatgcagaagcgatagccaacatgccagcgtccactttctttgccatcatcttctttctgatgttaatcacgctgggcttggacagcacgtttgcaggcttggagggggtgatcacggctgtgctggatgagttcccacacgtctgggccaagcgccgggagcggttcgtgctcgccgtggtcatcacctgcttctttggatccctggtcaccctgacttttggaggggcctacgtggtgaagctgctggaggagtatgccacggggcccgcagtgctcactgtcgcgctgatcgaagcagtcgctgtgtcttggttctatggcatcactcagttctgcagggacgtgaaggaaatgctcggcttcagcccggggtggttctggaggatctgctgggtggccatcagccctctgtttctcctgttcatcatttgcagttttctgatgagcccgccacaactacgacttttccaatataattatccttactggagtatcatcttgggttactgcataggaacctcatctttcatttgcatccccacatatatagcttatcggttgatcatcactccagggacatttaaagagcgtattattaaaagtattaccccagaaacaccaacagaaattccttgtggggacatccgcttgaatgctgtgtaacacactcaccgagaggaaaaaggcttctccacaacctcctcctccagttctgatgaggcacgcctgccttctcccctccaagtgaatgagtttccagctaagcctgatgatggaagggccttctccacagggacacagtctggtgcccagactcaaggcctccagccacttatttccatggattcccctggacatattcccatggtagactgtgacacagctgagctggcctattttggacgtgtgaggatgtggatggaggtgatgaaaaccaccctatcatcagttaggattaggtttagaatcaagtctgtgaaagtctcctgtatcatttcttggtatgatcattggtatctgatatctgtttgcttctaaaggtttcactgttcatgaatacgtaaactgcgtaggagagaacagggatgctatctcgctagccatatattttctgagtagcatatagaattttattgctggaatctactagaaccttctaatccatgtgctgctgtggcatcaggaaaggaagatgtaagaagctaaaatgaaaaatagtgtgtccatgcaagcttgtgag

SEQ ID NO: 81520 - DNA, 753 bp, Homo sapiens
ctcaagcacagagtccattgggaagggaccacccaaaagtgtggaatcggggagacagaaacaaattggagtcaccactccgccagtctgtcacagcgttatgtgtgtctgcatacgtgtgtgcttgccgctggcgctcttcatgaattcgttagcaggttctctgcctggctgctggtgatctcgagcaagttgtttcccttctgtgggactccatttccttatctgaaaagtggacagttgggcttgattcatggttttcaaactgctgggaaatgaccttcccagacttgggcactgtgggttcccaggccaaaacatggcagccgaggcccaaatgggagatccccacaaaacacatacaccagacctcctctttatttctgtcccccctgcctctctcctatgcccctatttctcctgagaatgctcccaacttcaccaagtgtttatggagcccaagaggttctgcccctggggaaaagggggaggcagaagaggtagaactttgggagttcacagctctgatatcaggagcagccccatttttctctgttgtctctgggtggttgctgaggctccttcgctctggcctggagagacctcatgaccagtcattccatatgtccccagcacccatagccatttgcttagaggtttccctgtggagtccaccccagccaaggggcattttttcttttgtgcggcattattcccacataggcttcattgaaactttccttggagccccct

SEQ ID NO: 81521 - DNA, 1080 bp, Homo sapiens
cggccgcctctcaccaccagggggcgcgctccgcctgggcccagattccaccccttgactgtctccccccaaaaatttcctttcactttcggcacgggctgtcacccggcttggccccttccacacccaactggggcaagcctgacccggcgacaggaggcatgaggggcccccggccgaaatgacagtgctggcgccagcctggagcccaacaacctatctcctcctgctgctgctgctgagctcgggactcagtgggacccaggactgctccttccaacacagccccatctcctccgacttcgctgtcaaaatccgtgagctgtctgactacctgcttcaagattacccagtcaccgtggcctccaacctgcaggacgaggagctctgcgggggcctctggcggctggtcctggcacagcgctggatggagcggctcaagactgtcgctgggtccaagatgcaaggcttgctggagcgcgtgaacacggagatacactttgtcaccaaatgtgcctttcaggagacctccgagcagctggtggcgctgaagccctggatcactcgccagaacttctcccggtgcctggagctgcagtgtcagcccgactcctcaaccctgccacccccatggagtccccggcccctggaggccacagccccgacagccccgcagccccctctgctcctcctactgctgctgcccgtgggcctcctgctgctggccgctgcctggtgcctgcactggcagaggacgcggcggaggacaccccgccctggggagcaggtgccccccgtccccagtccccaggacctgctgcttgtggagcactgacctggccaaggcctcatcctggggaggatactgaggcacacagaggggagtcaccagccagaggatgcatagcctggacacagaggaagttggctagaggccggtcccttccttgggcccctctcattccctccccagaatggaggcaacgccagaatccagcaccggccccatttacccaactctgtacaaagcccttgtccccatgaaattgtatataaatcatccttttctaccaaaaaagg

SEQ ID NO: 81522 - DNA, 1134 bp, Homo sapiens
cggccgcctctcaccaccagggggcgcgctccgcctgggcccagattccaccccttgactgtctccccccaaaaatttcctttcactttcggcacgggctgtcacccggcttggccccttccacacccaactggggcaagcctgacccggcgacaggaggcatgaggggcccccggccgaaatgacagtgctggcgccagcctggagcccaacaacctatctcctcctgctgctgctgctgagctcgggactcagtgggacccaggactgctccttccaacacagccccatctcctccgacttcgctgtcaaaatccgtgagctgtctgactacctgcttcaagattacccagtcaccgtggcctccaacctgcaggacgaggagctctgcgggggcctctggcggctggtcctggcacagcgctggatggagcggctcaagactgtcgctgggtccaagatgcaaggcttgctggagcgcgtgaacacggagatacactttgtcaccaaatgtgcctttcagcccccccccagctgtcttcgcttcgtccagaccaacatctcccgcctcctgcaggagacctccgagcagctggtggcgctgaagccctggatcactcgccagaacttctcccggtgcctggagctgcagtgtcagcccgactcctcaaccctgccacccccatggagtccccggcccctggaggccacagccccgacagccccgcagccccctctgctcctcctactgctgctgcccgtgggcctcctgctgctggccgctgcctggtgcctgcactggcagaggacgcggcggaggacaccccgccctggggagcaggtgccccccgtccccagtccccaggacctgctgcttgtggagcactgacctggccaaggcctcatcctggggaggatactgaggcacacagaggggagtcaccagccagaggatgcatagcctggacacagaggaagttggctagaggccggtcccttccttgggcccctctcattccctccccagaatggaggcaacgccagaatccagcaccggccccatttacccaactctgtacaaagcccttgtccccatgaaattgtatataaatcatccttttctaccaaaaaagg

SEQ ID NO: 81523 - DNA, 1086 bp, Homo sapiens
  misc_feature (1)..(1): n is a, c, g, or t
  misc_feature (3)..(3): n is a, c, g, or t
ncnggggcatgagggtccgagacttgttcttctgtcccttccaagacccggcgacaggaggcatgaggggcccccggccgaaatgacagtgctggcgccagcctggagcccaacaacctatctcctcctgctgctgctgctgagctcgggactcagtgggacccaggactgctccttccaacacagccccatctcctccgacttcgctgtcaaaatccgtgagctgtctgactacctgcttcaagattacccagtcaccgtggcctccaacctgcaggacgaggagctctgcgggggcctctggcggctggtcctggcacagcgctggatggagcggctcaagactgtcgctgggtccaagatgcaaggcttgctggagcgcgtgaacacggagatacactttgtcaccaaatgtgcctttcagcccccccccagctgtcttcgcttcgtccagaccaacatctcccgcctcctgcaggagacctccgagcagctggtggcgctgaagccctggatcactcgccagaacttctcccggtgcctggagctgcagtgtcagcccgactcctcaaccctgccacccccatggagtccccggcccctggaggccacagccccgacagccccgcagccccctctgctcctcctactgctgctgcccgtgggcctcctgctgctggccgctgcctggtgcctgcactggcagaggacgcggcggaggacaccccgccctggggagcaggtgccccccgtccccagtccccaggacctgctgcttgtggagcactgacctggccaaggcctcatcctgcggagccttaaacaacgcagtgagacagacatctatcatcccattttacaggggaggatactgaggcacacagaggggagtcaccagccagaggatgcatagcctggacacagaggaagttggctagaggccggtcccttccttgggcccctctcattccctccccagaatggaggcaacgccagaatccagcaccggccccatttacccaactctgtacaaagcccttgtccccatgaaattgtatataaatcatccttttctaccaaaaaagg

SEQ ID NO: 81524 - DNA, 350 bp, Homo sapiens
  misc_feature (1)..(1): n is a, c, g, or t
  misc_feature (3)..(3): n is a, c, g, or t
ncnggggcatgagggtccgagacttgttcttctgtcccttccaagacccggcgacaggaggcatgaggggcccccggccgaaatgacagtgctggcgccagcctggagcccaacaacctatctcctcctgctgctgctgctgagctcgggactcagtgggacccaggactgctccttccaacacagccccatctcctccgacttcgctgtcaaaatccgtgagctgtctgactacctgcttcaagattacccaacgccagaatccagcaccggccccatttacccaactctgtacaaagcccttgtccccatgaaattgtatataaatcatccttttctaccaaaaaagg

SEQ ID NO: 81525 - DNA, 344 bp, Homo sapiens
gttggatccgaattcggatccaccggatccaacgttggatccgaattcggatccaaaggcctcatcctgcggagccttaaacaacgcagtgagacagacatctatcatcccattttacaggggaggatactgaggcacacagaggggagtcaccagccagaggatgcatagcctggacacagaggaagttggctagaggccggtcccttccttgggcccctctcattccctccccagaatggaggcaacgccagaatccagcaccggccccatttacccaactctgtacaaagcccttgtccccatgaaattgtatataaatcatccttttctaccaaaaaagg

SEQ ID NO: 81526 - DNA, 347 bp, Homo sapiens
cggccgcctctcaccaccagggggcgcgctccgcctgggcccagattccaccccttgactgtctccccccaaaaatttcctttcactttcggcacgggctgtcacccggcttggccccttccacacccaactggggcaagcctggtgcgtgaggagacttggactctaggtccccaagggcggagccagggtccccactcctggggcaggggagcagagggtggggggctgggttcccgggtccctaacctgggaggttctgggaccagacgtcgagttcttagttcttagaagtggagatgaagagttttcaccgtaactggggcagacgcaggaagcctggggga

SEQ ID NO: 81527 - DNA, 1162 bp, Homo sapiens
cggccgcctctcaccaccagggggcgcgctccgcctgggcccagattccaccccttgactgtctccccccaaaaatttcctttcactttcggcacgggctgtcacccggcttggccccttccacacccaactggggcaagcctgacccggcgacaggaggcatgaggggcccccggccgaaatgacagtgctggcgccagcctggagcccaacaacctatctcctcctgctgctgctgctgagctcgggactcagtgggacccaggactgctccttccaacacagccccatctcctccgacttcgctgtcaaaatccgtgagctgccaggcctgatcctgttttctcccgcagtctgactacctgcttcaagattacccagtcaccgtggcctccaacctgcaggacgaggagctctgcgggggcctctggcggctggtcctggcacagcgctggatggagcggctcaagactgtcgctgggtccaagatgcaaggcttgctggagcgcgtgaacacggagatacactttgtcaccaaatgtgcctttcagcccccccccagctgtcttcgcttcgtccagaccaacatctcccgcctcctgcaggagacctccgagcagctggtggcgctgaagccctggatcactcgccagaacttctcccggtgcctggagctgcagtgtcagcccgactcctcaaccctgccacccccatggagtccccggcccctggaggccacagccccgacagccccgcagccccctctgctcctcctactgctgctgcccgtgggcctcctgctgctggccgctgcctggtgcctgcactggcagaggacgcggcggaggacaccccgccctggggagcaggtgccccccgtccccagtccccaggacctgctgcttgtggagcactgacctggccaaggcctcatcctggggaggatactgaggcacacagaggggagtcaccagccagaggatgcatagcctggacacagaggaagttggctagaggccggtcccttccttgggcccctctcattccctccccagaatggaggcaacgccagaatccagcaccggccccatttacccaactctgtacaaagcccttgtccccatgaaattgtatataaatcatccttttctaccaaaaaagg

SEQ ID NO: 81528 - DNA, 758 bp, Homo sapiens
ctaaggtgatccaccagcctcagcctcccaaactgctgggattataggcatgagccaccgcgcccggggaaatatagggaacatttctatcatggccacgttctcttggacagcaatgccctagcacatagtaagcgcttgctgggaatggagttgttttgggcataaatctgtggcccgccccaagctaagctactttccctctcctctctcagcggagccttaaacaacgcagtgagacagacatctatcatcccattttacaggggaggatactgaggcacacagaggggagtcaccagccagaggatgcatagcctggacacagaggaagttggctagaggccggtcccttccttgggcccctctcattccctccccagaatggaggcaacgccagaatccagcaccggccccatttacccaactctgtacaaagcccttgtccccatgaaattgtatataaatcatccttttctaccaaaaaaggccaggtctgtctatggatgggtgtgaatggggtagttttgatttcagaatcttggtttttgaattgcaatgcaatgtttcattcaatacgtgttttctgaggtcccctggagccccgggccggcgctgggcaatgtcagagcctggatttgagtcagaaccagcccaggtgccccaggtctccttggctatggacgagaagacaagggattcagcgagcctgggtgcaggatgccataggctactatggagataaaacagaggcagtg

SEQ ID NO: 81529 - DNA, 733 bp, Homo sapiens
cccgatcacggccgagggcggagctccccaccagtgccatgccgtccgccagcactcctcagcccttgggcggtcgatgggaccgggcaccgcgaagcagggtgcgacgtctgtcgcggaggctccggccgcgtggaagcccacctggggcgtggggggcggcttgggcatggcgggctgcaggtcccaagctctgccccgcggggaggcggttgaggcccagtgagaattcaagcacgacgtgggcgggtgggccagcagtgcaaggggacccagcacaccctccgaagctgctggcctgggtgctaagcccctcactgcctggggctggcggcgccagccggcggctcccagtgcggggtccgccaagcccgcgagcgccgcgcggagccatggttcccgcccgcgccactcgtcccacacctccccgcaagcagagggagccggctcctgcttctgccggcccagagaggggttcccactgtgcagcggcaggctgaagggttcttcaagagtggccacagcggatgccgaggccgaggaggtgctgagagcgagcgagggctgctagcacgttgtcacctctcactatgagcaagccctctgaatataggataaagtctagggttgaaggggcattcagaaagtggaggaggacctgctcttgagctggggtaatttggggagctctttcaacaccagatctttcaaaacttacctgtcccctgtccca

SEQ ID NO: 81530 - DNA, 750 bp, Homo sapiens
ctatcgaaggacacatgatacaatgaggtcaatgtaccaggtttatcatctgggttcatattcctgctcctttaccttgtaagctgtcacttaatcctttatagtctttactgctctgaattctatcctgtggatgataatacttgattttaggatttgttggggaaaccgagcatgggagatacttaatgagcactgattaaattggttaaataataatgaaatgtttttaggccagtatttttaaatggtgtaaattggaaagatttttttaaggattaattctatgtagggtattctatatgtggtaaaatgtcaagttgaggtatttgaataattctattaaattctataataaatgaaaagaacctggaataatgcttggcacatagtcagtgatgatcaaattttaacttttattacatgattatccacagcagtaagttcacttgttcttgctctaatgaaaattgtgagttaggtgaattacctctcaaataatttttccctccaaaaatgtgcattccataaattggtcttatttgatccttaagtcaacaaaatgtgtgtgtatatacgtatgtgtgtatatctttaagtcaactaaatgtgtgtgtgtttgtgtgtgtgtgtgtctgtggggtgtgaaatcgtgtcaaaaaagaatgggaggcaatggtaggagagctacaagctgattgttcagcagtagccacttttcttcccttcccatcatgaatagaatatact

SEQ ID NO: 81531 - DNA, 469 bp, Homo sapiens
gtgaactgtgggtagtgatgtcagtgaaaaatggagaccaccagcacaatccaggctgttgtagcacatacagccttttcaccattttagtctagtcagaaaattagagaccttatgctactagtatgataatagtgatacaattttcagtgtgtgactcctacaactcctctcgctctactgtgcatttgaatagttgagtagcatttttaggaaagtcctcactattttactttgcatgattttctgatcaaggcagccaaaagcacagtaaatgacagagcagaaatcttgatctggaaagggagatttggaacatatcttctggaagaagtgtcttctagatgctaattaacaggcaaaaacgtaataaagactaattttgtagagtattgttgccttacggttgttgccagtgtggctcagtaattgcataactgagtatgttgggtcttctctagtttgatct

SEQ ID NO: 81532 - DNA, 437 bp, Homo sapiens
ttattggtctttcttttgcttgggtacttcttattgtagtcttgtttatttctctaactctttcatatcttaccccttcaacctcatatttaatttgatagttccagtgagcccctttaaactctttcaacacagctttttttttcctcaagttcaagcccacacagttaccatttttttcctacttttcttacttttttattggtgagggctgactttgtaggggtacaactcatgcaactgcacagattctgcactctttaacgaccccaagtttgagctaatatgctgcagtcatcgtcatcttggcattttaatagtttttaaatagaaactcccacattaaattttgcaattgccccctaaaattacatagccagtacagttcctgacttatcattttgacttgtccttccgttttggcataaatacctacg

SEQ ID NO: 81533 - DNA, 741 bp, Homo sapiens
tttgaatcctctgttttatgagtgctgagatatcatctcatgatcccgaacagctgaacagtaaccccctgacactgcagggattacttggcctttatacaacacacagtagctcttcagggacacttagggctatttaatttgcattgtgatcttcagtttgagaaccttaaaagaaaaattaaaagtgcaattgcacacatgaaattacagagtaccattctagcaaacctacatttgtaaactttaaaacacaagttttaccccctgtattgtatattcaaatatatagtaaatgtatcagagtatttgcccattagatatagtcaacctaatattaacaattctgaagagtttcttcagcaaaaatgtatcaaaagagtaataaaaacactgtgcgtgtttcaagcttgtaaaccaatgatgtgctgctgtggtgccaacagagacttccaaatggattatgttaaatggccgtcatttcatttcccaaggttgattttgagcagtatacttggtggaactgaaaacaaagaaattaaccatgtatagcaaattcaaggtttctttatagaaaatctttcagcctccatcttattaaatagtgacaatgtggtaagttttgaattacatgaactcattttgtcatagatttcaattaagagtaataaatagtattaattattctcttctatgataagaagtatatcttatgcttatttccgctggaacatatatata

SEQ ID NO: 81534 - DNA, 728 bp, Homo sapiens
gatcaggtctccacagcagcggaacaacacttttctggacagaaagttaatttacatgaaggaaaaacggtctggtggaaggataccagaactaaaacttgggaattaagaaaaattatgacgcggggaagggcttttgcttgtgtttcaccaggagacaatcaaacacccatttagatacccaatagacatttgaaattctgcaatgaaccctacaccgaccggacagaagaaagggaagaatccaaagaggaagaagactggtccctccgacctgtcctttcgggagctgagaaagatgacgaagctgagcgtctcagagaaacaacagaagacggagaagacccgccaggctacaccaccgacatgagaacagataaagaagctgactcaaatggcagagggcagcctaaaggagaaacaactggcaattatcccgggtaatatgatcttggctgccttgatggtaattaccgcggcgtaaatcaacaggattacctttcccttaataatcttcaaaatgtccacgtgaaggacaggaagatgtttaatgggaagaccaaacatcgtcagtgctcaagtccagtagataacaaagaacagaaagaaaacaaaactttggtattttactggaatctgagtgaataaatagggaccacaggacaaatggcaaacaactgcttgagttacatcagaaggaaagaagaaatgatgaacccagatttcca

SEQ ID NO: 81535 - DNA, 515 bp, Homo sapiens
ttatgcatacaaaaggactgatttcaatctctctattttataaaaggctttcactgcaacagacagccagcgcttgagaaagagaccaaagttaaactaaaaaaaaaagtttacatgacagaccagataaatcaaatgtctatccaatcttagatgctatagtaaaatcaaatatggcaagacaatattttagtttacactcatcacagatgtcattcttttaagtttctaaaagaacactgctctttcaaagctttaaaacactgtcaatactaaaacgaatggtataaaaagaactttttggggccacacagaacatttacattacgcactgatgtttttgacatctgtgaataaagtattcttcgctacggcaagaataatcttttactgtttgacaagcaggtaaaggatgggtgaagggtttatcatctgaaaccccagtctagtgatgagatggtaaatgaaaagactctgctgttgcatcaacactcagctaccaccaagagcccttc

SEQ ID NO: 81536 - DNA, 2064 bp, Homo sapiens
aaagaatttgatacaatttagcattgattccaaattttttaaaaccagtaacaaaggagaatagtatccttaacaggataaaattatctatgtcatgtcaacagaaggaatcatactgaattgtgaaatattggaatcatctcccctaagatcaggaagaaaacaaagatggctgctatcaccattattatttaatgttcttctagaagttttggacaatgtcatattatatgacttagaaataagaattataactatctgaaaggaagaaatgaaattatcactatttggaaatgatagaattatctacctagacaaaaggtttaattaaaaaacatttggaattaataagaaaatttagcagaagatctagttaaaagataaacatcccaaagccaaaaattgtgttatataatcatctccaataagaagctgtgacagaaaaaagatctcattcaggagagcaataaaaaacagaatatctagaaataaccttaaaataatttgacagtaatttgatggaaagacctactgtgaagtgggtgttctgaattatgagagttatatgaataggaaggaatggcatctaatggtatcaccccttaaatatttctgtcaaatcataacctagaagttatctcttactcttctttcatgtttcatatctaatcatccactaagttccccgagtccaccttttcattagcatgcaaattaattcctatcctaccctatgtttccttcaattttagacctttattatttctaacctagactttgtaacctctttactcccagtctttcccaatcatctatcccttcattacactactgccagagtgatctttctgaaataacaactattgctcctttgttaacataccttcattgactccctctcaccagctgtataaagtccactctcctcacccgcatcccgtttttcacacttgggcacaccctgctccagctctgtgttctagctgggttgccatgcttacagtttaccaaggtgctgtgctttaccagtgcctcagtactgcagtgtcagtgcagggccattgcgtcttctggtttctctacaggacactctccatctaaatggcttcacagtgtggaaaactccagctcttctttacattcagtttaggcattggatcacttggaaaaccattccacacactttcttgcagttagggacttaccttccctgtttcctgagaagctttgtatacttctgccacagtacttatcacattatactgtagctactagtgacccccactagagtgtaaagctcgttgcatctctagcatgtagctcagtggctggctctttgttatttgttgaaatgtatatttttaacaaatttgatactcatgaagttctgtgtttctgagataattttatagttacacagctgttttctgggacagttactttaaaatttcctggttttttcttttgcatattggaactaagcaatgactggatataaagtatcactatacacatatttgatgtcaccactaaagtttgaccaatgtttaatggtttttcaggaataaaaataaagtcctatgaattaggatataaattgtgtttatgttgccactgcttaccatttctttgttagatgttatgcctagattaatgtcattagcttatatgctgaaaatgtaatcacataatgtttttaaaatagtaaatgacacaattattatatatatgtaaaattcagatccattcaaaaaatatccatgttcttttatatgcttaggactcaacttggtgctattgtatttagctattgtaaaatagctcagcctttaagaagtttgtatataaggtaagacctgcttatataacagccaatttaagattaaaaatagcagtctaagctgagtatagtggcacatgcctatagtcccagctactcaggaggctaaggcaggaggattgcttgagctaagagtttaaggctacagtgagctgtgattgtaactgagaatagccactgtactccagcctgggtaacacagagagaccatgcctcagtgtaaa

SEQ ID NO: 81537 - DNA, 807 bp, Homo sapiens
aaagaatttgatacaatttagcattgattccaaattttttaaaaccagtaacaaaggagaatagtatccttaacaggataaaattatctatgtcatgtcaacagaaggaatcatactgaattgtgaaatattggaatcatctcccctaagatcaggaagaaaacaaagatggctgctatcaccattattatttaatgttcttctagaagttttggacaatgtcatattatatgacttagaaataagaattataactatctgaaaggaagaaatgaaattatcactatttggaaatgatagaattatctacctagacaaaaggtttaattaaaaaacatttggaattaataagaaaatttagcagaagatctagttaaaagataaacatcccaaagccaaaaattgtgttatataatcatctccaataagaagctgtgacagaaaaaagatctcattcaggagagcaataaaaaacagaatatctagaaataaccttaaaataatttgacagtaatttgatggaaagacctactgtgaagtgggtgttctgaattatgagagttatatgaataggaaggaatggcatctaatggtatcaccccttaaatatttctgtcaaatcataacctagaagttatctcttactcttctttcatgtttcatatctaatcatccactaagttccccgagtccaccttttcattagcatgcaaattaattcctatcctaccctatgtttccttcaattttacccctgggtttttccaagcaacaacgttgtaaactgatcgactacgcagtctgtcc

SEQ ID NO: 81538 - DNA, 747 bp, Homo sapiens
ataaaacattatgaaggcaaaaaaaatgttaaataaagttattatatcaacaggtaatttacagcacagttcaatatttatacactgtaaatatatttttatagttcttttggaccctttgtatattctgtgttatacatactcacatacaaacacacacataccaggaaaggagagaggaaatacagaagtagccacgtgttagttaattatttgatgctgcatcttcgattactaatgagcccagtgacaacactttgttgatttttatgtgaaaattctttatgatcatcagtgttatgaagtggtttccacgaaagcatttcacccatctttttcttcttttaaagaaacatttacaatagtgatgctgtttaagttttgttaatacaatgcatttttgttgggggaagcattcttcggaaaaaccgtatcagcttttgctttcacatctagcataaatgtataagactgtaagaagaggcaatataaaaatgtaatatgcatgatcctttctttctggcatcaccgacctcattaatagatttgtgtgtaagggaatatagtcctgaaaattgttaaaccagatctcaaccctggtttttacactgatgtgagtatcctgtgccagacactttatttcaacaggccttagttttctcatttataaataagagcctgccctggaatgatcaggaacatccttctgggagtaattccctgtgactctgtgccctgttagggcca

SEQ ID NO: 81539 - DNA, 2466 bp, Homo sapiens
gtcacagccccgagtggaagggaaaaaaaaagaggaggcggcggaggaggcaagagccgacgcgaggggaggggagcgcagcggcggggctaacgggcgggcaagcgggcgggcggcaacagcatgtccctcggccagcgcgggcggcctcttagcgcggcgggggctgctctgggcgcgccccgggcgaagtgcgcccagtctccggccccggcccctcggcgcgcccgacttcccggccgcccctgagcccagcagccgcgggtcccgggatcggctaagagtagctgcaacgcctcgccggacggagtcctttcctttcccgggacgctgggccatgagctccgcggcccacctgaggcacaggggagtctgctcggccaggacagcctccccgaagtcccgtgccctcgcctctgcactgcgggacgccagcgctcggccctggcggaggcgtcttcggaagagcatcggggtgggggcatggaatccgcggaacctgcgggccaggcccgggcggcggccaccaagctgtcggaggctgtgggcgcggcgctgcaggagccccggcggcagaggcgcctggtgcttgttatcgtgtgcgtggcgctgttactggacaacatgctgtacatggtcatcgtgcccatagtgcccgactacatcgcccacatgcgcgggggcggcgagggccccacccggactcccgaggtgtgggagcccaccctgccgctgcccactccggccaatgccagcgcctacacggccaacacctcggcgtccccgacagctgcgtggccagcgggctcagcccttcggccccgctaccctacggagagcgaagacgtgaagatcggggtgctgtttgcttccaaggctatcctgcagctgctagtgaaccccttgagcgggcccttcatcgaccgcatgagctacgacgtgccgctgctgatcggcctgggcgtcatgttcgcctctacagtcctgttcgccttcgccgaggactacgccacgctgttcgcggcgcgcagcctgcagggcctgggctcagccttcgccgacacgtctggcatagccatgatcgccgataagtacccggaggagccggagcgcagtcgtgcactgggcgtggcgctggccttcattagcttcggaagcctagtggccccgcccttcgggggcatcctctatgagttcgccggcaagcgcgtgcccttcttggtgctagctgccgtgtcgctctttgacgcgctgttgctgctggcagtggccaaacccttctcggcggctgcacgggctcgggccaacctgccagtgggcactcccatccaccgcctcatgctagacccctacattgccgtggtggccggcgcgctcaccacctgtaacattcccctcgccttcctcgaacccaccattgccacgtggatgaagcatacgatggcggcttccgagtgggagatgggcatggcctggctgccggccttcgtgcctcatgtgctgggcgtctacctcaccgtgcgcctggcggcgcgctacccacacctgcagtggctgtacggcgcgcttgggctggctgtgatcggcgccagctcgtgcatcgtgcccgcctgccgctccttcgcgccgctagtggtctcactatgcggcctctgttttggcatagccctagtcgacacagcactgctgcccacgctcgccttcctggtggacgtgcgccatgtctcagtctatggcagcgtctacgccatcgccgacatctcctattcggtggcctacgcgctcgggcccatagtggcaggccacattgtgcactcgctgggctttgagcagctcagccttggcatgggactggccaacctgctctatgctcccgtcttgctgctgctccgcaacgtgggcctcctgacgcgctcccgttccgagcgcgatgtgctgcttgatgagccaccgcaaggtctgtacgatgcggtgcgcctgcgtgagcgtcctgtgtctggccaggacggcgagcctcgcagcccgcctggcccttttgatgagtgcgaggacgactacaactactactacacccgcagctagcatccccactcctcctccagcccacccaaccgccttgggtcaagggggctgctctgcaagcccactggccagctctggctcagggcccacctcctccagcgagtaccccagccactcctcaaccttgacttctgcccaaatcccctccctgtgacccgttccatatccctttctctcttgtccaatggggcttggagcaccgaggccagcgaagccatcgcgctccttgcggaggtgaagaggaccctgagtccccacctgcggctcccctgtgtagagcctgcatctgtctgtccttccttccattgctcccagtgccaaacttgggccgctgcaccgcggcgcctccgcccaaatcaataaactgtgtctgtcccaggaggc

SEQ ID NO: 81540 - DNA, 743 bp, Homo sapiens
tttctctttatcgacctgaagaatacagtcgttttgaagctaaaatacatgatttacgggagcagatgatgaatagtagtattagttcagggtcaggttctcttcgaactagccagaagcgatccctctatgtcagagccctttttgattatgacaagactaaagacagtgggcttcccagtcagggactgaacttcaaatttggagatatcctccatgttattaatgcttctgatgatgaatggtggcaagccaggcaggttacaccagatggtgagagcgatgaggtcggagtgattcccagtaaacgcagagttgagaagaaagaacgagcccgattaaaaacagtgaaattcaattctaaaacgagagataaaggggagatccctgacgacatgggatcaaaaggcctgagtaagtgatcaaaatactcccaagttattttttaacctccatctgcagacctaccttattcagatacattttgagattcatggtagtgcctttctggcataaggaggtgtatgatttagattgcttttagaattttcatgtttatcacatgcttgggactttatttctgtaatacataactttttgtttttatttttcacatgtcatttgaaaaattctcttgctcgtaactatattttcctttttgtaatttttacgacagttacttttgctaggaacttttaaaatataaaaacttttaagatttttttaaatgtaccctcattatt

SEQ ID NO: 81541 - DNA, 2849 bp, Homo sapiens
tttctctttatcgacctgaagaatacagtcgttttgaagctaaaatacatgatttacgggagcagatgatgaatagtagtattagttcagggtcaggttctcttcgaactagccagaagcgatccctctatgtcagagccctttttgattatgacaagactaaagacagtgggcttcccagtcagggactgaacttcaaatttggagatatcctccatgttattaatgcttctgatgatgaatggtggcaagccaggcaggttacaccagatggtgagagcgatgaggtcggagtgattcccagtaaacgcagagttgagaagaaagaacgagcccgattaaaaacagtgaaattcaattctaaaacgagagataaagggcagtcattcaatgacaagcgtaaaaagaacctcttttcccgaaaattccccttctacaagaacaaggaccagagtgagcaggaaacaagtgatgctgaccagcatgtaacttctaatgccagcgatagtgaaagtagttaccgtggtcaagaagaatacgtcttatcttatgaaccagtgaatcaacaagaagttaattatactcgaccagtgatcatattgggacctatgaaagacaggataaatgatgacttgatctcagaatttcctgacaaatttggatcctgtgttcctcatacaactagaccaaaacgagattatgaggtagatggaagagattatcattttgtgacttcaagagagcagatggaaaaagatatccaggaacataaattcattgaagctggccagtataacaatcatctatatggaacaagtgttcagtctgtacgagaagtagcagaaaagggcaaacactgtatccttgatgtgtctggaaatgccataaagagattacagattgcacagctttaccctatctccatttttattaaacccaaatccatggaaaatatcatggaaatgaataagcgtctaacagaagaacaagccagaaaaacatttgagagagccatgaaactggaacaggagtttactgaacatttcacagctattgtacagggggatacgctggaagacatttacaaccaagtgaaacagatcatagaagaacaatctggttcttacatctgggttccggcaaaagaaaagctatgaaaactcatgtttctctgtttctcttttccacaattccattttctttggcatctctttgccctttcctctggagtctttcttgagtactgatttcatgttgaattgtatcccacacatcatggtctgcagcttctttttcacatgtagtgtctccttcaagttacatcgtgtgtattatttaatgtcactattggttagtggccatttttcagaactgaagatggaatggcctgaccagctattaagaatgtggggagacgcagaaattgtggtaaaattccttaatgtttaagggaaagtaactttaagagatttttggaaaagctttatatacattcttttcaaatttcagtacaaatgaaaaagtggttttaatcagtgatttagtagactttgagcaactgtgcacgcttcagtttaatagcatggtttggccagtgtattactctcaagtccttttctcaatcaacttctatcatcaaagcaattgtttcattatagataaataaggacattttttaatttaaaaattcatgtctgagttgactttcataagggatttcattttttcctcaacattcttaaagccttttagtatttgacggttcttttttcccaggacatttgctaggaataacaacgtttcaatgtttttaatctacttgagcaacactatcgtgtcttacaaaagttgttcatatgtaaatgatcatcacatttcgtgaattgaggccatgttcaggtgctaaggaagttcgccttttacacagaagattgagaaaatttcctagatataaatacagataaatcagacgttacagtggtgacgtagtaaccatcatggcaatggaaaggagtccaattcatagcctaaaacttcaaatgtattcttaggagtcagattttactgaatattttacccacaatagctgcctattttgttataataaaatatatataaatatatatataaaactttctttaaactgtaactatgggaattattttctttacatagttgcgcacacacacaaacatatatatatatttaaaatatattttgtttcttttgccacctactcctaactttttgtttggtttttaaattaaatattaattgaatagacttatcttaatcatgtgaactgaaaatgggggcatggtggtcatgaggaggaaacatttagggaaattagattataagtaaaagtgtgggcatattctcctcttttctacaaaggttttcaaatggttcctgaggttttttgttgttgtccgtgttgttactgttgttcttgtcatcaggtttgattttggtccttgccctttccttctagttctccttttattaataggaaggcaggcaaaagccccatttatgtgtgtgttttcccctcagacagctttcatccactgctctgcactagaattgcacaaatcttcatggtgagcaattttaagaaatgttagtgaaaggtagaaattatttcacaaatcagtttctctggtccttcatattaataataatatttggcttcccattgctctttggagttgtttattaaatatgtgtttttgacaacctcctcattagtttcttaaatgagtactggtttgtaaagaattatcaacattatccattccatttatgaagaagaggagaacagctaataaactgtattgtaaaatcca

SEQ ID NO: 81542 - DNA, 2994 bp, Homo sapiens
agacatctgaatttatgacttctaatattagttggttttaaaatgcaattgccaccatcagtgccttcccttccagctgagacatctgaatttatgacctttacaatcctttatctatatgatctcagaaacatggattttcatcttcagaaacaggagcaaagctggattgaaaataagatcatctatttatttttaattacaaagacatcccgtcattaaaatgggcatctatttgtttaaatatagtttgtcccctttgccagttaacgctgtttcaaaaactgaaatagtgccaacagtattttctcctttgagttttatgtctacatttggactaattcagggtcacttagccctttttgtcatattctacttgctatttataatagatttgttcataaactgtgttgtacaaaaataaggcattgtccttaattacaggagttttcctttgctaatatatatttattatttgaaaaacttaaacgtttcaaagaaaaagaaaatgcttttaaaaaattattttgttatatatggcttatatctcaacatttcattttgattatttgctttttaaactcatgacactgttttattttttttcattgtcctgcaatttcagagcatgtaacttctaatgccagcgatagtgaaagtagttaccgtggtcaagaagaatacgtcttatcttatgaaccagtgaatcaacaagaagttaattatactcgaccagtgatcatattgggacctatgaaagacaggataaatgatgacttgatctcagaatttcctgacaaatttggatcctgtgttcctcatacaactagaccaaaacgagattatgaggtagatggaagagattatcattttgtgacttcaagagagcagatggaaaaagatatccaggaacataaattcattgaagctggccagtataacaatcatctatatggaacaagtgttcagtctgtacgagaagtagcagaaaagggcaaacactgtatccttgatgtgtctggaaatgccataaagagattacagattgcacagctttaccctatctccatttttattaaacccaaatccatggaaaatatcatggaaatgaataagcgtctaacagaagaacaagccagaaaaacatttgagagagccatgaaactggaacaggagtttactgaacatttcacagctattgtacagggggatacgctggaagacatttacaaccaagtgaaacagatcatagaagaacaatctggttcttacatctgggttccggcaaaagaaaagctatgaaaactcatgtttctctgtttctcttttccacaattccattttctttggcatctctttgccctttcctctggagtctttcttgagtactgatttcatgttgaattgtatcccacacatcatggtctgcagcttctttttcacatgtagtgtctccttcaagttacatcgtgtgtattatttaatgtcactattggttagtggccatttttcagaactgaagatggaatggcctgaccagctattaagaatgtggggagacgcagaaattgtggtaaaattccttaatgtttaagggaaagtaactttaagagatttttggaaaagctttatatacattcttttcaaatttcagtacaaatgaaaaagtggttttaatcagtgatttagtagactttgagcaactgtgcacgcttcagtttaatagcatggtttggccagtgtattactctcaagtccttttctcaatcaacttctatcatcaaagcaattgtttcattatagataaataaggacattttttaatttaaaaattcatgtctgagttgactttcataagggatttcattttttcctcaacattcttaaagccttttagtatttgacggttcttttttcccaggacatttgctaggaataacaacgtttcaatgtttttaatctacttgagcaacactatcgtgtcttacaaaagttgttcatatgtaaatgatcatcacatttcgtgaattgaggccatgttcaggtgctaaggaagttcgccttttacacagaagattgagaaaatttcctagatataaatacagataaatcagacgttacagtggtgacgtagtaaccatcatggcaatggaaaggagtccaattcatagcctaaaacttcaaatgtattcttaggagtcagattttactgaatattttacccacaatagctgcctattttgttataataaaatatatataaatatatatataaaactttctttaaactgtaactatgggaattattttctttacatagttgcgcacacacacaaacatatatatatatttaaaatatattttgtttcttttgccacctactcctaactttttgtttggtttttaaattaaatattaattgaatagacttatcttaatcatgtgaactgaaaatgggggcatggtggtcatgaggaggaaacatttagggaaattagattataagtaaaagtgtgggcatattctcctcttttctacaaaggttttcaaatggttcctgaggttttttgttgttgtccgtgttgttactgttgttcttgtcatcaggtttgattttggtccttgccctttccttctagttctccttttattaataggaaggcaggcaaaagccccatttatgtgtgtgttttcccctcagacagctttcatccactgctctgcactagaattgcacaaatcttcatggtgagcaattttaagaaatgttagtgaaaggtagaaattatttcacaaatcagtttctctggtccttcatattaataataatatttggcttcccattgctctttggagttgtttattaaatatgtgtttttgacaacctcctcattagtttcttaaatgagtactggtttgtaaagaattatcaacattatccattccatttatgaagaagaggagaacagctaataaactgtattgtaaaatcca

SEQ ID NO: 81543 - DNA, 2453 bp, Homo sapiens
ggacgcgtgggtcgacccacgcgtcgaaattccccttctacaagaacaaggaccagagtgagcaggaaacaagtgatgctgaccagcatgtaacttctaatgccagcgatagtgaaagtagttaccgtggtcaagaagaatacgtcttatcttatgaaccagtgaatcaacaagaagttaattatactcgaccagtgatcatattgggacctatgaaagacaggataaatgatgacttgatctcagaatttcctgacaaatttggatcctgtgttcctcatacaactagaccaaaacgagattatgaggtagatggaagagattatcattttgtgacttcaagagagcagatggaaaaagatatccaggaacataaattcattgaagctggccagtataacaatcatctatatggaacaagtgttcagtctgtacgagaagtagcagaaaagggcaaacactgtatccttgatgtgtctggaaatgccataaagagattacagattgcacagctttaccctatctccatttttattaaacccaaatccatggaaaatatcatggaaatgaataagcgtctaacagaagaacaagccagaaaaacatttgagagagccatgaaactggaacaggagtttactgaacatttcacagctattgtacagggggatacgctggaagacatttacaaccaagtgaaacagatcatagaagaacaatctggttcttacatctgggttccggcaaaagaaaagctatgaaaactcatgtttctctgtttctcttttccacaattccattttctttggcatctctttgccctttcctctggagtctttcttgagtactgatttcatgttgaattgtatcccacacatcatggtctgcagcttctttttcacatgtagtgtctccttcaagttacatcgtgtgtattatttaatgtcactattggttagtggccatttttcagaactgaagatggaatggcctgaccagctattaagaatgtggggagacgcagaaattgtggtaaaattccttaatgtttaagggaaagtaactttaagagatttttggaaaagctttatatacattcttttcaaatttcagtacaaatgaaaaagtggttttaatcagtgatttagtagactttgagcaactgtgcacgcttcagtttaatagcatggtttggccagtgtattactctcaagtccttttctcaatcaacttctatcatcaaagcaattgtttcattatagataaataaggacattttttaatttaaaaattcatgtctgagttgactttcataagggatttcattttttcctcaacattcttaaagccttttagtatttgacggttcttttttcccaggacatttgctaggaataacaacgtttcaatgtttttaatctacttgagcaacactatcgtgtcttacaaaagttgttcatatgtaaatgatcatcacatttcgtgaattgaggccatgttcaggtgctaaggaagttcgccttttacacagaagattgagaaaatttcctagatataaatacagataaatcagacgttacagtggtgacgtagtaaccatcatggcaatggaaaggagtccaattcatagcctaaaacttcaaatgtattcttaggagtcagattttactgaatattttacccacaatagctgcctattttgttataataaaatatatataaatatatatataaaactttctttaaactgtaactatgggaattattttctttacatagttgcgcacacacacaaacatatatatatatttaaaatatattttgtttcttttgccacctactcctaactttttgtttggtttttaaattaaatattaattgaatagacttatcttaatcatgtgaactgaaaatgggggcatggtggtcatgaggaggaaacatttagggaaattagattataagtaaaagtgtgggcatattctcctcttttctacaaaggttttcaaatggttcctgaggttttttgttgttgtccgtgttgttactgttgttcttgtcatcaggtttgattttggtccttgccctttccttctagttctccttttattaataggaaggcaggcaaaagccccatttatgtgtgtgttttcccctcagacagctttcatccactgctctgcactagaattgcacaaatcttcatggtgagcaattttaagaaatgttagtgaaaggtagaaattatttcacaaatcagtttctctggtccttcatattaataataatatttggcttcccattgctctttggagttgtttattaaatatgtgtttttgacaacctcctcattagtttcttaaatgagtactggtttgtaaagaattatcaacattatccattccatttatgaagaagaggagaacagctaataaactgtattgtaaaatcca

SEQ ID NO: 81544 - DNA, 2938 bp, Homo sapiens
  misc_feature (2865)..(2865): n is a, c, g, or t
  misc_feature (2874)..(2874): n is a, c, g, or t
tttctctttatcgacctgaagaatacagtcgttttgaagctaaaatacatgatttacgggagcagatgatgaatagtagtattagttcagggtcaggttctcttcgaactagccagaagcgatccctctatgtcagagccctttttgattatgacaagactaaagacagtgggcttcccagtcagggactgaacttcaaatttggagatatcctccatgttattaatgcttctgatgatgaatggtggcaagccaggcaggttacaccagatggtgagagcgatgaggtcggagtgattcccagtaaacgcagagttgagaagaaagaacgagcccgattaaaaacagtgaaattcaattctaaaacgagagataaagggcagtcattcaatgacaagcgtaaaaagaacctcttttcccgaaaattccccttctacaagaacaaggaccagagtgagcaggaaacaagtgatgctgaccagcatgtaacttctaatgccagcgatagtgaaagtagttaccgtggtcaagaagaatacgtcttatcttatgaaccagtgaatcaacaagaagttaattatactcgaccagtgatcatattgggacctatgaaagacaggataaatgatgacttgatctcagaatttcctgacaaatttggatcctgtgttcctcatacaactagaccaaaacgagattatgaggtagatggaagagattatcattttgtgacttcaagagagcagatggaaaaagatatccaggaacataaattcattgaagctggccagtataacaatcatctatatggaacaagtgttcagtctgtacgagaagtagcagaaaagggcaaacactgtatccttgatgtgtctggaaatgccataaagagattacagattgcacagctttaccctatctccatttttattaaacccaaatccatggaaaatatcatggaaatgaataagcgtctaacagaagaacaagccagaaaaacatttgagagagccatgaaactggaacaggagtttactgaacatttcacagctattgtacagggggatacgctggaagacatttacaaccaagtgaaacagatcatagaagaacaatctggttcttacatctgggttccggcaaaagaaaagctatgaaaactcatgtttctctgtttctcttttccacaattccattttctttggcatctctttgccctttcctctggagtctttcttgagtactgatttcatgttgaattgtatcccacacatcatggtctgcagcttctttttcacatgtagtgtctccttcaagttacatcgtgtgtattatttaatgtcactattggttagtggccatttttcagaactgaagatggaatggcctgaccagctattaagaatgtggggagacgcagaaattgtggtaaaattccttaatgtttaagggaaagtaactttaagagatttttggaaaagctttatatacattcttttcaaatttcagtacaaatgaaaaagtggttttaatcagtgatttagtagactttgagcaactgtgcacgcttcagtttaatagcatggtttggccagtgtattactctcaagtccttttctcaatcaacttctatcatcaaagcaattgtttcattatagataaataaggacattttttaatttaaaaattcatgtctgagttgactttcataagggatttcattttttcctcaacattcttaaagccttttagtatttgacggttcttttttcccaggacatttgctaggaataacaacgtttcaatgtttttaatctacttgagcaacactatcgtgtcttacaaaagttgttcatatgtaaatgatcatcacatttcgtgaattgaggccatgttcaggtgctaaggaagttcgccttttacacagaagattgagaaaatttcctagatataaatacagataaatcagacgttacagtggtgacgtagtaaccatcatggcaatggaaaggagtccaattcatagcctaaaacttcaaatgtattcttaggagtcagattttactgaatattttacccacaatagctgcctattttgttataataaaatatatataaatatatatataaaactttctttaaactgtaactatgggaattattttctttacatagttgcgcacacacacaaacatatatatatatttaaaatatattttgtttcttttgccacctactcctaactttttgtttggtttttaaattaaatattaattgaatagacttatcttaatcatgtgaactgaaaatgggggcatggtggtcatgaggaggaaacatttagggaaattagattataagtaaaagtgtgggcatattctcctcttttctacaaaggttttcaaatggttcctgaggttttttgttgttgtccgtgttgttactgttgttcttgtcatcaggtttgattttggtccttgccctttccttctagttctccttttattaataggaaggcaggcaaaagccccatttatgtgtgtgttttcccctcagacagctttcatccactgctctgcactagaattgcacaaatcttcatggtgagcaattttaagaaatgttagtgaaaggtagaaattatttcacaaatcagtttctctggtccttcatattaataataatatttggcttcccattgctctttggagttgtttattaaatatgtgtttttgacaacctcctcattagtttcttaaatgagtactggtttgtaaagaattatcaacattatccattccatttatgaagaagaggagaacagctaataaactgtattgtaaaatccaaaaaaaaaaaaaaaanaaaaaaaanaaattttggggcggcccggcccccggaaaaggtttttaaaccccctggggggggggggggcccc

SEQ ID NO: 81545 - DNA, 1547 bp, Homo sapiens
ggacgcgtgggtcgacccacgcgtcggtattatttaatgtcactattggttagtggccatttttcagaactgaagatggaatggcctgaccagctattaagaatgtggggagacgcagaaattgtggtaaaattccttaatgtttaagggaaagtaactttaagagatttttggaaaagctttatatacattcttttcaaatttcagtacaaatgaaaaagtggttttaatcagtgatttagtagactttgagcaactgtgcacgcttcagtttaatagcatggtttggccagtgtattactctcaagtccttttctcaatcaacttctatcatcaaagcaattgtttcattatagataaataaggacattttttaatttaaaaattcatgtctgagttgactttcataagggatttcattttttcctcaacattcttaaagccttttagtatttgacggttcttttttcccaggacatttgctaggaataacaacgtttcaatgtttttaatctacttgagcaacactatcgtgtcttacaaaagttgttcatatgtaaatgatcatcacatttcgtgaattgaggccatgttcaggtgctaaggaagttcgccttttacacagaagattgagaaaatttcctagatataaatacagataaatcagacgttacagtggtgacgtagtaaccatcatggcaatggaaaggagtccaattcatagcctaaaacttcaaatgtattcttaggagtcagattttactgaatattttacccacaatagctgcctattttgttataataaaatatatataaatatatatataaaactttctttaaactgtaactatgggaattattttctttacatagttgcgcacacacacaaacatatatatatatttaaaatatattttgtttcttttgccacctactcctaactttttgtttggtttttaaattaaatattaattgaatagacttatcttaatcatgtgaactgaaaatgggggcatggtggtcatgaggaggaaacatttagggaaattagattataagtaaaagtgtgggcatattctcctcttttctacaaaggttttcaaatggttcctgaggttttttgttgttgtccgtgttgttactgttgttcttgtcatcaggtttgattttggtccttgccctttccttctagttctccttttattaataggaaggcaggcaaaagccccatttatgtgtgtgttttcccctcagacagctttcatccactgctctgcactagaattgcacaaatcttcatggtgagcaattttaagaaatgttagtgaaaggtagaaattatttcacaaatcagtttctctggtccttcatattaataataatatttggcttcccattgctctttggagttgtttattaaatatgtgtttttgacaacctcctcattagtttcttaaatgagtactggtttgtaaagaattatcaacattatccattccatttatgaagaagaggagaacagctaataaactgtattgtaaaatcca

SEQ ID NO: 81546 - DNA, 2148 bp, Homo sapiens
tttctctttatcgacctgaagaatacagtcgttttgaagctaaaatacatgatttacgggagcagatgatgaatagtagtattagttcagggtcaggttctcttcgaactagccagaagcgatccctctatgtcagagccctttttgattatgacaagactaaagacagtgggcttcccagtcagggactgaacttcaaatttggagatatcctccatgttattaatgcttctgatgatgaatggtggcaagccaggcaggttacaccagatggtgagagcgatgaggtcggagtgattcccagtaaacgcagagttgagaagaaagaacgagcccgattaaaaacagtgaaattcaattctaaaacgagagataaagggcagtcattcaatgacaagcgtaaaaagaacctcttttcccgaaaattccccttctacaagaacaaggaccagagtgagcaggaaacaagtgatgctgaccagcatgtaacttctaatgccagcgatagtgaaagtagttaccgtggtcaagaagaatacgtcttatcttatgaaccagtgaatcaacaagaagttaattatactcgaccagtgatcatattgggacctatgaaagacaggataaatgatgacttgatctcagaatttcctgacaaatttggatcctgtgttcctcatacaactagaccaaaacgagattatgaggtagatggaagagattatcattttgtgacttcaagagagcagatggaaaaagatatccaggaacataaattcattgaagctggccagtataacaatcatctatatggaacaagtgttcagtctgtacgagaagtagcagaaaagggcaaacactgtatccttgatgtgtctggaaatgccataaagagattacagattgcacagctttaccctatctccatttttattaaacccaaatccatggaaaatatcatggaaatgaataagcgtctaacagaagaacaagccagaaaaacatttgagagagccatgaaactggaacaggagtttactgaacatttcacagctattgtacagggggatacgctggaagacatttacaaccaagtgaaacagatcatagaagaacaatctggttcttacatctgggttccggcaaaagaaaagctatgaaaactcatgtttctctgtttctcttttccacaattccattttctttggcatctctttgccctttcctctggagtctttcttgagtactgatttcatgttgaattgtatcccacacatcatggtctgcagcttctttttcacatgtagtgtctccttcaagttacatcgtgtgtattatttaatgtcactattggttagtggccatttttcagaactgaagatggaatggcctgaccagctattaagaatgtggggagacgcagaaattgtggtaaaattccttaatgtttaagggaaagtaactttaagagatttttggaaaagctttatatacattcttttcaaatttcagtacaaatgaaaaagtggttttaatcagtgatttagtagactttgagcaactgtgcacgcttcagtttaatagcatggtttggccagtgtattactctcaagtccttttctcaatcaacttctatcatcaaagcaattgtttcattatagataaataaggacattttttaatttaaaaattcatgtctgagttgactttcataagggatttcattttttcctcaacattcttaaagccttttagtatttgacggttcttttttcccaggacatttgctaggaataacaacgtttcaatgtttttaatctacttgagcaacactatcgtgtcttacaaaagttgttcatatgtaaatgatcatcacatttcgtgaattgaggccatgttcaggtgctaaggaagttcgccttttacacagaagattgagaaaatttcctagatataaatacagataaatcagacgttacagtggtgacgtagtaaccatcatggcaatggaaaggagtccaattcatagcctaaaacttcaaatgtattcttaggagtcagattttactgaatattttacccacaatagctgcctattttgttataataaaatatatataaatatatatataaaactttctttaaactgta

SEQ ID NO: 81547 - DNA, 1105 bp, Homo sapiens
  misc_feature (1064)..(1064): n is a, c, g, or t
  misc_feature (1094)..(1094): n is a, c, g, or t
tttctctttatcgacctgaagaatacagtcgttttgaagctaaaatacatgatttacgggagcagatgatgaatagtagtattagttcagggtcaggttctcttcgaactagccagaagcgatccctctatgtcagagccctttttgattatgacaagactaaagacagtgggcttcccagtcagggactgaacttcaaatttggagatatcctccatgttattaatgcttctgatgatgaatggtggcaagccaggcaggttacaccagatggtgagagcgatgaggtcggagtgattcccagtaaacgcagagttgagaagaaagaacgagcccgattaaaaacagtgaaattcaattctaaaacgagagataaagggcagtcattcaatgacaagcgtaaaaagaacctcttttcccgaaaattccccttctacaagaacaaggaccagagtgagcaggaaacaagtgatgctgaccagcatgtaacttctaatgccagcgatagtgaaagtagttaccgtggtcaagaagaatacgtcttatcttatgaaccagtgaatcaacaagaagttaattatactcgaccagtgatcatattgggacctatgaaagacaggataaatgatgacttgatctcagaatttcctgacaaatttggatcctgtgttcctcatacaactagaccaaaacgagattatgaggtagatggaagagattatcattttgtgacttcaagagagcagatggaaaaagatatccaggaacataaattcattgaagctggccagtataacaatcatctatatggaacaagtgttcagtctgtacgagaagtagcagaaaagggcaaacactgtatccttgatgtgtctggaaatgccataaagagattacagattgcacagctttaccctatctccatttttattaaacccaaatccatggaaaatatcatggaaatgaataagcgtctaacagaagaacaagccagaaaaacatttgagagagccatgaaactggaacaggagtttactgaacatttcacgctattgtacaggggnatacgctgctacagcacatgccggtaccgngctcgaatgta

SEQ ID NO: 81548 - DNA, 267 bp, Homo sapiens
gtaagtatgtggatccagtggtcaactgaaaataaaatggagagggacctactgccctgcagttggttgttaccatggagacagtttcaagagctgcagcaggttgctaattgtcttcaagggcaacttaacagttataaattaatttgtatgccgatcttaactttttctggcaccttaggaattcttaatttaaagcaaacattatttttcagttatatgtttataacttgaacatataaatatgtataaatgcagttatttgaa

SEQ ID NO: 81549 - DNA, 481 bp, Homo sapiens
ggaggatcacttgagccccaggagttcaagaccagcctggtcaacagaacaagaccccgtcccttaaattttaaaaaaagggaacggcgggggagctctatttttcaccattttgagaaataactgatccgtgaaaactaggaactgtattttcattcctttttaaatataacatttgtttgaaaatggcaaattaattatgcatattcagccatttcatttcctatctaaagtttgctgagagaaatgacaagtttactaaaagtgaacaaggatcgaaacagatcatgatttagactgtggacctgtaggaaaagtacctttgatattattgagaatatttggctcacttgttttttttctttgttccctttattttagggcaaacactgtatccttgatgtgtctggaaatgccataaagagattacagattgcacagctttaccctatctccatttttattaaacccaaatccatgg

SEQ ID NO: 81550 - DNA, 2783 bp, Homo sapiens
tttctctttatcgacctgaagaatacagtcgttttgaagctaaaatacatgatttacgggagcagatgatgaatagtagtattagttcagggtcaggttctcttcgaactagccagaagcgatccctctatgtcagagccctttttgattatgacaagactaaagacagtgggcttcccagtcagggactgaacttcaaatttggagatatcctccatgttattaatgcttctgatgatgaatggtggcaagccaggcaggttacaccagatggtgagagcgatgaggtcggagtgattcccagtaaacgcagagttgagaagaaagaacgagcccgattaaaaacagtgaaattcaattctaaaacgagagataaaggggagatccctgacgacatgggatcaaaaggcctgaagcatgtaacttctaatgccagcgatagtgaaagtagttaccgtggtcaagaagaatacgtcttatcttatgaaccagtgaatcaacaagaagttaattatactcgaccagtgatcatattgggacctatgaaagacaggataaatgatgacttgatctcagaatttcctgacaaatttggatcctgtgttcctcatacaactagaccaaaacgagattatgaggtagatggaagagattatcattttgtgacttcaagagagcagatggaaaaagatatccaggaacataaattcattgaagctggccagtataacaatcatctatatggaacaagtgttcagtctgtacgagaagtagcagaaaagggcaaacactgtatccttgatgtgtctggaaatgccataaagagattacagattgcacagctttaccctatctccatttttattaaacccaaatccatggaaaatatcatggaaatgaataagcgtctaacagaagaacaagccagaaaaacatttgagagagccatgaaactggaacaggagtttactgaacatttcacagctattgtacagggggatacgctggaagacatttacaaccaagtgaaacagatcatagaagaacaatctggttcttacatctgggttccggcaaaagaaaagctatgaaaactcatgtttctctgtttctcttttccacaattccattttctttggcatctctttgccctttcctctggagtctttcttgagtactgatttcatgttgaattgtatcccacacatcatggtctgcagcttctttttcacatgtagtgtctccttcaagttacatcgtgtgtattatttaatgtcactattggttagtggccatttttcagaactgaagatggaatggcctgaccagctattaagaatgtggggagacgcagaaattgtggtaaaattccttaatgtttaagggaaagtaactttaagagatttttggaaaagctttatatacattcttttcaaatttcagtacaaatgaaaaagtggttttaatcagtgatttagtagactttgagcaactgtgcacgcttcagtttaatagcatggtttggccagtgtattactctcaagtccttttctcaatcaacttctatcatcaaagcaattgtttcattatagataaataaggacattttttaatttaaaaattcatgtctgagttgactttcataagggatttcattttttcctcaacattcttaaagccttttagtatttgacggttcttttttcccaggacatttgctaggaataacaacgtttcaatgtttttaatctacttgagcaacactatcgtgtcttacaaaagttgttcatatgtaaatgatcatcacatttcgtgaattgaggccatgttcaggtgctaaggaagttcgccttttacacagaagattgagaaaatttcctagatataaatacagataaatcagacgttacagtggtgacgtagtaaccatcatggcaatggaaaggagtccaattcatagcctaaaacttcaaatgtattcttaggagtcagattttactgaatattttacccacaatagctgcctattttgttataataaaatatatataaatatatatataaaactttctttaaactgtaactatgggaattattttctttacatagttgcgcacacacacaaacatatatatatatttaaaatatattttgtttcttttgccacctactcctaactttttgtttggtttttaaattaaatattaattgaatagacttatcttaatcatgtgaactgaaaatgggggcatggtggtcatgaggaggaaacatttagggaaattagattataagtaaaagtgtgggcatattctcctcttttctacaaaggttttcaaatggttcctgaggttttttgttgttgtccgtgttgttactgttgttcttgtcatcaggtttgattttggtccttgccctttccttctagttctccttttattaataggaaggcaggcaaaagccccatttatgtgtgtgttttcccctcagacagctttcatccactgctctgcactagaattgcacaaatcttcatggtgagcaattttaagaaatgttagtgaaaggtagaaattatttcacaaatcagtttctctggtccttcatattaataataatatttggcttcccattgctctttggagttgtttattaaatatgtgtttttgacaacctcctcattagtttcttaaatgagtactggtttgtaaagaattatcaacattatccattccatttatgaagaagaggagaacagctaataaactgtattgtaaaatcca

SEQ ID NO: 81551 - DNA, 3217 bp, Homo sapiens
tttctctttatcgacctgaagaatacagtcgttttgaagctaaaatacatgatttacgggagcagatgatgaatagtagtattagttcagggtcaggttctcttcgaactagccagaagcgatccctctatgtcagagccctttttgattatgacaagactaaagacagtgggcttcccagtcagggactgaacttcaaatttggagatatcctccatgttattaatgcttctgatgatgaatggtggcaagccaggcaggttacaccagatggtgagagcgatgaggtcggagtgattcccagtaaacgcagagttgagaagaaagaacgagcccgattaaaaacagtgaaattcaattctaaaacgagagataaagggcagtcattcaatgacaagcgtaaaaagaacctcttttcccgaaaattccccttctacaagaacaaggaccagagtgagcaggaaacaagtgatgctgaccagcatgtaacttctaatgccagcgatagtgaaagtagttaccgtggtcaagaagaatacgtcttatcttatgaaccagtgaatcaacaagaagttaattatactcgaccagtgatcatattgggacctatgaaagacaggataaatgatgacttgatctcagaatttcctgacaaatttggatcctgtgttcctcatacaactagaccaaaacgagattatgaggtagatggaagagattatcattttgtgacttcaagagagcagatggaaaaagatatccaggaacataaattcattgaagctggccagtataacaatcatctatatggaacaagtgttcagtctgtacgagaagtagcagaaaagggcaaacactgtatccttgatgtgtctggaaatgccataaagagattacagattgcacagctttaccctatctccatttttattaaacccaaatccatggaaaatatcatggaaatgaataagcgtctaacagaagaacaagccagaaaaacatttgagagagccatgaaactggaacaggagtttactgaacatttcacagctattgtacagggggatacgctggaagacatttacaaccaagtgaaacagatcatagaagaacaatctggttcttacatctgggttccggcaaaagaaaagctatgaaaactcatgtttctctgtttctcttttccacaattccattttctttggcatctctttgccctttcctctggagtctttcttgagtactgatttcatgttgaattgtatcccacacatcatggtctgcagcttctttttcacatgtagtgtctccttcaagttacatcgtgtgtattatttaatgtcactattggttagtggccatttttcagaactgaagatggaatggcctgaccagctattaagaatgtggggagacgcagaaattgtggtaaaattccttaatgtttaagggaaagtaactttaagagatttttggaaaagctttatatacattcttttcaaatttcagtacaaatgaaaaagtggttttaatcagtgatttagtagactttgagcaactgtgcacgcttcagtttaatagcatggtttggccagtgtattactctcaagtccttttctcaatcaacttctatcatcaaagcaattgtttcattatagataaataaggacattttttaatttaaaaattcatgtctgagttgactttcataagggatttcattttttcctcaacattcttaaagccttttagtatttgacggttcttttttcccaggacatttgctaggaataacaacgtttcaatgtttttaatctacttgagcaacactatcgtgtcttacaaaagttgttcatatgtaaatgatcatcacatttcgtgaattgaggccatgttcaggtgctaaggaagttcgccttttacacagaagattgagaaaatttcctagatataaatacagataaatcagacgttacagtggtgacgtagtaaccatcatggcaatggaaaggagtccaattcatagcctaaaacttcaaatgtattcttaggagtcagattttactgaatattttacccacaatagctgcctattttgttataataaaatatatataaatatatatataaaactttctttaaactgtaactatgggaattattttctttacatagttgcgcacacacacaaacatatatatatatttaaaatatattttgtttcttttgccacctactcctaactttttgtttggtttttaaattaaatattaattgaatagacttatcttaatcatgtgaactgaaaatgggggcatggtggtcatgaggaggaaacatttagggaaattagattataagtaaaagtgtgggcatattctcctcttttctacaaaggttttcaaatggttcctgaggttttttgttgttgtccgtgttgttactgttgttcttgtcatcaggtttgattttggtccttgccctttccttctagttctccttttattaataggaaggcaggcaaaagccccatttatgtgtgtgttttcccctcagacagctttcatccactgctctgcactagaattgcacaaatcttcatggtgagcaattttaagaaatgttagtgaaaggtagaaattatttcacaaatcagtttctctggtccttcatattaataataatatttggcttcccattgctctttggagttgtttattaaatatgtgtttttgacaacctcctcattagtttcttaaatgagtactggtttgtaaagaattatcaacattatccattccatttatgaagaagaggagaacagctaataaactgtattgtaaaatccacatgttaagtgtgtcttgaattttgaaagaaaaaaatatattttgcaagctaacattttcttgaaacaatttgaggcatcatgtaacttataaccgaatccaagagccgttaggcagcagagtgtgttaccacattgaaatacacagtgctgctgttagactaaatgtcgtaggttgttaaccacatagaaacacactagtatgaagaaaactgttgtaaaatctcaagagcttcagaaactgccttacaagaccgcagcataagctattttgaagtatttaccaaatagtcacatgttgtaaaatatcaagtggttataaaaggatgccatttatatattaaaatttacataacattgttttctgga

SEQ ID NO: 81552 - DNA, 2743 bp, Homo sapiens
tttctctttatcgacctgaagaatacagtcgttttgaagctaaaatacatgatttacgggagcagatgatgaatagtagtattagttcagggtcaggttctcttcgaactagccagaagcgatccctctatgtcagagccctttttgattatgacaagactaaagacagtgggcttcccagtcagggactgaacttcaaatttggagatatcctccatgttattaatgcttctgatgatgaatggtggcaagccaggcaggttacaccagatggtgagagcgatgaggtcggagtgattcccagtaaacgcagagttgagaagaaagaacgagcccgattaaaaacagtgaaattcaattctaaaacgagagataaagggcagtcattcaatgacaagcgtaaaaagaacctcttttcccgaaaattccccttctacaagaacaaggaccagagtgagcaggaaacaagtgatgctgaccagcatgtaacttctaatgccagcgatagtgaaagtagttaccgtggtcaagaagaatacgtcttatcttatgaaccagtgaatcaacaagaagttaattatactcgaccagtgatcatattgggacctatgaaagacaggataaatgatgacttgatctcagaatttcctgacaaatttggatcctgtgttcctcatacaactagaccaaaacgagattatgaggtagatggaagagattatcattttgtgacttcaagagagcagatggaaaaagatatccaggaacataaattcattgaagctggccagtataacaatcatctatatggaacaagtgttcagtctgtacgagaagtagcagaaaagggcaaacactgtatccttgatgtgtctggaaatgccataaagagattacagattgcacagctttaccctatctccatttttattaaacccaaatccatggaaaatatcatggaaatgaataagcgtctaacagaagaacaagccagaaaaacatttgagagagccatgaaactggaacaggagtttactgaacatttcacagctattgtacagggggatacgctggaagacatttacaaccaagtgaaacagatcatagaagaacaatctggttcttacatctgggttccggcaaaagaaaagctatgaaaactcatgtttctctgtttctcttttccacaattccattttctttggcatctctttgccctttcctctggagtctttcttgagtactgatttcatgttgaattgtatcccacacatcatggtctgcagcttctttttcacatgtagtgtctccttcaagttacatcgtgtgtattatttaatgtcactattggttagtggccatttttcagaactgaagatggaatggcctgaccagctattaagaatgtggggagacgcagaaattgtggtaaaattccttaatgtttaagggaaagtaactttaagagatttttggaaaagctttatatacattcttttcaaatttcagtacaaatgaaaaagtggttttaatcagtgatttagtagactttgagcaactgtgcacgcttcagtttaatagcatggtttggccagtgtattactctcaagtccttttctcaatcaacttctatcatcaaagcaattgtttcattatagataaataaggacattttttaatttaaaaattcatgtctgagttgactttcataagggatttcattttttcctcaacattcttaaagccttttagtatttgacggttcttttttcccaggacatttgctaggaataacaacgtttcaatgtttttaatctacttgagcaacactatcgtgtcttacaaaagttgttcatatgtaaatgatcatcacatttcgtgaattgaggccatgttcaggtgctaaggaagttcgccttttacacagaagattgagaaaatttcctagatataaatacagataaatcagacgttacagtggtgacgtagtaaccatcatggcaatggaaaggagtccaattcatagcctaaaacttcaaatgtattcttaggagtcagattttactgaatattttacccacaatagctgcctattttgttataataaaatatatataaatatatatataaaactttctttaaactgtaactatgggaattattttctttacatagttgcgcacacacacaaacatatatatatatttaaaatatattttgtttcttttgccacctactcctaactttttgtttggtttttaaattaaatattaattgaatagacttatcttaatcatgtgaactgaaaatgggggcatggtggtcatgaggaggaaacatttagggaaattagattataagtaaaagtgtgggcatattctcctcttttctacaaaggttttcaaatggttcctgaggttttttgttgttgtccgtgttgttactgttgttcttgtcatcaggtttgattttggtccttgccctttccttctagttctccttttattaataggaaggcaggcaaaagccccatttatgtgtgtgttttcccctcagacagctttcatccactgctctgcactagaattgcacaaatcttcatggtgagcaattttaagaaatgttagtgaaaggtagaaattatttcacaaatcagtttctctggtccttcatattaataataatatttggcttcccattgctctttggagttgtttattaaatatgtgtttttgacaacctc

SEQ ID NO: 81553 - DNA, 2015 bp, Homo sapiens
  misc_feature (1942)..(1942): n is a, c, g, or t
  misc_feature (1951)..(1951): n is a, c, g, or t
tttctctttatcgacctgaagaatacagtcgttttgaagctaaaatacatgatttacgggagcagatgatgaatagtagtattagttcagggtcaggttctcttcgaactagccagaagcgatccctctatgtcagagccctttttgattatgacaagactaaagacagtgggcttcccagtcagggactgaacttcaaatttggagatatcctccatgttattaatgcttctgatgatgaatggtggcaagccaggcaggttacaccagatggtgagagcgatgaggtcggagtgattcccagtaaacgcagagttgagaagaaagaacgagcccgattaaaaacagtgaaattcaattctaaaacgagagataaagggcagtcattcaatgacaagcgtaaaaagaacctcttttcccgaaaattccccttctacaagaacaaggaccagagtgagcaggaaacaagtgatgctgaccagcatgtaacttctaatgccagcgatagtgaaagtagttaccgtggtcaagaagaatacgtcttatcttatgaaccagtgaatcaacaagaagttaattatactcgaccagtgatcatattgggacctatgaaagacaggataaatgatgacttgatctcagaatttcctgacaaatttggatcctgtgttcctcatacaactagaccaaaacgagattatgaggtagatggaagagattatcattttgtgacttcaagagagcagatggaaaaagatatccaggaacataaattcattgaagctggccagtataacaatcatctatatggaacaagtgttcagtctgtacgagaagtagcagaaaagggcaaacactgtatccttgatgtgtctggaaatgccataaagagattacagattgcacagctttaccctatctccatttttattaaacccaaatccatggaaaatatcatggaaatgaataagcgtctaacagaagaacaagccagaaaaacatttgagagagccatgaaactggaacaggagtttactgaacatttcacagctattgtacagggggatacgctggaagacatttacaaccaagtgaaacagatcatagaagaacaatctggttcttacatctgggttccggcaaaagaaaagctatgaaaactcatgtttctctgtttctcttttccacaattccattttctttggcatctctttgccctttcctctggagtctttcttgagtactgatttcatgttgaattgtatcccacacatcatggtctgcagcttctttttcacatgtagtgtctccttcaagttacatcgtgtgtattatttaatgtcactattggttagtggccatttttcagaactgaagatggaatggcctgaccagctattaagaatgtggggagacgcagaaattgtggtaaaattccttaatgtttaagggaaagtaactttaagagatttttggaaaagctttatatacattcttttcaaatttcagtacaaatgaaaaagtggttttaatcagtgatttagtagactttgagcaactgtgcacgcttcagtttaatagcatggtttggccagtgtattactctcaagtccttttctcaatcaacttctatcatcaaagcaattgtttcattatagataaataaggacattttttaatttaaaaattcatgtctgagttgactttcataagggatttcattttttcctcaacattcttaaagccttttagtatttgacggttcttttttcccaggacatttgctaggaataacaacgtttcaatgtttttaatctacttgagcaacactatcgtgtcttacaaaagttgttcatatgtaaatgatcatcacatttcgtgaattgaggccatgttcaggtgctaaggaagttcgccttttacacaaaaaaaaaaaaaaaanaaaaaaaanaaattttggggcggcccggcccccggaaaaggtttttaaaccccctggggggggggggggcccc

SEQ ID NO: 81554 - DNA, 441 bp, Homo sapiens
tttctctttatcgacctgaagaatacagtcgttttgaagctaaaatacatgatttacgggagcagatgatgaatagtagtattagttcagggtcaggttctcttcgaactagccagaagcgatccctctatgtcagagccctttttgattatgacaagactaaagacagtgggcttcccagtcagggactgaacttcaaatttggagatatcctccatgttattaatgcttctgatgatgaatggtggcaagccaggcaggttacaccagatggtgagagcgatgaggtcggagtgattcccagtaaacgcagagttgagaagaaagaacgagcccgattaaaaacagtgaaattcaattctaaaacgagagataaaggggtgagtatttgaaatctctacatttttgtaattcctgtttgagctacattgttaaaatgaa

SEQ ID NO: 81555 - DNA, 792 bp, Homo sapiens
ttggagaaagagcctctctgtgtctcccaggctggactgcagtggtgtgatctcagctcactgcaacctcagccttccaagtagctgggattgcagacatgtacccccataccagctatatatatatatgtattttagacacagtttcaccatgttagccaggccattcttgaatcctgacctcaggtgatttgccgacgtaggcctcccgaagtgctgggattacaggtatgagccactgcactcagccttttttcctaattttgaatatgggacccattatgaatttgggtgtcacctatgtgcgggggctatggaaatctctgtcaccccattcatttgtgtgtgctgtcaaagcaccaatatgtgggaattatgctttatgtgagcatatagtatatggaactttggtttttttttatacagggtctcaaaaaaaaatgagtatatttcatcacaatgttctgtgtataattccatacacacaaaatagtcttctatacacagagaacactcttatatcactttggagttgtttttgtttgtgtattttgttttaatttttatgagacagggcctggctatgtcgctgaggctggagggcagtggtgagatcttggctcactgcaacctccacctgccacctcagcctcctggattagtgtctacaggcaggcaccaccacccctgggtaagttctgtatttttggtactgatgaggtttcagcacgttccacaggctggactcttaactcctgcgatcaagtgatcctcccgctgttcaaattttac

SEQ ID NO: 81556 - DNA, 539 bp, Homo sapiens
atgagaactgatgttttgagaggtttctagaaggtgaattcactttcgttcagaaattagagatgcagatgatgcacaagcaagaattttaaataatattttgtatttttactgcaatgtattttaacttatatatgtggttaactcctttctcatgctcagttttttttgtttatttgttttgcttttatttactctgtgcctgaattttcattgagcacttgctaaggaactgttgtgagccaatattattcttgctctcatgtatgtagcaagaagccttaagaaagatttattagaaaaaaaaatgactatagaaatacaaggcatgatttgtgtttatggtgagaaattgaaaaggaaaagatgcagggtatatttctaaggattctacaaccctatctgatcaggctgatagctctgaccttccatttgtacagagtaagaaggtttctaattgtttgcagatcacttagcaattgatggtgccattttccttgggcagcccatttgccaatcgatattttctggcagagtca

SEQ ID NO: 81557 - DNA, 160 bp, Homo sapiens
gatatctacaaacatgcaggtctctaatcataggagcctggaatgagtcctagaatggaccctttaagtgacttgagagagagaaaatgattctgtctaggtttttttttttgtccccttctctttgctatgataaaattcgtaaccttaagccatatag

SEQ ID NO: 81558 - DNA, 313 bp, Homo sapiens
ccctaaaaggcagagtgtcttcttacctccacacaaccacgctagctctatagcagtggttcttaaccagattgaaatggctgaaatgacagacatatatttcagaacctggatgggaagaaagctcaatgagatagaggagaaggttgaaacgcatccaagtaaagcagtaaaatgatccaagagttgaaagatgacttagccattttaagaaagaaccaaacagaacttctggaaataaaaaaaaatcactacaggaatttcataatgcaattggaagcataaataacaaaataaaccaatctgagggaaa

SEQ ID NO: 81559 - DNA, 2672 bp, Homo sapiens
gaggagaggcagggaggggcggcgggggcgcactgaacatttaggaagcaagatgtctagcaggctgggccttgagagaacagtaactgtttcgcaactgaaagtcgctactcgagccttgccaactggggagactatgcccatgatatccgcggcctcggaccccggaccctccaggccctcgcgccccacccccgaccagcctcgggccaggctagggcgtagacggggcttcccgtccctcacgcgggcccgccccatgccgggcggggcctggggcccgccacctccgcccgtggccggagagccccaggcccgagccacgcggtcttccgggcccgggtcggggctcgatggctacgtggaggcgggacggccgactgacaggcggccaaaggctgctgtgcgctgggctggcggggacgctcagcctcagcctcaccgcgcccctggagctcgccaccgtgctggcccaggttggccgccgtgcagctcgccgcctaccgcaaatttgttgtgctgttcacagatgacctgggccacatttcccagtggagctccatcatggctgggagtctcgcaggcatggtttccaccattgtaacatatcctacagacctcatcaaaacccggttgatcatgcagaacatactggaaccatcgtacagggggctcctccatgctttttctactatttaccaacaggaagggttccttgccctttatcgaggggtttccctcactgttgtaggtgctctcccgttctctgctggctcccttcttgtttacatgaacctggagaaaatctggaacggaccccgagatcagttctctctcccacagaactttgctaatgtctgtctggctgctgcagtgacccagaccctctcctttccctttgagaccgtgaagagaaagatgcaggctcagagcccctacctcccacacagtggaggagtagatgtccatttctcaggagcagtggactgcttccggcagatagtgaaggcccagggggtcctggggctctggaatggattgacagccaatttactgaagatagttccatattttggaattatgtttagcacctttgagttctgcaagagaatctgtctttatcaaaatggttacattctgtctccactgagctataaattgaccccaggagtcgatcagagtttgcagccccaggaattacgagaattaaagaagttcttcaaaacgagaaaaccgaagcctaaaaaaccaactctataaaatggaatggaactagaagtgcactgactgacagcatgttgcaatcacagataaatgtagcctcataactgtgcacctgaggagggatgagaagctactgctatctgctgctctgggaaatgagatggtttggccatgcaccacctcagatctccaaactgatgtccctgtgaacacctgcactatgagaaggtttcccaacaagagtgtatcatgatggcattccacgagattttataaccagagtctagcagtgataaaatgtacaatttacgctctgaatagaaacatgacaccaaagaaagggcattgccatgacatctcaaagcaacaggtaattgaagtggctgagtggataccacgttgtgaggtcagccactgggtcacttgtagtcaatgcaaagcttgcacaaaccaacgtcagcctagtttcactcagtttgacctgagactttccaatacaatctgttgttttgttttgtttttagagacagggtcttgctctgtcacccagactggagtacaatgacacaatcatagctcactgcagcctttaactactgggctcaagacatcctcctgcttcagcctccagagagttgggaccataggtgcacaccaccacacctagctaatttttgggggaggtcttgctatgttgcccaggctggtcttgaactcctgggctcatgcaatcctcctgccttggcctcccaaagcgctaggattagaggtgtgagccgctgcaccctgccccagtacaatcttttttgaactcaaatttttgctgacatctgagtgcacacaccacagtgtaaattatgccttatcagaatctaaatgaaaatagcgaacatttaaaagctatcaccattgtagtagaatcatccttcttttttgaaatttgaagcatcccaggcttaaaatcttgtgtttcagaaagacagtttataccatgactgcttaattatccccccaaagaccttctgattgaagtcatgtacagttcagtggcctaaattctctgcctttttaacttgctttgcaagcctactctgaaaataagttatttagtcaagttattctcaaagatgtcccagttgcctagaaaggatcaaatggaacatttgacacacatactcaaaaaaatgtaactgactataaacactttaacctaatcatctgtatcaaactttctaaaaatcaaatctcaggattgttccactttagagattctatgtaaagtttatataactatacttgtcaaatagcacctatctatgcatttaaaaatgcattaatatctaacataaaattgttaatttatacacacacatacacttatacatagagagagattttcggtatgttgcaagtattttttccgattaaatttattttccaaagaaaaa

SEQ ID NO: 81560 - DNA, 1968 bp, Homo sapiens
acccttcctgttggtaaatagtagaaaaagcatggaggagccccctgtacgatggttccagtatgttctgcatgatcaaccccacagcagccattctttgccatcatcttggccaggaacccagcatccagaatgtagacttgagaccctggctccttccactaggacatttatttcctaatgtttcaatcacctcatcccagcttctgtttcctgtcaggctcagagcccctacctcccacacagtggaggagtagatgtccatttctcaggagcagtggactgcttccggcagatagtgaaggcccagggggtcctggggctctggaatggattgacagccaatttactgaagatagttccatattttggaattatgtttagcacctttgagttctgcaagagaatctgtctttatcaaaatggttacattctgtctccactgagctataaattgaccccaggagtcgatcagagtttgcagccccaggaattacgagaattaaagaagttcttcaaaacgagaaaaccgaagcctaaaaaaccaactctataaaatggaatggaactagaagtgcactgactgacagcatgttgcaatcacagataaatgtagcctcataactgtgcacctgaggagggatgagaagctactgctatctgctgctctgggaaatgagatggtttggccatgcaccacctcagatctccaaactgatgtccctgtgaacacctgcactatgagaaggtttcccaacaagagtgtatcatgatggcattccacgagattttataaccagagtctagcagtgataaaatgtacaatttacgctctgaatagaaacatgacaccaaagaaagggcattgccatgacatctcaaagcaacaggtaattgaagtggctgagtggataccacgttgtgaggtcagccactgggtcacttgtagtcaatgcaaagcttgcacaaaccaacgtcagcctagtttcactcagtttgacctgagactttccaatacaatctgttgttttgttttgtttttagagacagggtcttgctctgtcacccagactggagtacaatgacacaatcatagctcactgcagcctttaactactgggctcaagacatcctcctgcttcagcctccagagagttgggaccataggtgcacaccaccacacctagctaatttttgggggaggtcttgctatgttgcccaggctggtcttgaactcctgggctcatgcaatcctcctgccttggcctcccaaagcgctaggattagaggtgtgagccgctgcaccctgccccagtacaatcttttttgaactcaaatttttgctgacatctgagtgcacacaccacagtgtaaattatgccttatcagaatctaaatgaaaatagcgaacatttaaaagctatcaccattgtagtagaatcatccttcttttttgaaatttgaagcatcccaggcttaaaatcttgtgtttcagaaagacagtttataccatgactgcttaattatccccccaaagaccttctgattgaagtcatgtacagttcagtggcctaaattctctgcctttttaacttgctttgcaagcctactctgaaaataagttatttagtcaagttattctcaaagatgtcccagttgcctagaaaggatcaaatggaacatttgacacacatactcaaaaaaatgtaactgactataaacactttaacctaatcatctgtatcaaactttctaaaaatcaaatctcaggattgttccactttagagattctatgtaaagtttatataactatacttgtcaaatagcacctatctatgcatttaaaaatgcattaatatctaacataaaattgttaatttatacacacacatacacttatacatagagagagattttcggtatgttgcaagtattttttccgattaaatttattttccaaagaaaaa

SEQ ID NO: 81561 - DNA, 2791 bp, Homo sapiens
gaggagaggcagggaggggcggcgggggcgcactgaacatttaggaagcaagatgtctagcaggctgggccttgagagaacagtaactgtttcgcaactgaaagtcgctactcgagccttgccaactggggagactatgcccatgatatccgcggcctcggaccccggaccctccaggccctcgcgccccacccccgaccagcctcgggccaggctagggcgtagacggggcttcccgtccctcacgcgggcccgccccatgccgggcggggcctggggcccgccacctccgcccgtggccggagagccccaggcccgagccacgcggtcttccgggcccgggtcggggctcgatggctacgtggaggcgggacggccgactgacaggcggccaaaggctgctgtgcgctgggctggcggggacgctcagcctcagcctcaccgcgcccctggagctcgccaccgtgctggcccaggttggcgtcgtgcgaggccacgcccggggaccgtgggccacagggcaccgggtgtggcgggcagaggggctccgggccctgtggaaggggaacgcggtggcgtgcctgcgcctcttcccctgcagcgccgtgcagctcgccgcctaccgcaaatttgttgtgctgttcacagatgacctgggccacatttcccagtggagctccatcatggctgggagtctcgcaggcatggtttccaccattgtaacatatcctacagacctcatcaaaacccggttgatcatgcagaacatactggaaccatcgtacagggggctcctccatgctttttctactatttaccaacaggaagggttccttgccctttatcgaggggtttccctcactgttgtaggtgctctcccgttctctgctggctcccttcttgtttacatgaacctggagaaaatctggaacggaccccgagatcagttctctctcccacagaactttgctaatgtctgtctggctgctgcagtgacccagaccctctcctttccctttgagaccgtgaagagaaagatgcaggctcagagcccctacctcccacacagtggaggagtagatgtccatttctcaggagcagtggactgcttccggcagatagtgaaggcccagggggtcctggggctctggaatggattgacagccaatttactgaagatagttccatattttggaattatgtttagcacctttgagttctgcaagagaatctgtctttatcaaaatggttacattctgtctccactgagctataaattgaccccaggagtcgatcagagtttgcagccccaggaattacgagaattaaagaagttcttcaaaacgagaaaaccgaagcctaaaaaaccaactctataaaatggaatggaactagaagtgcactgactgacagcatgttgcaatcacagataaatgtagcctcataactgtgcacctgaggagggatgagaagctactgctatctgctgctctgggaaatgagatggtttggccatgcaccacctcagatctccaaactgatgtccctgtgaacacctgcactatgagaaggtttcccaacaagagtgtatcatgatggcattccacgagattttataaccagagtctagcagtgataaaatgtacaatttacgctctgaatagaaacatgacaccaaagaaagggcattgccatgacatctcaaagcaacaggtaattgaagtggctgagtggataccacgttgtgaggtcagccactgggtcacttgtagtcaatgcaaagcttgcacaaaccaacgtcagcctagtttcactcagtttgacctgagactttccaatacaatctgttgttttgttttgtttttagagacagggtcttgctctgtcacccagactggagtacaatgacacaatcatagctcactgcagcctttaactactgggctcaagacatcctcctgcttcagcctccagagagttgggaccataggtgcacaccaccacacctagctaatttttgggggaggtcttgctatgttgcccaggctggtcttgaactcctgggctcatgcaatcctcctgccttggcctcccaaagcgctaggattagaggtgtgagccgctgcaccctgccccagtacaatcttttttgaactcaaatttttgctgacatctgagtgcacacaccacagtgtaaattatgccttatcagaatctaaatgaaaatagcgaacatttaaaagctatcaccattgtagtagaatcatccttcttttttgaaatttgaagcatcccaggcttaaaatcttgtgtttcagaaagacagtttataccatgactgcttaattatccccccaaagaccttctgattgaagtcatgtacagttcagtggcctaaattctctgcctttttaacttgctttgcaagcctactctgaaaataagttatttagtcaagttattctcaaagatgtcccagttgcctagaaaggatcaaatggaacatttgacacacatactcaaaaaaatgtaactgactataaacactttaacctaatcatctgtatcaaactttctaaaaatcaaatctcaggattgttccactttagagattctatgtaaagtttatataactatacttgtcaaatagcacctatctatgcatttaaaaatgcattaatatctaacataaaattgttaatttatacacacacatacacttatacatagagagagattttcggtatgttgcaagtattttttccgattaaatttattttccaaagaaaaa

SEQ ID NO: 81562 - DNA, 2618 bp, Homo sapiens
gaggagaggcagggaggggcggcgggggcgcactgaacatttaggaagcaagatgtctagcaggctgggccttgagagaacagtaactgtttcgcaactgaaagtcgctactcgagccttgccaactggggagactatgcccatgatatccgcggcctcggaccccggaccctccaggccctcgcgccccacccccgaccagcctcgggccaggctagggcgtagacggggcttcccgtccctcacgcgggcccgccccatgccgggcggggcctggggcccgccacctccgcccgtggccggagagccccaggcccgagccacgcggtcttccgggcccgggtcggggctcgatggctacgtggaggcgggacggccgactgacaggcggccaaaggctgctgtgcgctgggctggcggggacgctcagcctcagcctcaccgcgcccctggagctcgccaccgtgctggcccaggttggcgtcgtgcgaggccacgcccggggaccgtgggccacagggcaccgggtgtggcgggcagaggggctccgggccctgtggaaggggaacgcggtggcgtgcctgcgcctcttcccctgcagcgccgtgcagctcgccgcctaccgcaaatttgttgtgctgttcacagatgacctgggccacatttcccagtggagctccatcatggctgggagtctcgcaggcatggtttccaccattgtaacatatcctacagacctcatcaaaacccggttgatcatgcagaacatactggaaccatcgtacagggggctcctccatgctttttctactatttaccaacaggaagggttccttgccctttatcgaggggtttccctcactgttgtaggctcagagcccctacctcccacacagtggaggagtagatgtccatttctcaggagcagtggactgcttccggcagatagtgaaggcccagggggtcctggggctctggaatggattgacagccaatttactgaagatagttccatattttggaattatgtttagcacctttgagttctgcaagagaatctgtctttatcaaaatggttacattctgtctccactgagctataaattgaccccaggagtcgatcagagtttgcagccccaggaattacgagaattaaagaagttcttcaaaacgagaaaaccgaagcctaaaaaaccaactctataaaatggaatggaactagaagtgcactgactgacagcatgttgcaatcacagataaatgtagcctcataactgtgcacctgaggagggatgagaagctactgctatctgctgctctgggaaatgagatggtttggccatgcaccacctcagatctccaaactgatgtccctgtgaacacctgcactatgagaaggtttcccaacaagagtgtatcatgatggcattccacgagattttataaccagagtctagcagtgataaaatgtacaatttacgctctgaatagaaacatgacaccaaagaaagggcattgccatgacatctcaaagcaacaggtaattgaagtggctgagtggataccacgttgtgaggtcagccactgggtcacttgtagtcaatgcaaagcttgcacaaaccaacgtcagcctagtttcactcagtttgacctgagactttccaatacaatctgttgttttgttttgtttttagagacagggtcttgctctgtcacccagactggagtacaatgacacaatcatagctcactgcagcctttaactactgggctcaagacatcctcctgcttcagcctccagagagttgggaccataggtgcacaccaccacacctagctaatttttgggggaggtcttgctatgttgcccaggctggtcttgaactcctgggctcatgcaatcctcctgccttggcctcccaaagcgctaggattagaggtgtgagccgctgcaccctgccccagtacaatcttttttgaactcaaatttttgctgacatctgagtgcacacaccacagtgtaaattatgccttatcagaatctaaatgaaaatagcgaacatttaaaagctatcaccattgtagtagaatcatccttcttttttgaaatttgaagcatcccaggcttaaaatcttgtgtttcagaaagacagtttataccatgactgcttaattatccccccaaagaccttctgattgaagtcatgtacagttcagtggcctaaattctctgcctttttaacttgctttgcaagcctactctgaaaataagttatttagtcaagttattctcaaagatgtcccagttgcctagaaaggatcaaatggaacatttgacacacatactcaaaaaaatgtaactgactataaacactttaacctaatcatctgtatcaaactttctaaaaatcaaatctcaggattgttccactttagagattctatgtaaagtttatataactatacttgtcaaatagcacctatctatgcatttaaaaatgcattaatatctaacataaaattgttaatttatacacacacatacacttatacatagagagagattttcggtatgttgcaagtattttttccgattaaatttattttccaaagaaaaa

SEQ ID NO: 81563 - DNA, 862 bp, Homo sapiens
acccttcctgttggtaaatagtagaaaaagcatggaggagccccctgtacgatggttccagtatgttctgcatgatcaaccccacagcagccattctttgccatcatcttggccaggaacccagcatccagaatgtagacttgagaccctggctccttccactaggacatttatttcctaatgtttcaatcacctcatcccagcttctgtttcctgtcaggctcagagcccctacctcccacacagtggaggagtagatgtccatttctcaggagcagtggactgcttccggcagatagtgaaggcccagggggtcctggggctctggaatggattgacagccaatttactgaaggtgagaagagccaccagcctccgctgctcccctgcctcttccaattctaccctcttcctttgtcacccccaacccctactacagtttgcttggaaaaccccctctagcactaatgggtagcacaaggcccatgaatgcacactgtctgtcagccccgtagagaggggaacctgtgcagtggtggagtatcttataccccattccagaggagctgagcatttagtgcagagatacttaatgtggaggttcatgggcccctaatgggaacctaacccctcatcctaaaattctatgcaaaaatgtatgtgtatatgcatatgtgcatcatattcccaaagaactccatgacaaaaaaaaaaaacaaaaacaaaaaacattaagcactctggactaaccttgcactagctggcatgtaaatgattccagtcaaggccagcatatagtgacaggtagtatcagatagtctgcgtgcatatgacccagatctagtgcctcccaggcaggtca

SEQ ID NO: 81564 - DNA, 1685 bp, Homo sapiens
gaggagaggcagggaggggcggcgggggcgcactgaacatttaggaagcaagatgtctagcaggctgggccttgagagaacagtaactgtttcgcaactgaaagtcgctactcgagccttgccaactggggagactatgcccatgatatccgcggcctcggaccccggaccctccaggccctcgcgccccacccccgaccagcctcgggccaggctagggcgtagacggggcttcccgtccctcacgcgggcccgccccatgccgggcggggcctggggcccgccacctccgcccgtggccggagagccccaggcccgagccacgcggtcttccgggcccgggtcggggctcgatggctacgtggaggcgggacggccgactgacaggcggccaaaggctgctgtgcgctgggctggcggggacgctcagcctcagcctcaccgcgcccctggagctcgccaccgtgctggcccaggttggcgtcgtgcgaggccacgcccggggaccgtgggccacagggcaccgggtgtggcgggcagaggggctccgggccctgtggaaggggaacgcggtggcgtgcctgcgcctcttcccctgcagcgccgtgcagctcgccgcctaccgcaaatttgttgtgctgttcacagatgacctgggccacatttcccagtggagctccatcatggctgggagtctcgcaggcatggtttccaccattgtaacatatcctacagacctcatcaaaacccggttgatcatgcagaacatactggaaccatcgtacagggggctcctccatgctttttctactatttaccaacaggaagggttccttgccctttatcgaggggtttccctcactgttgtaggtgctctcccgttctctgctggctcccttcttgtttacatgaacctggagaaaatctggaacggaccccgagatcagttctctctcccacagaactttgctaatgtctgtctggctgctgcagtgacccagaccctctcctttccctttgagaccgtgaagagaaagatgcaggctcagagcccctacctcccacacagtggaggagtagatgtccatttctcaggagcagtggactgcttccggcagatagtgaaggcccagggggtcctggggctctggaatggattgacagccaatttactgaaggtgagaagagccaccagcctccgctgctcccctgcctcttccaattctaccctcttcctttgtcacccccaacccctactacagtttgcttggaaaaccccctctagcactaatgggtagcacaaggcccatgaatgcacactgtctgtcagccccgtagagaggggaacctgtgcagtggtggagtatcttataccccattccagaggagctgagcatttagtgcagagatacttaatgtggaggttcatgggcccctaatgggaacctaacccctcatcctaaaattctatgcaaaaatgtatgtgtatatgcatatgtgcatcatattcccaaagaactccatgacaaaaaaaaaaaacaaaaacaaaaaacattaagcactctggactaaccttgcactagctggcatgtaaatgattccagtcaaggccagcatatagtgacaggtagtatcagatagtctgcgtgcatatgacccagatctagtgcctcccaggcaggtca

SEQ ID NO: 81565 - DNA, 433 bp, Homo sapiens
gggagatgcattaaatacttaaaagattgctgaagtccggtagttttgaagaattaaccatctcttcgaatgttgaaacgtggaaaagaattttggcacttctggaccctgatgaaaagtaaataacttatacatacgtggaacttgtaatttactggtgacaggccattcaatccagcagtaataatttctgttttcagctacagccattgaatagtacaaattaggctcttttttctttcaataatgtttttgtaaagctcactgggcttttagaaagggaaattttaggtatgtttctcactggttaagcagatttcttggattcattcatggagtgtgctgttttccaactttatggtcacacaagtctaggaagcataaatgtgaacagaaagctgactctatgtgtgcgtatgtgtatgcaggtgac

SEQ ID NO: 81566 - DNA, 294 bp, Homo sapiens
ggggattgtattggttaaccacacacgctgctatttcagtttaatcttgactgaacttcttggctactgcaggctttcttacaccactagagttcttgctcattacagtgttgaatccctatcaaaacctttcctgtttaattggcagtgacacaatcccatcttgtgtaactcaggatgtttcacatcctgaaatagtttgaaataaaattgaaacacacttacattgatgcctatgttaatttctttccttgactgtgtctgaatataatgttgaagtgtgatagaaacaat

SEQ ID NO: 81567 - DNA, 733 bp, Homo sapiens
ataattgtaacaagaacatattcactagcaatctgagcactcatgatattaatgtctgttctggagagaattatgtccccccagaattcctaacctgaagccctatctcccagtgtgactgtatttggagaaggagcttttaagaagttaaaggttaaataggggcaaaagggtaaggccctaatctgttaggactggggtcatcatccaaaaaggaagagacaccagagatacatatctctctcttctctctctctctgcctccctccttctctctctctccctctctccctctccccacatacatttgttaaattgaggttttttgttagaacatatatagtggcattttaatatagtattactctacttaaaacatacacacacacacacacacacacacacaattttgataaattcttttttgaggataaggccgggcatggtggttcacacctgtaatcccagcacttggcgggattatcatatgaggtgggtggatcatctgaggtcagaggttcaagaccagcctggccaacatggtgaaacccttctctattaaaaatacaaaaaattagctgggcgtggtggcgggcacctgtaattccatttactcagaatgctgaagcaggagagtcccttgaacccaggaggcggaggttgtggtgagccgagattgcaccattgcactccagcctgggcagcaagagcaaaactccgtctcaagaaaaat

SEQ ID NO: 81568 - DNA, 472 bp, Homo sapiens
caaaattattgtggcaagattttaaaagtacaaagttaccacaaagataaccttttgaaacagaatatttcctaaaatagtccttgatattctgaataggagtaaaaattgataatgtatcagaaggatttagtctggctaacctcaaaacccatattctcagggctagctcgctgagtgaaactgactaggagtactacatagactgtactactgagcgagtgtgcttgatccagggaacggttgaagcactgaatgcagttcatggattcattgcagaaaaaattcgagaaatgccccaaaatgtggccaagacagaaccagtcagcattctacaaccccagaccaccgttaatccagatcgcatcaaacaaacattgccatcttccccaactaccaccaagtcctctccatctgatcccatgaccacctccagagctaatcaggtacagtatcatcctgtcatctacac

SEQ ID NO: 81569 - DNA, 5364 bp, Homo sapiens
gggcggccgctcgcgatctagaactgaaaagaaaaagccaaaacaaaagggagaaccttctcccggtagcagcggcaggaactgcaaacatgatggcggcagctcccatccagcagaacgggacccacactggggttcccatagacctggacccgccggactcgcggaaaaggccgctggaagccccccctgaagccggcagcaccaagaggaccaatacgggcgaagacggccagtattttctaaaggttctcatacctagttatgctgctggatctataattgggaagggaggacagacaattgttcagttgcaaaaagaaactggagccaccatcaagctgtctaagtccaaagatttttacccaggtactactgagcgagtgtgcttgatccagggaacggttgaagcactgaatgcagttcatggattcattgcagaaaaaattcgagaaatgccccaaaatgtggccaagacagaaccagtcagcattctacaaccccagaccaccgttaatccagatcgcatcaaacaaacattgccatcttccccaactaccaccaagtcctctccatctgatcccatgaccacctccagagctaatcaggtaaagattatagttcccaacagcacagcaggtctgataatagggaagggaggtgctactgtgaaggctgtaatggagcagtcaggggcttgggtgcagctttcccagaaacctgatgggatcaacttgcaagagagggttgtcactgtgagtggagaacctgaacaaaaccgaaaagctgttgaacttatcatccagaagatacaagaggatccacaaagtggcagctgtctcaatatcagttatgccaatgtgacaggtccagtggcaaattccaatccaaccggatctccttatgcaaacactgctgaagtgttaccaactgctgcagcagctgcagggctattaggacatgctaaccttgctggcgttgcagcctttccagcagttttatctggcttcacaggcaatgacctggtggccatcacctctgcacttaatacattagccagctatggatataatctcaacactttaggtttaggtctcagtcaagcagcagcaacaggggctttggctgcagcagctgccagtgccaacccagcagcagcagcagccaatttattggccacctatgccagtgaagcctcagccagtggcagcacagctggtggtacggcggggacatttgcattaggtagcctggctgctgctactgctgcaaccaatggatattttggagctgcttctcccctagctgccagtgccattctaggaacagaaaagtccacagatggatccaaggatgtagttgaaatagcagtgccagaaaacttagttggtgcaatacttggcaaaggagggaaaacattagtggaataccaggagttgactggtgcaaggatacagatctccaaaaaaggagaattcgtacctggcacaaggaatcggaaggtaaccattactggaacaccagctgcaacacaggctgctcaatatttaattacacaaaggatcacatatgagcaaggagttcgggctgccaatcctcagaaagtgggttgagtgccccagttacacatcagattgttttaacccctcctttaccccattttcaagaaggatgtactgtactttgcagaagtgaagtttttctgttattaatatataattatgcaaatgaatgcgactatgttgacaatgtgtatatgtaaataatatgtgttttaccagatgtttcatagaaagaattttttcttgatctgttttgttctctatactttgcttgtgtatatttgtcagaggtgtttctagtgtaagatttaagcctgccattttaccagcattattgtagtttaatgattgaatgtagacagggatatgcgtatagttttcagtattagttctagataacactaaattaactactgttaggttgagtatggtggggtcagtgacctaaaatggagtgaggccaaagcactgtcctgtaagtcttacttcctgcttagggcacagtgaagtaggaaacaatattttgaaaataagttttaaatttaaaatgatcaaaaagcaatatagttgcataaaagcactgtaaaatatttaaaaggttaaaactgtggaaaattatattggtaagtttacagatcaataaaagcacctgttctccatctgaactagacaatggaaataatgctgcatgctggccatggcccattcttcatcatttgtaagttcaacaaaagttctcacatggagtcccacctcttcagaggtttgtacatttgtttttaagcactgaattcactactgatcccatcgcctggccagtagaacagtcattactccattaacatcctcactgtttagacacataactgtggtacagtgtattggaaattttataaacaaaagtgaaagtgccaacaaattattgatagctgataatgtttcattatctgcaactgcttgataagtatgttgcattttaagagcttataattgtgtataatttgttaacactagaaacctattagtattgtgaatgtagattttactgtgaagctatctgtgatttagctgtttgctcccatgatggagtctttgcagcatggcgctagcagccaatgcagtttctaatactcggtaatttgcatgttttgtggagcatttttatgtcaccaaccagacagtatttcctgcatgcttatttagaagaggcagcttatcttgagaggtagtgttatctacctttgtcaggctttttgacaggtcatttcagagtaagcctttgttcccaagacccaacaactgtcaccctcttctgtacctctcctgagtgccaactgtccaggccatttgacacaccatctgttaacctctgagtttgcccactcaaggccactcataggggcatcctagccctgtgcactcagcactcataggatcatccagactctcatgctggcatgcagtctaatcatgacaaataatgctgctactctgatatctggctgagcaactgaattacaaaagagaattacttccatctcaacttcaacccattgattacgtccatcctagcaagctaaatggcatcccagctgctcctttctgtgcaaccaattaaagaacaatgagtgtgatgctccatgtctgaatttcgtccagcctctctctgaactgtgatctttgtcctcatgaactttcccttttgttcattgaactatatggactcttcatttcatattgatttactgtgcaatttacttttggacattgagaacttgaaattatttcctgatcccttccccttccactattaataattcatttctgtcaaactgtaagagtagactcattttttttttttttagtttttaacattggactgttatttcatttagagttctctatctctaaatatttatttagagaatgattttaaaagggaatgatatgcttgtttaaatgaaagagaaaagctgtagtaaactgtgttaattggtaatgactatttatcgtcgatactctgtagctgtgtaagttttgacaaatagtgtatctcgtggaatcagtggttagcattgccgctattatatttactcattttatcattataaatgtgcttagttcatcatgtagcatcacttgtctcccgtctcattttttccttgcatgtcacaagtctcagatcatttataatacattaacagtaaataatatctatgtaaatttctttcaccatgctgtctcagagtcagcagtgaacaaaggcaaagattggggccccacttagtttgaaaaagggaaaggaagtgatctaggatgtgtactagaagcatttcaaatgttgggtctttaaaatgttttgttcagtcttagcaaatcttcgatcttttatttcaaaattccagtagtccactgtggagcccatgcatttcatctggaatttaatgttactttgaagccaaaccatttaaacaattatgtgtgttttattagctagtgttgctgaaaatgcacttagttcaattttaattgtaaatgggaattttaaacttttcctagttagcatggttatatgttagttaaaactgaaagctaaattgaagatattacattttaatttatggtgacagataagggtttgtatgcattatgtgtaaatcagcttcatgctgtttaaaaatttattctctgaaatttatagaccatgtagaattgatttgtgatgtgatgctttaatttattgcaagaaaattagtatggcttcaaactgccacaggtaggcatgtaacaatggctgttcagctgtactgatccaaaatggagaaaactgatgatacaagggccaaacatcttatgaaatgcaactatttatagacttgttttgctatagggaggctggtgaacacgctgaatacgaattacctcagttctgcagctttctatgtctttttaatgcattctgtttcagggtcactttcaatcaatatttcatttacttactgagattgaatgggcgctctgagacacagtgtgctgtttatcatacagattggacacctcattctagatccaagatcttttcctcaacactgggagctgtcctttcagcaccacaaaattactgcttgaagttgcattgcagtttttttgttttttttttgtttgtttgtttgtttgtttttttgtttttttctttatcactgggagcttttctttcagcaccacaacattgcacctagactttttaaacggctgccttcctctttgcactgaagaccaatttcgtctgcacttccagttattgctattacctgtaggactttcaatcctacttcacttcacccaccccactcctgaaacagttaaatgtatctatttctgtggaagtcattttctcattgaatgattagaaacaaagataaattctaacctgtaacggctcatttcgactcattgcttacaatagatctaagctcttttttctgcttattcgactccttccagcttcccatcacatctgtaacaaacttttaaaatgatattgccacaccaccatgcacaagcctacctgcacagtagagatagattattccatcgcattcagatggttaacagaggttagcaagtcctgtattatatatttatatcgctttctaagaaagtgcatattaatgtttactttaagaatgtgtaaatggtgctatcaagaatctgataaattttatccccgttttttgtgtaccacttctaatgtatgagatttatttttttattggaaaaaaataaacagtatgaaagcatt

SEQ ID NO: 81570 - DNA, 5683 bp, Homo sapiens
gggcggccgctcgcgatctagaactgaaaagaaaaagccaaaacaaaagggagaaccttctcccggtagcagcggcaggaactgcaaacatgatggcggcagctcccatccagcagaacgggacccacactggggttcccatagacctggacccgccggactcgcggaaaaggccgctggaagccccccctgaagccggcagcaccaagaggaccaatacgggcgaagacggccagtattttctaaaggttctcatacctagttatgctgctggatctataattgggaagggaggacagacaattgttcagttgcaaaaagaaactggagccaccatcaagctgtctaagtccaaagatttttacccaggtactactgagcgagtgtgcttgatccagggaacggttgaagcactgaatgcagttcatggattcattgcagaaaaaattcgagaaatgccccaaaatgtggccaagacagaaccagtcagcattctacaaccccagaccaccgttaatccagatcgcatcaaacaaacattgccatcttccccaactaccaccaagtcctctccatctgatcccatgaccacctccagagctaatcaggtaaagattatagttcccaacagcacagcaggtctgataatagggaagggaggtgctactgtgaaggctgtaatggagcagtcaggggcttgggtgcagctttcccagaaacctgatgggatcaacttgcaagagagggttgtcactgtgagtggagaacctgaacaaaaccgaaaagctgttgaacttatcatccagaagatacaagaggatccacaaagtggcagctgtctcaatatcagttatgccaatgtgacaggtccagtggcaaattccaatccaaccggatctccttatgcaaacactgctgaagtgttaccaactgctgcagcagctgcagggctattaggacatgctaaccttgctggcgttgcagcctttccagcagttttatctggcttcacaggcaatgacctggtggccatcacctctgcacttaatacattagccagctatggatataatctcaacactttaggtttaggtctcagtcaagcagcagcaacaggggctttggctgcagcagctgccagtgccaacccagcagcagcagcagccaatttattggccacctatgccagtgaagcctcagccagtggcagcacagctggtggtacggcggggacatttgcattaggtagcctggctgctgctactgctgcaaccaatggatattttggagctgcttctcccctagctgccagtgccattctaggaacagaaaagtccacagatggatccaaggatgtagttgaaatagcagtgccagaaaacttagttggtgcaatacttggcaaaggagggaaaacattagtggaataccaggagttgactggtgcaaggatacagatctccaaaaaaggagaattcgtacctggcacaaggaatcggaaggtaaccattactggaacaccagctgcaacacaggctgctcaatatttaattacacaaaggatcacatatgagcaaggagttcgggctgccaatcctcagaaagtgggttgagtgccccagttacacatcagattgttttaacccctcctttaccccattttcaagaaggatgtactgtactttgcagaagtgaagtttttctgttattaatatataattatgcaaatgaatgcgactatgttgacaatgtgtatatgtaaataatatgtgttttaccagatgtttcatagaaagaattttttcttgatctgttttgttctctatactttgcttgtgtatatttgtcagaggtgtttctagtgtaagatttaagcctgccattttaccagcattattgtagtttaatgattgaatgtagacagggatatgcgtatagttttcagtattagttctagataacactaaattaactactgttaggttgagtatggtggggtcagtgacctaaaatggagtgaggccaaagcactgtcctgtaagtcttacttcctgcttagggcacagtgaagtaggaaacaatattttgaaaataagttttaaatttaaaatgatcaaaaagcaatatagttgcataaaagcactgtaaaatatttaaaaggttaaaactgtggaaaattatattggtaagtttacagatcaataaaagcacctgttctccatctgaactagacaatggaaataatgctgcatgctggccatggcccattcttcatcatttgtaagttcaacaaaagttctcacatggagtcccacctcttcagaggtttgtacatttgtttttaagcactgaattcactactgatcccatcgcctggccagtagaacagtcattactccattaacatcctcactgtttagacacataactgtggtacagtgtattggaaattttataaacaaaagtgaaagtgccaacaaattattgatagctgataatgtttcattatctgcaactgcttgataagtatgttgcattttaagagcttataattgtgtataatttgttaacactagaaacctattagtattgtgaatgtagattttactgtgaagctatctgtgatttagctgtttgctcccatgatggagtctttgcagcatggcgctagcagccaatgcagtttctaatactcggtaatttgcatgttttgtggagcatttttatgtcaccaaccagacagtatttcctgcatgcttatttagaagaggcagcttatcttgagaggtagtgttatctacctttgtcaggctttttgacaggtcatttcagagtaagcctttgttcccaagacccaacaactgtcaccctcttctgtacctctcctgagtgccaactgtccaggccatttgacacaccatctgttaacctctgagtttgcccactcaaggccactcataggggcatcctagccctgtgcactcagcactcataggatcatccagactctcatgctggcatgcagtctaatcatgacaaataatgctgctactctgatatctggctgagcaactgaattacaaaagagaattacttccatctcaacttcaacccattgattacgtccatcctagcaagctaaatggcatcccagctgctcctttctgtgcaaccaattaaagaacaatgagtgtgatgctccatgtctgaatttcgtccagcctctctctgaactgtgatctttgtcctcatgaactttcccttttgttcattgaactatatggactcttcatttcatattgatttactgtgcaatttacttttggacattgagaacttgaaattatttcctgatcccttccccttccactattaataattcatttctgtcaaactgtaagagtagactcattttttttttttttagtttttaacattggactgttatttcatttagagttctctatctctaaatatttatttagagaatgattttaaaagggaatgatatgcttgtttaaatgaaagagaaaagctgtagtaaactgtgttaattggtaatgactatttatcgtcgatactctgtagctgtgtaagttttgacaaatagtgtatctcgtggaatcagtggttagcattgccgctattatatttactcattttatcattataaatgtgcttagttcatcatgtagcatcacttgtctcccgtctcattttttccttgcatgtcacaagtctcagatcatttataatacattaacagtaaataatatctatgtaaatttctttcaccatgctgtctcagagtcagcagtgaacaaaggcaaagattggggccccacttagtttgaaaaagggaaaggaagtgatctaggatgtgtactagaagcatttcaaatgttgggtctttaaaatgttttgttcagtcttagcaaatcttcgatcttttatttcaaaattccagtagtccactgtggagcccatgcatttcatctggaatttaatgttactttgaagccaaaccatttaaacaattatgtgtgttttattagctagtgttgctgaaaatgcacttagttcaattttaattgtaaatgggaattttaaacttttcctagttagcatggttatatgttagttaaaactgaaagctaaattgaagatattacattttaatttatggtgacagataagggtttgtatgcattatgtgtaaatcagcttcatgctgtttaaaaatttattctctgaaatttatagaccatgtagaattgatttgtgatgtgatgctttaatttattgcaagaaaattagtatggcttcaaactgccacaggtaggcatgtaacaatggctgttcagctgtactgatccaaaatggagaaaactgatgatacaagggccaaacatcttatgaaatgcaactatttatagacttgttttgctatagggaggctggtgaacacgctgaatacgaattacctcagttctgcagctttctatgtctttttaatgcattctgtttcagggtcactttcaatcaatatttcatttacttactgagattgaatgggcgctctgagacacagtgtgctgtttatcatacagattggacacctcattctagatccaagatcttttcctcaacactgggagctgtcctttcagcaccacaaaattactgcttgaagttgcattgcagtttttttgttttttttttgtttgtttgtttgtttgtttttttgtttttttctttatcactgggagcttttctttcagcaccacaacattgcacctagactttttaaacggctgccttcctctttgcactgaagaccaatttcgtctgcacttccagttattgctattacctgtaggactttcaatcctacttcacttcacccaccccactcctgaaacagttaaatgtatctatttctgtggaagtcattttctcattgaatgattagaaacaaagataaattctaacctgtaacggctcatttcgactcattgcttacaatagatctaagctcttttttctgcttattcgactccttccagcttcccatcacatctgtaacaaacttttaaaatgatattgccacaccaccatgcacaagcctacctgcacagtagagatagattattccatcgcattcagatggttaacagaggttagcaagtcctgtattatatatttatatcgctttctaagaaagtgcatattaatgtttactttaagaatgtgtaaatggtgctatcaagaatctgataaattttatccccgttttttgtgtaccacttctaatgtatgagatttatttttttattggaaaaaaataaacagtatgaaagcattaaattggtagattttagtaatttaacaatgaatggaatccctacgttacaggccctatgtttccttggaaattttaatggtggtaatagatttcaacaaaggtactgataatcatattccttttaatccattcttatatttcagtcttgatttatatgctgattcctcactgagtccttaagtaaagtttatttacttaataattttatttactgtaagtcttctccaagaagggaattcttgctttcgaaggcagcaattgagagatgaaaatataatttaataccccttacatcacaggcactatttgagactagtt

SEQ ID NO: 81571 - DNA, 5268 bp, Homo sapiens
gggcggccgctcgcgatctagaactgaaaagaaaaagccaaaacaaaagggagaaccttctcccggtagcagcggcaggaactgcaaacatgatggcggcagctcccatccagcagaacgggacccacactggggttcccatagacctggacccgccggactcgcggaaaaggccgctggaagccccccctgaagccggcagcaccaagaggaccaatacgggcgaagacggccagtattttctaaaggttctcatacctagttatgctgctggatctataattgggaagggaggacagacaattgttcagttgcaaaaagaaactggagccaccatcaagctgtctaagtccaaagatttttacccaggtactactgagcgagtgtgcttgatccagggaacggttgaagcactgaatgcagttcatggattcattgcagaaaaaattcgagaaatgccccaaaatgtggccaagacagaaccagtcagcattctacaaccccagaccaccgttaatccagatcgcatcaaacaagtaaagattatagttcccaacagcacagcaggtctgataatagggaagggaggtgctactgtgaaggctgtaatggagcagtcaggggcttgggtgcagctttcccagaaacctgatgggatcaacttgcaagagagggttgtcactgtgagtggagaacctgaacaaaaccgaaaagctgttgaacttatcatccagaagatacaagaggatccacaaagtggcagctgtctcaatatcagttatgccaatgtgacaggtccagtggcaaattccaatccaaccggatctccttatgcaaacactgctgaagtgttaccaactgctgcagcagctgcagggctattaggacatgctaaccttgctggcgttgcagcctttccagcagttttatctggcttcacaggcaatgacctggtggccatcacctctgcacttaatacattagccagctatggatataatctcaacactttaggtttaggtctcagtcaagcagcagcaacaggggctttggctgcagcagctgccagtgccaacccagcagcagcagcagccaatttattggccacctatgccagtgaagcctcagccagtggcagcacagctggtggtacggcggggacatttgcattaggtagcctggctgctgctactgctgcaaccaatggatattttggagctgcttctcccctagctgccagtgccattctaggaacagaaaagtccacagatggatccaaggatgtagttgaaatagcagtgccagaaaacttagttggtgcaatacttggcaaaggagggaaaacattagtggaataccaggagttgactggtgcaaggatacagatctccaaaaaaggagaattcgtacctggcacaaggaatcggaaggtaaccattactggaacaccagctgcaacacaggctgctcaatatttaattacacaaaggatcacatatgagcaaggagttcgggctgccaatcctcagaaagtgggttgagtgccccagttacacatcagattgttttaacccctcctttaccccattttcaagaaggatgtactgtactttgcagaagtgaagtttttctgttattaatatataattatgcaaatgaatgcgactatgttgacaatgtgtatatgtaaataatatgtgttttaccagatgtttcatagaaagaattttttcttgatctgttttgttctctatactttgcttgtgtatatttgtcagaggtgtttctagtgtaagatttaagcctgccattttaccagcattattgtagtttaatgattgaatgtagacagggatatgcgtatagttttcagtattagttctagataacactaaattaactactgttaggttgagtatggtggggtcagtgacctaaaatggagtgaggccaaagcactgtcctgtaagtcttacttcctgcttagggcacagtgaagtaggaaacaatattttgaaaataagttttaaatttaaaatgatcaaaaagcaatatagttgcataaaagcactgtaaaatatttaaaaggttaaaactgtggaaaattatattggtaagtttacagatcaataaaagcacctgttctccatctgaactagacaatggaaataatgctgcatgctggccatggcccattcttcatcatttgtaagttcaacaaaagttctcacatggagtcccacctcttcagaggtttgtacatttgtttttaagcactgaattcactactgatcccatcgcctggccagtagaacagtcattactccattaacatcctcactgtttagacacataactgtggtacagtgtattggaaattttataaacaaaagtgaaagtgccaacaaattattgatagctgataatgtttcattatctgcaactgcttgataagtatgttgcattttaagagcttataattgtgtataatttgttaacactagaaacctattagtattgtgaatgtagattttactgtgaagctatctgtgatttagctgtttgctcccatgatggagtctttgcagcatggcgctagcagccaatgcagtttctaatactcggtaatttgcatgttttgtggagcatttttatgtcaccaaccagacagtatttcctgcatgcttatttagaagaggcagcttatcttgagaggtagtgttatctacctttgtcaggctttttgacaggtcatttcagagtaagcctttgttcccaagacccaacaactgtcaccctcttctgtacctctcctgagtgccaactgtccaggccatttgacacaccatctgttaacctctgagtttgcccactcaaggccactcataggggcatcctagccctgtgcacctctcatgctggcatgcagtctaatcatgacaaataatgctgctactctgatatctggctgagcaactgaattacaaaagagaattacttccatctcaacttcaacccattgattacgtccatcctagcaagctaaatggcatcccagctgctcctttctgtgcaaccaattaaagaacaatgagtgtgatgctccatgtctgaatttcgtccagcctctctctgaactgtgatctttgtcctcatgaactttcccttttgttcattgaactatatggactcttcatttcatattgatttactgtgcaatttacttttggacattgagaacttgaaattatttcctgatcccttccccttccactattaataattcatttctgtcaaactgtaagagtagactcattttttttttttttagtttttaacattggactgttatttcatttagagttctctatctctaaatatttatttagagaatgattttaaaagggaatgatatgcttgtttaaatgaaagagaaaagctgtagtaaactgtgttaattggtaatgactatttatcgtcgatactctgtagctgtgtaagttttgacaaatagtgtatctcgtggaatcagtggttagcattgccgctattatatttactcattttatcattataaatgtgcttagttcatcatgtagcatcacttgtctcccgtctcattttttccttgcatgtcacaagtctcagatcatttataatacattaacagtaaataatatctatgtaaatttctttcaccatgctgtctcagagtcagcagtgaacaaaggcaaagattggggccccacttagtttgaaaaagggaaaggaagtgatctaggatgtgtactagaagcatttcaaatgttgggtctttaaaatgttttgttcagtcttagcaaatcttcgatcttttatttcaaaattccagtagtccactgtggagcccatgcatttcatctggaatttaatgttactttgaagccaaaccatttaaacaattatgtgtgttttattagctagtgttgctgaaaatgcacttagttcaattttaattgtaaatgggaattttaaacttttcctagttagcatggttatatgttagttaaaactgaaagctaaattgaagatattacattttaatttatggtgacagataagggtttgtatgcattatgtgtaaatcagcttcatgctgtttaaaaatttattctctgaaatttatagaccatgtagaattgatttgtgatgtgatgctttaatttattgcaagaaaattagtatggcttcaaactgccacaggtaggcatgtaacaatggctgttcagctgtactgatccaaaatggagaaaactgatgatacaagggccaaacatcttatgaaatgcaactatttatagacttgttttgctatagggaggctggtgaacacgctgaatacgaattacctcagttctgcagctttctatgtctttttaatgcattctgtttcagggtcactttcaatcaatatttcatttacttactgagattgaatgggcgctctgagacacagtgtgctgtttatcatacagattggacacctcattctagatccaagatcttttcctcaacactgggagctgtcctttcagcaccacaaaattactgcttgaagttgcattgcagtttttttgttttttttttgtttgtttgtttgtttgtttttttgtttttttctttatcactgggagcttttctttcagcaccacaacattgcacctagactttttaaacggctgccttcctctttgcactgaagaccaatttcgtctgcacttccagttattgctattacctgtaggactttcaatcctacttcacttcacccaccccactcctgaaacagttaaatgtatctatttctgtggaagtcattttctcattgaatgattagaaacaaagataaattctaacctgtaacggctcatttcgactcattgcttacaatagatctaagctcttttttctgcttattcgactccttccagcttcccatcacatctgtaacaaacttttaaaatgatattgccacaccaccatgcacaagcctacctgcacagtagagatagattattccatcgcattcagatggttaacagaggttagcaagtcctgtattatatatttatatcgctttctaagaaagtgcatattaatgtttactttaagaatgtgtaaatggtgctatcaagaatctgataaattttatccccgttttttgtgtaccacttctaatgtatgagatttatttttttattggaaaaaaataaacagtatgaaagcatt

SEQ ID NO: 81572 - DNA, 5232 bp, Homo sapiens
gcaaggtgagtttctttcccacttataaaattacaatctagcggagagaaaaatgtgtgtgtgtgtgtgtagtgtgtctcagttttaacactgagcccacagttgggtggattattgaagacggccagtattttctaaaggttctcatacctagttatgctgctggatctataattgggaagggaggacagacaattgttcagttgcaaaaagaaactggagccaccatcaagctgtctaagtccaaagatttttacccaggtactactgagcgagtgtgcttgatccagggaacggttgaagcactgaatgcagttcatggattcattgcagaaaaaattcgagaaatgccccaaaatgtggccaagacagaaccagtcagcattctacaaccccagaccaccgttaatccagatcgcatcaaacaaacattgccatcttccccaactaccaccaagtcctctccatctgatcccatgaccacctccagagctaatcaggtaaagattatagttcccaacagcacagcaggtctgataatagggaagggaggtgctactgtgaaggctgtaatggagcagtcaggggcttgggtgcagctttcccagaaacctgatgggatcaacttgcaagagagggttgtcactgtgagtggagaacctgaacaaaaccgaaaagctgttgaacttatcatccagaagatacaagaggatccacaaagtggcagctgtctcaatatcagttatgccaatgtgacaggtccagtggcaaattccaatccaaccggatctccttatgcaaacactgctgaagtgttaccaactgctgcagcagctgcagggctattaggacatgctaaccttgctggcgttgcagcctttccagcagttttatctggcttcacaggcaatgacctggtggccatcacctctgcacttaatacattagccagctatggatataatctcaacactttaggtttaggtctcagtcaagcagcagcaacaggggctttggctgcagcagctgccagtgccaacccagcagcagcagcagccaatttattggccacctatgccagtgaagcctcagccagtggcagcacagctggtggtacggcggggacatttgcattaggtagcctggctgctgctactgctgcaaccaatggatattttggagctgcttctcccctagctgccagtgccattctaggaacagaaaagtccacagatggatccaaggatgtagttgaaatagcagtgccagaaaacttagttggtgcaatacttggcaaaggagggaaaacattagtggaataccaggagttgactggtgcaaggatacagatctccaaaaaaggagaattcgtacctggcacaaggaatcggaaggtaaccattactggaacaccagctgcaacacaggctgctcaatatttaattacacaaaggatcacatatgagcaaggagttcgggctgccaatcctcagaaagtgggttgagtgccccagttacacatcagattgttttaacccctcctttaccccattttcaagaaggatgtactgtactttgcagaagtgaagtttttctgttattaatatataattatgcaaatgaatgcgactatgttgacaatgtgtatatgtaaataatatgtgttttaccagatgtttcatagaaagaattttttcttgatctgttttgttctctatactttgcttgtgtatatttgtcagaggtgtttctagtgtaagatttaagcctgccattttaccagcattattgtagtttaatgattgaatgtagacagggatatgcgtatagttttcagtattagttctagataacactaaattaactactgttaggttgagtatggtggggtcagtgacctaaaatggagtgaggccaaagcactgtcctgtaagtcttacttcctgcttagggcacagtgaagtaggaaacaatattttgaaaataagttttaaatttaaaatgatcaaaaagcaatatagttgcataaaagcactgtaaaatatttaaaaggttaaaactgtggaaaattatattggtaagtttacagatcaataaaagcacctgttctccatctgaactagacaatggaaataatgctgcatgctggccatggcccattcttcatcatttgtaagttcaacaaaagttctcacatggagtcccacctcttcagaggtttgtacatttgtttttaagcactgaattcactactgatcccatcgcctggccagtagaacagtcattactccattaacatcctcactgtttagacacataactgtggtacagtgtattggaaattttataaacaaaagtgaaagtgccaacaaattattgatagctgataatgtttcattatctgcaactgcttgataagtatgttgcattttaagagcttataattgtgtataatttgttaacactagaaacctattagtattgtgaatgtagattttactgtgaagctatctgtgatttagctgtttgctcccatgatggagtctttgcagcatggcgctagcagccaatgcagtttctaatactcggtaatttgcatgttttgtggagcatttttatgtcaccaaccagacagtatttcctgcatgcttatttagaagaggcagcttatcttgagaggtagtgttatctacctttgtcaggctttttgacaggtcatttcagagtaagcctttgttcccaagacccaacaactgtcaccctcttctgtacctctcctgagtgccaactgtccaggccatttgacacaccatctgttaacctctgagtttgcccactcaaggccactcataggggcatcctagccctgtgcacctctcatgctggcatgcagtctaatcatgacaaataatgctgctactctgatatctggctgagcaactgaattacaaaagagaattacttccatctcaacttcaacccattgattacgtccatcctagcaagctaaatggcatcccagctgctcctttctgtgcaaccaattaaagaacaatgagtgtgatgctccatgtctgaatttcgtccagcctctctctgaactgtgatctttgtcctcatgaactttcccttttgttcattgaactatatggactcttcatttcatattgatttactgtgcaatttacttttggacattgagaacttgaaattatttcctgatcccttccccttccactattaataattcatttctgtcaaactgtaagagtagactcattttttttttttttagtttttaacattggactgttatttcatttagagttctctatctctaaatatttatttagagaatgattttaaaagggaatgatatgcttgtttaaatgaaagagaaaagctgtagtaaactgtgttaattggtaatgactatttatcgtcgatactctgtagctgtgtaagttttgacaaatagtgtatctcgtggaatcagtggttagcattgccgctattatatttactcattttatcattataaatgtgcttagttcatcatgtagcatcacttgtctcccgtctcattttttccttgcatgtcacaagtctcagatcatttataatacattaacagtaaataatatctatgtaaatttctttcaccatgctgtctcagagtcagcagtgaacaaaggcaaagattggggccccacttagtttgaaaaagggaaaggaagtgatctaggatgtgtactagaagcatttcaaatgttgggtctttaaaatgttttgttcagtcttagcaaatcttcgatcttttatttcaaaattccagtagtccactgtggagcccatgcatttcatctggaatttaatgttactttgaagccaaaccatttaaacaattatgtgtgttttattagctagtgttgctgaaaatgcacttagttcaattttaattgtaaatgggaattttaaacttttcctagttagcatggttatatgttagttaaaactgaaagctaaattgaagatattacattttaatttatggtgacagataagggtttgtatgcattatgtgtaaatcagcttcatgctgtttaaaaatttattctctgaaatttatagaccatgtagaattgatttgtgatgtgatgctttaatttattgcaagaaaattagtatggcttcaaactgccacaggtaggcatgtaacaatggctgttcagctgtactgatccaaaatggagaaaactgatgatacaagggccaaacatcttatgaaatgcaactatttatagacttgttttgctatagggaggctggtgaacacgctgaatacgaattacctcagttctgcagctttctatgtctttttaatgcattctgtttcagggtcactttcaatcaatatttcatttacttactgagattgaatgggcgctctgagacacagtgtgctgtttatcatacagattggacacctcattctagatccaagatcttttcctcaacactgggagctgtcctttcagcaccacaaaattactgcttgaagttgcattgcagtttttttgttttttttttgtttgtttgtttgtttgtttttttgtttttttctttatcactgggagcttttctttcagcaccacaacattgcacctagactttttaaacggctgccttcctctttgcactgaagaccaatttcgtctgcacttccagttattgctattacctgtaggactttcaatcctacttcacttcacccaccccactcctgaaacagttaaatgtatctatttctgtggaagtcattttctcattgaatgattagaaacaaagataaattctaacctgtaacggctcatttcgactcattgcttacaatagatctaagctcttttttctgcttattcgactccttccagcttcccatcacatctgtaacaaacttttaaaatgatattgccacaccaccatgcacaagcctacctgcacagtagagatagattattccatcgcattcagatggttaacagaggttagcaagtcctgtattatatatttatatcgctttctaagaaagtgcatattaatgtttactttaagaatgtgtaaatggtgctatcaagaatctgataaattttatccccgttttttgtgtaccacttctaatgtatgagatttatttttttattggaaaaaaataaacagtatgaaagcatt

SEQ ID NO: 81573 - DNA, 2337 bp, Homo sapiens
tgaggtgatctagaggatccctactcagacagtgaccgtgagcaactgaattacaaaagagaattacttccatctcaacttcaacccattgattacgtccatcctagcaagctaaatggcatcccagctgctcctttctgtgcaaccaattaaagaacaatgagtgtgatgctccatgtctgaatttcgtccagcctctctctgaactgtgatctttgtcctcatgaactttcccttttgttcattgaactatatggactcttcatttcatattgatttactgtgcaatttacttttggacattgagaacttgaaattatttcctgatcccttccccttccactattaataattcatttctgtcaaactgtaagagtagactcattttttttttttttagtttttaacattggactgttatttcatttagagttctctatctctaaatatttatttagagaatgattttaaaagggaatgatatgcttgtttaaatgaaagagaaaagctgtagtaaactgtgttaattggtaatgactatttatcgtcgatactctgtagctgtgtaagttttgacaaatagtgtatctcgtggaatcagtggttagcattgccgctattatatttactcattttatcattataaatgtgcttagttcatcatgtagcatcacttgtctcccgtctcattttttccttgcatgtcacaagtctcagatcatttataatacattaacagtaaataatatctatgtaaatttctttcaccatgctgtctcagagtcagcagtgaacaaaggcaaagattggggccccacttagtttgaaaaagggaaaggaagtgatctaggatgtgtactagaagcatttcaaatgttgggtctttaaaatgttttgttcagtcttagcaaatcttcgatcttttatttcaaaattccagtagtccactgtggagcccatgcatttcatctggaatttaatgttactttgaagccaaaccatttaaacaattatgtgtgttttattagctagtgttgctgaaaatgcacttagttcaattttaattgtaaatgggaattttaaacttttcctagttagcatggttatatgttagttaaaactgaaagctaaattgaagatattacattttaatttatggtgacagataagggtttgtatgcattatgtgtaaatcagcttcatgctgtttaaaaatttattctctgaaatttatagaccatgtagaattgatttgtgatgtgatgctttaatttattgcaagaaaattagtatggcttcaaactgccacaggtaggcatgtaacaatggctgttcagctgtactgatccaaaatggagaaaactgatgatacaagggccaaacatcttatgaaatgcaactatttatagacttgttttgctatagggaggctggtgaacacgctgaatacgaattacctcagttctgcagctttctatgtctttttaatgcattctgtttcagggtcactttcaatcaatatttcatttacttactgagattgaatgggcgctctgagacacagtgtgctgtttatcatacagattggacacctcattctagatccaagatcttttcctcaacactgggagctgtcctttcagcaccacaaaattactgcttgaagttgcattgcagtttttttgttttttttttgtttgtttgtttgtttgtttttttgtttttttctttatcactgggagcttttctttcagcaccacaacattgcacctagactttttaaacggctgccttcctctttgcactgaagaccaatttcgtctgcacttccagttattgctattacctgtaggactttcaatcctacttcacttcacccaccccactcctgaaacagttaaatgtatctatttctgtggaagtcattttctcattgaatgattagaaacaaagataaattctaacctgtaacggctcatttcgactcattgcttacaatagatctaagctcttttttctgcttattcgactccttccagcttcccatcacatctgtaacaaacttttaaaatgatattgccacaccaccatgcacaagcctacctgcacagtagagatagattattccatcgcattcagatggttaacagaggttagcaagtcctgtattatatatttatatcgctttctaagaaagtgcatattaatgtttactttaagaatgtgtaaatggtgctatcaagaatctgataaattttatccccgttttttgtgtaccacttctaatgtatgagatttatttttttattggaaaaaaataaacagtatgaaagcatt

SEQ ID NO: 81574 - DNA, 576 bp, Homo sapiens
gggcggccgctcgcgatctagaactgaaaagaaaaagccaaaacaaaagggagaaccttctcccggtagcagcggcaggaactgcaaacatgatggcggcagctcccatccagcagaacgggacccacactggggttcccatagacctggacccgccggactcgcggaaaaggccgctggaagccccccctgaagccggcagcaccaagaggaccaatacgggcgaagacggccagtattttctaaaggttctcatacctagttatgctgctggatctataattgggaagggaggacagacaattgttcagttgcaaaaagaaactggagccaccatcaagctgtctaagtccaaagatttttacccaggtactactgagcgagtgtgcttgatccagggaacggttgaagcactgaatgcagttcatggattcattgcagaaaaaattcgagaaatgccccaaaatgtggccaagacagaaccagtcagcattctacaaccccagaccaccgttaatccagatcgcatcaaacaagtgagtgtttagttgagaaatcaaagagaaatatccacag

SEQ ID NO: 81575 - DNA, 558 bp, Homo sapiens
  misc_feature (513)..(513): n is a, c, g, or t
gggcggccgctcgcgatctagaactgaaaagaaaaagccaaaacaaaagggagaaccttctcccggtagcagcggcaggaactgcaaacatgatggcggcagctcccatccagcagaacgggacccacactggggttcccatagacctggacccgccggactcgcggaaaaggccgctggaagccccccctgaagccggcagcaccaagaggaccaatacgggcgaagacggccagtattttctaaaggttctcatacctagttatgctgctggatctataattgggaagggaggacagacaattgttcagttgcaaaaagaaactggagccaccatcaagctgtctaagtccaaagatttttacccaggtactactgagcgagtgtgcttgatccagggaacggttgaagcactgaatgcagttcatggattcattgcagaaaaaattcgagaaatgccccagtgagaacaaaccagcaacattgcttttttttcctaaagagatttatatngatccgattaaaaaaaaaaacccttaagaaaccccaaacgcaaaa

SEQ ID NO: 81576 - DNA, 4865 bp, Homo sapiens
  misc_feature (4820)..(4820): n is a, c, g, or t
gggcggccgctcgcgatctagaactgaaaagaaaaagccaaaacaaaagggagaaccttctcccggtagcagcggcaggaactgcaaacatgatggcggcagctcccatccagcagaacgggacccacactggggttcccatagacctggacccgccggactcgcggaaaaggccgctggaagccccccctgaagccggcagcaccaagaggaccaatacgggcgaagacggccagtattttctaaaggttctcatacctagttatgctgctggatctataattgggaagggaggacagacaattgttcagttgcaaaaagaaactggagccaccatcaagctgtctaagtccaaagatttttacccaggtactactgagcgagtgtgcttgatccagggaacggttgaagcactgaatgcagttcatggattcattgcagaaaaaattcgagaaatgccccaaaatgtggccaagacagaaccagtcagcattctacaaccccagaccaccgttaatccagatcgcatcaaacaaacattgccatcttccccaactaccaccaagtcctctccatctgatcccatgaccacctccagagctaatcaggtaaagattatagttcccaacagcacagcaggtctgataatagggaagggaggtgctactgtgaaggctgtaatggagcagtcaggggcttgggtgcagctttcccagaaacctgatgggatcaacttgcaagagagggttgtcactgtgagtggagaacctgaacaaaaccgaaaagctgttgaacttatcatccagaagatacaagaggatccacaaagtggcagctgtctcaatatcagttatgccaatgtgacaggtccagtggcaaattccaatccaaccggatctccttatgcaaacactgctgaagtgttaccaactgctgcagcagctgcagggctattaggacatgctaaccttgctggcgttgcagcctttccagcagttttatctggcttcacaggcaatgacctggtggccatcacctctgcacttaatacattagccagctatggatataatctcaacactttaggtttaggtctcagtcaagcagcagcaacaggggctttggctgcagcagctgccagtgccaacccagcagcagcagcagccaatttattggccacctatgccagtgaagcctcagccagtggcagcacagctggtggtacggcggggacatttgcattaggtagcctggctgctgctactgctgcaaccaatggatattttggagctgcttctcccctagctgccagtgccattctaggaacagaaaagtccacagatggatccaaggatgtagttgaaatagcagtgccagaaaacttagttggtgcaatacttggcaaaggagggaaaacattagtggaataccaggagttgactggtgcaaggatacagatctccaaaaaaggagaattcgtacctggcacaaggaatcggaaggtaaccattactggaacaccagctgcaacacaggctgctcaatatttaattacacaaaggatcacatatgagcaaggagttcgggctgccaatcctcagaaagtgggttgagtgccccagttacacatcagattgttttaacccctcctttaccccattttcaagaaggatgtactgtactttgcagaagtgaagtttttctgttattaatatataattatgcaaatgaatgcgactatgttgacaatgtgtatatgtaaataatatgtgttttaccagatgtttcatagaaagaattttttcttgatctgttttgttctctatactttgcttgtgtatatttgtcagaggtgtttctagtgtaagatttaagcctgccattttaccagcattattgtagtttaatgattgaatgtagacagggatatgcgtatagttttcagtattagttctagataacactaaattaactactgttaggttgagtatggtggggtcagtgacctaaaatggagtgaggccaaagcactgtcctgtaagtcttacttcctgcttagggcacagtgaagtaggaaacaatattttgaaaataagttttaaatttaaaatgatcaaaaagcaatatagttgcataaaagcactgtaaaatatttaaaaggttaaaactgtggaaaattatattggtaagtttacagatcaataaaagcacctgttctccatctgaactagacaatggaaataatgctgcatgctggccatggcccattcttcatcatttgtaagttcaacaaaagttctcacatggagtcccacctcttcagaggtttgtacatttgtttttaagcactgaattcactactgatcccatcgcctggccagtagaacagtcattactccattaacatcctcactgtttagacacataactgtggtacagtgtattggaaattttataaacaaaagtgaaagtgccaacaaattattgatagctgataatgtttcattatctgcaactgcttgataagtatgttgcattttaagagcttataattgtgtataatttgttaacactagaaacctattagtattgtgaatgtagattttactgtgaagctatctgtgatttagctgtttgctcccatgatggagtctttgcagcatggcgctagcagccaatgcagtttctaatactcggtaatttgcatgttttgtggagcatttttatgtcaccaaccagacagtatttcctgcatgcttatttagaagaggcagcttatcttgagaggtagtgttatctacctttgtcaggctttttgacaggtcatttcagagtaagcctttgttcccaagacccaacaactgtcaccctcttctgtacctctcctgagtgccaactgtccaggccatttgacacaccatctgttaacctctgagtttgcccactcaaggccactcataggggcatcctagccctgtgcactcagcactcataggatcatccagactctcatgctggcatgcagtctaatcatgacaaataatgctgctactctgatatctggctgagcaactgaattacaaaagagaattacttccatctcaacttcaacccattgattacgtccatcctagcaagctaaatggcatcccagctgctcctttctgtgcaaccaattaaagaacaatgagtgtgatgctccatgtctgaatttcgtccagcctctctctgaactgtgatctttgtcctcatgaactttcccttttgttcattgaactatatggactcttcatttcatattgatttactgtgcaatttacttttggacattgagaacttgaaattatttcctgatcccttccccttccactattaataattcatttctgtcaaactgtaagagtagactcattttttttttttttagtttttaacattggactgttatttcatttagagttctctatctctaaatatttatttagagaatgattttaaaagggaatgatatgcttgtttaaatgaaagagaaaagctgtagtaaactgtgttaattggtaatgactatttatcgtcgatactctgtagctgtgtaagttttgacaaatagtgtatctcgtggaatcagtggttagcattgccgctattatatttactcattttatcattataaatgtgcttagttcatcatgtagcatcacttgtctcccgtctcattttttccttgcatgtcacaagtctcagatcatttataatacattaacagtaaataatatctatgtaaatttctttcaccatgctgtctcagagtcagcagtgaacaaaggcaaagattggggccccacttagtttgaaaaagggaaaggaagtgatctaggatgtgtactagaagcatttcaaatgttgggtctttaaaatgttttgttcagtcttagcaaatcttcgatcttttatttcaaaattccagtagtccactgtggagcccatgcatttcatctggaatttaatgttactttgaagccaaaccatttaaacaattatgtgtgttttattagctagtgttgctgaaaatgcacttagttcaattttaattgtaaatgggaattttaaacttttcctagttagcatggttatatgttagttaaaactgaaagctaaattgaagatattacattttaatttatggtgacagataagggtttgtatgcattatgtgtaaatcagcttcatgctgtttaaaaatttattctctgaaatttatagaccatgtagaattgatttgtgatgtgatgctttaatttattgcaagaaaattagtatggcttcaaactgccacaggtaggcatgtaacaatggctgttcagctgtactgatccaaaatggagaaaactgatgatacaagggccaaacatcttatgaaatgcaactatttatagacttgttttgctatagggaggctggtgaacacgctgaatacgaattacctcagttctgcagctttctatgtctttttaatgcattctgtttcagggtcactttcaatcaatatttcatttacttactgagattgaatgggcgctctgagacacagtgtgctgtttatcatacagattggacacctcattctagatccaagatcttttcctcaacactgggagctgtcctttcagcaccacaaaattactgcttgaagttgcattgcagtttttttgttttttttttgtttgtttgtttgtttgtttttttgtttttttctttatcactgggagcttttctttcagcaccacaacattgctttttttcctaaagagatttatatngatccgattaaaaaaaaaaacccttaagaaaccccaaacgcaaaa

SEQ ID NO: 81577 - DNA, 5255 bp, Homo sapiens
aatggttgttttgcggactttaagtaggatataggcaatggctaattgtagtccttatgtgtctgctaatgacaaataaatatagctcatcactatttacagtcctgggcttttcttcttttttaatatgttaagtgaagaagacggccagtattttctaaaggttctcatacctagttatgctgctggatctataattgggaagggaggacagacaattgttcagttgcaaaaagaaactggagccaccatcaagctgtctaagtccaaagatttttacccaggtactactgagcgagtgtgcttgatccagggaacggttgaagcactgaatgcagttcatggattcattgcagaaaaaattcgagaaatgccccaaaatgtggccaagacagaaccagtcagcattctacaaccccagaccaccgttaatccagatcgcatcaaacaaacattgccatcttccccaactaccaccaagtcctctccatctgatcccatgaccacctccagagctaatcaggtaaagattatagttcccaacagcacagcaggtctgataatagggaagggaggtgctactgtgaaggctgtaatggagcagtcaggggcttgggtgcagctttcccagaaacctgatgggatcaacttgcaagagagggttgtcactgtgagtggagaacctgaacaaaaccgaaaagctgttgaacttatcatccagaagatacaagaggatccacaaagtggcagctgtctcaatatcagttatgccaatgtgacaggtccagtggcaaattccaatccaaccggatctccttatgcaaacactgctgaagtgttaccaactgctgcagcagctgcagggctattaggacatgctaaccttgctggcgttgcagcctttccagcagttttatctggcttcacaggcaatgacctggtggccatcacctctgcacttaatacattagccagctatggatataatctcaacactttaggtttaggtctcagtcaagcagcagcaacaggggctttggctgcagcagctgccagtgccaacccagcagcagcagcagccaatttattggccacctatgccagtgaagcctcagccagtggcagcacagctggtggtacggcggggacatttgcattaggtagcctggctgctgctactgctgcaaccaatggatattttggagctgcttctcccctagctgccagtgccattctaggaacagaaaagtccacagatggatccaaggatgtagttgaaatagcagtgccagaaaacttagttggtgcaatacttggcaaaggagggaaaacattagtggaataccaggagttgactggtgcaaggatacagatctccaaaaaaggagaattcgtacctggcacaaggaatcggaaggtaaccattactggaacaccagctgcaacacaggctgctcaatatttaattacacaaaggatcacatatgagcaaggagttcgggctgccaatcctcagaaagtgggttgagtgccccagttacacatcagattgttttaacccctcctttaccccattttcaagaaggatgtactgtactttgcagaagtgaagtttttctgttattaatatataattatgcaaatgaatgcgactatgttgacaatgtgtatatgtaaataatatgtgttttaccagatgtttcatagaaagaattttttcttgatctgttttgttctctatactttgcttgtgtatatttgtcagaggtgtttctagtgtaagatttaagcctgccattttaccagcattattgtagtttaatgattgaatgtagacagggatatgcgtatagttttcagtattagttctagataacactaaattaactactgttaggttgagtatggtggggtcagtgacctaaaatggagtgaggccaaagcactgtcctgtaagtcttacttcctgcttagggcacagtgaagtaggaaacaatattttgaaaataagttttaaatttaaaatgatcaaaaagcaatatagttgcataaaagcactgtaaaatatttaaaaggttaaaactgtggaaaattatattggtaagtttacagatcaataaaagcacctgttctccatctgaactagacaatggaaataatgctgcatgctggccatggcccattcttcatcatttgtaagttcaacaaaagttctcacatggagtcccacctcttcagaggtttgtacatttgtttttaagcactgaattcactactgatcccatcgcctggccagtagaacagtcattactccattaacatcctcactgtttagacacataactgtggtacagtgtattggaaattttataaacaaaagtgaaagtgccaacaaattattgatagctgataatgtttcattatctgcaactgcttgataagtatgttgcattttaagagcttataattgtgtataatttgttaacactagaaacctattagtattgtgaatgtagattttactgtgaagctatctgtgatttagctgtttgctcccatgatggagtctttgcagcatggcgctagcagccaatgcagtttctaatactcggtaatttgcatgttttgtggagcatttttatgtcaccaaccagacagtatttcctgcatgcttatttagaagaggcagcttatcttgagaggtagtgttatctacctttgtcaggctttttgacaggtcatttcagagtaagcctttgttcccaagacccaacaactgtcaccctcttctgtacctctcctgagtgccaactgtccaggccatttgacacaccatctgttaacctctgagtttgcccactcaaggccactcataggggcatcctagccctgtgcacctctcatgctggcatgcagtctaatcatgacaaataatgctgctactctgatatctggctgagcaactgaattacaaaagagaattacttccatctcaacttcaacccattgattacgtccatcctagcaagctaaatggcatcccagctgctcctttctgtgcaaccaattaaagaacaatgagtgtgatgctccatgtctgaatttcgtccagcctctctctgaactgtgatctttgtcctcatgaactttcccttttgttcattgaactatatggactcttcatttcatattgatttactgtgcaatttacttttggacattgagaacttgaaattatttcctgatcccttccccttccactattaataattcatttctgtcaaactgtaagagtagactcattttttttttttttagtttttaacattggactgttatttcatttagagttctctatctctaaatatttatttagagaatgattttaaaagggaatgatatgcttgtttaaatgaaagagaaaagctgtagtaaactgtgttaattggtaatgactatttatcgtcgatactctgtagctgtgtaagttttgacaaatagtgtatctcgtggaatcagtggttagcattgccgctattatatttactcattttatcattataaatgtgcttagttcatcatgtagcatcacttgtctcccgtctcattttttccttgcatgtcacaagtctcagatcatttataatacattaacagtaaataatatctatgtaaatttctttcaccatgctgtctcagagtcagcagtgaacaaaggcaaagattggggccccacttagtttgaaaaagggaaaggaagtgatctaggatgtgtactagaagcatttcaaatgttgggtctttaaaatgttttgttcagtcttagcaaatcttcgatcttttatttcaaaattccagtagtccactgtggagcccatgcatttcatctggaatttaatgttactttgaagccaaaccatttaaacaattatgtgtgttttattagctagtgttgctgaaaatgcacttagttcaattttaattgtaaatgggaattttaaacttttcctagttagcatggttatatgttagttaaaactgaaagctaaattgaagatattacattttaatttatggtgacagataagggtttgtatgcattatgtgtaaatcagcttcatgctgtttaaaaatttattctctgaaatttatagaccatgtagaattgatttgtgatgtgatgctttaatttattgcaagaaaattagtatggcttcaaactgccacaggtaggcatgtaacaatggctgttcagctgtactgatccaaaatggagaaaactgatgatacaagggccaaacatcttatgaaatgcaactatttatagacttgttttgctatagggaggctggtgaacacgctgaatacgaattacctcagttctgcagctttctatgtctttttaatgcattctgtttcagggtcactttcaatcaatatttcatttacttactgagattgaatgggcgctctgagacacagtgtgctgtttatcatacagattggacacctcattctagatccaagatcttttcctcaacactgggagctgtcctttcagcaccacaaaattactgcttgaagttgcattgcagtttttttgttttttttttgtttgtttgtttgtttgtttttttgtttttttctttatcactgggagcttttctttcagcaccacaacattgcacctagactttttaaacggctgccttcctctttgcactgaagaccaatttcgtctgcacttccagttattgctattacctgtaggactttcaatcctacttcacttcacccaccccactcctgaaacagttaaatgtatctatttctgtggaagtcattttctcattgaatgattagaaacaaagataaattctaacctgtaacggctcatttcgactcattgcttacaatagatctaagctcttttttctgcttattcgactccttccagcttcccatcacatctgtaacaaacttttaaaatgatattgccacaccaccatgcacaagcctacctgcacagtagagatagattattccatcgcattcagatggttaacagaggttagcaagtcctgtattatatatttatatcgctttctaagaaagtgcatattaatgtttactttaagaatgtgtaaatggtgctatcaagaatctgataaattttatccccgttttttgtgtaccacttctaatgtatgagatttatttttttattggaaaaaaataaacagtatgaaagcatt

SEQ ID NO: 81578 - DNA, 997 bp, Homo sapiens
  misc_feature (988)..(992): n is a, c, g, or t
  misc_feature (994)..(994): n is a, c, g, or t
  misc_feature (997)..(997): n is a, c, g, or t
gggcggccgctcgcgatctagaactgaaaagaaaaagccaaaacaaaagggagaaccttctcccggtagcagcggcaggaactgcaaacatgatggcggcagctcccatccagcagaacgggacccacactggggttcccatagacctggacccgccggactcgcggaaaaggccgctggaagccccccctgaagccggcagcaccaagaggaccaatacgggcgaagacggccagtattttctaaaggttctcatacctagttatgctgctggatctataattgggaagggaggacagacaattgttcagttgcaaaaagaaactggagccaccatcaagctgtctaagtccaaagatttttacccaggtactactgagcgagtgtgcttgatccagggaacggttgaagcactgaatgcagttcatggattcattgcagaaaaaattcgagaaatgccccaaaatgtggccaagacagaaccagtcagcattctacaaccccagaccaccgttaatccagatcgcatcaaacaaacattgccatcttccccaactaccaccaagtcctctccatctgatcccatgaccacctccagagctaatcagaagcataatatctcctggatatcatgaagcaagatataagagaagaacaaaacaaaatccgtaattcattgaaagaattgtaatcatcaatctttcatattattaatactttgtaattattttctccccaacagtattttccagtagattctaatcatgtggtagggcagaaggaaatgtgttttttgttgttcatttgtttcttgtcaatagtcctgattattttagctttgctatactgacttatatctggaagtatataaccaagataagaaaataggttttaatatgatcatcttaagctaattgtaatgaaaagaactaatggactgtcaatattcagaaaaccaaaaataaaaaatacggaaaactaaaaaaannnnnanttn

SEQ ID NO: 81579 - DNA, 894 bp, Homo sapiens
atgagggcaactagaggttgctttcatcaccatcctggtcctagctggtttgcaccagtttctttgctatatcctgccttgattagcaggtctgtaactgaggcttggaaaacaagtcctgctgctctcccatctcgagaggatggtctgcccttaggagcgtgggctgggaaagaggcccacacaggccctggaaatgggcttcaggacactgggacatgggaacagagaatcttcaggtactgaatactcatggcctggtctagaaggggatggggtgtgctccaagaaggggtgtcccctgggtcctgcaaattccttgccccatggggaagagaaacagctggaggggctgcctaaagcacaggggcatttctaggagcaggaaagcaagaggtcatcaggtcagactggctgaaggaagactgaggtgggagctgagagcagagacttcaaccatgaccatgcctggactctccagataaagcactggtgaaatcaaagaccaacaatgtcaagtattggcaagactgtggagcaactggaactctcattccctgatggagggaatgcaaagtacaagctatagccacttttcctcgtcattttacatgaagggcagacatgcacttaaggtaggacccagaaattctgcttctaggcagacttatgtccaccaaaggctgccacagggaagttcatgcagacatcctcataattgccaaaagccagaaacagcccaatagccatcaatgggtgtctgaataaacaaattgtgatcaatttacacaatggcgcatccatacaataaaaagaacaaactacctgtgcacaccacagcatagatgaatctcagaatcattatactgagcgaaaaaaaaaaaaaaaaaaaag

SEQ ID NO: 81580 - DNA, 514 bp, Homo sapiens
  misc_feature (1)..(1): n is a, c, g, or t
nttcggcacagattttctagtttatttgcgtagaggtgtttatagtattctctgataatggagatatgaccactgatcccacagaaatacaaactagcaccatgagcttcaataccctgcaaacactcccaccacgcccaccaacccatgcctgaatatgcaataaatgccaggagacacggcactctctctgactcagaccaatgggaacctgatgacaagggaggtaaatggccagcgtcatggggcagccttcccaacatgccacttctcaagtccggcggctcaccccaaaggaagagaatgagggtgacaggctgcaggagaggtccaggccttgaacggggatataaaggctacatcacacacattcctcagtactagtcaacgggacactgagatgacatttattgaggaactactaaaaagctgacacatatctttcatctttatgagaactctgtagagaggcattatcatccccggctaagaaatgagaaaacaaaactgagct

SEQ ID NO: 81581 - DNA, 175 bp, Homo sapiens
gacagctaagtattttctgaataagaactttccagaagtgatgactcatgatattaaaaaagtacttaaggcaatgagaaaagagttctcctttttcatgaagtacaaataagaaaatagaatggtattttaagaagctcataacaaatgagttttctttttcatttaagctctg

SEQ ID NO: 81582 - DNA, 263 bp, Homo sapiens
ttttataattattagggatattcagaagttttgtacttgagattagtgactgaatttatgtagacagctttcttctgtggttatacaggtaatctataattttattgcatgttgttgatgctatatgacttactcactgtttcttgaaatcacccttttttgctgaaacaaatagaaaaataagtatatcataatttaagaatattgtatgtatttaagtgatctaagtatccacctacttactaaattaattacttattatg

SEQ ID NO: 81583 - DNA, 334 bp, Homo sapiens
gtcactctgtggcacgggatgtgaatcacttgctcctcgtgttcctcgttcctggcccgtctccccagaggacagcaagctctgtccatattgaccatgactgggttcaggcctgagacctcagggcacctgactgctctgtgtgcagtgtgtgtgaggggcaggtgtactcacctgcccctcactgcctgccagaggcctctgtgggcagccgtggggtccagcctggcccattttttgttttgatgctgcactcattgtccgagcctgctgggtggtctgagctctaagtgtggcatcctggtgctgtggagggcatgtctttgaccacgct

SEQ ID NO: 81584 - DNA, 422 bp, Homo sapiens
ccctgtcatagttcttcaggctgtattatgcataccacatcctctgtagccctcagcctatggtggaacgaaacgaaagaaaaaaaaagtaacaattacatctatttgatgtttcttctgcctatgaggtctttgtataagtaatgcacactaaccaatcatgccattggctctccatgaggtctttgtaaacctagaaaatgtttttctctattgaaacaaatctcattattaaaacatactgagacagagtaagatggctaaacaggagcctccactgatcatccatcctcctcacaggaacaccaaattgaacaactatccacgcagaacgcgcctaattgccatttactccatggccactgccatatccatcagatcctcctctaaagttacttcctggtcctggtccgaaatttcca

SEQ ID NO: 81585 - DNA, 430 bp, Homo sapiens
aggaacaagaagatgagaagaatatacaaactaggaaaagcaaaaagaacaggtgcaggaattagaaggcctataatgacaccttttatcccctccccaattcacgaaatttgaaaaagtccaagactatcacaacaaaaaagaaggaaaaaatggccgggtgcagtggctcacgcctgtaatcctagcactttgggaggccaaggtgggtggatcatgaggtcaggagatctagactatcctggctaacactgtgaaaccccgtctctactaaaaatacaaaaataaaattagctgggcatggtggcaggcacctgtagtcccagctactagggaggctgaggcaggaggatggcatgaacccaggaagcggagcttgcagtgagccaagatcgcgccactgcactccagcctgggcaaaagagcaaga

SEQ ID NO: 81586 - DNA, 387 bp, Homo sapiens
  misc_feature (15)..(16): n is a, c, g, or t
  misc_feature (41)..(41): n is a, c, g, or t
  misc_feature (87)..(87): n is a, c, g, or t
  misc_feature (155)..(155): n is a, c, g, or t
gtctgagaggacccnngagaggacaggaggaagggaagcangagcccaaagcagcagccagacagagccccaaaaggtgccctgggnagacctagggcgcacaggctgtcgggcgagaagggaatcaggctgcacgagacgccggcgcggccagngggcgataagcccaagtggtcatccaaccttcccctttgggaagcaggctcgatcagttggtaaggggccatgatatggcatctgagtaggtctacagtagaccccaaacccgtgatccctcttctgacaggacgctcctgctgagactccctggcctgagtcgccccagcttgccctgacatctgtacacaagccagcctgagtcctagcaccagggcatgcagaccctct

SEQ ID NO: 81587 - DNA, 768 bp, Homo sapiens
gagggggtaaataaatcgagtcccttttacttcatcttggccagaagaagaaaagaagaagtctcctggtgtcttttaaacactctttgaaaaccaaactttaatagttgtgcaacaatccaaagtaggatgtgccttaatttttcaaaagtattgttcctcctttttgggaagctttaagttgccttcctaattttagcctactataaataaaaaactacaatgaacatcaacatccttagaagtagctatactttcaagttgacaatacaatgtttgtagcctatgcaataccacagctttccaccactggctttctacctcggcttgaatgaagagaaactaaaaaaaaaggtaagattaaatctaaaggtatggatctggcatattgtctctaaaataactcaatgattggtctttctgctttttataaagtgtatcttctatcccaacactaccctaaattaagcaagaaaaaagaataaatgaagaaaaaaaatccataaaaatttcccactagtatggaagacaaggaatatattcttttaaaaaaatctgcatttgagagggaacactgcttttttggggggatgggggtgggggacaaggtctcactctgtcacccaagctagagtgcagtggcatgatcatgccttatagcagcgtcaacctcctggcctcaaacagtcctctctgcctcagtgccccgagcagctattaataggaccacaagcatgcgccaccacgcctggctaatttttgtacttt

SEQ ID NO: 81588 - DNA, 297 bp, Homo sapiens
catttctttgtattgtgccactatgagaagagtaccttgattattttctaatgaataatatttttaacagtaataattttaacaataactagtttaatttctgagagccttttcttaaaagtatcttctgtcacatgaattatctcattcccttcatgcccctgccactgggtccttttttccctctgtttaccttgtttactctcattagactttcctcaaatgtgattcttacacccatatacgtgtgcgtgtgcacgtgagtgtgtctgtgaattaaaagcctaattgagacct

SEQ ID NO: 81589 - DNA, 844 bp, Homo sapiens
ccaacatgaaacagaaaaataccatctcaggctccatattccatgtccctgttgaatacagatccccgaactgagaaataagaaacaactacatacgaagtaatacttgaaaatgtttctcttgtaatacttccatatccaaagcatttgaatatatttattttattgatgtaggtctgccaactcttccttctcaggaaggactgtttttattccaaacatgtatatataaggttaaaatgtattttttaaaataagataattattgatagttgtttttaaaatagccttgcttagcaaaataaatgttggcaaccctaagtttgttctattataatattattgaaattacattgaattctgaaatccatgtcaacttgaagttaccaagttttaaccactgttagaaaataagcaggaatgaaatctgtttcaagcgtttcaatttcaatacaatttaataaacaggctttgagcatctacccccacccccttttggtttttttgcaagcacctggaggcagagctcatgtggagcttacaatttagtaggaacacaggcattaattacaaagtaattacaatgctgatgagtgtgttgaagtggagggggctatggggcttcagccccaaaaagctaaacctgcaggctaaaactttaaaaaaatatatttaattggcaaataaaaatagtatacatttatggtgtacaacatgttttgttatatgtatacactgtggaatcactaaatcgggctaattaacatatgcattatgtcacatatttatcattttgtaatggtgagaacatttaaaatctctgtgagcaattttcaagtataca

SEQ ID NO: 81590 - DNA, 183 bp, Homo sapiens
ggcagacacagctgtcagggtggttgacggcatgcgctctggagctgcctgcctggccttgcctcttgcctttcccgctcataagccatgtgcctcagtttcctcttatagagtgcatccaccttgcaggacctccatgagggtccaacaagtccttgcatgaaaaatgcccaaaatggtaaa

SEQ ID NO: 81591 - DNA, 766 bp, Homo sapiens
aaagttaaaaccctctccccttcagattaatgaaaatattaggatgcatagaacacaatgggcactggtgatatggcccatggtagctgaattagattgagtataaatgaagtcttcacataatagcgaagaggccaacagaagaaaggccagaaagccacttgaaactcatgtccatggaagaccaaatgaagttgatttaactgttcccttagaaagatattatcccattgcttagccctcaaagtgctcatactgctactttccttctttatatcaccagttctgggagcaaacctcctgaaagaatggaagtatagactgtaaatacaagactgtgggtacagcaaaggggctctgatgctctagttgtttgtgtctagatactgtcaaatgtcccttgtgatgcacaattgcccttagcggagaaccattaaccaaaataaatgaaataatatgtcatgttcatgcatcagaagacccaatgttgttaagatatcaattctctataagttgatctatagactcaatgtaaccccaatcaaataccccactggctttttgtctacatttacaagtgaattctgaaatgtatatggaaattcaaagaacctaacacaatgaaaacaattttgaataagaagagcaaagctcaagcatttgactacgtgatttcaaaacgtataaagctactgtaaccaaatcagtttggtattagtctaaagatggataagggaggctgaggcagtagaattgcttgaaccca

SEQ ID NO: 81592 - DNA, 452 bp, Homo sapiens
gaataatgcctgccccaagggaggtcttctttaacatctatttagtcatgtgttatttataaacagcttgaattaatactgtaaaatagacggatgtctaagaatctaggctgtagcctaaagctaaatgaacctgagggtagacaagttcactctgtattaaccaaaggataatgaatgagttcaccgctcagttcaataagcttcttctgaaatatgcttcctcctggacttctaagaaacaggccaaaagtttaattatcccttaaaacatgttaagcctaaatagaaaaaggaaattaatcatttatagattttctcttctttattatgattcagttggtgcatctgtagatggctaagaattttccaaaccacgtgaattcagagaggcaacacttttgttgttgttgtttttccaggtaatgagctcgctttgaaaaccagtcact

SEQ ID NO: 81593 - DNA, 3082 bp, Homo sapiens
  misc_feature (4)..(4): n is a, c, g, or t
  misc_feature (8)..(8): n is a, c, g, or t
  misc_feature (10)..(10): n is a, c, g, or t
  misc_feature (12)..(12): n is a, c, g, or t
  misc_feature (16)..(18): n is a, c, g, or t
gggncgancnangctnnngagccagcgaggagtgaagctgagcctggcctcacacgctcctagaggaccacctcctgagagagttctttcaccccctcttctttctccaagctcccctcctgctctccctccctgcccaatacaatgcattcttgagtggcagcgtctggactccaggcagccccagagaaccgaagcaagccaaagagaggactggagccaagatactggtgggggagattggatgcctggctttctttgaggacatctttggagcgagggtggctttggggtgggggcttgtgctgcagggaatacagccaggccccaagatggacacttctgggcacttccatgactcgggggtgggggacttggatgaagaccccaagtgcccctgtccatcctctggggatgagcagcagcagcagcagcagcagcaacagcagcagcagccaccaccgccagcgccaccagcagccccccagcagcccctgggaccctcgctgcagcctcagcctccgcagcttcagcagcagcagcagcagcagcagcagcagcagcagcagcagcagcagcagcagcagccaccgcatcccctgtctcagctcgcccaactccagagccagcccgtccaccctggcctgctgcactcctctcccaccgctttcagggcccccccttcgtccaactccaccgccatcctccacccttcctccaggcaaggcagccagctcaatctcaatgaccacttgcttggccactctccaagttccacagctacaagtgggcctggcggaggcagccggcaccgacaggccagccccctggtgcaccggcgggacagcaaccccttcacggagatcgccatgagctcctgcaagtatagcggtggggtcatgaagcccctcagccgcctcagcgcctcccggaggaacctcatcgaggccgagactgagggccaacccctccagcttttcagccctagcaaccccccggagatcgtcatctcctcccgggaggacaaccatgcccaccagaccctgctccatcaccctaatgccacccacaaccaccagcatgccggcaccaccgccagcagcaccaccttccccaaagccaacaagcggaaaaaccaaaacattggctataagctgggacacaggagggccctgtttgaaaagagaaagcgactgagtgactatgctctgatttttgggatgtttggaattgttgttatggtgatagagaccgagctctcttggggtttgtactcaaaggactccatgttttcgttggccctgaaatgccttatcagtctgtccaccatcatccttttgggcttgatcatcgcctaccacacacgtgaagtccagctcttcgtgatcgacaacggcgcggatgactggcggatagccatgacctacgagcgcatcctctacatcagcctggagatgctggtgtgcgccatccaccccattcctggcgagtacaagttcttctggacggcacgcctggccttctcctacacaccctcccgggcggaggccgatgtggacatcatcctgtctatccccatgttcctgcgcctgtacctgatcgcccgagtcatgctgctgcacagcaagctcttcaccgatgcctcgtcccgcagcatcggggccctcaacaagatcaacttcaacacccgctttgtcatgaagacgctcatgaccatctgccctggcactgtgctgctcgtgttcagcatctctctgtggatcattgctgcctggaccgtccgtgtctgtgaaaggtaccatgaccagcaggacgtaactagtaactttctgggtgccatgtggctcatctccatcacattcctttccattggttatggggacatggtgccccacacatactgtgggaaaggtgtctgtctcctcactggcatcatgggtgcaggctgcactgcccttgtggtggccgtggtggcccgaaagctggaactcaccaaagcggagaagcacgttcataacttcatgatggacactcagctcaccaagcggatcaagaatgctgcagccaatgtccttcgggaaacatggttaatctataaacacacaaagctgctaaagaagattgaccatgccaaagtgaggaaacaccagaggaagttcctccaagctatccaccagttgaggagcgtcaagatggaacagaggaagctgagtgaccaagccaacactctggtggacctttccaagatgcagaatgtcatgtatgacttaatcacagaactcaatgaccggagcgaagacctggagaagcagattggcagcctggagtcgaagctggagcatctcaccgccagcttcaactccctgccgctgctcatcgccgacaccctgcgccagcagcagcagcagctcctgtctgccatcatcgaggcccggggtgtcagcgtggcagtgggcaccacccacaccccaatctccgatagccccattggggtcagctccacctccttcccgaccccgtacacaagttcaagcagttgctaaataaatctccccactccagaagcattacccataggtcttaagatgcaaatcaactctctcctggtcgctttgccatcaagaaacattcagaccagggaacggaaagaagagagaccgagctaattaactaactcatgttcattcagcgtgcttggtccgacatgccttgaaaccagaaatctaatctctgtttaggtgcctctacttgggagcgggaagaggagatgacaggaagcgacgcctctggcagggcccttgctgcagagttggtggagaacagaaatccacgctcaatctcaggtcttcacgcggggggtgggggtcagatgcactgaagtagccaacagcgaagccagtccagaagaggggtccgctgggagggagggttgtgtcaggcttgggggatgggctcttcgccatgggggtctttgaacacacctctctcctttccttttgtctacggaagcctctgggtgacaaaagtaaaagagagctgcccacaacttgccaaaacagatatactcgaatcagactgaaaa

SEQ ID NO: 81594 - DNA, 1168 bp, Homo sapiens
tgaaggatccctattgactctgcagggtttgatttcagtaccttagacagctatctggtgacttcccagtaggcacgaacaaccccttctctccccttgcagtcggtgggcttgatgacgccccagacagtatcctttccttctctactgccgccaaaataaacattagggaaatgggatcattaacaccactgagaaaggagtttacagggatcgcaatagtaactgtctgcttgtggtagtagaaagcttgtgccaggctgcatgaatagaaattaatgttaaactcctgttagacgagtaatatgtagatttttattgaaacagaccacagcttattaaaaagtactcagtgcaatggtatatacatatatacagatagaaaaaaatataactgtgatctttttgtcttacgccattactggaaacacccaaacgtgaactggagttccctctgaacaaaaccattgtcaaatcttcaacatatgacctccaaatctaggtgccaagtgccctgtgacagttgtttacacacctgaaaaatgtatcctggaagctgtaatcttgggcctgggctatgtgttgaaacaagcaaaagagacacatcgtgaccaaccaagctggtggaggaaaagcacaaaattcaactccaacctgcagttaggatcccaaagagatgttgacatttatagccaaaaagaaaaagtacatatatatatatatatatatatatatatatatatatatatatatatatctgaatcagatcgaagcagccaacgtccagcttcactcaagaaggacaaggaataaacaacattctctagctgtgtcatgttgtctcagtttttgaatctcaaccaggactgatccaccttcatcagatacgttttttaatggcgcaacaactcaattttggtcccagactctccattctgcactggccacgagaacaacaagagaatgacaggatgttaatggaggaaacattttcatggcaagctcagaaactgaagtgtttatattcagaatcagatgagctttaatatgaatttgcatcttgcctctgtactgcttgctattttttaatgataggagaaagcataacagtttattttaaatatgaaatatattgatatattataaaatatattgtaactttcaatta

SEQ ID NO: 81595 - DNA, 3509 bp, Homo sapiens
  misc_feature (4)..(4): n is a, c, g, or t
  misc_feature (8)..(8): n is a, c, g, or t
  misc_feature (10)..(10): n is a, c, g, or t
  misc_feature (12)..(12): n is a, c, g, or t
  misc_feature (16)..(18): n is a, c, g, or t
gggncgancnangctnnngagccagcgaggagtgaagctgagcctggcctcacacgctcctagaggaccacctcctgagagagttctttcaccccctcttctttctccaagctcccctcctgctctccctccctgcccaatacaatgcattcttgagtggcagcgtctggactccaggcagccccagagaaccgaagcaagccaaagagaggactggagccaagatactggtgggggagattggatgcctggctttctttgaggacatctttggagcgagggtggctttggggtgggggcttgtgctgcagggaatacagccaggccccaagatggacacttctgggcacttccatgactcgggggtgggggacttggatgaagaccccaagtgcccctgtccatcctctggggatgagcagcagcagcagcagcagcagcaacagcagcagcagccaccaccgccagcgccaccagcagccccccagcagcccctgggaccctcgctgcagcctcagcctccgcagcttcagcagcagcagcagcagcagcagcagcagcagcagcagcagcagcagcagcagcagccaccgcatcccctgtctcagctcgcccaactccagagccagcccgtccaccctggcctgctgcactcctctcccaccgctttcagggcccccccttcgtccaactccaccgccatcctccacccttcctccaggcaaggcagccagctcaatctcaatgaccacttgcttggccactctccaagttccacagctacaagtgggcctggcggaggcagccggcaccgacaggccagccccctggtgcaccggcgggacagcaaccccttcacggagatcgccatgagctcctgcaagtatagcggtggggtcatgaagcccctcagccgcctcagcgcctcccggaggaacctcatcgaggccgagactgagggccaacccctccagcttttcagccctagcaaccccccggagatcgtcatctcctcccgggaggacaaccatgcccaccagaccctgctccatcaccctaatgccacccacaaccaccagcatgccggcaccaccgccagcagcaccaccttccccaaagccaacaagcggaaaaaccaaaacattggctataagctgggacacaggagggccctgtttgaaaagagaaagcgactgagtgactatgctctgatttttgggatgtttggaattgttgttatggtgatagagaccgagctctcttggggtttgtactcaaaggactccatgttttcgttggccctgaaatgccttatcagtctgtccaccatcatccttttgggcttgatcatcgcctaccacacacgtgaagtccagctcttcgtgatcgacaacggcgcggatgactggcggatagccatgacctacgagcgcatcctctacatcagcctggagatgctggtgtgcgccatccaccccattcctggcgagtacaagttcttctggacggcacgcctggccttctcctacacaccctcccgggcggaggccgatgtggacatcatcctgtctatccccatgttcctgcgcctgtacctgatcgcccgagtcatgctgctgcacagcaagctcttcaccgatgcctcgtcccgcagcatcggggccctcaacaagatcaacttcaacacccgctttgtcatgaagacgctcatgaccatctgccctggcactgtgctgctcgtgttcagcatctctctgtggatcattgctgcctggaccgtccgtgtctgtgaaaggtaccatgaccagcaggacgtaactagtaactttctgggtgccatgtggctcatctccatcacattcctttccattggttatggggacatggtgccccacacatactgtgggaaaggtgtctgtctcctcactggcatcatgggtgcaggctgcactgcccttgtggtggccgtggtggcccgaaagctggaactcaccaaagcggagaagcacgttcataacttcatgatggacactcagctcaccaagcggatcaagaatgctgcagccaatgtccttcgggaaacatggttaatctataaacacacaaagctgctaaagaagattgaccatgccaaagtgaggaaacaccagaggaagttcctccaagctatccaccagttgaggagcgtcaagatggaacagaggaagctgagtgaccaagccaacactctggtggacctttccaagatgcagaatgtcatgtatgacttaatcacagaactcaatgaccggagcgaagacctggagaagcagattggcagcctggagtcgaagctggagcatctcaccgccagcttcaactccctgccgctgctcatcgccgacaccctgcgccagcagcagcagcagctcctgtctgccatcatcgaggcccggggtgtcagcgtggcagtgggcaccacccacaccccaatctccgatagccccattggggtcagctccacctccttcccgaccccgtacacaagttcaagcagttgctaaataaatctccccactccagaagcattacccataggtcttaagatgcaaatcaactctctcctggtcgctttgccatcaagaaacattcagaccagggaacggaaagaagagagaccgagctaattaactaactcatgttcattcagcgtgcttggtccgacatgccttgaaaccagaaatctaatctctgtttaggtgcctctacttgggagcgggaagaggagatgacaggaagcgacgcctctggcagggcccttgctgcagagttggtggagaacagaaatccacgctcaatctcaggtgccaagtgccctgtgacagttgtttacacacctgaaaaatgtatcctggaagctgtaatcttgggcctgggctatgtgttgaaacaagcaaaagagacacatcgtgaccaaccaagctggtggaggaaaagcacaaaattcaactccaacctgcagttaggatcccaaagagatgttgacatttatagccaaaaagaaaaagtacatatatatatatatatatatatatatatatatatatatatatatatatctgaatcagatcgaagcagccaacgtccagcttcactcaagaaggacaaggaataaacaacattctctagctgtgtcatgttgtctcagtttttgaatctcaaccaggactgatccaccttcatcagatacgttttttaatggcgcaacaactcaattttggtcccagactctccattctgcactggccacgagaacaacaagagaatgacaggatgttaatggaggaaacattttcatggcaagctcagaaactgaagtgtttatattcagaatcagatgagctttaatatgaatttgcatcttgcctctgtactgcttgctattttttaatgataggagaaagcataacagtttattttaaatatgaaatatattgatatattataaaatatattgtaactttcaatta

SEQ ID NO: 81596 - DNA, 2004 bp, Homo sapiens
cacaacgcagaaaaaaagaaacatctatcggctaggtacgaggctgggtggtgcaggaaagtcagcttgaaggacactccttgcagggactgagctggcacctactccttagagcttgctgataccaggcctgccacgcgacatctgcaaggacagttgtttggtgttttgcttcaggttatagatggagagacctataaaggactccatgttttcgttggccctgaaatgccttatcagtctgtccaccatcatccttttgggcttgatcatcgcctaccacacacgtgaagtccagctcttcgtgatcgacaacggcgcggatgactggcggatagccatgacctacgagcgcatcctctacatcagcctggagatgctggtgtgcgccatccaccccattcctggcgagtacaagttcttctggacggcacgcctggccttctcctacacaccctcccgggcggaggccgatgtggacatcatcctgtctatccccatgttcctgcgcctgtacctgatcgcccgagtcatgctgctgcacagcaagctcttcaccgatgcctcgtcccgcagcatcggggccctcaacaagatcaacttcaacacccgctttgtcatgaagacgctcatgaccatctgccctggcactgtgctgctcgtgttcagcatctctctgtggatcattgctgcctggaccgtccgtgtctgtgaaaggtaccatgaccagcaggacgtaactagtaactttctgggtgccatgtggctcatctccatcacattcctttccattggttatggggacatggtgccccacacatactgtgggaaaggtgtctgtctcctcactggcatcatgggtgcaggctgcactgcccttgtggtggccgtggtggcccgaaagctggaactcaccaaagcggagaagcacgttcataacttcatgatggacactcagctcaccaagcggatcaagaatgctgcagccaatgtccttcgggaaacatggttaatctataaacacacaaagctgctaaagaagattgaccatgccaaagtgaggaaacaccagaggaagttcctccaagctatccaccagttgaggagcgtcaagatggaacagaggaagctgagtgaccaagccaacactctggtggacctttccaagatgcagaatgtcatgtatgacttaatcacagaactcaatgaccggagcgaagacctggagaagcagattggcagcctggagtcgaagctggagcatctcaccgccagcttcaactccctgccgctgctcatcgccgacaccctgcgccagcagcagcagcagctcctgtctgccatcatcgaggcccggggtgtcagcgtggcagtgggcaccacccacaccccaatctccgatagccccattggggtcagctccacctccttcccgaccccgtacacaagttcaagcagttgctaaataaatctccccactccagaagcattacccataggtcttaagatgcaaatcaactctctcctggtcgctttgccatcaagaaacattcagaccagggaacggaaagaagagagaccgagctaattaactaactcatgttcattcagcgtgcttggtccgacatgccttgaaaccagaaatctaatctctgtttaggtgcctctacttgggagcgggaagaggagatgacaggaagcgacgcctctggcagggcccttgctgcagagttggtggagaacagaaatccacgctcaatctcaggtcttcacgcggggggtgggggtcagatgcactgaagtagccaacagcgaagccagtccagaagaggggtccgctgggagggagggttgtgtcaggcttgggggatgggctcttcgccatgggggtctttgaacacacctctctcctttccttttgtctacggaagcctctgggtgacaaaagtaaaagagagctgcccacaacttgccaaaacagatatactcgaatcagactgaaaa

SEQ ID NO: 81597 - DNA, 1921 bp, Homo sapiens
gatggagaacagcaggcactggctttagcggggagctggccccactgctccagcctctcagtccagccccaagacggaggagggggtttccctcccagagggagtggagatggaggaaggactccatgttttcgttggccctgaaatgccttatcagtctgtccaccatcatccttttgggcttgatcatcgcctaccacacacgtgaagtccagctcttcgtgatcgacaacggcgcggatgactggcggatagccatgacctacgagcgcatcctctacatcagcctggagatgctggtgtgcgccatccaccccattcctggcgagtacaagttcttctggacggcacgcctggccttctcctacacaccctcccgggcggaggccgatgtggacatcatcctgtctatccccatgttcctgcgcctgtacctgatcgcccgagtcatgctgctgcacagcaagctcttcaccgatgcctcgtcccgcagcatcggggccctcaacaagatcaacttcaacacccgctttgtcatgaagacgctcatgaccatctgccctggcactgtgctgctcgtgttcagcatctctctgtggatcattgctgcctggaccgtccgtgtctgtgaaaggtaccatgaccagcaggacgtaactagtaactttctgggtgccatgtggctcatctccatcacattcctttccattggttatggggacatggtgccccacacatactgtgggaaaggtgtctgtctcctcactggcatcatgggtgcaggctgcactgcccttgtggtggccgtggtggcccgaaagctggaactcaccaaagcggagaagcacgttcataacttcatgatggacactcagctcaccaagcggatcaagaatgctgcagccaatgtccttcgggaaacatggttaatctataaacacacaaagctgctaaagaagattgaccatgccaaagtgaggaaacaccagaggaagttcctccaagctatccaccagttgaggagcgtcaagatggaacagaggaagctgagtgaccaagccaacactctggtggacctttccaagatgcagaatgtcatgtatgacttaatcacagaactcaatgaccggagcgaagacctggagaagcagattggcagcctggagtcgaagctggagcatctcaccgccagcttcaactccctgccgctgctcatcgccgacaccctgcgccagcagcagcagcagctcctgtctgccatcatcgaggcccggggtgtcagcgtggcagtgggcaccacccacaccccaatctccgatagccccattggggtcagctccacctccttcccgaccccgtacacaagttcaagcagttgctaaataaatctccccactccagaagcattacccataggtcttaagatgcaaatcaactctctcctggtcgctttgccatcaagaaacattcagaccagggaacggaaagaagagagaccgagctaattaactaactcatgttcattcagcgtgcttggtccgacatgccttgaaaccagaaatctaatctctgtttaggtgcctctacttgggagcgggaagaggagatgacaggaagcgacgcctctggcagggcccttgctgcagagttggtggagaacagaaatccacgctcaatctcaggtcttcacgcggggggtgggggtcagatgcactgaagtagccaacagcgaagccagtccagaagaggggtccgctgggagggagggttgtgtcaggcttgggggatgggctcttcgccatgggggtctttgaacacacctctctcctttccttttgtctacggaagcctctgggtgacaaaagtaaaagagagctgcccacaacttgccaaaacagatatactcgaatcagactgaaaa

SEQ ID NO: 81598 - DNA, 311 bp, Homo sapiens
gtattccacatggggctttctgagtacagagcctgtgctgggacagggaagggaggaggagtaggggtgccaggaagtatgtggtctgatggaggagacaggcatgtacccagacacctgaaaggagacaatgggaaagaggggagtgctgagttggggttcagtatgagctagaattgcagcattggaaccaaagtaaggtgggaaaaaggcacagaattttcctgattttctgttccttctttgcaaaccaatatatcaaagcattctggttacatcagtaactcacatataacacattgcaacttact

SEQ ID NO: 81599 - DNA, 3248 bp, Homo sapiens
  misc_feature (4)..(4): n is a, c, g, or t
  misc_feature (8)..(8): n is a, c, g, or t
  misc_feature (10)..(10): n is a, c, g, or t
  misc_feature (12)..(12): n is a, c, g, or t
  misc_feature (16)..(18): n is a, c, g, or t
gggncgancnangctnnngagccagcgaggagtgaagctgagcctggcctcacacgctcctagaggaccacctcctgagagagttctttcaccccctcttctttctccaagctcccctcctgctctccctccctgcccaatacaatgcattcttgagtggcagcgtctggactccaggcagccccagagaaccgaagcaagccaaagagaggactggagccaagatactggtgggggagattggatgcctggctttctttgaggacatctttggagcgagggtggctttggggtgggggcttgtgctgcagggaatacagccaggccccaagatggacacttctgggcacttccatgactcgggggtgggggacttggatgaagaccccaagtgcccctgtccatcctctggggatgagcagcagcagcagcagcagcagcaacagcagcagcagccaccaccgccagcgccaccagcagccccccagcagcccctgggaccctcgctgcagcctcagcctccgcagcttcagcagcagcagcagcagcagcagcagcagcagcagcagcagccaccgcatcccctgtctcagctcgcccaactccagagccagcccgtccaccctggcctgctgcactcctctcccaccgctttcagggcccccccttcgtccaactccaccgccatcctccacccttcctccaggcaaggcagccagctcaatctcaatgaccacttgcttggccactctccaagttccacagctacaagtgggcctggcggaggcagccggcaccgacaggccagccccctggtgcaccggcgggacagcaaccccttcacggagatcgccatgagctcctgcaagtatagcggtggggtcatgaagcccctcagccgcctcagcgcctcccggaggaacctcatcgaggccgagactgagggccaacccctccagcttttcagccctagcaaccccccggagatcgtcatctcctcccgggaggacaaccatgcccaccagaccctgctccatcaccctaatgccacccacaaccaccagcatgccggcaccaccgccagcagcaccaccttccccaaagccaacaagcggaaaaaccaaaacattggctataagctgggacacaggagggccctgtttgaaaagagaaagcgactgagtgactatgctctgatttttgggatgtttggaattgttgttatggtgatagagaccgagctctcttggggtttgtactcaaaggactccatgttttcgttggccctgaaatgccttatcagtctgtccaccatcatccttttgggcttgatcatcgcctaccacacacgtgaagtccagctcttcgtgatcgacaacggcgcggatgactggcggatagccatgacctacgagcgcatcctctacatcagcctggagatgctggtgtgcgccatccaccccattcctggcgagtacaagttcttctggacggcacgcctggccttctcctacacaccctcccgggcggaggccgatgtggacatcatcctgtctatccccatgttcctgcgcctgtacctgatcgcccgagtcatgctgctgcacagcaagctcttcaccgatgcctcgtcccgcagcatcggggccctcaacaagatcaacttcaacacccgctttgtcatgaagacgctcatgaccatctgccctggcactgtgctgctcgtgttcagcatctctctgtggatcattgctgcctggaccgtccgtgtctgtgaaaggtaccatgaccagcaggacgtaactagtaactttctgggtgccatgtggctcatctccatcacattcctttccattggttatggggacatggtgccccacacatactgtgggaaaggtgtctgtctcctcactggcatcatgggtgcaggctgcactgcccttgtggtggccgtggtggcccgaaagctggaactcaccaaagcggagaagcacgttcataacttcatgatggacactcagctcaccaagcggatcaagaatgctgcagccaatgtccttcgggaaacatggttaatctataaacacacaaagctgctaaagaagattgaccatgccaaagtgaggaaacaccagaggaagttcctccaagctatccaccagttgaggagcgtcaagatggaacagaggaagctgagtgaccaagccaacactctggtggacctttccaagatgcagaatgtcatgtatgacttaatcacagaactcaatgaccggagcgaagacctggagaagcagattggcagcctggagtcgaagctggagcatctcaccgccagcttcaactccctgccgctgctcatcgccgacaccctgcgccagcagcagcagcagctcctgtctgccatcatcgaggcccggggtgtcagcgtggcagtgggcaccacccacaccccaatctccgatagccccattggggtgcctctacttgggagcgggaagaggagatgacaggaagcgacgcctctggcagggcccttgctgcagagttggtggagaacagaaatccacgctcaatctcaggtgccaagtgccctgtgacagttgtttacacacctgaaaaatgtatcctggaagctgtaatcttgggcctgggctatgtgttgaaacaagcaaaagagacacatcgtgaccaaccaagctggtggaggaaaagcacaaaattcaactccaacctgcagttaggatcccaaagagatgttgacatttatagccaaaaagaaaaagtacatatatatatatatatatatatatatatatatatatatatatatatatctgaatcagatcgaagcagccaacgtccagcttcactcaagaaggacaaggaataaacaacattctctagctgtgtcatgttgtctcagtttttgaatctcaaccaggactgatccaccttcatcagatacgttttttaatggcgcaacaactcaattttggtcccagactctccattctgcactggccacgagaacaacaagagaatgacaggatgttaatggaggaaacattttcatggcaagctcagaaactgaagtgtttatattcagaatcagatgagctttaatatgaatttgcatcttgcctctgtactgcttgctattttttaatgataggagaaagcataacagtttattttaaatatgaaatatattgatatattataaaatatattgtaactttcaatta

SEQ ID NO: 81600 - DNA, 1973 bp, Homo sapiens
gtgctgctcagtgtcaaatgaacaggaaagtcagcttgaaggacactccttgcagggactgagctggcacctactccttagagcttgctgataccaggcctgccacgcgacatctgcaaggacagttgtttggtgttttgcttcaggttatagatggagagacctataaaggactccatgttttcgttggccctgaaatgccttatcagtctgtccaccatcatccttttgggcttgatcatcgcctaccacacacgtgaagtccagctcttcgtgatcgacaacggcgcggatgactggcggatagccatgacctacgagcgcatcctctacatcagcctggagatgctggtgtgcgccatccaccccattcctggcgagtacaagttcttctggacggcacgcctggccttctcctacacaccctcccgggcggaggccgatgtggacatcatcctgtctatccccatgttcctgcgcctgtacctgatcgcccgagtcatgctgctgcacagcaagctcttcaccgatgcctcgtcccgcagcatcggggccctcaacaagatcaacttcaacacccgctttgtcatgaagacgctcatgaccatctgccctggcactgtgctgctcgtgttcagcatctctctgtggatcattgctgcctggaccgtccgtgtctgtgaaaggtaccatgaccagcaggacgtaactagtaactttctgggtgccatgtggctcatctccatcacattcctttccattggttatggggacatggtgccccacacatactgtgggaaaggtgtctgtctcctcactggcatcatgggtgcaggctgcactgcccttgtggtggccgtggtggcccgaaagctggaactcaccaaagcggagaagcacgttcataacttcatgatggacactcagctcaccaagcggatcaagaatgctgcagccaatgtccttcgggaaacatggttaatctataaacacacaaagctgctaaagaagattgaccatgccaaagtgaggaaacaccagaggaagttcctccaagctatccaccagttgaggagcgtcaagatggaacagaggaagctgagtgaccaagccaacactctggtggacctttccaagatgcagaatgtcatgtatgacttaatcacagaactcaatgaccggagcgaagacctggagaagcagattggcagcctggagtcgaagctggagcatctcaccgccagcttcaactccctgccgctgctcatcgccgacaccctgcgccagcagcagcagcagctcctgtctgccatcatcgaggcccggggtgtcagcgtggcagtgggcaccacccacaccccaatctccgatagccccattggggtcagctccacctccttcccgaccccgtacacaagttcaagcagttgctaaataaatctccccactccagaagcattacccataggtcttaagatgcaaatcaactctctcctggtcgctttgccatcaagaaacattcagaccagggaacggaaagaagagagaccgagctaattaactaactcatgttcattcagcgtgcttggtccgacatgccttgaaaccagaaatctaatctctgtttaggtgcctctacttgggagcgggaagaggagatgacaggaagcgacgcctctggcagggcccttgctgcagagttggtggagaacagaaatccacgctcaatctcaggtcttcacgcggggggtgggggtcagatgcactgaagtagccaacagcgaagccagtccagaagaggggtccgctgggagggagggttgtgtcaggcttgggggatgggctcttcgccatgggggtctttgaacacacctctctcctttccttttgtctacggaagcctctgggtgacaaaagtaaaagagagctgcccacaacttgccaaaacagatatactcgaatcagactgaaaa

SEQ ID NO: 81601 - DNA, 2555 bp, Homo sapiens
  misc_feature (4)..(4): n is a, c, g, or t
  misc_feature (8)..(8): n is a, c, g, or t
  misc_feature (10)..(10): n is a, c, g, or t
  misc_feature (12)..(12): n is a, c, g, or t
  misc_feature (16)..(18): n is a, c, g, or t
gggncgancnangctnnngagccagcgaggagtgaagctgagcctggcctcacacgctcctagaggaccacctcctgagagagttctttcaccccctcttctttctccaagctcccctcctgctctccctccctgcccaatacaatgcattcttgagtggcagcgtctggactccaggcagccccagagaaccgaagcaagccaaagagaggactggagccaagatactggtgggggagattggatgcctggctttctttgaggacatctttggagcgagggtggctttggggtgggggcttgtgctgcagggaatacagccaggccccaagatggacacttctgggcacttccatgactcgggggtgggggacttggatgaagaccccaagtgcccctgtccatcctctggggatgagcagcagcagcagcagcagcagcaacagcagcagcagccaccaccgccagcgccaccagcagccccccagcagcccctgggaccctcgctgcagcctcagcctccgcagcttcagcagcagcagcagcagcagcagcagcagcagcagcagcagccaccgcatcccctgtctcagctcgcccaactccagagccagcccgtccaccctggcctgctgcactcctctcccaccgctttcagggcccccccttcgtccaactccaccgccatcctccacccttcctccaggcaaggcagccagctcaatctcaatgaccacttgcttggccactctccaagttccacagctacaagtgggcctggcggaggcagccggcaccgacaggccagccccctggtgcaccggcgggacagcaaccccttcacggagatcgccatgagctcctgcaagtatagcggtggggtcatgaagcccctcagccgcctcagcgcctcccggaggaacctcatcgaggccgagactgagggccaacccctccagcttttcagccctagcaaccccccggagatcgtcatctcctcccgggaggacaaccatgcccaccagaccctgctccatcaccctaatgccacccacaaccaccagcatgccggcaccaccgccagcagcaccaccttccccaaagccaacaagcggaaaaaccaaaacattggctataagctgggacacaggagggccctgtttgaaaagagaaagcgactgagtgactatgctctgatttttgggatgtttggaattgttgttatggtgatagagaccgagctctcttggggtttgtactcaaaggactccatgttttcgttggccctgaaatgccttatcagtctgtccaccatcatccttttgggcttgatcatcgcctaccacacacgtgaagtccagctcttcgtgatcgacaacggcgcggatgactggcggatagccatgacctacgagcgcatcctctacatcagcctggagatgctggtgtgcgccatccaccccattcctggcgagtacaagttcttctggacggcacgcctggccttctcctacacaccctcccgggcggaggccgatgtggacatcatcctgtctatccccatgttcctgcgcctgtacctgatcgcccgagtcatgctgctgcacagcaagctcttcaccgatgcctcgtcccgcagcatcggggccctcaacaagatcaacttcaacacccgctttgtcatgaagacgctcatgaccatctgccctggcactgtgctgctcgtgttcagcatctctctgtggatcattgctgcctggaccgtccgtgtctgtgaaaggtaccatgaccagcaggacgtaactagtaactttctgggtgccatgtggctcatctccatcacattcctttccattggttatggggacatggtgccccacacatactgtgggaaaggtgtctgtctcctcactggcatcatgggtgcaggctgcactgcccttgtggtggccgtggtggcccgaaagctggaactcaccaaagcggagaagcacgttcataacttcatgatggacactcagctcaccaagcggatcaagaatgctgcagccaatgtccttcgggaaacatggttaatctataaacacacaaagctgctaaagaagattgaccatgccaaagtgaggaaacaccagaggaagttcctccaagctatccaccagttgaggagcgtcaagatggaacagaggaagctgagtgaccaagccaacactctggtggacctttccaagatgcagaatgtcatgtatgacttaatcacagaactcaatgaccggagcgaagacctggagaagcagattggcagcctggagtcgaagctggagcatctcaccgccagcttcaactccctgccgctgctcatcgccgacaccctgcgccagcagcagcagcagctcctgtctgccatcatcgaggcccggggtgtcagcgtggcagtgggcaccacccacaccccaatctccgatagccccattggggtcagctccacctccttcccgaccccgtacacaagttcaagcagttgctaaataaatctccccactccagaagcatta

SEQ ID NO: 81602 - DNA, 4789 bp, Homo sapiens
  misc_feature (67)..(67): n is a, c, g, or t
agaatatgttgcttaagtccaactgtgttttggaagcttttggaaatgccaaaaccaaccgtaatgncaactcaagcaggtttggaaaatacatggatatcaactttgacttcaagggtgaccctattggtgggcatatcaataactacttactagaaaagtctcgagtgattgtgcaacagccaggagaaagaagctttcattctttctatcagctactccaaggaggttcagaacaaatgctacgctctctacatctccagaaatccctttcatcctacaactatattcatgtgggagctcaattaaagtcttctatcaatgatgctgccgaattcagagttgttgctgatgccatgaaagtcattggcttcaaacctgaggagatccaaacagtgtataagattttggctgctattctgcacttgggaaatttaaaatttgtagtagatggtgacacgcctcttattgagaatggcaaagtagtatctatcatagcagaattgctctctactaagacagatatggttgagaaagcccttctttaccggactgtggccacaggccgtgacatcattgacaagcagcacacagaacaagaggccagctacggcagagacgcctttgccaaggcaatatatgagcgccttttttgttggatcgttactcgcatcaatgatattattgaggtcaagaactatgacaccacaatccatgggaaaaacactgttattggtgtcttggatatctatggctttgaaatctttgacaacaacagttttgaacaattctgtatcaattactgcaatgagaaactgcagcagctatttattcagctggttctgaagcaagaacaagaggaataccagcgggaagggatcccctggaaacatattgactacttcaacaatcagatcattgttgacctcgtggagcaacagcacaaagggatcattgcaatccttgatgatgcttgcatgaatgtcggcaaagtcaccgatgaaatgtttcttgaagcacttaacagtaaattgggcaaacacgcccatttttccagccgaaagctctgtgcctcagacaaaattctggagtttgatcgagattttcgaattcgacattatgcaggcgatgtagtctattctgtcattggttttattgacaaaaataaagatactttatttcaagatttcaagcgccttatgtataacagttcaaatcctgtgctcaagaatatgtggcctgaaggcaaactgagcattacagaggtgaccaagcgacctctgactgctgctaccttgtttaagaattctatgattgctctagtagacaaccttgcatcaaaggaaccatattacgttcgttgcatcaaacccaatgacaagaaatctccacagatatttgatgatgaacgctgccggcaccaagtagaatatcttggactactggaaaatgtgagagtgcgtcgggcaggatttgccttccgccagacatacgagaagtttcttcacaggtataagatgatctctgaattcacctggcccaaccatgaccttccttcagacaaagaggctgtcaagaaactaattgaacggtgtggttttcaggatgatgtagcttatgggaagaccaaaattttcattcgaacaccccgaacattgtttaccttggaagaactccgtgcccagatgctcataaggattgtcctctttctacaaaaggtgtggcggggcaccctggcccgcatgcggtacaaaagaaccaaggcagctctgacaataatcaggtactaccggcgctacaaagtgaagtcgtacatccacgaggtggccagacgcttccatggcgtcaagaccatgcgagactacgggaagcacgtgaagtggccaagccctcctaaagttcttcgccgttttgaggaggccctgcagacgattttcaatagatggagagcatcccagctcatcaagagcattccggcctcagacctgccccaggtcagggcaaaggttgcagccgtggaaatgttgaagggtcaaagggctgacctcgggctccagagggcctgggagggcaactatcttgcttcaaagccagatacacctcagacctcaggcacttttgtccctgttgctaatgaattgaaacggaaggacaaatacatgaatgtcctcttttcctgtcacgtccgtaaggtaaatcgatttagtaaggtggaagacagagcaatttttgtcactgaccgtcacctgtataaaatggatcccactaaacagtacaaggtgatgaagactatccctctatacaatttgactggtctgagtgtctccaatggaaaggaccaacttgtagtgttccatacgaaagacaacaaagacctcattgtctgcctcttcagcaaacagccaacccatgagagtcgaattggagaacttgttggagtgctggtgaatcatttcaagagtgagaagcgccaccttcaagtgaacgtcaccaacccagtacagtgcagcctgcacgggaagaagtgcaccgtctccgtggagacgcggctcaaccagccccagcccgacttcaccaagaatcgctcgggcttcatcctcagcgtgcccgggaactgacgccccgcggaggcctggcccggagcccggccacactccgagtcctgggtcccagtccagctgctgcctcccaacccatgcccgctagaaacctgctgcgagggcccctcccagaggagccccgcccctgtaagatttccttcctggttttctgcctttggtatcatcttcctctgtccttactgtccacggtccctgttcaataagccaaagaccctggtgccccgcccagacccctgggctgacgtccagaccaatctcaccccagaggcaactggatggtgcctttagttggtgcggatgccccgtggccaggtcaagtcagagcacctggacaggtgtcctccctgctgctgaccctgcagagggaaggggtggggatgcaggaccccgctctgcgggagccccatagccacctctcttgcccaaggtgagccagccctggggacccagctcagggaggctctgctcagagttcggcggacccaccccaacccaactcccagccgccagccaaagccactgggtgagcagagtcacccacagggccagcccctcagccaggagccagtggcaggagcggaacagcccatccagcagagtgagtccatccttcccaggttctcccctgggagactccctttgccaccaaggcccccaccagggcctctgaccaccgctctggagaggacagtgtggcatgctccaaggatcatcttacttaactcgcagcctgtggctgtggtcctcttatagatactttcaccgtttgcagggttgctaatcagatacctgctgtcaccacacttgggtcaggaaccctaatgagaacggggagctgccagggtgagggcagccctcagggtcggccgctttccctctggaccacctcccgctgcgtttcctactcagagaaacagcaagggcggggtcaagacacgggatgacgggaagcaggaagcggggcagcagcacagcgtggggtcctggcactgcaggccaggccaggatgcccaccccgccctctacacggccccttggggcctgcgcccgtgaaactggtgccagggagcactgccagcttgccagtttctgcccagcaaaagcacgtatgcttcaggggccttctgagaccaccttccccactgagccccagctgctgagaaggccttgagggaagtagaggctgggagcaaatgccccatgcggtgagaggatgaggggagcctacgcctcaggcatgtggtgagaggatgagggggagggagccaacgcctcaggtggagtgggcagaggtgcaagagagggatgtactgaagcttcttcccgtcctgccacagacacttctcctgccttcccaccctgacccggcagaacccaccaagtgcctgtgtgcagcctcctgtgcctcacccagggcctgaccccagagtggtcccaacaacccggtctcatgcccactccccatccctgcttcccaaaaattgcactgtgtgcagtttgcaacaaagaatcccgctggcatcctgtccttgggaaccctttctcattctccaagcctggtcagctgcctgcacaggcagaggtgccctcagcccagattagcaacactcatagttttgccaattaccagtagacactagtggaaccatctaactggaacttcctctctccttccacttatttcctcaaacttgttgctttacactagacacatgcaaatgtatgttttaaacacaccaaaacagatcatgccaaatgagttgcctgtcaaaggctggagggcaggaggagggcctgggtttgggttctttcctcccagcctttggatggtgccttgggccccttagccccagcgccagggcctcccagctgaggccacaggacaagcacttttttatgatgtactaaaagccacagtatgtggcaactgcaaaaggatcaggaatttagggtatgatctcggtcacgtgtcccgggcgctgaggggaaaggaagcgggcatgattgtagacaatgagggggttctcttgatgtaatgaaatgcaattttatggtttggtgcaaaaactcctattttccagtaaattaactttatttctaaagcatattttgatttgccatcaagagcaataaagcattaaatcttatttttaaaaaaaagttctgct

SEQ ID NO: 81603 - DNA, 423 bp, Homo sapiens
ttgggccccttagccccaggcaccatccaaaggctgggaggaaagaacccaaacccaggccctcctcctcccagcctttggatggtgccttgggccccttagccccagcgccagggcctcccagctgaggccacaggacaagcacttttttatgatgtactaaaagccacagtatgtggcaactgcaaaaggatcaggaatttagggtatgatctcggtcacgtgtcccgggcgctgaggggaaaggaagcgggcatgattgtagacaatgagggggttctcttgatgtaatgaaatgcaattttatggtttggtgcaaaaactcctattttccagtaaattaactttatttctaaagcatattttgatttgccatcaagagcaataaagcattaaatcttatttttaaaaaaaagttctgct

SEQ ID NO: 81604 - DNA, 327 bp, Homo sapiens
  misc_feature (6)..(6): n is a, c, g, or t
  misc_feature (14)..(14): n is a, c, g, or t
  misc_feature (95)..(95): n is a, c, g, or t
gcagtntggggaanaaatcacaaacacttacttggagaaacagagaccatagtgtagattttacaaaatcacttttaaaatctctgtattgtgcncctcaaatacctagagccagtctttgcataaaatatcacagcgctgaggggaaaggaagcgggcatgattgtagacaatgagggggttctcttgatgtaatgaaatgcaattttatggtttggtgcaaaaactcctattttccagtaaattaactttatttctaaagcatattttgatttgccatcaagagcaataaagcattaaatcttatttttaaaaaaaagttctgct

SEQ ID NO: 81605 - DNA, 2447 bp, Homo sapiens
ctggagatacacggagcccagaggaagcagggagggtggaggcaggggccaccctgctgagcgggagtcaggagagccctgcacggaggagcatgccccgattgtctgaacacgagaggtgagaagcgccaccttcaagtgaacgtcaccaacccagtacagtgcagcctgcacgggaagaagtgcaccgtctccgtggagacgcggctcaaccagccccagcccgacttcaccaagaatcgctcgggcttcatcctcagcgtgcccgggaactgacgccccgcggaggcctggcccggagcccggccacactccgagtcctgggtcccagtccagctgctgcctcccaacccatgcccgctagaaacctgctgcgagggcccctcccagaggagccccgcccctgtaagatttccttcctggttttctgcctttggtatcatcttcctctgtccttactgtccacggtccctgttcaataagccaaagaccctggtgccccgcccagacccctgggctgacgtccagaccaatctcaccccagaggcaactggatggtgcctttagttggtgcggatgccccgtggccaggtcaagtcagagcacctggacaggtgtcctccctgctgctgaccctgcagagggaaggggtggggatgcaggaccccgctctgcgggagccccatagccacctctcttgcccaaggtgagccagccctggggacccagctcagggaggctctgctcagagttcggcggacccaccccaacccaactcccagccgccagccaaagccactgggtgagcagagtcacccacagggccagcccctcagccaggagccagtggcaggagcggaacagcccatccagcagagtgagtccatccttcccaggttctcccctgggagactccctttgccaccaaggcccccaccagggcctctgaccaccgctctggagaggacagtgtggcatgctccaaggatcatcttacttaactcgcagcctgtggctgtggtcctcttatagatactttcaccgtttgcagggttgctaatcagatacctgctgtcaccacacttgggtcaggaaccctaatgagaacggggagctgccagggtgagggcagccctcagggtcggccgctttccctctggaccacctcccgctgcgtttcctactcagagaaacagcaagggcggggtcaagacacgggatgacgggaagcaggaagcggggcagcagcacagcgtggggtcctggcactgcaggccaggccaggatgcccaccccgccctctacacggccccttggggcctgcgcccgtgaaactggtgccagggagcactgccagcttgccagtttctgcccagcaaaagcacgtatgcttcaggggccttctgagaccaccttccccactgagccccagctgctgagaaggccttgagggaagtagaggctgggagcaaatgccccatgcggtgagaggatgaggggagcctacgcctcaggcatgtggtgagaggatgagggggagggagccaacgcctcaggtggagtgggcagaggtgcaagagagggatgtactgaagcttcttcccgtcctgccacagacacttctcctgccttcccaccctgacccggcagaacccaccaagtgcctgtgtgcagcctcctgtgcctcacccagggcctgaccccagagtggtcccaacaacccggtctcatgcccactccccatccctgcttcccaaaaattgcactgtgtgcagtttgcaacaaagaatcccgctggcatcctgtccttgggaaccctttctcattctccaagcctggtcagctgcctgcacaggcagaggtgccctcagcccagattagcaacactcatagttttgccaattaccagtagacactagtggaaccatctaactggaacttcctctctccttccacttatttcctcaaacttgttgctttacactagacacatgcaaatgtatgttttaaacacaccaaaacagatcatgccaaatgagttgcctgtcaaaggctggagggcaggaggagggcctgggtttgggttctttcctcccagcctttggatggtgccttgggccccttagccccagcgccagggcctcccagctgaggccacaggacaagcacttttttatgatgtactaaaagccacagtatgtggcaactgcaaaaggatcaggaatttagggtatgatctcggtcacgtgtcccgggcgctgaggggaaaggaagcgggcatgattgtagacaatgagggggttctcttgatgtaatgaaatgcaattttatggtttggtgcaaaaactcctattttccagtaaattaactttatttctaaagcatattttgatttgccatcaagagcaataaagcattaaatcttatttttaaaaaaaagttctgct

SEQ ID NO: 81606 - DNA, 4322 bp, Homo sapiens
  misc_feature (67)..(67): n is a, c, g, or t
agaatatgttgcttaagtccaactgtgttttggaagcttttggaaatgccaaaaccaaccgtaatgncaactcaagcaggtttggaaaatacatggatatcaactttgacttcaagggtgaccctattggtgggcatatcaataactacttactagaaaagtctcgagtgattgtgcaacagccaggagaaagaagctttcattctttctatcagctactccaaggaggttcagaacaaatgctacgctctctacatctccagaaatccctttcatcctacaactatattcatgtgggagctcaattaaagtcttctatcaatgatgctgccgaattcagagttgttgctgatgccatgaaagtcattggcttcaaacctgaggagatccaaacagtgtataagattttggctgctattctgcacttgggaaatttaaaatttgtagtagatggtgacacgcctcttattgagaatggcaaagtagtatctatcatagcagaattgctctctactaagacagatatggttgagaaagcccttctttaccggactgtggccacaggccgtgacatcattgacaagcagcacacagaacaagaggccagctacggcagagacgcctttgccaaggcaatatatgagcgccttttttgttggatcgttactcgcatcaatgatattattgaggtcaagaactatgacaccacaatccatgggaaaaacactgttattggtgtcttggatatctatggctttgaaatctttgacaacaacagttttgaacaattctgtatcaattactgcaatgagaaactgcagcagctatttattcagctggttctgaagcaagaacaagaggaataccagcgggaagggatcccctggaaacatattgactacttcaacaatcagatcattgttgacctcgtggagcaacagcacaaagggatcattgcaatccttgatgatgcttgcatgaatgtcggcaaagtcaccgatgaaatgtttcttgaagcacttaacagtaaattgggcaaacacgcccatttttccagccgaaagctctgtgcctcagacaaaattctggagtttgatcgagattttcgaattcgacattatgcaggcgatgtagtctattctgtcattggttttattgacaaaaataaagatactttatttcaagatttcaagcgccttatgtataacagttcaaatcctgtgctcaagaatatgtggcctgaaggcaaactgagcattacagaggtgaccaagcgacctctgactgctgctaccttgtttaagaattctatgattgctctagtagacaaccttgcatcaaaggaaccatattacgttcgttgcatcaaacccaatgacaagaaatctccacagatatttgatgatgaacgctgccggcaccaagtagaatatcttggactactggaaaatgtgagagtgcgtcgggcaggatttgccttccgccagacatacgagaagtttcttcacaggtataagatgatctctgaattcacctggcccaaccatgaccttccttcagacaaagaggctgtcaagaaactaattgaacggtgtggttttcaggatgatgtagcttatgggaagaccaaaattttcattcgaacaccccgaacattgtttaccttggaagaactccgtgcccagatgctcataaggattgtcctctttctacaaaaggtgtggcggggcaccctggcccgcatgcggtacaaaagaaccaaggcagctctgacaataatcaggtactaccggcgctacaaagtgaagtcgtacatccacgaggtggccagacgcttccatggcgtcaagaccatgcgagactacgggaagcacgtgaagtggccaagccctcctaaagttcttcgccgttttgaggaggccctgcagacgattttcaatagatggagagcatcccagctcatcaagagcattccggcctcagacctgccccaggtcagggcaaaggttgcagccgtggaaatgttgaagggtcaaagggctgacctcgggctccagagggcctgggagggcaactatcttgcttcaaagccagatacacctcagacctcaggcacttttgtccctgttgctaatgaattgaaacggaaggacaaatacatgaatgtcctcttttcctgtcacgtccgtaaggtaaatcgatttagtaaggtggaagacagagcaatttttgtcactgaccgtcacctgtataaaatggatcccactaaacagtacaaggtgatgaagactatccctctatacaatttgactggtctgagtgtctccaatggaaaggaccaacttgtagtgttccatacgaaagacaacaaagacctcattgtctgcctcttcagcaaacagccaacccatgagagtcgaattggagaacttgttggagtgctggtgaatcatttcaagagtgagaagcgccaccttcaagtgaacgtcaccaacccagtacagtgcagcctgcacgggaagaagtgcaccgtctccgtggagacgcggctcaaccagccccagcccgacttcaccaagaatcgctcgggcttcatcctcagcgtgcccgggaactgacgccccgcggaggcctggcccggagcccggccacactccgagtcctgggtcccagtccagctgctgcctcccaacccatgcccgctagaaacctgctgcgagggcccctcccagaggagccccgcccctgtaagatttccttcctggttttctgcctttggtatcatcttcctctgtccttactgtccacggtccctgttcaataagccaaagaccctggtgccccgcccagacccctgggctgacgtccagaccaatctcaccccagaggcaactggatggtgcctttagttggtgcggatgccccgtggccaggtcaagtcagagcacctggacaggtgtcctccctgctgctgaccctgcagagggaaggggtggggatgcaggaccccgctctgcgggagccccatagccacctctcttgcccaaggtgagccagccctggggacccagctcagggaggctctgctcagagttcggcggacccaccccaacccaactcccagccgccagccaaagccactgggtgagcagagtcacccacagggccagcccctcagccaggagccagtggcaggagcggaacagcccatccagcagagtgagtccatccttcccaggttctcccctgggagactccctttgccaccaaggcccccaccagggcctctgaccaccgctctggagaggacagtgtggcatgctccaaggatcatcttacttaactcgcagcctgtggctgtggtcctcttatagatactttcaccgtttgcagggttgctaatcagatacctgctgtcaccacacttgggtcaggaaccctaatgagaacggggagctgccagggtgagggcagccctcagggtcggccgctttccctctggaccacctcccgctgcgtttcctactcagagaaacagcaagggcggggtcaagacacgggatgacgggaagcaggaagcggggcagcagcacagcgtggggtcctggcactgcaggccaggccaggatgcccaccccgccctctacacggccccttggggcctgcgcccgtgaaactggtgccagggagcactgccagcttgccagtttctgcccagcaaaagcacgtatgcttcaggggccttctgagaccaccttccccactgagccccagctgctgagaaggccttgagggaagtagaggctgggagcaaatgccccatgcggtgagaggatgaggggagcctacgcctcaggcatgtggtgagaggatgagggggagggagccaacgcctcaggtggagtgggcagaggtgcaagagagggatgtactgaagcttcttcccgtcctgccacagacacttctcctgccttcccaccctgacccggcagaacccaccaagtgcctgtgtgcagcctcctgtgcctcacccagggcctgaccccagagtggtcccaacaacccggtctcatgcccactccccatccctgcttcccaaaaattgcactgtgtgcagtttgcaacaaagaatcccgctggcatcctgtccttgggaacccgtagacaatgagggggttctcttgatgtaatgaaatgcaattttatggtttggtgcaaaaactcctattttccagtaaattaactttatttctaaagcatattttgatttgccatcaagagcaataaagcattaaatcttatttttaaaaaaaagttctgct

SEQ ID NO: 81607 - DNA, 2943 bp, Homo sapiens
  misc_feature (67)..(67): n is a, c, g, or t
agaatatgttgcttaagtccaactgtgttttggaagcttttggaaatgccaaaaccaaccgtaatgncaactcaagcaggtttggaaaatacatggatatcaactttgacttcaagggtgaccctattggtgggcatatcaataactacttactagaaaagtctcgagtgattgtgcaacagccaggagaaagaagctttcattctttctatcagctactccaaggaggttcagaacaaatgctacgctctctacatctccagaaatccctttcatcctacaactatattcatgtgggagctcaattaaagtcttctatcaatgatgctgccgaattcagagttgttgctgatgccatgaaagtcattggcttcaaacctgaggagatccaaacagtgtataagattttggctgctattctgcacttgggaaatttaaaatttgtagtagatggtgacacgcctcttattgagaatggcaaagtagtatctatcatagcagaattgctctctactaagacagatatggttgagaaagcccttctttaccggactgtggccacaggccgtgacatcattgacaagcagcacacagaacaagaggccagctacggcagagacgcctttgccaaggcaatatatgagcgccttttttgttggatcgttactcgcatcaatgatattattgaggtcaagaactatgacaccacaatccatgggaaaaacactgttattggtgtcttggatatctatggctttgaaatctttgacaacaacagttttgaacaattctgtatcaattactgcaatgagaaactgcagcagctatttattcagctggttctgaagcaagaacaagaggaataccagcgggaagggatcccctggaaacatattgactacttcaacaatcagatcattgttgacctcgtggagcaacagcacaaagggatcattgcaatccttgatgatgcttgcatgaatgtcggcaaagtcaccgatgaaatgtttcttgaagcacttaacagtaaattgggcaaacacgcccatttttccagccgaaagctctgtgcctcagacaaaattctggagtttgatcgagattttcgaattcgacattatgcaggcgatgtagtctattctgtcattggttttattgacaaaaataaagatactttatttcaagatttcaagcgccttatgtataacagttcaaatcctgtgctcaagaatatgtggcctgaaggcaaactgagcattacagaggtgaccaagcgacctctgactgctgctaccttgtttaagaattctatgattgctctagtagacaaccttgcatcaaaggaaccatattacgttcgttgcatcaaacccaatgacaagaaatctccacagatatttgatgatgaacgctgccggcaccaagtagaatatcttggactactggaaaatgtgagagtgcgtcgggcaggatttgccttccgccagacatacgagaagtttcttcacaggtataagatgatctctgaattcacctggcccaaccatgaccttccttcagacaaagaggctgtcaagaaactaattgaacggtgtggttttcaggatgatgtagcttatgggaagaccaaaattttcattcgaacaccccgaacattgtttaccttggaagaactccgtgcccagatgctcataaggattgtcctctttctacaaaaggtgtggcggggcaccctggcccgcatgcggtacaaaagaaccaaggcagctctgacaataatcaggtactaccggcgctacaaagtgaagtcgtacatccacgaggtggccagacgcttccatggcgtcaagaccatgcgagactacgggaagcacgtgaagtggccaagccctcctaaagttcttcgccgttttgaggaggccctgcagacgattttcaatagatggagagcatcccagctcatcaagagcattccggcctcagacctgccccaggtcagggcaaaggttgcagccgtggaaatgttgaagggtcaaagggctgacctcgggctccagagggcctgggagggcaactatcttgcttcaaagccagatacacctcagacctcaggcacttttgtccctgttgctaatgaattgaaacggaaggacaaatacatgaatgtcctcttttcctgtcacgtccgtaaggtaaatcgatttagtaaggtggaagacagagcaatttttgtcactgaccgtcacctgtataaaatggatcccactaaacagtacaaggtgatgaagactatccctctatacaatttgactggtctgagtgtctccaatggaaaggaccaacttgtagtgttccatacgaaagacaacaaagacctcattgtctgcctcttcagcaaacagccaacccatgagagtcgaattggagaacttgttggagtgctggtgaatcatttcaagagtgagaagcgccaccttcaagtgaacgtcaccaacccagtacagtgcagcctgcacgggaagaagtgcaccgtctccgtggagacgcggctcaaccagccccagcccgacttcaccaagaatcgctcgggcttcatcctcagcgtgcccgggaactgacgccccgcggaggcctggcccggagcccggccacactccgagtcctgggtcccagtccagctgctgcctcccaacccatgcccgctagaaacctgctgcgagggcccctcccagaggagccccgcccctgtaagatttccttcctggttttctgcctttggtatcatcttcctctgtccttactgtccacggtccctgttcaataagccaaagaccctggtgccgccagacctggtgggtcagacattaccaaagcaatggtggtgcttattgggggttcccgggagtaagtaagctggagggttcctggggactgaggaagggc

SEQ ID NO: 81608 - DNA, 1524 bp, Homo sapiens
  misc_feature (67)..(67): n is a, c, g, or t
agaatatgttgcttaagtccaactgtgttttggaagcttttggaaatgccaaaaccaaccgtaatgncaactcaagcaggtttggaaaatacatggatatcaactttgacttcaagggtgaccctattggtgggcatatcaataactacttactagaaaagtctcgagtgattgtgcaacagccaggagaaagaagctttcattctttctatcagctactccaaggaggttcagaacaaatgctacgctctctacatctccagaaatccctttcatcctacaactatattcatgtgggagctcaattaaagtcttctatcaatgatgctgccgaattcagagttgttgctgatgccatgaaagtcattggcttcaaacctgaggagatccaaacagtgtataagattttggctgctattctgcacttgggaaatttaaaatttgtagtagatggtgacacgcctcttattgagaatggcaaagtagtatctatcatagcagaattgctctctactaagacagatatggttgagaaagcccttctttaccggactgtggccacaggccgtgacatcattgacaagcagcacacagaacaagaggccagctacggcagagacgcctttgccaaggcaatatatgagcgccttttttgttggatcgttactcgcatcaatgatattattgaggtcaagaactatgacaccacaatccatgggaaaaacactgttattggtgtcttggatatctatggctttgaaatctttgacaacaacagttttgaacaattctgtatcaattactgcaatgagaaactgcagcagctatttattcagctggttctgaagcaagaacaagaggaataccagcgggaagggatcccctggaaacatattgactacttcaacaatcagatcattgttgacctcgtggagcaacagcacaaagggatcattgcaatccttgatgatgcttgcatgaatgtcggcaaagtcaccgatgaaatgtttcttgaagcacttaacagtaaattgggcaaacacgcccatttttccagccgaaagctctgtgcctcagacaaaattctggagtttgatcgagattttcgaattcgacattatgcaggcgatgtagtctattctgtcattggttttattgacaaaaataaagatactttatttcaagatttcaagcgccttatgtataacagttcaaatcctgtgctcaagaatatgtggcctgaaggcaaactgagcattacagaggtgaccaagcgacctctgactgctgctaccttgtttaagaattctatgattgctctagtagacaaccttgcatcaaagtacagatggggtttcaccatgttgaccaggttggtcttgaactcctgatctcaggtcatccacccacctcggcctcctaaagcgctggcattgcagatgtgagccaccatgctcagccatctcaactattttgaagaagtgcatatacagatacagttttcatcttcaaagcaagtaaaat

SEQ ID NO: 81609 - DNA, 444 bp, Homo sapiens
aagaccaaaattttcattcgaacaccccgaacattgtttaccttggaagaactccgtgcccagatgctcataaggattgtcctctttctacaaaaggtaattttatattttatatataaggataagattttgcttttaagttcttaaaaatttgttgcatattttctttaattcaagaaatattcctggaagatatgttgttttatgtctatgcatatcttaaaatgttttctgttgccttcacacatggaaaacttacttggttgccccagttcaaaattatttttgcccaagttcaaaattattttatcttcaaaactctgaagatattttgtttttaaagttggagagatgtctgaaccagtctttctgtcctttactgttaactgtgttttttccttcagcttaaatgcataaaggactttttttttcccccccgagacg

SEQ ID NO: 81610 - DNA, 2549 bp, Homo sapiens
gggagccaagggccctgccatggtgccgaggctgtggttggaggcccagctagtgccacactcgccttgcctcggcctctctggggcccttcaggcatcctcctggcacttgtggaggaagcaggctgcgccggagccaatggtggccgggagctgccgggcaggtgccctgttctcatgctgcctgctaactgcccgtctggtgtttttggttcctgcagtgagaagcgccaccttcaagtgaacgtcaccaacccagtacagtgcagcctgcacgggaagaagtgcaccgtctccgtggagacgcggctcaaccagccccagcccgacttcaccaagaatcgctcgggcttcatcctcagcgtgcccgggaactgacgccccgcggaggcctggcccggagcccggccacactccgagtcctgggtcccagtccagctgctgcctcccaacccatgcccgctagaaacctgctgcgagggcccctcccagaggagccccgcccctgtaagatttccttcctggttttctgcctttggtatcatcttcctctgtccttactgtccacggtccctgttcaataagccaaagaccctggtgccccgcccagacccctgggctgacgtccagaccaatctcaccccagaggcaactggatggtgcctttagttggtgcggatgccccgtggccaggtcaagtcagagcacctggacaggtgtcctccctgctgctgaccctgcagagggaaggggtggggatgcaggaccccgctctgcgggagccccatagccacctctcttgcccaaggtgagccagccctggggacccagctcagggaggctctgctcagagttcggcggacccaccccaacccaactcccagccgccagccaaagccactgggtgagcagagtcacccacagggccagcccctcagccaggagccagtggcaggagcggaacagcccatccagcagagtgagtccatccttcccaggttctcccctgggagactccctttgccaccaaggcccccaccagggcctctgaccaccgctctggagaggacagtgtggcatgctccaaggatcatcttacttaactcgcagcctgtggctgtggtcctcttatagatactttcaccgtttgcagggttgctaatcagatacctgctgtcaccacacttgggtcaggaaccctaatgagaacggggagctgccagggtgagggcagccctcagggtcggccgctttccctctggaccacctcccgctgcgtttcctactcagagaaacagcaagggcggggtcaagacacgggatgacgggaagcaggaagcggggcagcagcacagcgtggggtcctggcactgcaggccaggccaggatgcccaccccgccctctacacggccccttggggcctgcgcccgtgaaactggtgccagggagcactgccagcttgccagtttctgcccagcaaaagcacgtatgcttcaggggccttctgagaccaccttccccactgagccccagctgctgagaaggccttgagggaagtagaggctgggagcaaatgccccatgcggtgagaggatgaggggagcctacgcctcaggcatgtggtgagaggatgagggggagggagccaacgcctcaggtggagtgggcagaggtgcaagagagggatgtactgaagcttcttcccgtcctgccacagacacttctcctgccttcccaccctgacccggcagaacccaccaagtgcctgtgtgcagcctcctgtgcctcacccagggcctgaccccagagtggtcccaacaacccggtctcatgcccactccccatccctgcttcccaaaaattgcactgtgtgcagtttgcaacaaagaatcccgctggcatcctgtccttgggaaccctttctcattctccaagcctggtcagctgcctgcacaggcagaggtgccctcagcccagattagcaacactcatagttttgccaattaccagtagacactagtggaaccatctaactggaacttcctctctccttccacttatttcctcaaacttgttgctttacactagacacatgcaaatgtatgttttaaacacaccaaaacagatcatgccaaatgagttgcctgtcaaaggctggagggcaggaggagggcctgggtttgggttctttcctcccagcctttggatggtgccttgggccccttagccccagcgccagggcctcccagctgaggccacaggacaagcacttttttatgatgtactaaaagccacagtatgtggcaactgcaaaaggatcaggaatttagggtatgatctcggtcacgtgtcccgggcgctgaggggaaaggaagcgggcatgattgtagacaatgagggggttctcttgatgtaatgaaatgcaattttatggtttggtgcaaaaactcctattttccagtaaattaactttatttctaaagcatattttgatttgccatcaagagcaataaagcattaaatcttatttttaaaaaaaagttctgct

SEQ ID NO: 81611 - DNA, 4727 bp, Homo sapiens
  misc_feature (67)..(67): n is a, c, g, or t
agaatatgttgcttaagtccaactgtgttttggaagcttttggaaatgccaaaaccaaccgtaatgncaactcaagcaggtttggaaaatacatggatatcaactttgacttcaagggtgaccctattggtgggcatatcaataactacttactagaaaagtctcgagtgattgtgcaacagccaggagaaagaagctttcattctttctatcagctactccaaggaggttcagaacaaatgctacgctctctacatctccagaaatccctttcatcctacaactatattcatgtgggagctcaattaaagtcttctatcaatgatgctgccgaattcagagttgttgctgatgccatgaaagtcattggcttcaaacctgaggagatccaaacagtgtataagattttggctgctattctgcacttgggaaatttaaaatttgtagtagatggtgacacgcctcttattgagaatggcaaagtagtatctatcatagcagaattgctctctactaagacagatatggttgagaaagcccttctttaccggactgtggccacaggccgtgacatcattgacaagcagcacacagaacaagaggccagctacggcagagacgcctttgccaaggcaatatatgagcgccttttttgttggatcgttactcgcatcaatgatattattgaggtcaagaactatgacaccacaatccatgggaaaaacactgttattggtgtcttggatatctatggctttgaaatctttgacaacaacagttttgaacaattctgtatcaattactgcaatgagaaactgcagcagctatttattcagctggttctgaagcaagaacaagaggaataccagcgggaagggatcccctggaaacatattgactacttcaacaatcagatcattgttgacctcgtggagcaacagcacaaagggatcattgcaatccttgatgatgcttgcatgaatgtcggcaaagtcaccgatgaaatgtttcttgaagcacttaacagtaaattgggcaaacacgcccatttttccagccgaaagctctgtgcctcagacaaaattctggagtttgatcgagattttcgaattcgacattatgcaggcgatgtagtctattctgtcattggttttattgacaaaaataaagatactttatttcaagatttcaagcgccttatgtataacagttcaaatcctgtgctcaagaatatgtggcctgaaggcaaactgagcattacagaggtgaccaagcgacctctgactgctgctaccttgtttaagaattctatgattgctctagtagacaaccttgcatcaaaggaaccatattacgttcgttgcatcaaacccaatgacaagaaatctccacagatatttgatgatgaacgctgccggcaccaagtagaatatcttggactactggaaaatgtgagagtgcgtcgggcaggatttgccttccgccagacatacgagaagtttcttcacaggtataagatgatctctgaattcacctggcccaaccatgaccttccttcagacaaagaggctgtcaagaaactaattgaacggtgtggttttcaggatgatgtagcttatgggaagaccaaaattttcattcgaacaccccgaacattgtttaccttggaagaactccgtgcccagatgctcataaggattgtcctctttctacaaaaggtgtggcggggcaccctggcccgcatgcggtacaaaagaaccaaggcagctctgacaataatcaggtactaccggcgctacaaagtgaagtcgtacatccacgaggtggccagacgcttccatggcgtcaagaccatgcgagactacgggaagcacgtgaagtggccaagccctcctaaagttcttcgccgttttgaggaggccctgcagacgattttcaatagatggagagcatcccagctcatcaagagcattccggcctcagacctgccccaggtcagggcaaaggttgcagccgtggaaatgttgaagggtcaaagggctgacctcgggctccagagggcctgggagggcaactatcttgcttcaaagccagatacacctcagacctcaggcacttttgtccctgttgctaatgaattgaaacggaaggacaaatacatgaatgtcctcttttcctgtcacgtccgtaaggtaaatcgatttagtaaggtggaagacagagcaatttttgtcactgaccgtcacctgtataaaatggatcccactaaacagtacaaggtgatgaagactatccctctatacaatttgactggtctgagtgtctccaatggaaaggaccaacttgtagtgttccatacgaaagacaacaaagacctcattgtctgcctcttcagcaaacagccaacccatgagagtcgaattggagaacttgttggagtgctggtgaatcatttcaagagtgagaagcgccaccttcaagtgaacgtcaccaacccagtacagtgcagcctgcacgggaagaagtgcaccgtctccgtggagacgcggctcaaccagccccagcccgacttcaccaagaatcgctcgggcttcatcctcagcgtgcccgggaactgacgccccgcggaggcctggcccggagcccggccacactccgagtcctgggtcccagtccagctgctgcctcccaacccatgcccgctagaaacctgctgcgagggcccctcccagaggagccccgcccctgtaagatttccttcctggttttctgcctttggtatcatcttcctctgtccttactgtccacggtccctgttcaataagccaaagaccctggtgccccgcccagacccctgggctgacgtccagaccaatctcaccccagaggcaactggatggtgcctttagttggtgcggatgccccgtggccaggtcaagtcagagcacctggacaggtgtcctccctgctgctgaccctgcagagggaaggggtggggatgcaggaccccgctctgcgggagccccatagccacctctcttgcccaaggtgagccagccctggggacccagctcagggaggctctgctcagagttcggcggacccaccccaacccaactcccagccgccagccaaagccactgggtgagcagagtcacccacagggccagcccctcagccaggagccagtggcaggagcggaacagcccatccagcagagtgagtccatccttcccaggttctcccctgggagactccctttgccaccaaggcccccaccagggcctctgaccaccgctctggagaggacagtgtggcatgctccaaggatcatcttacttaactcgcagcctgtggctgtggtcctcttatagatactttcaccgtttgcagggttgctaatcagatacctgctgtcaccacacttgggtcaggaaccctaatgagaacggggagctgccagggtgagggcagccctcagggtcggccgctttccctctggaccacctcccgctgcgtttcctactcagagaaacagcaagggcggggtcaagacacgggatgacgggaagcaggaagcggggcagcagcacagcgtggggtcctggcactgcaggccaggccaggatgcccaccccgccctctacacggccccttggggcctgcgcccgtgaaactggtgccagggagcactgccagcttgccagtttctgcccagcaaaagcacgtatgcttcaggggccttctgagaccaccttccccactgagccccagctgctgagaaggccttgagggaagtagaggctgggagcaaatgccccatgcggtgagaggatgaggggagcctacgcctcaggcatgtggtgagaggatgagggggagggagccaacgcctcaggtggagtgggcagaggtgcaagagagggatgtactgaagcttcttcccgtcctgccacagacacttctcctgccttcccaccctgacccggcagaacccaccaagtgcctgtgtgcagcctcctgtgcctcacccagggcctgaccccagagtggtcccaacaacccggtctcatgcccactccccatccctgcttcccatttctcattctccaagcctggtcagctgcctgcacaggcagaggtgccctcagcccagattagcaacactcatagttttgccaattaccagtagacactagtggaaccatctaactggaacttcctctctccttccacttatttcctcaaacttgttgctttacactagacacatgcaaatgtatgttttaaacacaccaaaacagatcatgccaaatgagttgcctgtcaaaggctggagggcaggaggagggcctgggtttgggttctttcctcccagcctttggatggtgccttgggccccttagccccagcgccagggcctcccagctgaggccacaggacaagcacttttttatgatgtactaaaagccacagtatgtggcaactgcaaaaggatcaggaatttagggtatgatctcggtcacgtgtcccgggcgctgaggggaaaggaagcgggcatgattgtagacaatgagggggttctcttgatgtaatgaaatgcaattttatggtttggtgcaaaaactcctattttccagtaaattaactttatttctaaagcatattttgatttgccatcaagagcaataaagcattaaatcttatttttaaaaaaaagttctgct

SEQ ID NO: 81612 - DNA, 2835 bp, Homo sapiens
  misc_feature (67)..(67): n is a, c, g, or t
agaatatgttgcttaagtccaactgtgttttggaagcttttggaaatgccaaaaccaaccgtaatgncaactcaagcaggtttggaaaatacatggatatcaactttgacttcaagggtgaccctattggtgggcatatcaataactacttactagaaaagtctcgagtgattgtgcaacagccaggagaaagaagctttcattctttctatcagctactccaaggaggttcagaacaaatgctacgctctctacatctccagaaatccctttcatcctacaactatattcatgtgggagctcaattaaagtcttctatcaatgatgctgccgaattcagagttgttgctgatgccatgaaagtcattggcttcaaacctgaggagatccaaacagtgtataagattttggctgctattctgcacttgggaaatttaaaatttgtagtagatggtgacacgcctcttattgagaatggcaaagtagtatctatcatagcagaattgctctctactaagacagatatggttgagaaagcccttctttaccggactgtggccacaggccgtgacatcattgacaagcagcacacagaacaagaggccagctacggcagagacgcctttgccaaggcaatatatgagcgccttttttgttggatcgttactcgcatcaatgatattattgaggtcaagaactatgacaccacaatccatgggaaaaacactgttattggtgtcttggatatctatggctttgaaatctttgacaacaacagttttgaacaattctgtatcaattactgcaatgagaaactgcagcagctatttattcagctggttctgaagcaagaacaagaggaataccagcgggaagggatcccctggaaacatattgactacttcaacaatcagatcattgttgacctcgtggagcaacagcacaaagggatcattgcaatccttgatgatgcttgcatgaatgtcggcaaagtcaccgatgaaatgtttcttgaagcacttaacagtaaattgggcaaacacgcccatttttccagccgaaagctctgtgcctcagacaaaattctggagtttgatcgagattttcgaattcgacattatgcaggcgatgtagtctattctgtcattggttttattgacaaaaataaagatactttatttcaagatttcaagcgccttatgtataacagttcaaatcctgtgctcaagaatatgtggcctgaaggcaaactgagcattacagaggtgaccaagcgacctctgactgctgctaccttgtttaagaattctatgattgctctagtagacaaccttgcatcaaaggaaccatattacgttcgttgcatcaaacccaatgacaagaaatctccacagatatttgatgatgaacgctgccggcaccaagtagaatatcttggactactggaaaatgtgagagtgcgtcgggcaggatttgccttccgccagacatacgagaagtttcttcacaggtataagatgatctctgaattcacctggcccaaccatgaccttccttcagacaaagaggctgtcaagaaactaattgaacggtgtggttttcaggatgatgtagcttatgggaagaccaaaattttcattcgaacaccccgaacattgtttaccttggaagaactccgtgcccagatgctcataaggattgtcctctttctacaaaaggtgtggcggggcaccctggcccgcatgcggtacaaaagaaccaaggcagctctgacaataatcaggtactaccggcgctacaaagtgaagtcgtacatccacgaggtggccagacgcttccatggcgtcaagaccatgcgagactacgggaagcacgtgaagtggccaagccctcctaaagttcttcgccgttttgaggaggccctgcagacgattttcaatagatggagagcatcccagctcatcaagagcattccggcctcagacctgccccaggtcagggcaaaggttgcagccgtggaaatgttgaagggtcaaagggctgacctcgggctccagagggcctgggagggcaactatcttgcttcaaagccagatacacctcagacctcaggcacttttgtccctgttgctaatgaattgaaacggaaggacaaatacatgaatgtcctcttttcctgtcacgtccgtaaggtaaatcgatttagtaaggtggaagacagagcaatttttgtcactgaccgtcacctgtataaaatggatcccactaaacagtacaaggtgatgaagactatccctctatacaatttgactggtctgagtgtctccaatggaaaggaccaacttgtagtgttccatacgaaagacaacaaagacctcattgtctgcctcttcagcaaacagccaacccatgagagtcgaattggagaacttgttggagtgctggtgaatcatttcaagagaaaccatctgcttatactctgaataaaattcaagaaagcatagattctacataaacaggcccaagattacatggcaaactgagatgaagaggatgctggctgagaaacaaacaaaagtgttcaattatttgaatgaagtaaggaaagatattttaaaatgtaaatcaacattaaaatctgaaaatggcacagttgatattgcagaaaatagaattgatgtgaaaggaaagtttgaagtctctcagtgtgcagaatttactgttataatgggcaacatgttaactttcttagcaatatacaaaataagggtacatcttacaaagaaggcatcttatattcaataaaatatggtaatttaaaacatacaaaaagaa

SEQ ID NO: 81613 - DNA, 197 bp, Homo sapiens
tggggtcaggaggctgggggcagacttcaggacggaagccaggagctgtgaatcctctcccttcccgccagggggtggcataaatcagggggcgggcagtggttccttcgggacactagtgtaggagagaaagtgagcgtccttccctttgaaagggcacagcagggaaggatggataacttggcagaggcctgggg

SEQ ID NO: 81614 - DNA, 951 bp, Homo sapiens
ggactacaggcccccgccaccacgcctggctagtttttgtatttttagtagaggtggagtttcaccgtgttggccaggctgatctcaaactcttgacctcaggtgatcacctgccttggcctcccaaagtgctgtgattacaggtgtgagcaccatgcccagcccaagataagccgttttaaagtagatatgtcaacaaatgcattttaaaacttaatttagataaaattgtctttgtatgctttaagatgatctttatagtataatcttgcctaatatgctgattaaaagtagttttttttccttcaaatcatttaatcacatttactacttaaatgatgaaatgtcgccaggagttcttattactgtggaagatgacttcaagggaagaaaaagttaaaagtatttttagtgattccttatcctggttcatcagaatttgggaagcttttacaaaatacacattcctcgctgggcaggatggctcatgctgtaatcccagcacttgagatgccaaggcaggtagattgcttgagcccaggagttcaagaccagtttgggcagtatagtgagaccctgtctctaccagaaaataaaacattaaggatggtggtccctgcctgtaatcccagctactcgggagcttgaggtgcagggattgcttgaacccaggaggttgaggctggtttgaaccatgatggtgctgctgcactccagcctgggcgatagagggagtactctgtctttaaaaaagaaaaaagtgaacaaagtgaacacctgtgaccaaatttgaacacaaggtttatgaccattacactaagactggtatagctaattgggaggctgaggtgggaggattgcttgagccttggaggtcaaggctgtggtgaattctgattgtgtcatgcgttccagcctgggtgacagagtgagaccttgtctcttaaaaaa

SEQ ID NO: 81615 - DNA, 444 bp, Homo sapiens
  misc_feature (15)..(15): n is a, c, g, or t
  misc_feature (25)..(25): n is a, c, g, or t
  misc_feature (126)..(126): n is a, c, g, or t
  misc_feature (197)..(197): n is a, c, g, or t
attaacccctactcntgtttccaanacctccatccaaaagatcaacggttagagacaagaagccattaagaaaattaagtcgataatgaaatacctagatgatgagccataaaaatgtaaatgatncctaaatatttggttccacgatttttgttaccttttttcctttttttttgagacagagttttactctgtcncccggttggagtgcagtggcgatagagggagtactctgtctttaaaaaagaaaaaagtgaacaaagtgaacacctgtgaccaaatttgaacacaaggtttatgaccattacactaagactggtatagctaattgggaggctgaggtgggaggattgcttgagccttggaggtcaaggctgtggtgaattctgattgtgtcatgcgttccagcctgggtgacagagtgagaccttgtctcttaaaaaa

SEQ ID NO: 81616 - DNA, 417 bp, Homo sapiens
gacggagtctcgctctgttgcccaagctggagtgcagtggagggatctcagctcactgcaacctctgcctcctgggttcaagtgttctcttgcctcagctactcgggagcttgaggtgcagggattgcttgaacccaggaggttgaggctggtttgaaccatgatggtgctgctgcactccagcctgggcgatagagggagtactctgtctttaaaaaagaaaaaagtgaacaaagtgaacacctgtgaccaaatttgaacacaaggtttatgaccattacactaagactggtatagctaattgggaggctgaggtgggaggattgcttgagccttggaggtcaaggctgtggtgaattctgattgtgtcatgcgttccagcctgggtgacagagtgagaccttgtctcttaaaaaa

SEQ ID NO: 81617 - DNA, 384 bp, Homo sapiens
gccacagtttgctttgtaggaaggtttctaattacaaatctgattttaaaaataaatatagggatatacatttttatttttcttaagtgaactttagtggtttgtgtcttcaaagagagtttgttcattttattttatttcccagatttattggcataaatgggttcatgattttcctttcaatatctgtagaatctgtcatgtctctcattcccaatctggggtaatttatgtgcttctttgtaacttgataatccttgggctagaggtttatcagttgtattgttcttaagggcttttgggtttcactgattttcttcacaggttcattctgtttatttcattgacttcccattttaatctttattatatactctcttctgc

SEQ ID NO: 81618 - DNA, 559 bp, Homo sapiens
ggggatattttgaatttgaggtgcctgtgggatgtctatttggagctagcctgtagacattggattaggggagagatgcacatgctacagatactgatagggtaacagttagcagtaatggtaagtgcagccattgcaatggttgtctgtaatgtgagaagacaagatgaagaatagaaccctgcagatcacccatgtttaagagacagggcaggttagaagaaggggaccttgcaaaggaaacaaaaaaaaaatgcataggaagactatggcagtgaagtatgatgaaagctaagataaaagttgtttcaaaaggacagagtagtcaacaatgtccagtactgtagtaaagtaaggtagttaggccaacatagtatctagccatgtagttcatgaccttgataagaacaagttaagtagacttcagtggtttattgagtatggagccaaagtacagtcactgagaagtaaataagaaacaaaaatggctgggcacggtggttcatgcttataatcccaacattttgggagaccaaggcaggtggtggattgcttgagc

SEQ ID NO: 81619 - DNA, 346 bp, Homo sapiens
cattggcctgggcctccttctcttgaccgaactctcatccaacctaggcaacatttggattcaatttgatagaaaatgtgggtgagctgcttgccaaattcttatgaatctgtgtcaaactcagtgatttaggctaagatttggggtgtggctgagtccccagaggaattctgtggttgcataattcacagaaagtgaagcaaagggtattttcaaaactatttccaaagaagtggactctgtagaatctcagtctatggggattaagattttggagacttcaccacagaatttaagtcttttcacagtatgtaatggtcttttagggatgtttaaccatctgttc

SEQ ID NO: 81620 - DNA, 533 bp, Homo sapiens
cattccattttattgctgaatgctattctgttgtattgatataccacattttgtttatccattcatcagctgatggacagttgggttgtttctgttttttggttatgaataatattgcagtattgctaagaacgtgtgtataagtttttctgtgggtatatgttttcatttctcaaggagatacctttaaagctgcatccatccatatctctactttgtggttaacattctcctaggttatgcagtttgtttgaggaagaacagtgttttagtaaactcttgatcctactgtggtgttgcggatattgccctgaatcaagaaaaggtgccaccaaaaaaaaatccaaaacccaaaaacaaaaagagagaatcctgtttttaagtttgaactctccagtagcattgtttccaaatatttggtgcagaactttaaccattggtgagagttgacagacgcgatagtgcctaaattcaatgcacatgtactgctgctttaaacaaataaagaggattttcaatgcgaagcctcagct

SEQ ID NO: 81621 - DNA, 798 bp, Homo sapiens
tttttgagacaagatcttgctctgttgctcagtctagggtgcagtgacgtgatcatggctcactgcagcctcaaccttgaagactcaagtagctcagactataagcacacaccaccacacccagctaatttttttatttttttgtagtgatgggatttttttattggccaggttattctcgaactcctgagctcaagtgatccttccaccctggtcccctgaagtgctgggattacaggtgtgagccactgcgcccagaccgtatgaacatgctaatgtaatatctaactctctctcaatccgtcgaacacctgatcttggagtactattatgtattcatggagcgcgcctgtgttttgggaaggtggaatgaggagatggccgtgcttcgaggagggacgatggcgtgtggatgcccaactcctttgggagtgccttctgcatcggccttggattcgatctgaagagtacacgtgatgtgccgccgtaaatatgttcgcctagatcctacttgatagcagcctcctctggcccaaatcagaactacacgacgagagtgatgctcctaggataccgtcagcgctccttggattcacccctgttcagagcctccatggctccccagtgccttatggaggcctcccaggctcctccagaccttagcccctgccgacctctcccagctttcccccactgcccctcacacttgcgaaggcatgagacttggaaccctggccatatgtggctatttaaaagtattaaatcgtgaatgaacaaaaaaaaaaaatctccagcgct

SEQ ID NO: 81622 - DNA, 177 bp, Homo sapiens
tcattgccaatattagagaaaatgacaaggcagcatttatttccaaaggaatagctaggaaaagatggccaaatgtgaaagactagattaaaatcactgttgtctgttatttatttggtaacccatcatgcattttgtttcatcttggggttttttatttagagacaggtctagttc

SEQ ID NO: 81623 - DNA, 353 bp, Homo sapiens
cttttctttcttttcttttttctttctcttttccttccttcctttctttctctctctctttctttcattttttttcagccgtgagtggaatctgggacccttcaaatgccatcctcctttcaattgggccatttgaagacctcgagtttacctcaaacttcatcccttccagcaccagcaaatgcccaaagtcactggccaatgacttatgcttttgttgttttccttccctaacaatctcccttgtgtgacagccaccagcacctccctagggcaagagaccccacgctctgctctcacgtagctgccacctgcagctaatctcagctggcagttggtcgacgtttatgatt

SEQ ID NO: 81624 - DNA, 956 bp, Homo sapiens
cttgttttccattttgattataaccatcctactgagctctttgggttttcatttgcgtttctctaatgattagtgatgttaagcatcttttcatgtgcttattggccatttgtatgtctttgaagaaatgtctgttcaggctttgcccattttttaattgggttgtttgagttgtgagagttttttatgtattctggatattaaatctttctttatcagacatgtgatttgcaaatactttctcccattctgtggcttgtcttttacattttttttattttttttatttttatttattttttttgagacggagttttgctctgttgccgaggctggagtgcagtggtgcaatctcagctcactgcagcctccaagccccaggttcaagtgattctcctgcctcagcccccagagtagctgggattacaggcgcccgccaccttgcccggctaattttttgtatttttagtagagacagtggttcaccattttggtcaggctggtctcaaactcctgatctcaggtgatccacctgcctgggcctcccaaagtgctgggaatataggcatgagccaccgcacctggcctgataatgttctttgatgcacaaaagtttttaatttttatgaagtccaatgtatctgtttttccttttgttgttcttgattttggtatataagaatccacagtcaaatccaaagtaatgaagatttacccttatgttttcttctaagagttttatggctttagctcttacacttagattattgatccattttgagttactttttgtatatagggtgaggtggggattcaacttcattcttttgcatgttggctcttcaattggcccagcactgtttattgaaaagactgttggatggccttcgcactcttgtcaaaaatcaattggccatagatgcttaggttgacttctagactctcagttctattcc

SEQ ID NO: 81625 - DNA, 817 bp, Homo sapiens
agcagaatatgatctgctagtgctcctgttttaccaaaacacagatgattgagagtttaggggattactaaagtctgctctcatcagctctcatttctcagagattcacattctaaattatgcacagtctgatgaaagctcttttgcgtcattgacaaggttgtggcccttctttcagcattacaacttggagattttatgggctgtgttgggaagctcatgatgcacaatgggaggggatgagggatttacattgattaagtttctactctgtgccaggcacttccacacttcacagtatttgattttcctgacccctactctagtattccttccactgtatcatgtttatacagcatcccccttctgtggaaattatcaacacacctaccaaggcaagaggatagtgtggtggtcaagggcttaggctctggattcagatgcacctggtatgctgaatggtctgtttctcctccagacccactctccaaacttctttgtcctactctgcccagggaggctcacctttacagagtagatcagtcaggcttctttgccctctgccttctcattgagtttggtcaataggagccactagcaggagaagaaaagatgtgatgagaaattgctcagcaatgtaatctgtcagttctctttgggccatagtatggcactatcagctttgctctacctaagactacagcttctgccaggcgcagtggctcatgcctgtaatcccaacactttgggaagccaaggagggtggatcacttgagatcaggagcttgagagcagcctggccaacatggcgagatcc

SEQ ID NO: 81626 - DNA, 945 bp, Homo sapiens
agcggagtccactttaaaggggaggaaggcacaaagagaatcgggaaaatagcaataaaccaatggaaacctaatgggggggacttggaagttactatagaaaatagggcatgtgtctgggccctattacacataatcacacttgtaatgccagcactttaggaggctgaaggagagggaatgcttgagtccagaagttcgagaccaccctaggcaacatagcaagaccccatctctacaaaaattagccaggcatggtggtgcactcctgtagtcctaactactcaggaggattgcttgagcccaggaatttgaggctgcagtgagctatgatcataccactgcaatccagactgggtaacagagtgagaccttatctataaaaaaagaaagaaaagaaaagaaagtagggcaagtccatcaagccttttctgccaccagatgtccaccaggacatgttttatggccctatagagtgagaggcaaacagaagcaggtttttgtgcttacaatagaagaacgaggatttggaatgatgtatataggattgttttatagtttaatgagcctctctttcagctttgaggaaataatgacaattgtgtagcgatagtggagaaaagattttttcatgcataagagcaagatgtgaaaaaagatactaactatgctacttctctgcctttgctctctgaaacccatatctccaggcaaaaacccctctcctgaatccatacccacagaaccaggcatgaccagagacttccacctggaggtcacacagcgtgatagaatccataatcatctcactattttcttgctcacccttatggctcttttcctgtgtttcctcccagaaaataccacgattacctagttgtgtaggctggaaacataaaaaccattgctgtctgacctgttcaatcaccacagccagtcaacacc

SEQ ID NO: 81627 - DNA, 335 bp, Homo sapiens
cagcagaactctaccattcaggaaccctgttctcagactttcagccaccagaacagtgagaaaaaatttctgttgtctaaaccacacagtctatggtattttgttatgacagcatgcgctgactaagatagactcaaactgaaacacaggcttttcctgtgtcttaagtctgctggccactggactccagctacatcagctctcctggttttctgaccttcagactcatattggaactatatcagcagggttcagggttctccagggtttcagggttctccagggtcttcagcttgctaactcacccaccttccagatcttgagacttgtcagcc

SEQ ID NO: 81628 - DNA, 414 bp, Homo sapiens
ctaaaggcagcaagacccagtagaatgctgttgaagttatccatgtgtgataggctgggctggagtggtatagtgaagaaaccctgcaaaggataaaatacctgactaaatcaaatatacaaacgaattaagaaatcagttaaaaagctgacttctcagaatattttcttctagaataatataaaatttgatactaaaactacctgtagctgttttacatttttctgcagaatcacagggatattggacttgagcaacaagtgatttaaagttagcgtcttgggccgtgcatgctggctgacacctgtaattccagcactttggggggtgctgaggcaggaagatggcttgagcacaggagtttgagactagcctggccatcatagttgagaccttatctccacaaaaaataaa

SEQ ID NO: 81629 - DNA, 229 bp, Homo sapiens
atagggttgccttaacttcagtatctagccataaaaggaaaggagaaagagaaacgggaggaatactagggaaaagttgctgaaattcttctttgtatacccaagtagtttctctgatgatacttggtttatttaggagaattgccagaaggatttagaaatgtttctagtccttattagtgatggtagttttaatttacttttcttccatgtctctgattcttatcct

SEQ ID NO: 81630 - DNA, 1051 bp, Homo sapiens
tagtagagacagggtttcatcatgttggccaggctggtctcgaactcctgatgatctcaggtgatccacccacctggcctcccaaagtgctgggattacaggtgtgagacaccgcgcccagcccgcagcttcaaatattttgtttgtagttctcttttatcgtgtaaaatctgtggtttataattacccccgagaatgctctcaaattacagttttagcctccatttgttttctcaaatctcctcaatggttcacacactctaggggctctgaaaagaggtgtgtacttttccttttatttatatcctctgcccattttatattaacgtacttaacccttgtttttaatatgagttacagattttttttttttttctggtatgtcatttgtcttttgaccttggtgttttgttatggatttttttttttctcagacttatcttttatggcttctgcattttaagtcatacttagaaaaggcctttccatgttcagattttaaggaatttactaggccaggcatggtagctcacacctatatgttaacactttggaagctgaggtgggggcatcgcttgagctttggagttcaaggctgcagtgagctatgattgctgcactccagcctgatagacagagcgagacctggtctccactccccccaaaaaagactttataaggaattatacttcaatgtttatcttatactttctggtttctttttttttcatttaattctttgttctgtttttctcagcgaactgtatgagatacagatccactgatctttttctagatagctctccagttgtcccaaaatcttttaagtctatttgtaactcactgatagttgtatgctactttttcatatattaaattctcatttgtatatgggcccatttttctggatttttgtattctgtctcttgattcctgcttgttcgtgatccattattctctttctttttttttacagtgtccctagttaatctcacttttttcatatgatcttcagaatcatgttgttttgttccagaagcaaaaaaaaaaa

SEQ ID NO: 81631 - DNA, 461 bp, Homo sapiens
tactactactaaattcgcggccgcgtcgactccagcctgatagacagagcgagacctggtctccactccccccaaaaaagactttataaggaattatacttcaatgtttatcttatactttctggtttctttttttttcatttaattctttgttctgtttttctcagcgaactgtatgagatacagatccactgatctttttctagatagctctccagttgtcccaaaatcttttaagtctatttgtaactcactgatagttgtatgctactttttcatatattaaattctcatttgtatatgggcccatttttctggatttttgtattctgtctcttgattcctgcttgttcgtgatccattattctctttctttttttttacagtgtccctagttaatctcacttttttcatatgatcttcagaatcatgttgttttgttccagaagcaaaaaaaaaaa

SEQ ID NO: 81632 - DNA, 863 bp, Homo sapiens
tgagggaaggacagagtgctagtcagaccacatcaggaggagcttatgtgtcagctgacccacccctggtaggcgatgaccaccagagctctctgtggaaaggcacaggtccccattgtcactaatgagggacctgtgggctgtgcttgtagtctgtcccaacagtgtagcttttgttgttgttgttttgagatagggtcttggctctgttgctctgtccaggctagagtacagtggcacaatcatagctcactccaggctcaaactcctgggctcaggtcatcttcttcctgccttggcctcccaaattgttgggattacaagtgtgagccaccatacctgtccccagcagccacggctttagcagtccttgatgattcatcatggacttgttaaatggtaactggctattattgcactttctacattttagttgtcatttttctatgaaaatgagctcctccctaaaaaaaaaagagttatatattttagttcttattttcttaaatcctcacattgtcccaaatttgaccagtgggagttctattaagttcctttaagttgtatgcctttgacatgtccccgtcagcccttgagcacctctttacgttctggtacaacaagatgttccaggctcatcttgtactgtttttcccaccaccccccccaaccctagcatcagccgtttctcagagaaggcctaggttctttgagtacagaatagtatgtaggagcccaggtctggtcgctggttgtgttcattgctctgggagacagagtttgcaagggaaactctgtgcagtaggtctccaagcagtgctgagcccttgctccaagtggagctcttgggtccatttttgatt

SEQ ID NO: 81633 - DNA, 384 bp, Homo sapiens
gaaactgttgagaactaggaaaagctcaggaatgtttctggtgcataatttgtgatagcaagaacctgaaagtcctccaaaagccgtctacaatgaaatggggaaattaatggtggcacattcctgcataggagatagcagtgataatgggtggataccagaacgtgcatcaacacagaagaatctcagcaacataattcaggattaaaacagcgtttacagctgggcacagtggcccacacctgtaatgccagcactttggaaggccacagtcggcagatggcttgagcccaggagtttgattccaacccgggcaacatactgagaccccatctctactaaaaatacaaaaattagccagtgtggtatcatgtgtctgtggtc

SEQ ID NO: 81634 - DNA, 427 bp, Homo sapiens
  misc_feature (410)..(410): n is a, c, g, or t
cttgtggggaatcacagtaaaccagcaggaagttcacagtgaaaacggtgtggggtgaagaatggtcagattctggattcactttcaagatggagccaaagggacttgctggttaaattgaaagtagaatgtgagagaaagacaagcatcaggaacgtcttccatgctttttgactgagctacacaaatggggtctgaagggctgttgttgtgggaaggttgagggcaaagctagtgggaagaaaaccaggagaggatgaggcaacagaagtccaatgaaggtggggcttcaagggagagttgtgaactcttcccagtgcagctgatggggtaagtggcattaagaactgacatttttatttgatgtagccatgtgggggccatcgtgacattccaaagggggcccctgncacctcacacttaaagt

SEQ ID NO: 81635 - DNA, 1411 bp, Homo sapiens
agcatatgtgcaagcaaggttcacacaccccatttaatcttcacaccaccacggggtagtcactattatccccattttacaggattaaaacactgacgctgggaggttgacagagttacaccaaatcacacagaggagctgggcttcccccgacctcctccgctcaagtctccctgtccccgggaggtgcggaaggaggcaacagacgcttggcccataggtggagcaattggcgaaggcttcgcccgacgccggaactgcgagctctcagcgggagccgagacggtgcagggcgggagaagcaccttcactcccagcctgcgccccgatgctgcgcgttctgtgcctcctgcgcccctggaggccccttcgggcccgcggctgcgcttccgacggggcggccgggggctcagagatccaagtgcgcgccctggcgggtccggaccaagggatcactgagattctgatgaacagaccttctgcccgcaatgccttggggaatgtcttcgtcagtgagctgctggaaactctggcccagctgcgggaggaccggcaagtgcgtgtcctgctcttcagaagtggagtgaagggcgtgttctgtgcaggtgcagacctgaaggagcgggaacagatgagtgaagcagaggtgggggtgtttgtccagcgactccggggcctgatgaatgacatcgcttcctcggcagtcatgggactgattgagaccacgcgagggctcctcccgggggcaggagggactcagaggctgccccgttgtctgggggtggccctggcgaaggagctcatcttcacgggccgacgactgagtggaactgaggcccacgtactggggctggtgaatcacgctgtggcccagaacgaggagggggacgccgcctaccagcgggcacgagcactggcccaggagatcctgccccaggcccccattgccgtgcggctgggcaaagtagccattgaccgaggaacggaggtggacattgcatctgggatggccattgaagggatgtgctatgcccagaatattccaacccgggaccggctagagggcatggcagccttcagggagaagcggactcccaaatttgttggcaaatgacccccattttaaccttcagcatgggagatgcatgccctgaagagcaggatccagaaggaagatttgtggccagattgccttcatcatttcacctctccagacttccatttcttcacaaggatgatgatggaaataaaatgactggcgtgatgcctggaaccaaggtgctgatcctaccacctactgctaccttccttagcttcaccctggctagaaataatcacgagggttgggtttgctttggaaaatgcctgtctctctacttgaatgataaagaattaaattagatctctctga

SEQ ID NO: 81636 - DNA, 481 bp, Homo sapiens
gaaacacttggaccctggccttgtcttgggctggacaagcttaagcaactctttttgggcctgtggccctgctcccccaaaactaatattttgtaccttgttgcagaatattccaacccgggaccggctagagggcatggcagccttcagggagaagcggactcccaaatttgttggcaaatgacccccattttaaccttcagcatgggagatgcatgccctgaagagcaggatccagaaggaagatttgtggccagattgccttcatcatttcacctctccagacttccatttcttcacaaggatgatgatggaaataaaatgactggcgtgatgcctggaaccaaggtgctgatcctaccacctactgctaccttccttagcttcaccctggctagaaataatcacgagggttgggtttgctttggaaaatgcctgtctctctacttgaatgataaagaattaaattagatctctctga

SEQ ID NO: 81637 - DNA, 609 bp, Homo sapiens
ctacccccaccagcatctaaggagagtcttctttctgtttggagttctgtgataagacagatgactcacccagggggatggaggaggatgaccgagggcagttctctcagagagggagttctggctcttcagcttttgtgtcccgccccaccctcagggttcaagcctggccattccaaagcagttaagtttccccaagcatgctttcaagttttgacaattgctgttacctttgcctgagataccccttcttggttacttgaacttttacttgtccttcaagccctccagtacctcctcctccaggaagccttcccaacccaccctctgagctttttattggagcactgatgatcctgggtcaataatgcctgatacacatttgtcttccccatgagactgagccccatgggaacaaaggctatgtctgattcattctgtgttcccagttcccagcacccagcacagggcttggcacaaagaaagggaggccccagggaggccagcggattaggcctgaacagggatcatccagcccatcctcccattcctcttccctggctgattctgtaactttccctgggggattgtgccattgcactccgcctg

SEQ ID NO: 81638 - DNA, 1031 bp, Homo sapiens
agcatatgtgcaagcaaggttcacacaccccatttaatcttcacaccaccacggggtagtcactattatccccattttacaggattaaaacactgacgctgggaggttgacagagttacaccaaatcacacagaggagctgggcttcccccgacctcctccgctcaagtctccctgtccccgggaggtgcggaaggaggcaacagacgcttggcccataggtggagcaattggcgaaggcttcgcccgacgccggaactgcgagctctcagcgggagccgagacggtgcagggcgggagaagcaccttcactcccagcctgcgccccgatgctgcgcgttctgtgcctcctgcgcccctggaggccccttcgggcccgcggctgcgcttccgacggggcggccgggggctcagagatccaagtgcgcgccctggcgggtccggaccaagggatcactgagattctgatgaacagaccttctgcccgcaatgccttggggaatgtcttcgtcagtgagctgctggaaactctggcccagctgcgggaggaccggcaagtgcgtgtcctgctcttcagaagtggagtgaagggcgtgttctgtgcaggtgcagacctgaaggagcgggaacagatgagtgaagcagaggtgggggtgtttgtccagcgagactgagtggaactgaggcccacgtactggggctggtgaatcacgctgtggcccagaacgaggagggggacgccgcctaccagcgggcacgagcactggcccaggagatcctgccccaggcccccattgccgtgcggctgggcaaagtagccattgaccgaggaacggaggtggacattgcatctgggatggccattgaagggatgtgctatgcccagaatattccaacccgggaccggctagagggcatggcagccttcagggagaagcggactcccgataacaggttcacaaagagatttgtgggcagattgcctcaatctcttacctcttagacttcatttttttaccaggtggagggggg

SEQ ID NO: 81639 - DNA, 662 bp, Homo sapiens
agtgcagaggaggcatggggatgagatcacacacggagccctcacagggaatgagttggggtcatttgatgttcatattagaagctgcaggttctgccttccactggggctgatggcacaagagcactgttacattttacctgctgcctttgagcttgaggttgggtggtaaaccattcttcactgttcttagcggctttatttctcatagagtcatgtgttgcttaacaacggggctacattctgagaaatgcatcattaggtgattgtggtcattgtgggagcatcacagagtgcacctacacagtcctagatggggtagcctactgcacaccaaggctacatggtgtatagcctgttgctcctagaatacaaacctggacagcatggtaccgggctgaatactgtaggcaactgtaacacaatggtaaatgtgtatctgaacatagaaaaggcacagtaaaaatacagtctaaaagattttttaaatagtacacctgtactgggcagttaccataaatggagcttgcaggactggaagctgcactgggtgagtcagcgagtgaatggtgagtgaatgtgaaggcctaggacagcagggactggtttggcaccagggactattttcatgaaagacagtttttccatggacttgcgggcgg

SEQ ID NO: 81640 - DNA, 937 bp, Homo sapiens
aacgggtgacaggaagcgtggtgaggcagccggatgggaaggagaactcctcttctctggcaaaatgtctcagtctgtctcgtttctcccagcagttttgtcatagttacgaatggtgtttcttctctaggagggaaattccttctcatagctatctctgctcatatagatgtctgtaggcaatagggtgggctggcttccagtgtgggtgaagatggacaaggtcagaccaatccagggagcacgtctttcttgcagtggacattgcatctgggatggccattgaagggatgtgctatgcccaggtatgtagcaaccagcccatgcctgcttgttaacataggctgggccaggctagagggactttgtatggtacatgaccatagtgcttctctctgggacttttccctcaaccatctaatgtactggggttcatcctgcccacttaatgccgagaatcacagaacacaggtccttaagaggaagaaccacatcttttgcctctgtatcagatgccactgtaaagttcaggatggagttgggaggtcaagggcttggttgtagcctgcaggctgtgttcaatgtaggggctgtacacttgggactgacctattaaatctcttactcatgggtgagtaaaaaatgctaatctccacgttaacagatatccaaaatactcctaaggggtcctgggacttggagaaactagtgtgaacctggattcaaagccagatttcttactgcaaagaatttttttctctactgagcagcctcatgtcagaccactgcagacggcagctgagttctcaggaggcatgaaagcagtgtgcaagtggaggctaatgctgatggggcacagagaatacaaaggctggcctgtcttccccaggagacaaagcagccacggaggcttatacctttgcatgcctcaagatca

SEQ ID NO: 81641 - DNA, 5124 bp, Homo sapiens
ctgggccctcttctctgccactccctctgcctgcaacaggcttctctcctggactgcccccttccctgcaccttgccaacatgcatgcacacacacaggcactcatgcacacgctcacatatgcacccatgcatgcacacttacatgcacacatgcactcttacatcttttgcctggccaattcctactctcctgtcagctctcagcttaaaggccactgcctcctctgataactcattgctgaccttctatactagggctcccctctgcccactggaggccccttacttgtttgtcctttttctccaagttctcctcacaaatagtaattatttaatgtctgtcttccccactaggctgtaggttccatgaggacaggccttgagtctgtcctggtctctggaatcacggtgtctagtagaggccagcacacagcaaatatataaatgtacaaatgagtgaatgaagagaatctgattggccttaaggaacttacgcacttaaaataattgggcagaagagaagcagtgaaggagtgcagaggcatcacctgaaaggtaggaggaaggagaatgggggcctgccaaagccaaggcagatacgtgtcattatgcatctgtgtaaacccacagagtgtacaccaccaagagcgaaccccagtgtacactagggcccccgggtggcgacagtgcatcagtgtaggttcgtcagttgcaacacgtgcctctggtgggggatggggattgcggaaggggctgtgcctgtgtagggccagggagtataggtgaactgtattgaattgtattttccactccatttagctgtgaccctaaaactgctctaagaaaatcatctatttataaacagaataaatattcttctaagacagccaaagcagaaaacgatcaagatcggaagtgtgattaatgtcagcaaaggtttttgctgccacgaggttgaggcaaggagagaaacgtgtcccttggttagtgatgtggctatattcatcactttaatgagaataatgtctgctgagtgatggggctggaacctagattggagaaggtttgagcgaatggaaggtaagaaagtgactaaatgagtatagaaaactaccaagaagcttggctgttgctggtgaaagaatattacacaagtagggccaggattactgtcttgccaaacaggacagaacactaagcctctgtatttagttgctaatttattgtgacagaggagcatattgatctgtccccgtgattgtgcagttagcaaaacccaggctttgagaaaccctgtaggtcaaataccccaggctcctccacagataatctctgagggaaagacagagttgtggggagcatgtgggggttgtaccaggatttaaaagatacacggcaattttagaaattagcaagtctaaactatgatacctaaggatgcacacctgggtgataaaattataaagaaatggccgggtgtggtggctcacacctgtaatcccagcacttttagaggccgaggtgggtggatcacctgaggtcaggagttcgagacaagcctgaccaacatggagaaacctcatctctactaaaaatacaaaattggccgggcgtggtggcacatgctgtaatcccagctactccggaggctgaggcaggagaatcgcttgaacctgggaggcggaggttgtggtgagccaagtttacaagtccttccactttctctctgaggcagaaagagcaagggtttttctctccattttatggttgggaaaattgaggcctgcctgagtgtgtgacttgtggcaagtcactctggtcatctagggcagaggctccccagatcccaggcctcctgcctccagtccccagcccgcagcccaggattaggcagagccagctgctttcccgtggctgccctgactccttacagggatcactgagattctgatgaacagaccttctgcccgcaatgccttggggaatgtcttcgtcagtgagctgctggaaactctggcccagctgcgggaggaccggcaagtgcgtgtcctgctcttcagaagtggagtgaagggcgtgttctgtgcaggtgcagacctgaaggagcgggaacagatgagtgaagcagaggtgggggtgtttgtccagcgactccggggcctgatgaatgacatcgggttcaagcctggccattccaaagcagttaagtttccccaagcatgctttcaagttttgacaattgctgttacctttgcctgagataccccttcttggttacttgaacttttacttgtccttcaagccctccagtacctcctcctccaggaagccttcccaacccaccctctgagctttttattggagcactgatgatcctgggtcaataatgcctgatacacatttgtcttccccatgagactgagccccatgggaacaaaggctatgtctgattcattctgtgttcccagttcccagcacccagcacagggcttggcacaaagaaagggaggccccagggaggccagcggattaggcctgaacagggatcatccagcccatcctcccattcctcttccctggctgattctgtaactttccctaaagggaaaattggcttctgagataacctggctgcgggaagcagaggttgtcgtgagcagagattgtgccattgcactccagcctgggcaacaacagcgagactccatctcaaaaaaaaaaaaaaaaaagaattaagataacctggctgaggttccatgtaatgtccccagacctgggtccactgaggcctctgtcccaaccagcttgcccctccccagccttgagtctctgtcctggtcccaccagggctttgcaggctgagcctttcttcctctccacagcagccttccctgcacccaccattgcggctatggatgggtttgccttgggcggaggcctagagcttgccctggcctgtgacctccgagtggcaggtactgggccaggactgggggcagggggtggggctagggagtcaggggtgagtgaaacagggtgagtctggacattctgcagtcagccactgttcttggcttccaaccaaaagcaaaactaaggcaaggcagagcacagagggtgctcaggcagaagctgcttcccctcctggtgcagccattagctgctgtagtatctgtgacctgtcagaacctgcttccttcattttgggaatatttgaccaacctcagagcaattgctgttacgagccaaggaggtcaaagagcaatgtccagtcttcccattctgtccaagtcagatttatcgaccatgtttcggaaaaaggtgagcctcagggatagtttgtcaatggctgagctaatcacaaaggtgcctgggcaggaatactggcaccagccaaatttgcattacttgttctgagcaattgagctttgtttgaagaatgggaggggataaagaagataactgatcattttctcaggtgactgacctggtgattaggagcagccttcttggatgcagttaggcaaagtctgaatgtcttcccttctccccccaccgctctctcctgccaccccaggagcaacatataaaaatgtgtagctccaggcatgaaagtagcttctgtctacacaatgcaggtcaaagagaaggaactgaccaggtgtccaggcaccaaaataccaggctggtctagccccaactctccttctcacatgcccacgttcacgcaactaactcacagggttttggggaagactaagacggagtgaatgtaaaacccactcccttctgcccacgttcacatggtccatgctgagggaattcagaaaaggagacagacccgggggggtgcgtcagtcaaggcaagtttctcgaaggaaggaagcagaactcaggaggacatggactggaacagtcagggcaatttcaggctgtgacaaagctggaacggacgactgtagcaggagcaggagtcactgacattctaggccaggccagggctaagccagagaacctattaatagtaatccacaaatagatatggggcacctcctaggaactctccttgttccaagcgtcgtacctcgtgtgatccttagcggctctctgaagcagacagaagagggccagccatctttcttccacctttgaggcttgggaagggtgagacttgctggtgacttacaactccatcaaaggggcatggtgaaataagggcctgggctcctgacttctgggctagggctcttccaaaggcagagtctggagaggcctggctgtggccagaccatggggcaagtggctagaggggcgagtagacagcagaggcagctgtggcccccgggattagcactgggggaccggatgggggagggaggcctcactttgttctatctgagcagcttcctcggcagtcatgggactgattgagaccacgcgagggctcctcccgggggcaggagggactcagaggctgccccgttgtctgggggtggccctggcgaaggagctcatcttcacgggccgacgactgagtggaactgaggcccacgtactggggctggtgaatcacgctgtggcccagaacgaggagggggacgccgcctaccagcgggcacgagcactggcccaggagatcctgccccaggcccccattgccgtgcggctgggcaaagtagccattgaccgaggaacggaggtggacattgcatctgggatggccattgaagggatgtgctatgcccagaatattccaacccgggaccggctagagggcatggcagccttcagggagaagcggactcccaaatttgttggcaaatgacccccattttaaccttcagcatgggagatgcatgccctgaagagcaggatccagaaggaagatttgtggccagattgccttcatcatttcacctctccagacttccatttcttcacaaggatgatgatggaaataaaatgactggcgtgatgcctggaaccaaggtgctgatcctaccacctactgctaccttccttagcttcaccctggctagaaataatcacgagggttgggtttgctttggaaaatgcctgtctctctacttgaatgataaagaattaaattagatctctctga

SEQ ID NO: 81642 - DNA, 3303 bp, Homo sapiens
ctacccccaccagcatctaaggagagtcttctttctgtttggagttctgtgataagacagatgactcacccagggggatggaggaggatgaccgagggcagttctctcagagagggagttctggctcttcagcttttgtgtcccgccccaccctcagggttcaagcctggccattccaaagcagttaagtttccccaagcatgctttcaagttttgacaattgctgttacctttgcctgagataccccttcttggttacttgaacttttacttgtccttcaagccctccagtacctcctcctccaggaagccttcccaacccaccctctgagctttttattggagcactgatgatcctgggtcaataatgcctgatacacatttgtcttccccatgagactgagccccatgggaacaaaggctatgtctgattcattctgtgttcccagttcccagcacccagcacagggcttggcacaaagaaagggaggccccagggaggccagcggattaggcctgaacagggatcatccagcccatcctcccattcctcttccctggctgattctgtaactttccctaaagggaaaattggcttctgagataacctggctgcgggaagcagaggttgtcgtgagcagagattgtgccattgcactccagcctgggcaacaacagcgagactccatctcaaaaaaaaaaaaaaaaaagaattaagataacctggctgaggttccatgtaatgtccccagacctgggtccactgaggcctctgtcccaaccagcttgcccctccccagccttgagtctctgtcctggtcccaccagggctttgcaggctgagcctttcttcctctccacagcagccttccctgcacccaccattgcggctatggatgggtttgccttgggcggaggcctagagcttgccctggcctgtgacctccgagtggcaggtactgggccaggactgggggcagggggtggggctagggagtcaggggtgagtgaaacagggtgagtctggacattctgcagtcagccactgttcttggcttccaaccaaaagcaaaactaaggcaaggcagagcacagagggtgctcaggcagaagctgcttcccctcctggtgcagccattagctgctgtagtatctgtgacctgtcagaacctgcttccttcattttgggaatatttgaccaacctcagagcaattgctgttacgagccaaggaggtcaaagagcaatgtccagtcttcccattctgtccaagtcagatttatcgaccatgtttcggaaaaaggtgagcctcagggatagtttgtcaatggctgagctaatcacaaaggtgcctgggcaggaatactggcaccagccaaatttgcattacttgttctgagcaattgagctttgtttgaagaatgggaggggataaagaagataactgatcattttctcaggtgactgacctggtgattaggagcagccttcttggatgcagttaggcaaagtctgaatgtcttcccttctccccccaccgctctctcctgccaccccaggagcaacatataaaaatgtgtagctccaggcatgaaagtagcttctgtctacacaatgcaggtcaaagagaaggaactgaccaggtgtccaggcaccaaaataccaggctggtctagccccaactctccttctcacatgcccacgttcacgcaactaactcacagggttttggggaagactaagacggagtgaatgtaaaacccactcccttctgcccacgttcacatggtccatgctgagggaattcagaaaaggagacagacccgggggggtgcgtcagtcaaggcaagtttctcgaaggaaggaagcagaactcaggaggacatggactggaacagtcagggcaatttcaggctgtgacaaagctggaacggacgactgtagcaggagcaggagtcactgacattctaggccaggccagggctaagccagagaacctattaatagtaatccacaaatagatatggggcacctcctaggaactctccttgttccaagcgtcgtacctcgtgtgatccttagcggctctctgaagcagacagaagagggccagccatctttcttccacctttgaggcttgggaagggtgagacttgctggtgacttacaactccatcaaaggggcatggtgaaataagggcctgggctcctgacttctgggctagggctcttccaaaggcagagtctggagaggcctggctgtggccagaccatggggcaagtggctagaggggcgagtagacagcagaggcagctgtggcccccgggattagcactgggggaccggatgggggagggaggcctcactttgttctatctgagcagcttcctcggcagtcatgggactgattgagaccacgcgagggctcctcccgggggcaggtaatcgcaactacagcacccgcccaattccaccccatccagggtccttcgctgctttccttttttgccctctgttctgggctctgccctcccacctgaaccctgctcctctgagaagtcttggctgagtcccaggctgagccttctctgggttcccacttcccatgctgattcccaccctgctccctccatcctggtaggagggactcagaggctgccccgttgtctgggggtggccctggcgaaggagctcatcttcacgggccgacgactgagtggaactgaggcccacgtactggggctggtgaatcacgctgtggcccagaacgaggagggggacgccgcctaccagcgggcacgagcactggcccaggagatcctgccccaggcccccattgccgtgcggctgggcaaagtagccattgaccgaggaacggaggtggacattgcatctgggatggccattgaagggatgtgctatgcccagaatattccaacccgggaccggctagagggcatggcagccttcagggagaagcggactcccaaatttgttggcaaatgacccccattttaaccttcagcatgggagatgcatgccctgaagagcaggatccagaaggaagatttgtggccagattgccttcatcatttcacctctccagacttccatttcttcacaaggatgatgatggaaataaaatgactggcgtgatgcctggaaccaaggtgctgatcctaccacctactgctaccttccttagcttcaccctggctagaaataatcacgagggttgggtttgctttggaaaatgcctgtctctctacttgaatgataaagaattaaattagatctctctga

SEQ ID NO: 81643 - DNA, 4140 bp, Homo sapiens
agcatatgtgcaagcaaggttcacacaccccatttaatcttcacaccaccacggggtagtcactattatccccattttacaggattaaaacactgacgctgggaggttgacagagttacaccaaatcacacagaggagctgggcttcccccgacctcctccgctcaagtctccctgtccccgggaggtgcggaaggaggcaacagacgcttggcccataggtggagcaattggcgaaggcttcgcccgacgccggaactgcgagctctcagcgggagccgagacggtgcagggcgggagaagcaccttcactcccagcctgcgccccgatgctgcgcgttctgtgcctcctgcgcccctggaggccccttcgggcccgcggctgcgcttccgacggggcggccgggggctcagagatccaagtgcgcgccctggcgggtccggaccaaggtaaatgtgcagttccggggcggcgcatgacgcgactgggactaggccggaggcagcgggggaccggcaggctgtaggttccatgaggacaggccttgagtctgtcctggtctctggaatcacggtgtctagtagaggccagcacacagcaaatatataaatgtacaaatgagtgaatgaagagaatctgattggccttaaggaacttacgcacttaaaataattgggcagaagagaagcagtgaaggagtgcagaggcatcacctgaaagtttacaagtccttccactttctctctgaggcagaaagagcaagggtttttctctccattttatggttgggaaaattgaggcctgcctgagtgtgtgacttgtggcaagtcactctggtcatctagggcagaggctccccagatcccaggcctcctgcctccagtccccagcccgcagcccaggattaggcagagccagctgctttcccgtggctgccctgactccttacagggatcactgagattctgatgaacagaccttctgcccgcaatgccttggggaatgtcttcgtcagtgagctgctggaaactctggcccagctgcgggaggaccggcaagtgcgtgtcctgctcttcagaagtggagtgaagggcgtgttctgtgcaggtgcagacctgaaggagcgggaacagatgagtgaagcagaggtgggggtgtttgtccagcgactccggggcctgatgaatgacatcgggttcaagcctggccattccaaagcagttaagtttccccaagcatgctttcaagttttgacaattgctgttacctttgcctgagataccccttcttggttacttgaacttttacttgtccttcaagccctccagtacctcctcctccaggaagccttcccaacccaccctctgagctttttattggagcactgatgatcctgggtcaataatgcctgatacacatttgtcttccccatgagactgagccccatgggaacaaaggctatgtctgattcattctgtgttcccagttcccagcacccagcacagggcttggcacaaagaaagggaggccccagggaggccagcggattaggcctgaacagggatcatccagcccatcctcccattcctcttccctggctgattctgtaactttccctaaagggaaaattggcttctgagataacctggctgcgggaagcagaggttgtcgtgagcagagattgtgccattgcactccagcctgggcaacaacagcgagactccatctcaaaaaaaaaaaaaaaaaagaattaagataacctggctgaggttccatgtaatgtccccagacctgggtccactgaggcctctgtcccaaccagcttgcccctccccagccttgagtctctgtcctggtcccaccagggctttgcaggctgagcctttcttcctctccacagcagccttccctgcacccaccattgcggctatggatgggtttgccttgggcggaggcctagagcttgccctggcctgtgacctccgagtggcaggtactgggccaggactgggggcagggggtggggctagggagtcaggggtgagtgaaacagggtgagtctggacattctgcagtcagccactgttcttggcttccaaccaaaagcaaaactaaggcaaggcagagcacagagggtgctcaggcagaagctgcttcccctcctggtgcagccattagctgctgtagtatctgtgacctgtcagaacctgcttccttcattttgggaatatttgaccaacctcagagcaattgctgttacgagccaaggaggtcaaagagcaatgtccagtcttcccattctgtccaagtcagatttatcgaccatgtttcggaaaaaggtgagcctcagggatagtttgtcaatggctgagctaatcacaaaggtgcctgggcaggaatactggcaccagccaaatttgcattacttgttctgagcaattgagctttgtttgaagaatgggaggggataaagaagataactgatcattttctcaggtgactgacctggtgattaggagcagccttcttggatgcagttaggcaaagtctgaatgtcttcccttctccccccaccgctctctcctgccaccccaggagcaacatataaaaatgtgtagctccaggcatgaaagtagcttctgtctacacaatgcaggtcaaagagaaggaactgaccaggtgtccaggcaccaaaataccaggctggtctagccccaactctccttctcacatgcccacgttcacgcaactaactcacagggttttggggaagactaagacggagtgaatgtaaaacccactcccttctgcccacgttcacatggtccatgctgagggaattcagaaaaggagacagacccgggggggtgcgtcagtcaaggcaagtttctcgaaggaaggaagcagaactcaggaggacatggactggaacagtcagggcaatttcaggctgtgacaaagctggaacggacgactgtagcaggagcaggagtcactgacattctaggccaggccagggctaagccagagaacctattaatagtaatccacaaatagatatggggcacctcctaggaactctccttgttccaagcgtcgtacctcgtgtgatccttagcggctctctgaagcagacagaagagggccagccatctttcttccacctttgaggcttgggaagggtgagacttgctggtgacttacaactccatcaaaggggcatggtgaaataagggcctgggctcctgacttctgggctagggctcttccaaaggcagagtctggagaggcctggctgtggccagaccatggggcaagtggctagaggggcgagtagacagcagaggcagctgtggcccccgggattagcactgggggaccggatgggggagggaggcctcactttgttctatctgagcagcttcctcggcagtcatgggactgattgagaccacgcgagggctcctcccgggggcaggagggactcagaggctgccccgttgtctgggggtggccctggcgaaggagctcatcttcacgggccgacgactgagtggaactgaggcccacgtactggggctggtgaatcacgctgtggcccagaacgaggagggggacgccgcctaccagcgggcacgagcactggcccaggagatcctgccccaggcccccattgccgtgcggctgggcaaagtagccattgaccgaggaacggaggtggacattgcatctgggatggccattgaagggatgtgctatgcccagaatattccaacccgggaccggctagagggcatggcagccttcagggagaagcggactcccaaatttgttggcaaatgacccccattttaaccttcagcatgggagatgcatgccctgaagagcaggatccagaaggaagatttgtggccagattgccttcatcatttcacctctccagacttccatttcttcacaaggatgatgatggaaataaaatgactggcgtgatgcctggaaccaaggtgctgatcctaccacctactgctaccttccttagcttcaccctggctagaaataatcacgagggttgggtttgctttggaaaatgcctgtctctctacttgaatgataaagaattaaattagatctctctga

SEQ ID NO: 81644 - DNA, 3886 bp, Homo sapiens
agcatatgtgcaagcaaggttcacacaccccatttaatcttcacaccaccacggggtagtcactattatccccattttacaggattaaaacactgacgctgggaggttgacagagttacaccaaatcacacagaggagctgggcttcccccgacctcctccgctcaagtctccctgtccccgggaggtgcggaaggaggcaacagacgcttggcccataggtggagcaattggcgaaggcttcgcccgacgccggaactgcgagctctcagcgggagccgagacggtgcagggcgggagaagcaccttcactcccagcctgcgccccgatgctgcgcgttctgtgcctcctgcgcccctggaggccccttcgggcccgcggctgcgcttccgacggggcggccgggggctcagagatccaagtgcgcgccctggcgggtccggaccaaggtaaatgtgcagttccggggcggcgcatgacgcgactgggactaggccggaggcagcgggggaccggcaggtgggccgctcagtgcgttgaaggattcgatccccagtccctccctcccagttctaggcgccccaaaccgctccaggcctgagaggtgggcggcgccttagtggctccagtccccagcccgcagcccaggattaggcagagccagctgctttcccgtggctgccctgactccttacagggatcactgagattctgatgaacagaccttctgcccgcaatgccttggggaatgtcttcgtcagtgagctgctggaaactctggcccagctgcgggaggaccggcaagtgcgtgtcctgctcttcagaagtggagtgaagggcgtgttctgtgcaggtgcagacctgaaggagcgggaacagatgagtgaagcagaggtgggggtgtttgtccagcgactccggggcctgatgaatgacatcgggttcaagcctggccattccaaagcagttaagtttccccaagcatgctttcaagttttgacaattgctgttacctttgcctgagataccccttcttggttacttgaacttttacttgtccttcaagccctccagtacctcctcctccaggaagccttcccaacccaccctctgagctttttattggagcactgatgatcctgggtcaataatgcctgatacacatttgtcttccccatgagactgagccccatgggaacaaaggctatgtctgattcattctgtgttcccagttcccagcacccagcacagggcttggcacaaagaaagggaggccccagggaggccagcggattaggcctgaacagggatcatccagcccatcctcccattcctcttccctggctgattctgtaactttccctaaagggaaaattggcttctgagataacctggctgcgggaagcagaggttgtcgtgagcagagattgtgccattgcactccagcctgggcaacaacagcgagactccatctcaaaaaaaaaaaaaaaaaagaattaagataacctggctgaggttccatgtaatgtccccagacctgggtccactgaggcctctgtcccaaccagcttgcccctccccagccttgagtctctgtcctggtcccaccagggctttgcaggctgagcctttcttcctctccacagcagccttccctgcacccaccattgcggctatggatgggtttgccttgggcggaggcctagagcttgccctggcctgtgacctccgagtggcaggtactgggccaggactgggggcagggggtggggctagggagtcaggggtgagtgaaacagggtgagtctggacattctgcagtcagccactgttcttggcttccaaccaaaagcaaaactaaggcaaggcagagcacagagggtgctcaggcagaagctgcttcccctcctggtgcagccattagctgctgtagtatctgtgacctgtcagaacctgcttccttcattttgggaatatttgaccaacctcagagcaattgctgttacgagccaaggaggtcaaagagcaatgtccagtcttcccattctgtccaagtcagatttatcgaccatgtttcggaaaaaggtgagcctcagggatagtttgtcaatggctgagctaatcacaaaggtgcctgggcaggaatactggcaccagccaaatttgcattacttgttctgagcaattgagctttgtttgaagaatgggaggggataaagaagataactgatcattttctcaggtgactgacctggtgattaggagcagccttcttggatgcagttaggcaaagtctgaatgtcttcccttctccccccaccgctctctcctgccaccccaggagcaacatataaaaatgtgtagctccaggcatgaaagtagcttctgtctacacaatgcaggtcaaagagaaggaactgaccaggtgtccaggcaccaaaataccaggctggtctagccccaactctccttctcacatgcccacgttcacgcaactaactcacagggttttggggaagactaagacggagtgaatgtaaaacccactcccttctgcccacgttcacatggtccatgctgagggaattcagaaaaggagacagacccgggggggtgcgtcagtcaaggcaagtttctcgaaggaaggaagcagaactcaggaggacatggactggaacagtcagggcaatttcaggctgtgacaaagctggaacggacgactgtagcaggagcaggagtcactgacattctaggccaggccagggctaagccagagaacctattaatagtaatccacaaatagatatggggcacctcctaggaactctccttgttccaagcgtcgtacctcgtgtgatccttagcggctctctgaagcagacagaagagggccagccatctttcttccacctttgaggcttgggaagggtgagacttgctggtgacttacaactccatcaaaggggcatggtgaaataagggcctgggctcctgacttctgggctagggctcttccaaaggcagagtctggagaggcctggctgtggccagaccatggggcaagtggctagaggggcgagtagacagcagaggcagctgtggcccccgggattagcactgggggaccggatgggggagggaggcctcactttgttctatctgagcagcttcctcggcagtcatgggactgattgagaccacgcgagggctcctcccgggggcaggagggactcagaggctgccccgttgtctgggggtggccctggcgaaggagctcatcttcacgggccgacgactgagtggaactgaggcccacgtactggggctggtgaatcacgctgtggcccagaacgaggagggggacgccgcctaccagcgggcacgagcactggcccaggagatcctgccccaggcccccattgccgtgcggctgggcaaagtagccattgaccgaggaacggaggtggacattgcatctgggatggccattgaagggatgtgctatgcccagaatattccaacccgggaccggctagagggcatggcagccttcagggagaagcggactcccaaatttgttggcaaatgacccccattttaaccttcagcatgggagatgcatgccctgaagagcaggatccagaaggaagatttgtggccagattgccttcatcatttcacctctccagacttccatttcttcacaaggatgatgatggaaataaaatgactggcgtgatgcctggaaccaaggtgctgatcctaccacctactgctaccttccttagcttcaccctggctagaaataatcacgagggttgggtttgctttggaaaatgcctgtctctctacttgaatgataaagaattaaattagatctctctga

SEQ ID NO: 81645 - DNA, 3558 bp, Homo sapiens
gggagttgtaaaattaaagaaggtacatgggtgcatgtgtgcttgtgtgtgtgtgtgtctgtctgtctaacaacagcagaagcaggcaagggctactgtggtagtcactgttgttcctctccccattttgcttcacagtttacaagtccttccactttctctctgaggcagaaagagcaagggtttttctctccattttatggttgggaaaattgaggcctgcctgagtgtgtgacttgtggcaagtcactctggtcatctagggcagaggctccccagatcccaggcctcctgcctccagtccccagcccgcagcccaggattaggcagagccagctgctttcccgtggctgccctgactccttacagggatcactgagattctgatgaacagaccttctgcccgcaatgccttggggaatgtcttcgtcagtgagctgctggaaactctggcccagctgcgggaggaccggcaagtgcgtgtcctgctcttcagaagtggagtgaagggcgtgttctgtgcaggtgcagacctgaaggagcgggaacagatgagtgaagcagaggtgggggtgtttgtccagcgactccggggcctgatgaatgacatcgggttcaagcctggccattccaaagcagttaagtttccccaagcatgctttcaagttttgacaattgctgttacctttgcctgagataccccttcttggttacttgaacttttacttgtccttcaagccctccagtacctcctcctccaggaagccttcccaacccaccctctgagctttttattggagcactgatgatcctgggtcaataatgcctgatacacatttgtcttccccatgagactgagccccatgggaacaaaggctatgtctgattcattctgtgttcccagttcccagcacccagcacagggcttggcacaaagaaagggaggccccagggaggccagcggattaggcctgaacagggatcatccagcccatcctcccattcctcttccctggctgattctgtaactttccctaaagggaaaattggcttctgagataacctggctgcgggaagcagaggttgtcgtgagcagagattgtgccattgcactccagcctgggcaacaacagcgagactccatctcaaaaaaaaaaaaaaaaaagaattaagataacctggctgaggttccatgtaatgtccccagacctgggtccactgaggcctctgtcccaaccagcttgcccctccccagccttgagtctctgtcctggtcccaccagggctttgcaggctgagcctttcttcctctccacagcagccttccctgcacccaccattgcggctatggatgggtttgccttgggcggaggcctagagcttgccctggcctgtgacctccgagtggcaggtactgggccaggactgggggcagggggtggggctagggagtcaggggtgagtgaaacagggtgagtctggacattctgcagtcagccactgttcttggcttccaaccaaaagcaaaactaaggcaaggcagagcacagagggtgctcaggcagaagctgcttcccctcctggtgcagccattagctgctgtagtatctgtgacctgtcagaacctgcttccttcattttgggaatatttgaccaacctcagagcaattgctgttacgagccaaggaggtcaaagagcaatgtccagtcttcccattctgtccaagtcagatttatcgaccatgtttcggaaaaaggtgagcctcagggatagtttgtcaatggctgagctaatcacaaaggtgcctgggcaggaatactggcaccagccaaatttgcattacttgttctgagcaattgagctttgtttgaagaatgggaggggataaagaagataactgatcattttctcaggtgactgacctggtgattaggagcagccttcttggatgcagttaggcaaagtctgaatgtcttcccttctccccccaccgctctctcctgccaccccaggagcaacatataaaaatgtgtagctccaggcatgaaagtagcttctgtctacacaatgcaggtcaaagagaaggaactgaccaggtgtccaggcaccaaaataccaggctggtctagccccaactctccttctcacatgcccacgttcacgcaactaactcacagggttttggggaagactaagacggagtgaatgtaaaacccactcccttctgcccacgttcacatggtccatgctgagggaattcagaaaaggagacagacccgggggggtgcgtcagtcaaggcaagtttctcgaaggaaggaagcagaactcaggaggacatggactggaacagtcagggcaatttcaggctgtgacaaagctggaacggacgactgtagcaggagcaggagtcactgacattctaggccaggccagggctaagccagagaacctattaatagtaatccacaaatagatatggggcacctcctaggaactctccttgttccaagcgtcgtacctcgtgtgatccttagcggctctctgaagcagacagaagagggccagccatctttcttccacctttgaggcttgggaagggtgagacttgctggtgacttacaactccatcaaaggggcatggtgaaataagggcctgggctcctgacttctgggctagggctcttccaaaggcagagtctggagaggcctggctgtggccagaccatggggcaagtggctagaggggcgagtagacagcagaggcagctgtggcccccgggattagcactgggggaccggatgggggagggaggcctcactttgttctatctgagcagcttcctcggcagtcatgggactgattgagaccacgcgagggctcctcccgggggcaggagggactcagaggctgccccgttgtctgggggtggccctggcgaaggagctcatcttcacgggccgacgactgagtggaactgaggcccacgtactggggctggtgaatcacgctgtggcccagaacgaggagggggacgccgcctaccagcgggcacgagcactggcccaggagatcctgccccaggcccccattgccgtgcggctgggcaaagtagccattgaccgaggaacggaggtggacattgcatctgggatggccattgaagggatgtgctatgcccagaatattccaacccgggaccggctagagggcatggcagccttcagggagaagcggactcccaaatttgttggcaaatgacccccattttaaccttcagcatgggagatgcatgccctgaagagcaggatccagaaggaagatttgtggccagattgccttcatcatttcacctctccagacttccatttcttcacaaggatgatgatggaaataaaatgactggcgtgatgcctggaaccaaggtgctgatcctaccacctactgctaccttccttagcttcaccctggctagaaataatcacgagggttgggtttgctttggaaaatgcctgtctctctacttgaatgataaagaattaaattagatctctctga

SEQ ID NO: 81646 - DNA, 3708 bp, Homo sapiens
agcatatgtgcaagcaaggttcacacaccccatttaatcttcacaccaccacggggtagtcactattatccccattttacaggattaaaacactgacgctgggaggttgacagagttacaccaaatcacacagaggagctgggcttcccccgacctcctccgctcaagtctccctgtccccgggaggtgcggaaggaggcaacagacgcttggcccataggtggagcaattggcgaaggcttcgcccgacgccggaactgcgagctctcagcgggagccgagacggtgcagggcgggagaagcaccttcactcccagcctgcgccccgatgctgcgcgttctgtgcctcctgcgcccctggaggccccttcgggcccgcggctgcgcttccgacggggcggccgggggctcagagatccaagtgcgcgccctggcgggtccggaccaaggtaaatgtgcagttccggggcggcgcatgacgcgactgggactaggccggaggcagcgggggaccggcagggatcactgagattctgatgaacagaccttctgcccgcaatgccttggggaatgtcttcgtcagtgagctgctggaaactctggcccagctgcgggaggaccggcaagtgcgtgtcctgctcttcagaagtggagtgaagggcgtgttctgtgcaggtgcagacctgaaggagcgggaacagatgagtgaagcagaggtgggggtgtttgtccagcgactccggggcctgatgaatgacatcgggttcaagcctggccattccaaagcagttaagtttccccaagcatgctttcaagttttgacaattgctgttacctttgcctgagataccccttcttggttacttgaacttttacttgtccttcaagccctccagtacctcctcctccaggaagccttcccaacccaccctctgagctttttattggagcactgatgatcctgggtcaataatgcctgatacacatttgtcttccccatgagactgagccccatgggaacaaaggctatgtctgattcattctgtgttcccagttcccagcacccagcacagggcttggcacaaagaaagggaggccccagggaggccagcggattaggcctgaacagggatcatccagcccatcctcccattcctcttccctggctgattctgtaactttccctaaagggaaaattggcttctgagataacctggctgcgggaagcagaggttgtcgtgagcagagattgtgccattgcactccagcctgggcaacaacagcgagactccatctcaaaaaaaaaaaaaaaaaagaattaagataacctggctgaggttccatgtaatgtccccagacctgggtccactgaggcctctgtcccaaccagcttgcccctccccagccttgagtctctgtcctggtcccaccagggctttgcaggctgagcctttcttcctctccacagcagccttccctgcacccaccattgcggctatggatgggtttgccttgggcggaggcctagagcttgccctggcctgtgacctccgagtggcaggtactgggccaggactgggggcagggggtggggctagggagtcaggggtgagtgaaacagggtgagtctggacattctgcagtcagccactgttcttggcttccaaccaaaagcaaaactaaggcaaggcagagcacagagggtgctcaggcagaagctgcttcccctcctggtgcagccattagctgctgtagtatctgtgacctgtcagaacctgcttccttcattttgggaatatttgaccaacctcagagcaattgctgttacgagccaaggaggtcaaagagcaatgtccagtcttcccattctgtccaagtcagatttatcgaccatgtttcggaaaaaggtgagcctcagggatagtttgtcaatggctgagctaatcacaaaggtgcctgggcaggaatactggcaccagccaaatttgcattacttgttctgagcaattgagctttgtttgaagaatgggaggggataaagaagataactgatcattttctcaggtgactgacctggtgattaggagcagccttcttggatgcagttaggcaaagtctgaatgtcttcccttctccccccaccgctctctcctgccaccccaggagcaacatataaaaatgtgtagctccaggcatgaaagtagcttctgtctacacaatgcaggtcaaagagaaggaactgaccaggtgtccaggcaccaaaataccaggctggtctagccccaactctccttctcacatgcccacgttcacgcaactaactcacagggttttggggaagactaagacggagtgaatgtaaaacccactcccttctgcccacgttcacatggtccatgctgagggaattcagaaaaggagacagacccgggggggtgcgtcagtcaaggcaagtttctcgaaggaaggaagcagaactcaggaggacatggactggaacagtcagggcaatttcaggctgtgacaaagctggaacggacgactgtagcaggagcaggagtcactgacattctaggccaggccagggctaagccagagaacctattaatagtaatccacaaatagatatggggcacctcctaggaactctccttgttccaagcgtcgtacctcgtgtgatccttagcggctctctgaagcagacagaagagggccagccatctttcttccacctttgaggcttgggaagggtgagacttgctggtgacttacaactccatcaaaggggcatggtgaaataagggcctgggctcctgacttctgggctagggctcttccaaaggcagagtctggagaggcctggctgtggccagaccatggggcaagtggctagaggggcgagtagacagcagaggcagctgtggcccccgggattagcactgggggaccggatgggggagggaggcctcactttgttctatctgagcagcttcctcggcagtcatgggactgattgagaccacgcgagggctcctcccgggggcaggagggactcagaggctgccccgttgtctgggggtggccctggcgaaggagctcatcttcacgggccgacgactgagtggaactgaggcccacgtactggggctggtgaatcacgctgtggcccagaacgaggagggggacgccgcctaccagcgggcacgagcactggcccaggagatcctgccccaggcccccattgccgtgcggctgggcaaagtagccattgaccgaggaacggaggtggacattgcatctgggatggccattgaagggatgtgctatgcccagaatattccaacccgggaccggctagagggcatggcagccttcagggagaagcggactcccaaatttgttggcaaatgacccccattttaaccttcagcatgggagatgcatgccctgaagagcaggatccagaaggaagatttgtggccagattgccttcatcatttcacctctccagacttccatttcttcacaaggatgatgatggaaataaaatgactggcgtgatgcctggaaccaaggtgctgatcctaccacctactgctaccttccttagcttcaccctggctagaaataatcacgagggttgggtttgctttggaaaatgcctgtctctctacttgaatgataaagaattaaattagatctctctga

SEQ ID NO: 81647 - DNA, 3970 bp, Homo sapiens
agtgcagaggaggcatggggatgagatcacacacggagccctcacagggaatgagttggggtcatttgatgttcatattagaagctgcaggttctgccttccactggggctgatggcacaagagcactgttacattttacctgctgcctttgagcttgaggttgggtggtaaaccattcttcactgttcttagcggctttatttctcatagagtcatgtgttgcttaacaacggggctacattctgagaaatgcatcattaggtgattgtggtcattgtgggagcatcacagagtgcacctacacagtcctagatggggtagcctactgcacaccaaggctacatggtgtatagcctgttgctcctagaatacaaacctggacagcatggtaccgggctgaatactgtaggcaactgtaacacaatggtaaatgtgtatctgaacatagaaaaggcacagtaaaaatacagtctaaaagattttttaaatagtacacctgtactgggcagttaccataaatggagcttgcaggactggaagctgcactggtttacaagtccttccactttctctctgaggcagaaagagcaagggtttttctctccattttatggttgggaaaattgaggcctgcctgagtgtgtgacttgtggcaagtcactctggtcatctagggcagaggctccccagatcccaggcctcctgcctccagtccccagcccgcagcccaggattaggcagagccagctgctttcccgtggctgccctgactccttacagggatcactgagattctgatgaacagaccttctgcccgcaatgccttggggaatgtcttcgtcagtgagctgctggaaactctggcccagctgcgggaggaccggcaagtgcgtgtcctgctcttcagaagtggagtgaagggcgtgttctgtgcaggtgcagacctgaaggagcgggaacagatgagtgaagcagaggtgggggtgtttgtccagcgactccggggcctgatgaatgacatcgggttcaagcctggccattccaaagcagttaagtttccccaagcatgctttcaagttttgacaattgctgttacctttgcctgagataccccttcttggttacttgaacttttacttgtccttcaagccctccagtacctcctcctccaggaagccttcccaacccaccctctgagctttttattggagcactgatgatcctgggtcaataatgcctgatacacatttgtcttccccatgagactgagccccatgggaacaaaggctatgtctgattcattctgtgttcccagttcccagcacccagcacagggcttggcacaaagaaagggaggccccagggaggccagcggattaggcctgaacagggatcatccagcccatcctcccattcctcttccctggctgattctgtaactttccctaaagggaaaattggcttctgagataacctggctgcgggaagcagaggttgtcgtgagcagagattgtgccattgcactccagcctgggcaacaacagcgagactccatctcaaaaaaaaaaaaaaaaaagaattaagataacctggctgaggttccatgtaatgtccccagacctgggtccactgaggcctctgtcccaaccagcttgcccctccccagccttgagtctctgtcctggtcccaccagggctttgcaggctgagcctttcttcctctccacagcagccttccctgcacccaccattgcggctatggatgggtttgccttgggcggaggcctagagcttgccctggcctgtgacctccgagtggcaggtactgggccaggactgggggcagggggtggggctagggagtcaggggtgagtgaaacagggtgagtctggacattctgcagtcagccactgttcttggcttccaaccaaaagcaaaactaaggcaaggcagagcacagagggtgctcaggcagaagctgcttcccctcctggtgcagccattagctgctgtagtatctgtgacctgtcagaacctgcttccttcattttgggaatatttgaccaacctcagagcaattgctgttacgagccaaggaggtcaaagagcaatgtccagtcttcccattctgtccaagtcagatttatcgaccatgtttcggaaaaaggtgagcctcagggatagtttgtcaatggctgagctaatcacaaaggtgcctgggcaggaatactggcaccagccaaatttgcattacttgttctgagcaattgagctttgtttgaagaatgggaggggataaagaagataactgatcattttctcaggtgactgacctggtgattaggagcagccttcttggatgcagttaggcaaagtctgaatgtcttcccttctccccccaccgctctctcctgccaccccaggagcaacatataaaaatgtgtagctccaggcatgaaagtagcttctgtctacacaatgcaggtcaaagagaaggaactgaccaggtgtccaggcaccaaaataccaggctggtctagccccaactctccttctcacatgcccacgttcacgcaactaactcacagggttttggggaagactaagacggagtgaatgtaaaacccactcccttctgcccacgttcacatggtccatgctgagggaattcagaaaaggagacagacccgggggggtgcgtcagtcaaggcaagtttctcgaaggaaggaagcagaactcaggaggacatggactggaacagtcagggcaatttcaggctgtgacaaagctggaacggacgactgtagcaggagcaggagtcactgacattctaggccaggccagggctaagccagagaacctattaatagtaatccacaaatagatatggggcacctcctaggaactctccttgttccaagcgtcgtacctcgtgtgatccttagcggctctctgaagcagacagaagagggccagccatctttcttccacctttgaggcttgggaagggtgagacttgctggtgacttacaactccatcaaaggggcatggtgaaataagggcctgggctcctgacttctgggctagggctcttccaaaggcagagtctggagaggcctggctgtggccagaccatggggcaagtggctagaggggcgagtagacagcagaggcagctgtggcccccgggattagcactgggggaccggatgggggagggaggcctcactttgttctatctgagcagcttcctcggcagtcatgggactgattgagaccacgcgagggctcctcccgggggcaggagggactcagaggctgccccgttgtctgggggtggccctggcgaaggagctcatcttcacgggccgacgactgagtggaactgaggcccacgtactggggctggtgaatcacgctgtggcccagaacgaggagggggacgccgcctaccagcgggcacgagcactggcccaggagatcctgccccaggcccccattgccgtgcggctgggcaaagtagccattgaccgaggaacggaggtggacattgcatctgggatggccattgaagggatgtgctatgcccagaatattccaacccgggaccggctagagggcatggcagccttcagggagaagcggactcccaaatttgttggcaaatgacccccattttaaccttcagcatgggagatgcatgccctgaagagcaggatccagaaggaagatttgtggccagattgccttcatcatttcacctctccagacttccatttcttcacaaggatgatgatggaaataaaatgactggcgtgatgcctggaaccaaggtgctgatcctaccacctactgctaccttccttagcttcaccctggctagaaataatcacgagggttgggtttgctttggaaaatgcctgtctctctacttgaatgataaagaattaaattagatctctctga

SEQ ID NO: 81648 - DNA, 4418 bp, Homo sapiens
ctgggccctcttctctgccactccctctgcctgcaacaggcttctctcctggactgcccccttccctgcaccttgccaacatgcatgcacacacacaggcactcatgcacacgctcacatatgcacccatgcatgcacacttacatgcacacatgcactcttacatcttttgcctggccaattcctactctcctgtcagctctcagcttaaaggccactgcctcctctgataactcattgctgaccttctatactagggctcccctctgcccactggaggccccttacttgtttgtcctttttctccaagttctcctcacaaatagtaattatttaatgtctgtcttccccactaggctgtaggttccatgaggacaggccttgagtctgtcctggtctctggaatcacggtgtctagtagaggccagcacacagcaaatatataaatgtacaaatgagtgaatgaagagaatctgattggccttaaggaacttacgcacttaaaataattgggcagaagagaagcagtgaaggagtgcagaggcatcacctgaaaggtaggaggaaggagaatgggggcctgccaaagccaaggcagatacgtgtcattatgcatctgtgtaaacccacagagtgtacaccaccaagagcgaaccccagtgtacactagggcccccgggtggcgacagtgcatcagtgtaggttcgtcagttgcaacacgtgcctctggtgggggatggggattgcggaaggggctgtgcctgtgtagggccagggagtataggtgaactgtattgaattgtattttccactccatttagctgtgaccctaaaactgctctaagaaaatcatctatttataaacagaataaatattcttctaagacagccaaagcagaaaacgatcaagatcggaagtgtgattaatgtcagcaaaggtttttgctgccacgaggttgaggcaaggagagaaacgtgtcccttggttagtgatgtggctatattcatcactttaatgagaataatgtctgctgagtgatggggctggaacctagattggagaaggtttgagcgaatggaaggtaagaaagtgactaaatgagtatagaaaactaccaagaagcttggctgttgctggtgaaagaatattacacaagtagggccaggattactgtcttgccaaacaggacagaacactaagcctctgtatttagttgctaatttattgtgacagaggagcatattgatctgtccccgtgattgtgcagttagcaaaacccaggctttgagaaaccctgtaggtcaaataccccaggctcctccacagataatctctgagggaaagacagagttgtggggagcatgtgggggttgtaccaggatttaaaagatacacggcaattttagaaattagcaagtctaaactatgatacctaaggatgcacacctgggtgataaaattataaagaaatggccgggtgtggtggctcacacctgtaatcccagcacttttagaggccgaggtgggtggatcacctgaggtcaggagttcgagacaagcctgaccaacatggagaaacctcatctctactaaaaatacaaaattggccgggcgtggtggcacatgctgtaatcccagctactccggaggctgaggcaggagaatcgcttgaacctgggaggcggaggttgtggtgagccaagtttacaagtccttccactttctctctgaggcagaaagagcaagggtttttctctccattttatggttgggaaaattgaggcctgcctgagtgtgtgacttgtggcaagtcactctggtcatctagggcagaggctccccagatcccaggcctcctgcctccagtccccagcccgcagcccaggattaggcagagccagctgctttcccgtggctgccctgactccttacagggatcactgagattctgatgaacagaccttctgcccgcaatgccttggggaatgtcttcgtcagtgagctgctggaaactctggcccagctgcgggaggaccggcaagtgcgtgtcctgctcttcagaagtggagtgaagggcgtgttctgtgcaggtgcagacctgaaggagcgggaacagatgagtgaagcagaggtgggggtgtttgtccagcgactccggggcctgatgaatgacatcgcagccttccctgcacccaccattgcggctatggatgggtttgccttgggcggaggcctagagcttgccctggcctgtgacctccgagtggcaggtactgggccaggactgggggcagggggtggggctagggagtcaggggtgagtgaaacagggtgagtctggacattctgcagtcagccactgttcttggcttccaaccaaaagcaaaactaaggcaaggcagagcacagagggtgctcaggcagaagctgcttcccctcctggtgcagccattagctgctgtagtatctgtgacctgtcagaacctgcttccttcattttgggaatatttgaccaacctcagagcaattgctgttacgagccaaggaggtcaaagagcaatgtccagtcttcccattctgtccaagtcagatttatcgaccatgtttcggaaaaaggtgagcctcagggatagtttgtcaatggctgagctaatcacaaaggtgcctgggcaggaatactggcaccagccaaatttgcattacttgttctgagcaattgagctttgtttgaagaatgggaggggataaagaagataactgatcattttctcaggtgactgacctggtgattaggagcagccttcttggatgcagttaggcaaagtctgaatgtcttcccttctccccccaccgctctctcctgccaccccaggagcaacatataaaaatgtgtagctccaggcatgaaagtagcttctgtctacacaatgcaggtcaaagagaaggaactgaccaggtgtccaggcaccaaaataccaggctggtctagccccaactctccttctcacatgcccacgttcacgcaactaactcacagggttttggggaagactaagacggagtgaatgtaaaacccactcccttctgcccacgttcacatggtccatgctgagggaattcagaaaaggagacagacccgggggggtgcgtcagtcaaggcaagtttctcgaaggaaggaagcagaactcaggaggacatggactggaacagtcagggcaatttcaggctgtgacaaagctggaacggacgactgtagcaggagcaggagtcactgacattctaggccaggccagggctaagccagagaacctattaatagtaatccacaaatagatatggggcacctcctaggaactctccttgttccaagcgtcgtacctcgtgtgatccttagcggctctctgaagcagacagaagagggccagccatctttcttccacctttgaggcttgggaagggtgagacttgctggtgacttacaactccatcaaaggggcatggtgaaataagggcctgggctcctgacttctgggctagggctcttccaaaggcagagtctggagaggcctggctgtggccagaccatggggcaagtggctagaggggcgagtagacagcagaggcagctgtggcccccgggattagcactgggggaccggatgggggagggaggcctcactttgttctatctgagcagcttcctcggcagtcatgggactgattgagaccacgcgagggctcctcccgggggcaggagggactcagaggctgccccgttgtctgggggtggccctggcgaaggagctcatcttcacgggccgacgactgagtggaactgaggcccacgtactggggctggtgaatcacgctgtggcccagaacgaggagggggacgccgcctaccagcgggcacgagcactggcccaggagatcctgccccaggcccccattgccgtgcggctgggcaaagtagccattgaccgaggaacggaggtggacattgcatctgggatggccattgaagggatgtgctatgcccagaatattccaacccgggaccggctagagggcatggcagccttcagggagaagcggactcccaaatttgttggcaaatgacccccattttaaccttcagcatgggagatgcatgccctgaagagcaggatccagaaggaagatttgtggccagattgccttcatcatttcacctctccagacttccatttcttcacaaggatgatgatggaaataaaatgactggcgtgatgcctggaaccaaggtgctgatcctaccacctactgctaccttccttagcttcaccctggctagaaataatcacgagggttgggtttgctttggaaaatgcctgtctctctacttgaatgataaagaattaaattagatctctctga

SEQ ID NO: 81649 - DNA, 2932 bp, Homo sapiens
agcatatgtgcaagcaaggttcacacaccccatttaatcttcacaccaccacggggtagtcactattatccccattttacaggattaaaacactgacgctgggaggttgacagagttacaccaaatcacacagaggagctgggcttcccccgacctcctccgctcaagtctccctgtccccgggaggtgcggaaggaggcaacagacgcttggcccataggtggagcaattggcgaaggcttcgcccgacgccggaactgcgagctctcagcgggagccgagacggtgcagggcgggagaagcaccttcactcccagcctgcgccccgatgctgcgcgttctgtgcctcctgcgcccctggaggccccttcgggcccgcggctgcgcttccgacggggcggccgggggctcagagatccaagtgcgcgccctggcgggtccggaccaagggatcactgagattctgatgaacagaccttctgcccgcaatgccttggggaatgtcttcgtcagtgagctgctggaaactctggcccagctgcgggaggaccggcaagtgcgtgtcctgctcttcagaagtggagtgaagggcgtgttctgtgcaggtgcagacctgaaggagcgggaacagatgagtgaagcagaggtgggggtgtttgtccagcgactccggggcctgatgaatgacatcgcagccttccctgcacccaccattgcggctatggatgggtttgccttgggcggaggcctagagcttgccctggcctgtgacctccgagtggcaggtactgggccaggactgggggcagggggtggggctagggagtcaggggtgagtgaaacagggtgagtctggacattctgcagtcagccactgttcttggcttccaaccaaaagcaaaactaaggcaaggcagagcacagagggtgctcaggcagaagctgcttcccctcctggtgcagccattagctgctgtagtatctgtgacctgtcagaacctgcttccttcattttgggaatatttgaccaacctcagagcaattgctgttacgagccaaggaggtcaaagagcaatgtccagtcttcccattctgtccaagtcagatttatcgaccatgtttcggaaaaaggtgagcctcagggatagtttgtcaatggctgagctaatcacaaaggtgcctgggcaggaatactggcaccagccaaatttgcattacttgttctgagcaattgagctttgtttgaagaatgggaggggataaagaagataactgatcattttctcaggtgactgacctggtgattaggagcagccttcttggatgcagttaggcaaagtctgaatgtcttcccttctccccccaccgctctctcctgccaccccaggagcaacatataaaaatgtgtagctccaggcatgaaagtagcttctgtctacacaatgcaggtcaaagagaaggaactgaccaggtgtccaggcaccaaaataccaggctggtctagccccaactctccttctcacatgcccacgttcacgcaactaactcacagggttttggggaagactaagacggagtgaatgtaaaacccactcccttctgcccacgttcacatggtccatgctgagggaattcagaaaaggagacagacccgggggggtgcgtcagtcaaggcaagtttctcgaaggaaggaagcagaactcaggaggacatggactggaacagtcagggcaatttcaggctgtgacaaagctggaacggacgactgtagcaggagcaggagtcactgacattctaggccaggccagggctaagccagagaacctattaatagtaatccacaaatagatatggggcacctcctaggaactctccttgttccaagcgtcgtacctcgtgtgatccttagcggctctctgaagcagacagaagagggccagccatctttcttccacctttgaggcttgggaagggtgagacttgctggtgacttacaactccatcaaaggggcatggtgaaataagggcctgggctcctgacttctgggctagggctcttccaaaggcagagtctggagaggcctggctgtggccagaccatggggcaagtggctagaggggcgagtagacagcagaggcagctgtggcccccgggattagcactgggggaccggatgggggagggaggcctcactttgttctatctgagcagcttcctcggcagtcatgggactgattgagaccacgcgagggctcctcccgggggcaggagggactcagaggctgccccgttgtctgggggtggccctggcgaaggagctcatcttcacgggccgacgactgagtggaactgaggcccacgtactggggctggtgaatcacgctgtggcccagaacgaggagggggacgccgcctaccagcgggcacgagcactggcccaggagatcctgccccaggcccccattgccgtgcggctgggcaaagtagccattgaccgaggaacggaggtggacattgcatctgggatggccattgaagggatgtgctatgcccagaatattccaacccgggaccggctagagggcatggcagccttcagggagaagcggactcccaaatttgttggcaaatgacccccattttaaccttcagcatgggagatgcatgccctgaagagcaggatccagaaggaagatttgtggccagattgccttcatcatttcacctctccagacttccatttcttcacaaggatgatgatggaaataaaatgactggcgtgatgcctggaaccaaggtgctgatcctaccacctactgctaccttccttagcttcaccctggctagaaataatcacgagggttgggtttgctttggaaaatgcctgtctctctacttgaatgataaagaattaaattagatctctctga

SEQ ID NO: 81650 - DNA, 2990 bp, Homo sapiens
ctgggccctcttctctgccactccctctgcctgcaacaggcttctctcctggactgcccccttccctgcaccttgccaacatgcatgcacacacacaggcactcatgcacacgctcacatatgcacccatgcatgcacacttacatgcacacatgcactcttacatcttttgcctggccaattcctactctcctgtcagctctcagcttaaaggccactgcctcctctgataactcattgctgaccttctatactagggctcccctctgcccactggaggccccttacttgtttgtcctttttctccaagttctcctcacaaatagtaattatttaatgtctgtcttccccactaggctgtaggttccatgaggacaggccttgagtctgtcctggtctctggaatcacggtgtctagtagaggccagcacacagcaaatatataaatgtacaaatgagtgaatgaagagaatctgattggccttaaggaacttacgcacttaaaataattgggcagaagagaagcagtgaaggagtgcagaggcatcacctgaaaggtaggaggaaggagaatgggggcctgccaaagccaaggcagatacgtgtcattatgcatctgtgtaaacccacagagtgtacaccaccaagagcgaaccccagtgtacactagggcccccgggtggcgacagtgcatcagtgtaggttcgtcagttgcaacacgtgcctctggtgggggatggggattgcggaaggggctgtgcctgtgtagggccagggagtataggtgaactgtattgaattgtattttccactccatttagctgtgaccctaaaactgctctaagaaaatcatctatttataaacagaataaatattcttctaagacagccaaagcagaaaacgatcaagatcggaagtgtgattaatgtcagcaaaggtttttgctgccacgaggttgaggcaaggagagaaacgtgtcccttggttagtgatgtggctatattcatcactttaatgagaataatgtctgctgagtgatggggctggaacctagattggagaaggtttgagcgaatggaaggtaagaaagtgactaaatgagtatagaaaactaccaagaagcttggctgttgctggtgaaagaatattacacaagtagggccaggattactgtcttgccaaacaggacagaacactaagcctctgtatttagttgctaatttattgtgacagaggagcatattgatctgtccccgtgattgtgcagttagcaaaacccaggctttgagaaaccctgtaggtcaaataccccaggctcctccacagataatctctgagggaaagacagagttgtggggagcatgtgggggttgtaccaggatttaaaagatacacggcaattttagaaattagcaagtctaaactatgatacctaaggatgcacacctgggtgataaaattataaagaaatggccgggtgtggtggctcacacctgtaatcccagcacttttagaggccgaggtgggtggatcacctgaggtcaggagttcgagacaagcctgaccaacatggagaaacctcatctctactaaaaatacaaaattggccgggcgtggtggcacatgctgtaatcccagctactccggaggctgaggcaggagaatcgcttgaacctgggaggcggaggttgtggtgagccaagtttacaagtccttccactttctctctgaggcagaaagagcaagggtttttctctccattttatggttgggaaaattgaggcctgcctgagtgtgtgacttgtggcaagtcactctggtcatctagggcagaggctccccagatcccaggcctcctgcctccagtccccagcccgcagcccaggattaggcagagccagctgctttcccgtggctgccctgactccttacagggatcactgagattctgatgaacagaccttctgcccgcaatgccttggggaatgtcttcgtcagtgagctgctggaaactctggcccagctgcgggaggaccggcaagtgcgtgtcctgctcttcagaagtggagtgaagggcgtgttctgtgcaggtgcagacctgaaggagcgggaacagatgagtgaagcagaggtgggggtgtttgtccagcgactccggggcctgatgaatgacatcgcagccttccctgcacccaccattgcggctatggatgggtttgccttgggcggaggcctagagcttgccctggcctgtgacctccgagtggcagcttcctcggcagtcatgggactgattgagaccacgcgagggctcctcccgggggcaggagggactcagaggctgccccgttgtctgggggtggccctggcgaaggagctcatcttcacgggccgacgactgagtggaactgaggcccacgtactggggctggtgaatcacgctgtggcccagaacgaggagggggacgccgcctaccagcgggcacgagcactggcccaggagatcctgccccaggcccccattgccgtgcggctgggcaaagtagccattgaccgaggaacggaggtggacattgcatctgggatggccattgaagggatgtgctatgcccagaatattccaacccgggaccggctagagggcatggcagccttcagggagaagcggactcccaaatttgttggcaaatgacccccattttaaccttcagcatgggagatgcatgccctgaagagcaggatccagaaggaagatttgtggccagattgccttcatcatttcacctctccagacttccatttcttcacaaggatgatgatggaaataaaatgactggcgtgatgcctggaaccaaggtgctgatcctaccacctactgctaccttccttagcttcaccctggctagaaataatcacgagggttgggtttgctttggaaaatgcctgtctctctacttgaatgataaagaattaaattagatctctctga

SEQ ID NO: 81651 - DNA, 1504 bp, Homo sapiens
agcatatgtgcaagcaaggttcacacaccccatttaatcttcacaccaccacggggtagtcactattatccccattttacaggattaaaacactgacgctgggaggttgacagagttacaccaaatcacacagaggagctgggcttcccccgacctcctccgctcaagtctccctgtccccgggaggtgcggaaggaggcaacagacgcttggcccataggtggagcaattggcgaaggcttcgcccgacgccggaactgcgagctctcagcgggagccgagacggtgcagggcgggagaagcaccttcactcccagcctgcgccccgatgctgcgcgttctgtgcctcctgcgcccctggaggccccttcgggcccgcggctgcgcttccgacggggcggccgggggctcagagatccaagtgcgcgccctggcgggtccggaccaagggatcactgagattctgatgaacagaccttctgcccgcaatgccttggggaatgtcttcgtcagtgagctgctggaaactctggcccagctgcgggaggaccggcaagtgcgtgtcctgctcttcagaagtggagtgaagggcgtgttctgtgcaggtgcagacctgaaggagcgggaacagatgagtgaagcagaggtgggggtgtttgtccagcgactccggggcctgatgaatgacatcgcagccttccctgcacccaccattgcggctatggatgggtttgccttgggcggaggcctagagcttgccctggcctgtgacctccgagtggcagcttcctcggcagtcatgggactgattgagaccacgcgagggctcctcccgggggcaggagggactcagaggctgccccgttgtctgggggtggccctggcgaaggagctcatcttcacgggccgacgactgagtggaactgaggcccacgtactggggctggtgaatcacgctgtggcccagaacgaggagggggacgccgcctaccagcgggcacgagcactggcccaggagatcctgccccaggcccccattgccgtgcggctgggcaaagtagccattgaccgaggaacggaggtggacattgcatctgggatggccattgaagggatgtgctatgcccagaatattccaacccgggaccggctagagggcatggcagccttcagggagaagcggactcccaaatttgttggcaaatgacccccattttaaccttcagcatgggagatgcatgccctgaagagcaggatccagaaggaagatttgtggccagattgccttcatcatttcacctctccagacttccatttcttcacaaggatgatgatggaaataaaatgactggcgtgatgcctggaaccaaggtgctgatcctaccacctactgctaccttccttagcttcaccctggctagaaataatcacgagggttgggtttgctttggaaaatgcctgtctctctacttgaatgataaagaattaaattagatctctctga

SEQ ID NO: 81652 - DNA, 2840 bp, Homo sapiens
ctgggccctcttctctgccactccctctgcctgcaacaggcttctctcctggactgcccccttccctgcaccttgccaacatgcatgcacacacacaggcactcatgcacacgctcacatatgcacccatgcatgcacacttacatgcacacatgcactcttacatcttttgcctggccaattcctactctcctgtcagctctcagcttaaaggccactgcctcctctgataactcattgctgaccttctatactagggctcccctctgcccactggaggccccttacttgtttgtcctttttctccaagttctcctcacaaatagtaattatttaatgtctgtcttccccactaggctgtaggttccatgaggacaggccttgagtctgtcctggtctctggaatcacggtgtctagtagaggccagcacacagcaaatatataaatgtacaaatgagtgaatgaagagaatctgattggccttaaggaacttacgcacttaaaataattgggcagaagagaagcagtgaaggagtgcagaggcatcacctgaaaggtaggaggaaggagaatgggggcctgccaaagccaaggcagatacgtgtcattatgcatctgtgtaaacccacagagtgtacaccaccaagagcgaaccccagtgtacactagggcccccgggtggcgacagtgcatcagtgtaggttcgtcagttgcaacacgtgcctctggtgggggatggggattgcggaaggggctgtgcctgtgtagggccagggagtataggtgaactgtattgaattgtattttccactccatttagctgtgaccctaaaactgctctaagaaaatcatctatttataaacagaataaatattcttctaagacagccaaagcagaaaacgatcaagatcggaagtgtgattaatgtcagcaaaggtttttgctgccacgaggttgaggcaaggagagaaacgtgtcccttggttagtgatgtggctatattcatcactttaatgagaataatgtctgctgagtgatggggctggaacctagattggagaaggtttgagcgaatggaaggtaagaaagtgactaaatgagtatagaaaactaccaagaagcttggctgttgctggtgaaagaatattacacaagtagggccaggattactgtcttgccaaacaggacagaacactaagcctctgtatttagttgctaatttattgtgacagaggagcatattgatctgtccccgtgattgtgcagttagcaaaacccaggctttgagaaaccctgtaggtcaaataccccaggctcctccacagataatctctgagggaaagacagagttgtggggagcatgtgggggttgtaccaggatttaaaagatacacggcaattttagaaattagcaagtctaaactatgatacctaaggatgcacacctgggtgataaaattataaagaaatggccgggtgtggtggctcacacctgtaatcccagcacttttagaggccgaggtgggtggatcacctgaggtcaggagttcgagacaagcctgaccaacatggagaaacctcatctctactaaaaatacaaaattggccgggcgtggtggcacatgctgtaatcccagctactccggaggctgaggcaggagaatcgcttgaacctgggaggcggaggttgtggtgagccaagtttacaagtccttccactttctctctgaggcagaaagagcaagggtttttctctccattttatggttgggaaaattgaggcctgcctgagtgtgtgacttgtggcaagtcactctggtcatctagggcagaggctccccagatcccaggcctcctgcctccagtccccagcccgcagcccaggattaggcagagccagctgctttcccgtggctgccctgactccttacagggatcactgagattctgatgaacagaccttctgcccgcaatgccttggggaatgtcttcgtcagtgagctgctggaaactctggcccagctgcgggaggaccggcaagtgcgtgtcctgctcttcagaagtggagtgaagggcgtgttctgtgcaggtgcagacctgaaggagcgggaacagatgagtgaagcagaggtgggggtgtttgtccagcgactccggggcctgatgaatgacatcggagggactcagaggctgccccgttgtctgggggtggccctggcgaaggagctcatcttcacgggccgacgactgagtggaactgaggcccacgtactggggctggtgaatcacgctgtggcccagaacgaggagggggacgccgcctaccagcgggcacgagcactggcccaggagatcctgccccaggcccccattgccgtgcggctgggcaaagtagccattgaccgaggaacggaggtggacattgcatctgggatggccattgaagggatgtgctatgcccagaatattccaacccgggaccggctagagggcatggcagccttcagggagaagcggactcccaaatttgttggcaaatgacccccattttaaccttcagcatgggagatgcatgccctgaagagcaggatccagaaggaagatttgtggccagattgccttcatcatttcacctctccagacttccatttcttcacaaggatgatgatggaaataaaatgactggcgtgatgcctggaaccaaggtgctgatcctaccacctactgctaccttccttagcttcaccctggctagaaataatcacgagggttgggtttgctttggaaaatgcctgtctctctacttgaatgataaagaattaaattagatctctctga

SEQ ID NO: 81653 - DNA, 1743 bp, Homo sapiens
agtgcagaggaggcatggggatgagatcacacacggagccctcacagggaatgagttggggtcatttgatgttcatattagaagctgcaggttctgccttccactggggctgatggcacaagagcactgttacattttacctgctgcctttgagcttgaggttgggtggtaaaccattcttcactgttcttagcggctttatttctcatagagtcatgtgttgcttaacaacggggctacattctgagaaatgcatcattaggtgattgtggtcattgtgggagcatcacagagtgcacctacacagtcctagatggggtagcctactgcacaccaaggctacatggtgtatagcctgttgctcctagaatacaaacctggacagcatggtaccgggctgaatactgtaggcaactgtaacacaatggtaaatgtgtatctgaacatagaaaaggcacagtaaaaatacagtctaaaagattttttaaatagtacacctgtactgggcagttaccataaatggagcttgcaggactggaagctgcactggtttacaagtccttccactttctctctgaggcagaaagagcaagggtttttctctccattttatggttgggaaaattgaggcctgcctgagtgtgtgacttgtggcaagtcactctggtcatctagggcagaggctccccagatcccaggcctcctgcctccagtccccagcccgcagcccaggattaggcagagccagctgctttcccgtggctgccctgactccttacagggatcactgagattctgatgaacagaccttctgcccgcaatgccttggggaatgtcttcgtcagtgagctgctggaaactctggcccagctgcgggaggaccggcaagtgcgtgtcctgctcttcagaagtggagtgaagggcgtgttctgtgcaggtgcagacctgaaggagcgggaacagatgagtgaagcagaggtgggggtgtttgtccagcgactccggggcctgatgaatgacatcgcttcctcggcagtcatgggactgattgagaccacgcgagggctcctcccgggggcaggagggactcagaggctgccccgttgtctgggggtggccctggcgaaggagctcatcttcacgggccgacgactgagtggaactgaggcccacgtactggggctggtgaatcacgctgtggcccagaacgaggagggggacgccgcctaccagcgggcacgagcactggcccaggagatcctgccccaggcccccattgccgtgcggctgggcaaagtagccattgaccgaggaacggaggtggacattgcatctgggatggccattgaagggatgtgctatgcccagaatattccaacccgggaccggctagagggcatggcagccttcagggagaagcggactcccaaatttgttggcaaatgacccccattttaaccttcagcatgggagatgcatgccctgaagagcaggatccagaaggaagatttgtggccagattgccttcatcatttcacctctccagacttccatttcttcacaaggatgatgatggaaataaaatgactggcgtgatgcctggaaccaaggtgctgatcctaccacctactgctaccttccttagcttcaccctggctagaaataatcacgagggttgggtttgctttggaaaatgcctgtctctctacttgaatgataaagaattaaattagatctctctga

SEQ ID NO: 81654 - DNA, 1260 bp, Homo sapiens
agcatatgtgcaagcaaggttcacacaccccatttaatcttcacaccaccacggggtagtcactattatccccattttacaggattaaaacactgacgctgggaggttgacagagttacaccaaatcacacagaggagctgggcttcccccgacctcctccgctcaagtctccctgtccccgggaggtgcggaaggaggcaacagacgcttggcccataggtggagcaattggcgaaggcttcgcccgacgccggaactgcgagctctcagcgggagccgagacggtgcagggcgggagaagcaccttcactcccagcctgcgccccgatgctgcgcgttctgtgcctcctgcgcccctggaggccccttcgggcccgcggctgcgcttccgacggggcggccgggggctcagagatccaagtgcgcgccctggcgggtccggaccaagggatcactgagattctgatgaacagaccttctgcccgcaatgccttggggaatgtcttcgtcagtgagctgctggaaactctggcccagctgcgggaggaccggcaagtgcgtgtcctgctcttcagaagtggagtgaagggcgtgttctgtgcaggtgcagacctgaaggagcgggaacagatgagtgaagcagaggtgggggtgtttgtccagcgagactgagtggaactgaggcccacgtactggggctggtgaatcacgctgtggcccagaacgaggagggggacgccgcctaccagcgggcacgagcactggcccaggagatcctgccccaggcccccattgccgtgcggctgggcaaagtagccattgaccgaggaacggaggtggacattgcatctgggatggccattgaagggatgtgctatgcccagaatattccaacccgggaccggctagagggcatggcagccttcagggagaagcggactcccaaatttgttggcaaatgacccccattttaaccttcagcatgggagatgcatgccctgaagagcaggatccagaaggaagatttgtggccagattgccttcatcatttcacctctccagacttccatttcttcacaaggatgatgatggaaataaaatgactggcgtgatgcctggaaccaaggtgctgatcctaccacctactgctaccttccttagcttcaccctggctagaaataatcacgagggttgggtttgctttggaaaatgcctgtctctctacttgaatgataaagaattaaattagatctctctga

SEQ ID NO: 81655 - DNA, 3255 bp, Homo sapiens
ctacccccaccagcatctaaggagagtcttctttctgtttggagttctgtgataagacagatgactcacccagggggatggaggaggatgaccgagggcagttctctcagagagggagttctggctcttcagcttttgtgtcccgccccaccctcagggttcaagcctggccattccaaagcagttaagtttccccaagcatgctttcaagttttgacaattgctgttacctttgcctgagataccccttcttggttacttgaacttttacttgtccttcaagccctccagtacctcctcctccaggaagccttcccaacccaccctctgagctttttattggagcactgatgatcctgggtcaataatgcctgatacacatttgtcttccccatgagactgagccccatgggaacaaaggctatgtctgattcattctgtgttcccagttcccagcacccagcacagggcttggcacaaagaaagggaggccccagggaggccagcggattaggcctgaacagggatcatccagcccatcctcccattcctcttccctggctgattctgtaactttccctaaagggaaaattggcttctgagataacctggctgcgggaagcagaggttgtcgtgagcagagattgtgccattgcactccagcctgggcaacaacagcgagactccatctcaaaaaaaaaaaaaaaaaagaattaagataacctggctgaggttccatgtaatgtccccagacctgggtccactgaggcctctgtcccaaccagcttgcccctccccagccttgagtctctgtcctggtcccaccagggctttgcaggctgagcctttcttcctctccacagcagccttccctgcacccaccattgcggctatggatgggtttgccttgggcggaggcctagagcttgccctggcctgtgacctccgagtggcaggtactgggccaggactgggggcagggggtggggctagggagtcaggggtgagtgaaacagggtgagtctggacattctgcagtcagccactgttcttggcttccaaccaaaagcaaaactaaggcaaggcagagcacagagggtgctcaggcagaagctgcttcccctcctggtgcagccattagctgctgtagtatctgtgacctgtcagaacctgcttccttcattttgggaatatttgaccaacctcagagcaattgctgttacgagccaaggaggtcaaagagcaatgtccagtcttcccattctgtccaagtcagatttatcgaccatgtttcggaaaaaggtgagcctcagggatagtttgtcaatggctgagctaatcacaaaggtgcctgggcaggaatactggcaccagccaaatttgcattacttgttctgagcaattgagctttgtttgaagaatgggaggggataaagaagataactgatcattttctcaggtgactgacctggtgattaggagcagccttcttggatgcagttaggcaaagtctgaatgtcttcccttctccccccaccgctctctcctgccaccccaggagcaacatataaaaatgtgtagctccaggcatgaaagtagcttctgtctacacaatgcaggtcaaagagaaggaactgaccaggtgtccaggcaccaaaataccaggctggtctagccccaactctccttctcacatgcccacgttcacgcaactaactcacagggttttggggaagactaagacggagtgaatgtaaaacccactcccttctgcccacgttcacatggtccatgctgagggaattcagaaaaggagacagacccgggggggtgcgtcagtcaaggcaagtttctcgaaggaaggaagcagaactcaggaggacatggactggaacagtcagggcaatttcaggctgtgacaaagctggaacggacgactgtagcaggagcaggagtcactgacattctaggccaggccagggctaagccagagaacctattaatagtaatccacaaatagatatggggcacctcctaggaactctccttgttccaagcgtcgtacctcgtgtgatccttagcggctctctgaagcagacagaagagggccagccatctttcttccacctttgaggcttgggaagggtgagacttgctggtgacttacaactccatcaaaggggcatggtgaaataagggcctgggctcctgacttctgggctagggctcttccaaaggcagagtctggagaggcctggctgtggccagaccatggggcaagtggctagaggggcgagtagacagcagaggcagctgtggcccccgggattagcactgggggaccggatgggggagggaggcctcactttgttctatctgagcagcttcctcggcagtcatgggactgattgagaccacgcgagggctcctcccgggggcaggtaatcgcaactacagcacccgcccaattccaccccatccagggtccttcgctgctttccttttttgccctctgttctgggctctgccctcccacctgaaccctgctcctctgagaagtcttggctgagtcccaggctgagccttctctgggttcccacttcccatgctgattcccaccctgctccctccatcctggtaggagggactcagaggctgccccgttgtctgggggtggccctggcgaaggagctcatcttcacgggccgacgactgagtggaactgaggcccacgtactggggctggtgaatcacgctgtggcccagaacgaggagggggacgccgcctaccagcgggcacgagcactggcccaggagatcctgccccaggcccccattgccgtgcggctgggcaaagtagccattgaccgaggaacggagaatattccaacccgggaccggctagagggcatggcagccttcagggagaagcggactcccaaatttgttggcaaatgacccccattttaaccttcagcatgggagatgcatgccctgaagagcaggatccagaaggaagatttgtggccagattgccttcatcatttcacctctccagacttccatttcttcacaaggatgatgatggaaataaaatgactggcgtgatgcctggaaccaaggtgctgatcctaccacctactgctaccttccttagcttcaccctggctagaaataatcacgagggttgggtttgctttggaaaatgcctgtctctctacttgaatgataaagaattaaattagatctctctga

SEQ ID NO: 81656 - DNA, 3055 bp, Homo sapiens
ctacccccaccagcatctaaggagagtcttctttctgtttggagttctgtgataagacagatgactcacccagggggatggaggaggatgaccgagggcagttctctcagagagggagttctggctcttcagcttttgtgtcccgccccaccctcagggttcaagcctggccattccaaagcagttaagtttccccaagcatgctttcaagttttgacaattgctgttacctttgcctgagataccccttcttggttacttgaacttttacttgtccttcaagccctccagtacctcctcctccaggaagccttcccaacccaccctctgagctttttattggagcactgatgatcctgggtcaataatgcctgatacacatttgtcttccccatgagactgagccccatgggaacaaaggctatgtctgattcattctgtgttcccagttcccagcacccagcacagggcttggcacaaagaaagggaggccccagggaggccagcggattaggcctgaacagggatcatccagcccatcctcccattcctcttccctggctgattctgtaactttccctaaagggaaaattggcttctgagataacctggctgcgggaagcagaggttgtcgtgagcagagattgtgccattgcactccagcctgggcaacaacagcgagactccatctcaaaaaaaaaaaaaaaaaagaattaagataacctggctgaggttccatgtaatgtccccagacctgggtccactgaggcctctgtcccaaccagcttgcccctccccagccttgagtctctgtcctggtcccaccagggctttgcaggctgagcctttcttcctctccacagcagccttccctgcacccaccattgcggctatggatgggtttgccttgggcggaggcctagagcttgccctggcctgtgacctccgagtggcaggtactgggccaggactgggggcagggggtggggctagggagtcaggggtgagtgaaacagggtgagtctggacattctgcagtcagccactgttcttggcttccaaccaaaagcaaaactaaggcaaggcagagcacagagggtgctcaggcagaagctgcttcccctcctggtgcagccattagctgctgtagtatctgtgacctgtcagaacctgcttccttcattttgggaatatttgaccaacctcagagcaattgctgttacgagccaaggaggtcaaagagcaatgtccagtcttcccattctgtccaagtcagatttatcgaccatgtttcggaaaaaggtgagcctcagggatagtttgtcaatggctgagctaatcacaaaggtgcctgggcaggaatactggcaccagccaaatttgcattacttgttctgagcaattgagctttgtttgaagaatgggaggggataaagaagataactgatcattttctcaggtgactgacctggtgattaggagcagccttcttggatgcagttaggcaaagtctgaatgtcttcccttctccccccaccgctctctcctgccaccccaggagcaacatataaaaatgtgtagctccaggcatgaaagtagcttctgtctacacaatgcaggtcaaagagaaggaactgaccaggtgtccaggcaccaaaataccaggctggtctagccccaactctccttctcacatgcccacgttcacgcaactaactcacagggttttggggaagactaagacggagtgaatgtaaaacccactcccttctgcccacgttcacatggtccatgctgagggaattcagaaaaggagacagacccgggggggtgcgtcagtcaaggcaagtttctcgaaggaaggaagcagaactcaggaggacatggactggaacagtcagggcaatttcaggctgtgacaaagctggaacggacgactgtagcaggagcaggagtcactgacattctaggccaggccagggctaagccagagaacctattaatagtaatccacaaatagatatggggcacctcctaggaactctccttgttccaagcgtcgtacctcgtgtgatccttagcggctctctgaagcagacagaagagggccagccatctttcttccacctttgaggcttgggaagggtgagacttgctggtgacttacaactccatcaaaggggcatggtgaaataagggcctgggctcctgacttctgggctagggctcttccaaaggcagagtctggagaggcctggctgtggccagaccatggggcaagtggctagaggggcgagtagacagcagaggcagctgtggcccccgggattagcactgggggaccggatgggggagggaggcctcactttgttctatctgagcagcttcctcggcagtcatgggactgattgagaccacgcgagggctcctcccgggggcaggagggactcagaggctgccccgttgtctgggggtggccctggcgaaggagctcatcttcacgggccgacgactgagtggaactgaggcccacgtactggggctggtgaatcacgctgtggcccagaacgaggagggggacgccgcctaccagcgggcacgagcactggcccaggagatcctgccccaggcccccattgccgtgcggctgggcaaagtagccattgaccgaggaacggagaatattccaacccgggaccggctagagggcatggcagccttcagggagaagcggactcccaaatttgttggcaaatgacccccattttaaccttcagcatgggagatgcatgccctgaagagcaggatccagaaggaagatttgtggccagattgccttcatcatttcacctctccagacttccatttcttcacaaggatgatgatggaaataaaatgactggcgtgatgcctggaaccaaggtgctgatcctaccacctactgctaccttccttagcttcaccctggctagaaataatcacgagggttgggtttgctttggaaaatgcctgtctctctacttgaatgataaagaattaaattagatctctctga

SEQ ID NO: 81657 - DNA, 3628 bp, Homo sapiens
ctacccccaccagcatctaaggagagtcttctttctgtttggagttctgtgataagacagatgactcacccagggggatggaggaggatgaccgagggcagttctctcagagagggagttctggctcttcagcttttgtgtcccgccccaccctcagggttcaagcctggccattccaaagcagttaagtttccccaagcatgctttcaagttttgacaattgctgttacctttgcctgagataccccttcttggttacttgaacttttacttgtccttcaagccctccagtacctcctcctccaggaagccttcccaacccaccctctgagctttttattggagcactgatgatcctgggtcaataatgcctgatacacatttgtcttccccatgagactgagccccatgggaacaaaggctatgtctgattcattctgtgttcccagttcccagcacccagcacagggcttggcacaaagaaagggaggccccagggaggccagcggattaggcctgaacagggatcatccagcccatcctcccattcctcttccctggctgattctgtaactttccctaaagggaaaattggcttctgagataacctggctgcgggaagcagaggttgtcgtgagcagagattgtgccattgcactccagcctgggcaacaacagcgagactccatctcaaaaaaaaaaaaaaaaaagaattaagataacctggctgaggttccatgtaatgtccccagacctgggtccactgaggcctctgtcccaaccagcttgcccctccccagccttgagtctctgtcctggtcccaccagggctttgcaggctgagcctttcttcctctccacagcagccttccctgcacccaccattgcggctatggatgggtttgccttgggcggaggcctagagcttgccctggcctgtgacctccgagtggcaggtactgggccaggactgggggcagggggtggggctagggagtcaggggtgagtgaaacagggtgagtctggacattctgcagtcagccactgttcttggcttccaaccaaaagcaaaactaaggcaaggcagagcacagagggtgctcaggcagaagctgcttcccctcctggtgcagccattagctgctgtagtatctgtgacctgtcagaacctgcttccttcattttgggaatatttgaccaacctcagagcaattgctgttacgagccaaggaggtcaaagagcaatgtccagtcttcccattctgtccaagtcagatttatcgaccatgtttcggaaaaaggtgagcctcagggatagtttgtcaatggctgagctaatcacaaaggtgcctgggcaggaatactggcaccagccaaatttgcattacttgttctgagcaattgagctttgtttgaagaatgggaggggataaagaagataactgatcattttctcaggtgactgacctggtgattaggagcagccttcttggatgcagttaggcaaagtctgaatgtcttcccttctccccccaccgctctctcctgccaccccaggagcaacatataaaaatgtgtagctccaggcatgaaagtagcttctgtctacacaatgcaggtcaaagagaaggaactgaccaggtgtccaggcaccaaaataccaggctggtctagccccaactctccttctcacatgcccacgttcacgcaactaactcacagggttttggggaagactaagacggagtgaatgtaaaacccactcccttctgcccacgttcacatggtccatgctgagggaattcagaaaaggagacagacccgggggggtgcgtcagtcaaggcaagtttctcgaaggaaggaagcagaactcaggaggacatggactggaacagtcagggcaatttcaggctgtgacaaagctggaacggacgactgtagcaggagcaggagtcactgacattctaggccaggccagggctaagccagagaacctattaatagtaatccacaaatagatatggggcacctcctaggaactctccttgttccaagcgtcgtacctcgtgtgatccttagcggctctctgaagcagacagaagagggccagccatctttcttccacctttgaggcttgggaagggtgagacttgctggtgacttacaactccatcaaaggggcatggtgaaataagggcctgggctcctgacttctgggctagggctcttccaaaggcagagtctggagaggcctggctgtggccagaccatggggcaagtggctagaggggcgagtagacagcagaggcagctgtggcccccgggattagcactgggggaccggatgggggagggaggcctcactttgttctatctgagcagcttcctcggcagtcatgggactgattgagaccacgcgagggctcctcccgggggcaggtaatcgcaactacagcacccgcccaattccaccccatccagggtccttcgctgctttccttttttgccctctgttctgggctctgccctcccacctgaaccctgctcctctgagaagtcttggctgagtcccaggctgagccttctctgggttcccacttcccatgctgattcccaccctgctccctccatcctggtaggagggactcagaggctgccccgttgtctgggggtggccctggcgaaggagctcatcttcacgggccgacgactgagtggaactgaggcccacgtactggggctggtgaatcacgctgtggcccagaacgaggagggggacgccgcctaccagcgggcacgagcactggcccaggagatcctgccccaggcccccattgccgtgcggctgggcaaagtagccattgaccgaggaacggaggtggacattgcatctgggatggccattgaagggatgtgctatgcccagaatattccaacccgggaccggctagagggcatggcagccttcagggagaagcggactcccaaatttgttggcaaatgacccccattttaaccttcagcatgggagatgcatgccctgaagagcaggatccagaaggaagatttgtggccagattgccttcatcatttcacctctccagacttccatttcttcacaaggatgatgatggaaataaaatgactggcgtgatgcctggaaccaaggtgctgatcctaccacctactgctaccttccttagcttcaccctggctagaaataatcacgagggttgggtttgctttggaaaatgcctgtctctctacttgaatgataaagaattaaattagatctctctgatctgagtcttggtatcattggctctcagcccctgacctctctcagttatcaggcactcattagagatgtcagaagattttaagatacccctagtttcttcctgtgaacaacagaggtaataaataaactctgacatcggttgaacatgtgtcaggggtcagactgcagatcccagtctctgccagttacttgctgtataaccgtggacaaattgtttaaatgctctgggcctcagcttcctcacctacaaaacaaaacttgtgaagatttagcaaaataaaaacacttcatattcaataaatatgttttaattgttaaattacag

SEQ ID NO: 81658 - DNA, 3633 bp, Homo sapiens
ctacccccaccagcatctaaggagagtcttctttctgtttggagttctgtgataagacagatgactcacccagggggatggaggaggatgaccgagggcagttctctcagagagggagttctggctcttcagcttttgtgtcccgccccaccctcagggttcaagcctggccattccaaagcagttaagtttccccaagcatgctttcaagttttgacaattgctgttacctttgcctgagataccccttcttggttacttgaacttttacttgtccttcaagccctccagtacctcctcctccaggaagccttcccaacccaccctctgagctttttattggagcactgatgatcctgggtcaataatgcctgatacacatttgtcttccccatgagactgagccccatgggaacaaaggctatgtctgattcattctgtgttcccagttcccagcacccagcacagggcttggcacaaagaaagggaggccccagggaggccagcggattaggcctgaacagggatcatccagcccatcctcccattcctcttccctggctgattctgtaactttccctaaagggaaaattggcttctgagataacctggctgcgggaagcagaggttgtcgtgagcagagattgtgccattgcactccagcctgggcaacaacagcgagactccatctcaaaaaaaaaaaaaaaaaagaattaagataacctggctgaggttccatgtaatgtccccagacctgggtccactgaggcctctgtcccaaccagcttgcccctccccagccttgagtctctgtcctggtcccaccagggctttgcaggctgagcctttcttcctctccacagcagccttccctgcacccaccattgcggctatggatgggtttgccttgggcggaggcctagagcttgccctggcctgtgacctccgagtggcaggtactgggccaggactgggggcagggggtggggctagggagtcaggggtgagtgaaacagggtgagtctggacattctgcagtcagccactgttcttggcttccaaccaaaagcaaaactaaggcaaggcagagcacagagggtgctcaggcagaagctgcttcccctcctggtgcagccattagctgctgtagtatctgtgacctgtcagaacctgcttccttcattttgggaatatttgaccaacctcagagcaattgctgttacgagccaaggaggtcaaagagcaatgtccagtcttcccattctgtccaagtcagatttatcgaccatgtttcggaaaaaggtgagcctcagggatagtttgtcaatggctgagctaatcacaaaggtgcctgggcaggaatactggcaccagccaaatttgcattacttgttctgagcaattgagctttgtttgaagaatgggaggggataaagaagataactgatcattttctcaggtgactgacctggtgattaggagcagccttcttggatgcagttaggcaaagtctgaatgtcttcccttctccccccaccgctctctcctgccaccccaggagcaacatataaaaatgtgtagctccaggcatgaaagtagcttctgtctacacaatgcaggtcaaagagaaggaactgaccaggtgtccaggcaccaaaataccaggctggtctagccccaactctccttctcacatgcccacgttcacgcaactaactcacagggttttggggaagactaagacggagtgaatgtaaaacccactcccttctgcccacgttcacatggtccatgctgagggaattcagaaaaggagacagacccgggggggtgcgtcagtcaaggcaagtttctcgaaggaaggaagcagaactcaggaggacatggactggaacagtcagggcaatttcaggctgtgacaaagctggaacggacgactgtagcaggagcaggagtcactgacattctaggccaggccagggctaagccagagaacctattaatagtaatccacaaatagatatggggcacctcctaggaactctccttgttccaagcgtcgtacctcgtgtgatccttagcggctctctgaagcagacagaagagggccagccatctttcttccacctttgaggcttgggaagggtgagacttgctggtgacttacaactccatcaaaggggcatggtgaaataagggcctgggctcctgacttctgggctagggctcttccaaaggcagagtctggagaggcctggctgtggccagaccatggggcaagtggctagaggggcgagtagacagcagaggcagctgtggcccccgggattagcactgggggaccggatgggggagggaggcctcactttgttctatctgagcagcttcctcggcagtcatgggactgattgagaccacgcgagggctcctcccgggggcaggtaatcgcaactacagcacccgcccaattccaccccatccagggtccttcgctgctttccttttttgccctctgttctgggctctgccctcccacctgaaccctgctcctctgagaagtcttggctgagtcccaggctgagccttctctgggttcccacttcccatgctgattcccaccctgctccctccatcctggtaggagggactcagaggctgccccgttgtctgggggtggccctggcgaaggagctcatcttcacgggccgacgactgagtggaactgaggcccacgtactggggctggtgaatcacgctgtggcccagaacgaggagggggacgccgcctaccagcgggcacgagcactggcccaggagatcctgccccaggcccccattgccgtgcggctgggcaaagtagccattgaccgaggaacggaggtggacattgcatctgggatggccattgaagggatgtgctatgcccagaatattccaacccgggaccggctagagggcatggcagccttcagggagaagcggactcccaaatttgttggcaaatgacccccattttaaccttcagcatgggagatgcatgccctgaagagcaggatccagaaggaagatttgtggccagattgccttcatcatttcacctctccagacttccatttcttcacaaggatgatgatggaaataaaatgactggcgtgatgcctggaaccaaggtgctgatcctaccacctactgctaccttccttagcttcaccctggctagaaataatcacgagggttgggtttgctttggaaaatgcctgtctctctacttgaatgataaagaattaaattagatctctctgaaaaacacaaccaaccacacacaagcaaacaacacagaataacaaaacaacgccatcgcccatcgatcacacctccacccagccgccgcgccgcgactgagccctacatacacccaggggcacctcgaagagcacagcagaatacactagaagagaagaacaactaagaagacgacatcaatgaacgagggcgcgcgggtagcctaccgcacgacacacacagagcagcagccgcgacacgacgacagaccgcatgcacacaccagacccgagaccagagcaagacaacgaagcacctcggtgagcacctacatagcgagacacggagaca

SEQ ID NO: 81659 - DNA, 3575 bp, Homo sapiens
ctacccccaccagcatctaaggagagtcttctttctgtttggagttctgtgataagacagatgactcacccagggggatggaggaggatgaccgagggcagttctctcagagagggagttctggctcttcagcttttgtgtcccgccccaccctcagggttcaagcctggccattccaaagcagttaagtttccccaagcatgctttcaagttttgacaattgctgttacctttgcctgagataccccttcttggttacttgaacttttacttgtccttcaagccctccagtacctcctcctccaggaagccttcccaacccaccctctgagctttttattggagcactgatgatcctgggtcaataatgcctgatacacatttgtcttccccatgagactgagccccatgggaacaaaggctatgtctgattcattctgtgttcccagttcccagcacccagcacagggcttggcacaaagaaagggaggccccagggaggccagcggattaggcctgaacagggatcatccagcccatcctcccattcctcttccctggctgattctgtaactttccctaaagggaaaattggcttctgagataacctggctgcgggaagcagaggttgtcgtgagcagagattgtgccattgcactccagcctgggcaacaacagcgagactccatctcaaaaaaaaaaaaaaaaaagaattaagataacctggctgaggttccatgtaatgtccccagacctgggtccactgaggcctctgtcccaaccagcttgcccctccccagccttgagtctctgtcctggtcccaccagggctttgcaggctgagcctttcttcctctccacagcagccttccctgcacccaccattgcggctatggatgggtttgccttgggcggaggcctagagcttgccctggcctgtgacctccgagtggcaggtactgggccaggactgggggcagggggtggggctagggagtcaggggtgagtgaaacagggtgagtctggacattctgcagtcagccactgttcttggcttccaaccaaaagcaaaactaaggcaaggcagagcacagagggtgctcaggcagaagctgcttcccctcctggtgcagccattagctgctgtagtatctgtgacctgtcagaacctgcttccttcattttgggaatatttgaccaacctcagagcaattgctgttacgagccaaggaggtcaaagagcaatgtccagtcttcccattctgtccaagtcagatttatcgaccatgtttcggaaaaaggtgagcctcagggatagtttgtcaatggctgagctaatcacaaaggtgcctgggcaggaatactggcaccagccaaatttgcattacttgttctgagcaattgagctttgtttgaagaatgggaggggataaagaagataactgatcattttctcaggtgactgacctggtgattaggagcagccttcttggatgcagttaggcaaagtctgaatgtcttcccttctccccccaccgctctctcctgccaccccaggagcaacatataaaaatgtgtagctccaggcatgaaagtagcttctgtctacacaatgcaggtcaaagagaaggaactgaccaggtgtccaggcaccaaaataccaggctggtctagccccaactctccttctcacatgcccacgttcacgcaactaactcacagggttttggggaagactaagacggagtgaatgtaaaacccactcccttctgcccacgttcacatggtccatgctgagggaattcagaaaaggagacagacccgggggggtgcgtcagtcaaggcaagtttctcgaaggaaggaagcagaactcaggaggacatggactggaacagtcagggcaatttcaggctgtgacaaagctggaacggacgactgtagcaggagcaggagtcactgacattctaggccaggccagggctaagccagagaacctattaatagtaatccacaaatagatatggggcacctcctaggaactctccttgttccaagcgtcgtacctcgtgtgatccttagcggctctctgaagcagacagaagagggccagccatctttcttccacctttgaggcttgggaagggtgagacttgctggtgacttacaactccatcaaaggggcatggtgaaataagggcctgggctcctgacttctgggctagggctcttccaaaggcagagtctggagaggcctggctgtggccagaccatggggcaagtggctagaggggcgagtagacagcagaggcagctgtggcccccgggattagcactgggggaccggatgggggagggaggcctcactttgttctatctgagcagcttcctcggcagtcatgggactgattgagaccacgcgagggctcctcccgggggcaggtaatcgcaactacagcacccgcccaattccaccccatccagggtccttcgctgctttccttttttgccctctgttctgggctctgccctcccacctgaaccctgctcctctgagaagtcttggctgagtcccaggctgagccttctctgggttcccacttcccatgctgattcccaccctgctccctccatcctggtaggagggactcagaggctgccccgttgtctgggggtggccctggcgaaggagctcatcttcacgggccgacgactgagtggaactgaggcccacgtactggggctggtgaatcacgctgtggcccagaacgaggagggggacgccgcctaccagcgggcacgagcactggcccaggagatcctgccccaggcccccattgccgtgcggctgggcaaagtagccattgaccgaggaacggaggtggacattgcatctgggatggccattgaagggatgtgctatgcccagaatattccaacccgggaccggctagagggcatggcagccttcagcatgggagatgcatgccctgaagagcaggatccagaaggaagatttgtggccagattgccttcatcatttcacctctccagacttccatttcttcacaaggatgatgatggaaataaaatgactggcgtgatgcctggaaccaaggtgctgatcctaccacctactgctaccttccttagcttcaccctggctagaaataatcacgagggttgggtttgctttggaaaatgcctgtctctctacttgaatgataaagaattaaattagatctctctgatctgagtcttggtatcattggctctcagcccctgacctctctcagttatcaggcactcattagagatgtcagaagattttaagatacccctagtttcttcctgtgaacaacagaggtaataaataaactctgacatcggttgaacatgtgtcaggggtcagactgcagatcccagtctctgccagttacttgctgtataaccgtggacaaattgtttaaatgctctgggcctcagcttcctcacctacaaaacaaaacttgtgaagatttagcaaaataaaaacacttcatattcaataaatatgttttaattgttaaattacag

SEQ ID NO: 81660 - DNA, 3645 bp, Homo sapiens
ctacccccaccagcatctaaggagagtcttctttctgtttggagttctgtgataagacagatgactcacccagggggatggaggaggatgaccgagggcagttctctcagagagggagttctggctcttcagcttttgtgtcccgccccaccctcagggttcaagcctggccattccaaagcagttaagtttccccaagcatgctttcaagttttgacaattgctgttacctttgcctgagataccccttcttggttacttgaacttttacttgtccttcaagccctccagtacctcctcctccaggaagccttcccaacccaccctctgagctttttattggagcactgatgatcctgggtcaataatgcctgatacacatttgtcttccccatgagactgagccccatgggaacaaaggctatgtctgattcattctgtgttcccagttcccagcacccagcacagggcttggcacaaagaaagggaggccccagggaggccagcggattaggcctgaacagggatcatccagcccatcctcccattcctcttccctggctgattctgtaactttccctaaagggaaaattggcttctgagataacctggctgcgggaagcagaggttgtcgtgagcagagattgtgccattgcactccagcctgggcaacaacagcgagactccatctcaaaaaaaaaaaaaaaaaagaattaagataacctggctgaggttccatgtaatgtccccagacctgggtccactgaggcctctgtcccaaccagcttgcccctccccagccttgagtctctgtcctggtcccaccagggctttgcaggctgagcctttcttcctctccacagcagccttccctgcacccaccattgcggctatggatgggtttgccttgggcggaggcctagagcttgccctggcctgtgacctccgagtggcaggtactgggccaggactgggggcagggggtggggctagggagtcaggggtgagtgaaacagggtgagtctggacattctgcagtcagccactgttcttggcttccaaccaaaagcaaaactaaggcaaggcagagcacagagggtgctcaggcagaagctgcttcccctcctggtgcagccattagctgctgtagtatctgtgacctgtcagaacctgcttccttcattttgggaatatttgaccaacctcagagcaattgctgttacgagccaaggaggtcaaagagcaatgtccagtcttcccattctgtccaagtcagatttatcgaccatgtttcggaaaaaggtgagcctcagggatagtttgtcaatggctgagctaatcacaaaggtgcctgggcaggaatactggcaccagccaaatttgcattacttgttctgagcaattgagctttgtttgaagaatgggaggggataaagaagataactgatcattttctcaggtgactgacctggtgattaggagcagccttcttggatgcagttaggcaaagtctgaatgtcttcccttctccccccaccgctctctcctgccaccccaggagcaacatataaaaatgtgtagctccaggcatgaaagtagcttctgtctacacaatgcaggtcaaagagaaggaactgaccaggtgtccaggcaccaaaataccaggctggtctagccccaactctccttctcacatgcccacgttcacgcaactaactcacagggttttggggaagactaagacggagtgaatgtaaaacccactcccttctgcccacgttcacatggtccatgctgagggaattcagaaaaggagacagacccgggggggtgcgtcagtcaaggcaagtttctcgaaggaaggaagcagaactcaggaggacatggactggaacagtcagggcaatttcaggctgtgacaaagctggaacggacgactgtagcaggagcaggagtcactgacattctaggccaggccagggctaagccagagaacctattaatagtaatccacaaatagatatggggcacctcctaggaactctccttgttccaagcgtcgtacctcgtgtgatccttagcggctctctgaagcagacagaagagggccagccatctttcttccacctttgaggcttgggaagggtgagacttgctggtgacttacaactccatcaaaggggcatggtgaaataagggcctgggctcctgacttctgggctagggctcttccaaaggcagagtctggagaggcctggctgtggccagaccatggggcaagtggctagaggggcgagtagacagcagaggcagctgtggcccccgggattagcactgggggaccggatgggggagggaggcctcactttgttctatctgagcagcttcctcggcagtcatgggactgattgagaccacgcgagggctcctcccgggggcaggtaatcgcaactacagcacccgcccaattccaccccatccagggtccttcgctgctttccttttttgccctctgttctgggctctgccctcccacctgaaccctgctcctctgagaagtcttggctgagtcccaggctgagccttctctgggttcccacttcccatgctgattcccaccctgctccctccatcctggtaggagggactcagaggctgccccgttgtctgggggtggccctggcgaaggagctcatcttcacgggccgacgactgagtggaactgaggcccacgtactggggctggtgaatcacgctgtggcccagaacgaggagggggacgccgcctaccagcgggcacgagcactggcccaggagatcctgccccaggcccccattgccgtgcggctgggcaaagtagccattgaccgaggaacggaggtggacattgcatctgggatggccattgaagggatgtgctatgcccaggtatgtagcaaccagcccatgcctgcttgttaacataggctgggccaggctagagggactttgtatggtacatgaccaattttagaaggttcttctcaacacaaacagtctgaccgcatccatcgtccctcataagtcacctggagtggcttgaggagagccatagtgcttctctctgggacttttccctcaaccatctaatgtactggggttcatcctgcccacttaatgccgagaatcacagaacacaggtccttaagaggaagaaccacatcttttgcctctgtatcagatgccactgtaaagttcaggatggagttgggaggtcaagggcttggttgtagcctgcaggctgtgttcaatgtaggggctgtacacttgggactgacctattaaatctcttactcatgggtgagtaaaaaatgctaatctccacgttaacagatatccaaaatactcctaaggggtcctgggacttggagaaactagtgtgaacctggattcaaagccagatttcttactgcaaagaatttttttctctactgagcagcctcatgtcagaccactgcagacggcagctgagttctcaggaggcatgaaagcagtgtgcaagtggaggctaatgctgatggggcacagagaatacaaaggctggcctgtcttccccaggagacaaagcagccacggaggcttatacctttgcatgcctcaagatca

SEQ ID NO: 81661 - DNA, 3544 bp, Homo sapiens
ctacccccaccagcatctaaggagagtcttctttctgtttggagttctgtgataagacagatgactcacccagggggatggaggaggatgaccgagggcagttctctcagagagggagttctggctcttcagcttttgtgtcccgccccaccctcagggttcaagcctggccattccaaagcagttaagtttccccaagcatgctttcaagttttgacaattgctgttacctttgcctgagataccccttcttggttacttgaacttttacttgtccttcaagccctccagtacctcctcctccaggaagccttcccaacccaccctctgagctttttattggagcactgatgatcctgggtcaataatgcctgatacacatttgtcttccccatgagactgagccccatgggaacaaaggctatgtctgattcattctgtgttcccagttcccagcacccagcacagggcttggcacaaagaaagggaggccccagggaggccagcggattaggcctgaacagggatcatccagcccatcctcccattcctcttccctggctgattctgtaactttccctaaagggaaaattggcttctgagataacctggctgcgggaagcagaggttgtcgtgagcagagattgtgccattgcactccagcctgggcaacaacagcgagactccatctcaaaaaaaaaaaaaaaaaagaattaagataacctggctgaggttccatgtaatgtccccagacctgggtccactgaggcctctgtcccaaccagcttgcccctccccagccttgagtctctgtcctggtcccaccagggctttgcaggctgagcctttcttcctctccacagcagccttccctgcacccaccattgcggctatggatgggtttgccttgggcggaggcctagagcttgccctggcctgtgacctccgagtggcaggtactgggccaggactgggggcagggggtggggctagggagtcaggggtgagtgaaacagggtgagtctggacattctgcagtcagccactgttcttggcttccaaccaaaagcaaaactaaggcaaggcagagcacagagggtgctcaggcagaagctgcttcccctcctggtgcagccattagctgctgtagtatctgtgacctgtcagaacctgcttccttcattttgggaatatttgaccaacctcagagcaattgctgttacgagccaaggaggtcaaagagcaatgtccagtcttcccattctgtccaagtcagatttatcgaccatgtttcggaaaaaggtgagcctcagggatagtttgtcaatggctgagctaatcacaaaggtgcctgggcaggaatactggcaccagccaaatttgcattacttgttctgagcaattgagctttgtttgaagaatgggaggggataaagaagataactgatcattttctcaggtgactgacctggtgattaggagcagccttcttggatgcagttaggcaaagtctgaatgtcttcccttctccccccaccgctctctcctgccaccccaggagcaacatataaaaatgtgtagctccaggcatgaaagtagcttctgtctacacaatgcaggtcaaagagaaggaactgaccaggtgtccaggcaccaaaataccaggctggtctagccccaactctccttctcacatgcccacgttcacgcaactaactcacagggttttggggaagactaagacggagtgaatgtaaaacccactcccttctgcccacgttcacatggtccatgctgagggaattcagaaaaggagacagacccgggggggtgcgtcagtcaaggcaagtttctcgaaggaaggaagcagaactcaggaggacatggactggaacagtcagggcaatttcaggctgtgacaaagctggaacggacgactgtagcaggagcaggagtcactgacattctaggccaggccagggctaagccagagaacctattaatagtaatccacaaatagatatggggcacctcctaggaactctccttgttccaagcgtcgtacctcgtgtgatccttagcggctctctgaagcagacagaagagggccagccatctttcttccacctttgaggcttgggaagggtgagacttgctggtgacttacaactccatcaaaggggcatggtgaaataagggcctgggctcctgacttctgggctagggctcttccaaaggcagagtctggagaggcctggctgtggccagaccatggggcaagtggctagaggggcgagtagacagcagaggcagctgtggcccccgggattagcactgggggaccggatgggggagggaggcctcactttgttctatctgagcagcttcctcggcagtcatgggactgattgagaccacgcgagggctcctcccgggggcaggtaatcgcaactacagcacccgcccaattccaccccatccagggtccttcgctgctttccttttttgccctctgttctgggctctgccctcccacctgaaccctgctcctctgagaagtcttggctgagtcccaggctgagccttctctgggttcccacttcccatgctgattcccaccctgctccctccatcctggtaggagggactcagaggctgccccgttgtctgggggtggccctggcgaaggagctcatcttcacgggccgacgactgagtggaactgaggcccacgtactggggctggtgaatcacgctgtggcccagaacgaggagggggacgccgcctaccagcgggcacgagcactggcccaggagatcctgccccaggcccccattgccgtgcggctgggcaaagtagccattgaccgaggaacggaggtgagagggttttgggttgggacttgggtccactaaagttggtcgcggctgggacacagtgctttcagagctcagacagcacagctgggaaaaactcaggaagtggactcttctaacagacttgaactctgacctcgtgctctacgtcagtttacacatctgcaaattggccagacagtattattgtttacattctatcctcatctttctcccttggagagaggatgagattgaggttaagaaagggtaaatgatttgcccaaggtctcagaggaagtgagtagaaagaacccgggtctgtgtggctgccagtccatgctgcaagatttgtgctggcagtaatgtggcctcagggcagggcttggggtgatgccttgggtgtggctaatccatctgtccacctcaactctcccatctagttaatccatctgtccacctcaactctcccatctagtcactcatcacacactgaatccagaacaaagctgggaactgggatacagatggatgagttaaacatggtcactgcccccgggagggggcagatacagacacaaatcaaggataatggtaccacgctgacaccccagaaaggttagagctttgcggtccattatgatatccatgtgtggcttttaaattaaaagtaaaatgtggtcaggcg

SEQ ID NO: 81662 - DNA, 2590 bp, Homo sapiens
ctacccccaccagcatctaaggagagtcttctttctgtttggagttctgtgataagacagatgactcacccagggggatggaggaggatgaccgagggcagttctctcagagagggagttctggctcttcagcttttgtgtcccgccccaccctcagggttcaagcctggccattccaaagcagttaagtttccccaagcatgctttcaagttttgacaattgctgttacctttgcctgagataccccttcttggttacttgaacttttacttgtccttcaagccctccagtacctcctcctccaggaagccttcccaacccaccctctgagctttttattggagcactgatgatcctgggtcaataatgcctgatacacatttgtcttccccatgagactgagccccatgggaacaaaggctatgtctgattcattctgtgttcccagttcccagcacccagcacagggcttggcacaaagaaagggaggccccagggaggccagcggattaggcctgaacagggatcatccagcccatcctcccattcctcttccctggctgattctgtaactttccctaaagggaaaattggcttctgagataacctggctgcgggaagcagaggttgtcgtgagcagagattgtgccattgcactccagcctgggcaacaacagcgagactccatctcaaaaaaaaaaaaaaaaaagaattaagataacctggctgaggttccatgtaatgtccccagacctgggtccactgaggcctctgtcccaaccagcttgcccctccccagccttgagtctctgtcctggtcccaccagggctttgcaggctgagcctttcttcctctccacagcagccttccctgcacccaccattgcggctatggatgggtttgccttgggcggaggcctagagcttgccctggcctgtgacctccgagtggcaggtactgggccaggactgggggcagggggtggggctagggagtcaggggtgagtgaaacagggtgagtctggacattctgcagtcagccactgttcttggcttccaaccaaaagcaaaactaaggcaaggcagagcacagagggtgctcaggcagaagctgcttcccctcctggtgcagccattagctgctgtagtatctgtgacctgtcagaacctgcttccttcattttgggaatatttgaccaacctcagagcaattgctgttacgagccaaggaggtcaaagagcaatgtccagtcttcccattctgtccaagtcagatttatcgaccatgtttcggaaaaaggtgagcctcagggatagtttgtcaatggctgagctaatcacaaaggtgcctgggcaggaatactggcaccagccaaatttgcattacttgttctgagcaattgagctttgtttgaagaatgggaggggataaagaagataactgatcattttctcaggtgactgacctggtgattaggagcagccttcttggatgcagttaggcaaagtctgaatgtcttcccttctccccccaccgctctctcctgccaccccaggagcaacatataaaaatgtgtagctccaggcatgaaagtagcttctgtctacacaatgcaggtcaaagagaaggaactgaccaggtgtccaggcaccaaaataccaggctggtctagccccaactctccttctcacatgcccacgttcacgcaactaactcacagggttttggggaagactaagacggagtgaatgtaaaacccactcccttctgcccacgttcacatggtccatgctgagggaattcagaaaaggagacagacccgggggggtgcgtcagtcaaggcaagtttctcgaaggaaggaagcagaactcaggaggacatggactggaacagtggacattgcatctgggatggccattgaagggatgtgctatgcccagaatattccaacccgggaccggctagagggcatggcagccttcagggagaagcggactcccaaatttgttggcaaatgacccccattttaaccttcagcatgggagatgcatgccctgaagagcaggatccagaaggaagatttgtggccagattgccttcatcatttcacctctccagacttccatttcttcacaaggatgatgatggaaataccttccttagcttcaccctggctagaaataatcacgagggttgggtttgctttggaaaatgcctgtctctctacttgaatgataaagaattaaattagatctctctgatctgagtcttggtatcattggctctcagcccctgacctctctcagttatcaggcactcattagagatgtcagaagattttaagatacccctagtttcttcctgtgaacaacagaggtaataaataaactctgacatcggttgaacatgtgtcaggggtcagactgcagatcccagtctctgccagttacttgctgtataaccgtggacaaattgtttaaatgctctgggcctcagcttcctcacctacaaaacaaaacttgtgaagatttagcaaaataaaaacacttcatattcaataaatatgttttaattgttaaattacag

SEQ ID NO: 81663 - DNA, 3262 bp, Homo sapiens
ctgggccctcttctctgccactccctctgcctgcaacaggcttctctcctggactgcccccttccctgcaccttgccaacatgcatgcacacacacaggcactcatgcacacgctcacatatgcacccatgcatgcacacttacatgcacacatgcactcttacatcttttgcctggccaattcctactctcctgtcagctctcagcttaaaggccactgcctcctctgataactcattgctgaccttctatactagggctcccctctgcccactggaggccccttacttgtttgtcctttttctccaagttctcctcacaaatagtaattatttaatgtctgtcttccccactaggctgtaggttccatgaggacaggccttgagtctgtcctggtctctggaatcacggtgtctagtagaggccagcacacagcaaatatataaatgtacaaatgagtgaatgaagagaatctgattggccttaaggaacttacgcacttaaaataattgggcagaagagaagcagtgaaggagtgcagaggcatcacctgaaaggtaggaggaaggagaatgggggcctgccaaagccaaggcagatacgtgtcattatgcatctgtgtaaacccacagagtgtacaccaccaagagcgaaccccagtgtacactagggcccccgggtggcgacagtgcatcagtgtaggttcgtcagttgcaacacgtgcctctggtgggggatggggattgcggaaggggctgtgcctgtgtagggccagggagtataggtgaactgtattgaattgtattttccactccatttagctgtgaccctaaaactgctctaagaaaatcatctatttataaacagaataaatattcttctaagacagccaaagcagaaaacgatcaagatcggaagtgtgattaatgtcagcaaaggtttttgctgccacgaggttgaggcaaggagagaaacgtgtcccttggttagtgatgtggctatattcatcactttaatgagaataatgtctgctgagtgatggggctggaacctagattggagaaggtttgagcgaatggaaggtaagaaagtgactaaatgagtatagaaaactaccaagaagcttggctgttgctggtgaaagaatattacacaagtagggccaggattactgtcttgccaaacaggacagaacactaagcctctgtatttagttgctaatttattgtgacagaggagcatattgatctgtccccgtgattgtgcagttagcaaaacccaggctttgagaaaccctgtaggtcaaataccccaggctcctccacagataatctctgagggaaagacagagttgtggggagcatgtgggggttgtaccaggatttaaaagatacacggcaattttagaaattagcaagtctaaactatgatacctaaggatgcacacctgggtgataaaattataaagaaatggccgggtgtggtggctcacacctgtaatcccagcacttttagaggccgaggtgggtggatcacctgaggtcaggagttcgagacaagcctgaccaacatggagaaacctcatctctactaaaaatacaaaattggccgggcgtggtggcacatgctgtaatcccagctactccggaggctgaggcaggagaatcgcttgaacctgggaggcggaggttgtggtgagccaagtttacaagtccttccactttctctctgaggcagaaagagcaagggtttttctctccattttatggttgggaaaattgaggcctgcctgagtgtgtgacttgtggcaagtcactctggtcatctagggcagaggctccccagatcccaggcctcctgcctccagtccccagcccgcagcccaggattaggcagagccagctgctttcccgtggctgccctgactccttacagggatcactgagattctgatgaacagaccttctgcccgcaatgccttggggaatgtcttcgtcagtgagctgctggaaactctggcccagctgcgggaggaccggcaagtgcgtgtcctgctcttcagaagtggagtgaagggcgtgttctgtgcaggtgcagacctgaaggagcgggaacagatgagtgaagcagaggtgggggtgtttgtccagcgactccggggcctgatgaatgacatcgcagccttccctgcacccaccattgcggctatggatgggtttgccttgggcggaggcctagagcttgccctggcctgtgacctccgagtggcagcttcctcggcagtcatgggactgattgagaccacgcgagggctcctcccgggggcaggagggactcagaggctgccccgttgtctgggggtggccctggcgaaggagctcatcttcacgggccgacgactgagtggaactgaggcccacgtactggggctggtgaatcacgctgtggcccagaacgaggagggggacgccgcctaccagcgggcacgagcactggcccaggagatcctgccccaggcccccattgccgtgcggctgggcaaagtagccattgaccgaggaacggaggtggacattgcatctgggatggccattgaagggatgtgctatgcccagaatattccaacccgggaccggctagagggcatggcagccttcagcatgggagatgcatgccctgaagagcaggatccagaaggaagatttgtggccagattgccttcatcatttcacctctccagacttccatttcttcacaaggatgatgatggaaataaaatgactggcgtgatgcctggaaccaaggtgctgatcctaccacctactgctaccttccttagcttcaccctggctagaaataatcacgagggttgggtttgctttggaaaatgcctgtctctctacttgaatgataaagaattaaattagatctctctgatctgagtcttggtatcattggctctcagcccctgacctctctcagttatcaggcactcattagagatgtcagaagattttaagatacccctagtttcttcctgtgaacaacagaggtaataaataaactctgacatcggttgaacatgtgtcaggggtcagactgcagatcccagtctctgccagttacttgctgtataaccgtggacaaattgtttaaatgctctgggcctcagcttcctcacctacaaaacaaaacttgtgaagatttagcaaaataaaaacacttcatattcaataaatatgttttaattgttaaattacag

SEQ ID NO: 81664 - DNA, 1228 bp, Homo sapiens
agcatatgtgcaagcaaggttcacacaccccatttaatcttcacaccaccacggggtagtcactattatccccattttacaggattaaaacactgacgctgggaggttgacagagttacaccaaatcacacagaggagctgggcttcccccgacctcctccgctcaagtctccctgtccccgggaggtgcggaaggaggcaacagacgcttggcccataggtggagcaattggcgaaggcttcgcccgacgccggaactgcgagctctcagcgggagccgagacggtgcagggcgggagaagcaccttcactcccagcctgcgccccgatgctgcgcgttctgtgcctcctgcgcccctggaggccccttcgggcccgcggctgcgcttccgacggggcggccgggggctcagagatccaagtgcgcgccctggcgggtccggaccaaggtaaatgtgcagttccggggcggcgcatgacgcgactgggactaggccggaggcagcgggggaccggcaggtgggccgctcagtgcgttgaaggattcgatccccagtccctccctcccagttctaggcgccccaaaccgctccaggcctgagaggtgggcggcgccttagtggctccagactctagctgggggcggggggcctctggcaacctcggtctcttcaaaggccctttggggtcttccgactgtgtggaagggggagcggggtccgcacgggtaggactgggccccgcggcccccaggccaggagcgtttaagtgcgcgttcccctcccccgccaagggtcctggcccggttcgggggcggaggcagcggagccagtcccagtgcccagtgcggcagcgggcagagtgaggagggtgcctctccagccgcgcgcccgccctgggccgctagcgaacctttgcgtccttctggctccagggaaaagttcgctgtttctccgccttttggccaagatcaaggatagtatggagcggggacgaggggtggggggcaaagttcgcgggtcactggcagaaaacgcctctgatcgcgtgttgcgtttttgttgttgttgttgtttgaacttctggagcattcagtggtgctgataacgctcctcagtcctctgctggtaaccatcagggctaggcgcttctcctgccttgggtctcctccccgcatctcatcccctgtctcctgcatttgatacacagatggcattgtactgtacat

SEQ ID NO: 81665 - DNA, 1728 bp, Homo sapiens
ctgggccctcttctctgccactccctctgcctgcaacaggcttctctcctggactgcccccttccctgcaccttgccaacatgcatgcacacacacaggcactcatgcacacgctcacatatgcacccatgcatgcacacttacatgcacacatgcactcttacatcttttgcctggccaattcctactctcctgtcagctctcagcttaaaggccactgcctcctctgataactcattgctgaccttctatactagggctcccctctgcccactggaggccccttacttgtttgtcctttttctccaagttctcctcacaaatagtaattatttaatgtctgtcttccccactaggctgtaggttccatgaggacaggccttgagtctgtcctggtctctggaatcacggtgtctagtagaggccagcacacagcaaatatataaatgtacaaatgagtgaatgaagagaatctgattggccttaaggaacttacgcacttaaaataattgggcagaagagaagcagtgaaggagtgcagaggcatcacctgaaaggtaggaggaaggagaatgggggcctgccaaagccaaggcagatacgtgtcattatgcatctgtgtaaacccacagagtgtacaccaccaagagcgaaccccagtgtacactagggcccccgggtggcgacagtgcatcagtgtaggttcgtcagttgcaacacgtgcctctggtgggggatggggattgcggaaggggctgtgcctgtgtagggccagggagtataggtgaactgtattgaattgtattttccactccatttagctgtgaccctaaaactgctctaagaaaatcatctatttataaacagaataaatattcttctaagacagccaaagcagaaaacgatcaagatcggaagtgtgattaatgtcagcaaaggtttttgctgccacgaggttgaggcaaggagagaaacgtgtcccttggttagtgatgtggctatattcatcactttaatgagaataatgtctgctgagtgatggggctggaacctagattggagaaggtttgagcgaatggaaggtaagaaagtgactaaatgagtatagaaaactaccaagaagcttggctgttgctggtgaaagaatattacacaagtagggccaggattactgtcttgccaaacaggacagaacactaagcctctgtatttagttgctaatttattgtgacagaggagcatattgatctgtccccgtgattgtgcagttagcaaaacccaggctttgagaaaccctgtaggtcaaataccccaggctcctccacagataatctctgagggaaagacagagttgtggggagcatgtgggggttgtaccaggatttaaaagatacacggcaattttagaaattagcaagtctaaactatgatacctaaggatgcacacctgggtgataaaattataaagaaatggccgggtgtggtggctcacacctgtaatcccagcacttttagaggccgaggtgggtggatcacctgaggtcaggagttcgagacaagcctgaccaacatggagaaacctcatctctactaaaaatacaaaattggccgggcgtggtggcacatgctgtaatcccagctactccggaggctgaggcaggagaatcgcttgaacctgggaggcggaggttgtggtgagccaaggtaacaagagtgaaactctgtctc

SEQ ID NO: 81666 - DNA, 1022 bp, Homo sapiens
aacgggtgacaggaagcgtggtgaggcagccggatgggaaggagaactcctcttctctggcaaaatgtctcagtctgtctcgtttctcccagcagttttgtcatagttacgaatggtgtttcttctctaggagggaaattccttctcatagctatctctgctcatatagatgtctgtaggcaatagggtgggctggcttccagtgtgggtgaagatggacaaggtcagaccaatccagggagcacgtctttcttgcagtggacattgcatctgggatggccattgaagggatgtgctatgcccaggtatgtagcaaccagcccatgcctgcttgttaacataggctgggccaggctagagggactttgtatggtacatgaccaattttagaaggttcttctcaacacaaacagtctgaccgcatccatcgtccctcataagtcacctggagtggcttgaggagagccatagtgcttctctctgggacttttccctcaaccatctaatgtactggggttcatcctgcccacttaatgccgagaatcacagaacacaggtccttaagaggaagaaccacatcttttgcctctgtatcagatgccactgtaaagttcaggatggagttgggaggtcaagggcttggttgtagcctgcaggctgtgttcaatgtaggggctgtacacttgggactgacctattaaatctcttactcatgggtgagtaaaaaatgctaatctccacgttaacagatatccaaaatactcctaaggggtcctgggacttggagaaactagtgtgaacctggattcaaagccagatttcttactgcaaagaatttttttctctactgagcagcctcatgtcagaccactgcagacggcagctgagttctcaggaggcatgaaagcagtgtgcaagtggaggctaatgctgatggggcacagagaatacaaaggctggcctgtcttccccaggagacaaagcagccacggaggcttatacctttgcatgcctcaagatca

SEQ ID NO: 81667 - DNA, 998 bp, Homo sapiens
  misc_feature (956)..(956): n is a, c, g, or t
  misc_feature (988)..(988): n is a, c, g, or t
agcatatgtgcaagcaaggttcacacaccccatttaatcttcacaccaccacggggtagtcactattatccccattttacaggattaaaacactgacgctgggaggttgacagagttacaccaaatcacacagaggagctgggcttcccccgacctcctccgctcaagtctccctgtccccgggaggtgcggaaggaggcaacagacgcttggcccataggtggagcaattggcgaaggcttcgcccgacgccggaactgcgagctctcagcgggagccgagacggtgcagggcgggagaagcaccttcactcccagcctgcgccccgatgctgcgcgttctgtgcctcctgcgcccctggaggccccttcgggcccgcggctgcgcttccgacggggcggccgggggctcagagatccaagtgcgcgccctggcgggtccggaccaagggatcactgagattctgatgaacagaccttctgcccgcaatgccttggggaatgtcttcgtcagtgagctgctggaaactctggcccagctgcgggaggaccggcaagtgcgtgtcctgctcttcagaagtggagtgaagggcgtgttctgtgcaggtgcagacctgaaggagcgggaacagatgagtgaagcagaggtgggggtgtttgtccagcgactccggggcctgatgaatgacatcgcttcctcggcagtcatgggactgattgagaccacgcgagggctcctcccgggggcaggagggactcagaggctgccccgttgtctgggggtggccctggcgaaggagctcatcttcacgggccgacgactgagtggaactgaggcccacgtactggggctggtgaatcacgctgtggcccagaacgaggagggggacgccgcctaccagcgggcacgagcactggcccaggagatcctgccccaggcccccaattgcccgttcnggctggggcaaaagttagccaatttaacccgnagggaaccgg

SEQ ID NO: 81668 - DNA, 3103 bp, Homo sapiens
ctacccccaccagcatctaaggagagtcttctttctgtttggagttctgtgataagacagatgactcacccagggggatggaggaggatgaccgagggcagttctctcagagagggagttctggctcttcagcttttgtgtcccgccccaccctcagggttcaagcctggccattccaaagcagttaagtttccccaagcatgctttcaagttttgacaattgctgttacctttgcctgagataccccttcttggttacttgaacttttacttgtccttcaagccctccagtacctcctcctccaggaagccttcccaacccaccctctgagctttttattggagcactgatgatcctgggtcaataatgcctgatacacatttgtcttccccatgagactgagccccatgggaacaaaggctatgtctgattcattctgtgttcccagttcccagcacccagcacagggcttggcacaaagaaagggaggccccagggaggccagcggattaggcctgaacagggatcatccagcccatcctcccattcctcttccctggctgattctgtaactttccctaaagggaaaattggcttctgagataacctggctgcgggaagcagaggttgtcgtgagcagagattgtgccattgcactccagcctgggcaacaacagcgagactccatctcaaaaaaaaaaaaaaaaaagaattaagataacctggctgaggttccatgtaatgtccccagacctgggtccactgaggcctctgtcccaaccagcttgcccctccccagccttgagtctctgtcctggtcccaccagggctttgcaggctgagcctttcttcctctccacagcagccttccctgcacccaccattgcggctatggatgggtttgccttgggcggaggcctagagcttgccctggcctgtgacctccgagtggcaggtactgggccaggactgggggcagggggtggggctagggagtcaggggtgagtgaaacagggtgagtctggacattctgcagtcagccactgttcttggcttccaaccaaaagcaaaactaaggcaaggcagagcacagagggtgctcaggcagaagctgcttcccctcctggtgcagccattagctgctgtagtatctgtgacctgtcagaacctgcttccttcattttgggaatatttgaccaacctcagagcaattgctgttacgagccaaggaggtcaaagagcaatgtccagtcttcccattctgtccaagtcagatttatcgaccatgtttcggaaaaaggtgagcctcagggatagtttgtcaatggctgagctaatcacaaaggtgcctgggcaggaatactggcaccagccaaatttgcattacttgttctgagcaattgagctttgtttgaagaatgggaggggataaagaagataactgatcattttctcaggtgactgacctggtgattaggagcagccttcttggatgcagttaggcaaagtctgaatgtcttcccttctccccccaccgctctctcctgccaccccaggagcaacatataaaaatgtgtagctccaggcatgaaagtagcttctgtctacacaatgcaggtcaaagagaaggaactgaccaggtgtccaggcaccaaaataccaggctggtctagccccaactctccttctcacatgcccacgttcacgcaactaactcacagggttttggggaagactaagacggagtgaatgtaaaacccactcccttctgcccacgttcacatggtccatgctgagggaattcagaaaaggagacagacccgggggggtgcgtcagtcaaggcaagtttctcgaaggaaggaagcagaactcaggaggacatggactggaacagtcagggcaatttcaggctgtgacaaagctggaacggacgactgtagcaggagcaggagtcactgacattctaggccaggccagggctaagccagagaacctattaatagtaatccacaaatagatatggggcacctcctaggaactctccttgttccaagcgtcgtacctcgtgtgatccttagcggctctctgaagcagacagaagagggccagccatctttcttccacctttgaggcttgggaagggtgagacttgctggtgacttacaactccatcaaaggggcatggtgaaataagggcctgggctcctgacttctgggctagggctcttccaaaggcagagtctggagaggcctggctgtggccagaccatggggcaagtggctagaggggcgagtagacagcagaggcagctgtggcccccgggattagcactgggggaccggatgggggagggaggcctcactttgttctatctgagcagcttcctcggcagtcatgggactgattgagaccacgcgagggctcctcccgggggcaggagggactcagaggctgccccgttgtctgggggtggccctggcgaaggagctcatcttcacgggccgacgactgagtggaactgaggcccacgtactggggctggtgaatcacgctgtggcccagaacgaggagggggacgccgcctaccagcgggcacgagcactggcccaggagatcctgccccaggcccccattgccgtgcggctgggcaaagtagccattgaccgaggaacggaggtggacattgcatctgggatggccattgaagggatgtgctatgcccagaatattccaacccgggaccggctagagggcatggcagccttcagggagaagcggactcccaaatttgttggcaaatgacccccattttaaccttcagcatgggagatgcatgccctgaagagcaggatccagaaggaagatttgtggccagattgccttcatcatttcacctctccagacttccatttcttcacaaggatgatgatggaaataaaatgactggcgtgatgcctggaaccaaggtgctgatcctaccacctactgctaccttccttagcttcaccctggctagaaataatcacgagggttgggtttgctttggaaaatgcctgtctctctacttgaatgataaagaattaaattagatctctctga

SEQ ID NO: 81669 - DNA, 5372 bp, Homo sapiens
agcatatgtgcaagcaaggttcacacaccccatttaatcttcacaccaccacggggtagtcactattatccccattttacaggattaaaacactgacgctgggaggttgacagagttacaccaaatcacacagaggagctgggcttcccccgacctcctccgctcaagtctccctgtccccgggaggtgcggaaggaggcaacagacgcttggcccataggtggagcaattggcgaaggcttcgcccgacgccggaactgcgagctctcagcgggagccgagacggtgcagggcgggagaagcaccttcactcccagcctgcgccccgatgctgcgcgttctgtgcctcctgcgcccctggaggccccttcgggcccgcggctgcgcttccgacggggcggccgggggctcagagatccaagtgcgcgccctggcgggtccggaccaaggtaaatgtgcagttccggggcggcgcatgacgcgactgggactaggccggaggcagcgggggaccggcaggtgggccgctcagtgcgttgaaggattcgatccccagtccctccctcccagttctaggcgccccaaaccgctccaggcctgagaggctgtaggttccatgaggacaggccttgagtctgtcctggtctctggaatcacggtgtctagtagaggccagcacacagcaaatatataaatgtacaaatgagtgaatgaagagaatctgattggccttaaggaacttacgcacttaaaataattgggcagaagagaagcagtgaaggagtgcagaggcatcacctgaaaggtaggaggaaggagaatgggggcctgccaaagccaaggcagatacgtgtcattatgcatctgtgtaaacccacagagtgtacaccaccaagagcgaaccccagtgtacactagggcccccgggtggcgacagtgcatcagtgtaggttcgtcagttgcaacacgtgcctctggtgggggatggggattgcggaaggggctgtgcctgtgtagggccagggagtataggtgaactgtattgaattgtattttccactccatttagctgtgaccctaaaactgctctaagaaaatcatctatttataaacagaataaatattcttctaagacagccaaagcagaaaacgatcaagatcggaagtgtgattaatgtcagcaaaggtttttgctgccacgaggttgaggcaaggagagaaacgtgtcccttggttagtgatgtggctatattcatcactttaatgagaataatgtctgctgagtgatggggctggaacctagattggagaaggtttgagcgaatggaaggtaagaaagtgactaaatgagtatagaaaactaccaagaagcttggctgttgctggtgaaagaatattacacaagtagggccaggattactgtcttgccaaacaggacagaacactaagcctctgtatttagttgctaatttattgtgacagaggagcatattgatctgtccccgtgattgtgcagttagcaaaacccaggctttgagaaaccctgtaggtcaaataccccaggctcctccacagataatctctgagggaaagacagagttgtggggagcatgtgggggttgtaccaggatttaaaagatacacggcaattttagaaattagcaagtctaaactatgatacctaaggatgcacacctgggtgataaaattataaagaaatggccgggtgtggtggctcacacctgtaatcccagcacttttagaggccgaggtgggtggatcacctgaggtcaggagttcgagacaagcctgaccaacatggagaaacctcatctctactaaaaatacaaaattggccgggcgtggtggcacatgctgtaatcccagctactccggaggctgaggcaggagaatcgcttgaacctgggaggcggaggttgtggtgagccaagtttacaagtccttccactttctctctgaggcagaaagagcaagggtttttctctccattttatggttgggaaaattgaggcctgcctgagtgtgtgacttgtggcaagtcactctggtcatctagggcagaggctccccagatcccaggcctcctgcctccagtccccagcccgcagcccaggattaggcagagccagctgctttcccgtggctgccctgactccttacagggatcactgagattctgatgaacagaccttctgcccgcaatgccttggggaatgtcttcgtcagtgagctgctggaaactctggcccagctgcgggaggaccggcaagtgcgtgtcctgctcttcagaagtggagtgaagggcgtgttctgtgcaggtgcagacctgaaggagcgggaacagatgagtgaagcagaggtgggggtgtttgtccagcgactccggggcctgatgaatgacatcgggttcaagcctggccattccaaagcagttaagtttccccaagcatgctttcaagttttgacaattgctgttacctttgcctgagataccccttcttggttacttgaacttttacttgtccttcaagccctccagtacctcctcctccaggaagccttcccaacccaccctctgagctttttattggagcactgatgatcctgggtcaataatgcctgatacacatttgtcttccccatgagactgagccccatgggaacaaaggctatgtctgattcattctgtgttcccagttcccagcacccagcacagggcttggcacaaagaaagggaggccccagggaggccagcggattaggcctgaacagggatcatccagcccatcctcccattcctcttccctggctgattctgtaactttccctaaagggaaaattggcttctgagataacctggctgcgggaagcagaggttgtcgtgagcagagattgtgccattgcactccagcctgggcaacaacagcgagactccatctcaaaaaaaaaaaaaaaaaagaattaagataacctggctgaggttccatgtaatgtccccagacctgggtccactgaggcctctgtcccaaccagcttgcccctccccagccttgagtctctgtcctggtcccaccagggctttgcaggctgagcctttcttcctctccacagcagccttccctgcacccaccattgcggctatggatgggtttgccttgggcggaggcctagagcttgccctggcctgtgacctccgagtggcaggtactgggccaggactgggggcagggggtggggctagggagtcaggggtgagtgaaacagggtgagtctggacattctgcagtcagccactgttcttggcttccaaccaaaagcaaaactaaggcaaggcagagcacagagggtgctcaggcagaagctgcttcccctcctggtgcagccattagctgctgtagtatctgtgacctgtcagaacctgcttccttcattttgggaatatttgaccaacctcagagcaattgctgttacgagccaaggaggtcaaagagcaatgtccagtcttcccattctgtccaagtcagatttatcgaccatgtttcggaaaaaggtgagcctcagggatagtttgtcaatggctgagctaatcacaaaggtgcctgggcaggaatactggcaccagccaaatttgcattacttgttctgagcaattgagctttgtttgaagaatgggaggggataaagaagataactgatcattttctcaggtgactgacctggtgattaggagcagccttcttggatgcagttaggcaaagtctgaatgtcttcccttctccccccaccgctctctcctgccaccccaggagcaacatataaaaatgtgtagctccaggcatgaaagtagcttctgtctacacaatgcaggtcaaagagaaggaactgaccaggtgtccaggcaccaaaataccaggctggtctagccccaactctccttctcacatgcccacgttcacgcaactaactcacagggttttggggaagactaagacggagtgaatgtaaaacccactcccttctgcccacgttcacatggtccatgctgagggaattcagaaaaggagacagacccgggggggtgcgtcagtcaaggcaagtttctcgaaggaaggaagcagaactcaggaggacatggactggaacagtcagggcaatttcaggctgtgacaaagctggaacggacgactgtagcaggagcaggagtcactgacattctaggccaggccagggctaagccagagaacctattaatagtaatccacaaatagatatggggcacctcctaggaactctccttgttccaagcgtcgtacctcgtgtgatccttagcggctctctgaagcagacagaagagggccagccatctttcttccacctttgaggcttgggaagggtgagacttgctggtgacttacaactccatcaaaggggcatggtgaaataagggcctgggctcctgacttctgggctagggctcttccaaaggcagagtctggagaggcctggctgtggccagaccatggggcaagtggctagaggggcgagtagacagcagaggcagctgtggcccccgggattagcactgggggaccggatgggggagggaggcctcactttgttctatctgagcagcttcctcggcagtcatgggactgattgagaccacgcgagggctcctcccgggggcaggagggactcagaggctgccccgttgtctgggggtggccctggcgaaggagctcatcttcacgggccgacgactgagtggaactgaggcccacgtactggggctggtgaatcacgctgtggcccagaacgaggagggggacgccgcctaccagcgggcacgagcactggcccaggagatcctgccccaggcccccattgccgtgcggctgggcaaagtagccattgaccgaggaacggaggtggacattgcatctgggatggccattgaagggatgtgctatgcccagaatattccaacccgggaccggctagagggcatggcagccttcagggagaagcggactcccaaatttgttggcaaatgacccccattttaaccttcagcatgggagatgcatgccctgaagagcaggatccagaaggaagatttgtggccagattgccttcatcatttcacctctccagacttccatttcttcacaaggatgatgatggaaataaaatgactggcgtgatgcctggaaccaaggtgctgatcctaccacctactgctaccttccttagcttcaccctggctagaaataatcacgagggttgggtttgctttggaaaatgcctgtctctctacttgaatgataaagaattaaattagatctctctga

SEQ ID NO: 81670 - DNA, 4331 bp, Homo sapiens
agcatatgtgcaagcaaggttcacacaccccatttaatcttcacaccaccacggggtagtcactattatccccattttacaggattaaaacactgacgctgggaggttgacagagttacaccaaatcacacagaggagctgggcttcccccgacctcctccgctcaagtctccctgtccccgggaggtgcggaaggaggcaacagacgcttggcccataggtggagcaattggcgaaggcttcgcccgacgccggaactgcgagctctcagcgggagccgagacggtgcagggcgggagaagcaccttcactcccagcctgcgccccgatgctgcgcgttctgtgcctcctgcgcccctggaggccccttcgggcccgcggctgcgcttccgacggggcggccgggggctcagagatccaagtgcgcgccctggcgggtccggaccaaggtaaatgtgcagttccggggcggcgcatgacgcgactgggactaggccggaggcagcgggggaccggcaggtgggccgctcagtgcgttgaaggattcgatccccagtccctccctcccagttctaggcgccccaaaccgctccaggcctgagaggctgtaggttccatgaggacaggccttgagtctgtcctggtctctggaatcacggtgtctagtagaggccagcacacagcaaatatataaatgtacaaatgagtgaatgaagagaatctgattggccttaaggaacttacgcacttaaaataattgggcagaagagaagcagtgaaggagtgcagaggcatcacctgaaagacaaaattggccgggcgtggtggcacatgctgtaatcccagctactccggaggctgaggcaggagaatcgcttgaacctgggaggcggaggttgtggtgagccaagtttacaagtccttccactttctctctgaggcagaaagagcaagggtttttctctccattttatggttgggaaaattgaggcctgcctgagtgtgtgacttgtggcaagtcactctggtcatctagggcagaggctccccagatcccaggcctcctgcctccagtccccagcccgcagcccaggattaggcagagccagctgctttcccgtggctgccctgactccttacagggatcactgagattctgatgaacagaccttctgcccgcaatgccttggggaatgtcttcgtcagtgagctgctggaaactctggcccagctgcgggaggaccggcaagtgcgtgtcctgctcttcagaagtggagtgaagggcgtgttctgtgcaggtgcagacctgaaggagcgggaacagatgagtgaagcagaggtgggggtgtttgtccagcgactccggggcctgatgaatgacatcgggttcaagcctggccattccaaagcagttaagtttccccaagcatgctttcaagttttgacaattgctgttacctttgcctgagataccccttcttggttacttgaacttttacttgtccttcaagccctccagtacctcctcctccaggaagccttcccaacccaccctctgagctttttattggagcactgatgatcctgggtcaataatgcctgatacacatttgtcttccccatgagactgagccccatgggaacaaaggctatgtctgattcattctgtgttcccagttcccagcacccagcacagggcttggcacaaagaaagggaggccccagggaggccagcggattaggcctgaacagggatcatccagcccatcctcccattcctcttccctggctgattctgtaactttccctaaagggaaaattggcttctgagataacctggctgcgggaagcagaggttgtcgtgagcagagattgtgccattgcactccagcctgggcaacaacagcgagactccatctcaaaaaaaaaaaaaaaaaagaattaagataacctggctgaggttccatgtaatgtccccagacctgggtccactgaggcctctgtcccaaccagcttgcccctccccagccttgagtctctgtcctggtcccaccagggctttgcaggctgagcctttcttcctctccacagcagccttccctgcacccaccattgcggctatggatgggtttgccttgggcggaggcctagagcttgccctggcctgtgacctccgagtggcaggtactgggccaggactgggggcagggggtggggctagggagtcaggggtgagtgaaacagggtgagtctggacattctgcagtcagccactgttcttggcttccaaccaaaagcaaaactaaggcaaggcagagcacagagggtgctcaggcagaagctgcttcccctcctggtgcagccattagctgctgtagtatctgtgacctgtcagaacctgcttccttcattttgggaatatttgaccaacctcagagcaattgctgttacgagccaaggaggtcaaagagcaatgtccagtcttcccattctgtccaagtcagatttatcgaccatgtttcggaaaaaggtgagcctcagggatagtttgtcaatggctgagctaatcacaaaggtgcctgggcaggaatactggcaccagccaaatttgcattacttgttctgagcaattgagctttgtttgaagaatgggaggggataaagaagataactgatcattttctcaggtgactgacctggtgattaggagcagccttcttggatgcagttaggcaaagtctgaatgtcttcccttctccccccaccgctctctcctgccaccccaggagcaacatataaaaatgtgtagctccaggcatgaaagtagcttctgtctacacaatgcaggtcaaagagaaggaactgaccaggtgtccaggcaccaaaataccaggctggtctagccccaactctccttctcacatgcccacgttcacgcaactaactcacagggttttggggaagactaagacggagtgaatgtaaaacccactcccttctgcccacgttcacatggtccatgctgagggaattcagaaaaggagacagacccgggggggtgcgtcagtcaaggcaagtttctcgaaggaaggaagcagaactcaggaggacatggactggaacagtcagggcaatttcaggctgtgacaaagctggaacggacgactgtagcaggagcaggagtcactgacattctaggccaggccagggctaagccagagaacctattaatagtaatccacaaatagatatggggcacctcctaggaactctccttgttccaagcgtcgtacctcgtgtgatccttagcggctctctgaagcagacagaagagggccagccatctttcttccacctttgaggcttgggaagggtgagacttgctggtgacttacaactccatcaaaggggcatggtgaaataagggcctgggctcctgacttctgggctagggctcttccaaaggcagagtctggagaggcctggctgtggccagaccatggggcaagtggctagaggggcgagtagacagcagaggcagctgtggcccccgggattagcactgggggaccggatgggggagggaggcctcactttgttctatctgagcagcttcctcggcagtcatgggactgattgagaccacgcgagggctcctcccgggggcaggagggactcagaggctgccccgttgtctgggggtggccctggcgaaggagctcatcttcacgggccgacgactgagtggaactgaggcccacgtactggggctggtgaatcacgctgtggcccagaacgaggagggggacgccgcctaccagcgggcacgagcactggcccaggagatcctgccccaggcccccattgccgtgcggctgggcaaagtagccattgaccgaggaacggaggtggacattgcatctgggatggccattgaagggatgtgctatgcccagaatattccaacccgggaccggctagagggcatggcagccttcagggagaagcggactcccaaatttgttggcaaatgacccccattttaaccttcagcatgggagatgcatgccctgaagagcaggatccagaaggaagatttgtggccagattgccttcatcatttcacctctccagacttccatttcttcacaaggatgatgatggaaataaaatgactggcgtgatgcctggaaccaaggtgctgatcctaccacctactgctaccttccttagcttcaccctggctagaaataatcacgagggttgggtttgctttggaaaatgcctgtctctctacttgaatgataaagaattaaattagatctctctga

SEQ ID NO: 81671 - DNA, 4176 bp, Homo sapiens
agcatatgtgcaagcaaggttcacacaccccatttaatcttcacaccaccacggggtagtcactattatccccattttacaggattaaaacactgacgctgggaggttgacagagttacaccaaatcacacagaggagctgggcttcccccgacctcctccgctcaagtctccctgtccccgggaggtgcggaaggaggcaacagacgcttggcccataggtggagcaattggcgaaggcttcgcccgacgccggaactgcgagctctcagcgggagccgagacggtgcagggcgggagaagcaccttcactcccagcctgcgccccgatgctgcgcgttctgtgcctcctgcgcccctggaggccccttcgggcccgcggctgcgcttccgacggggcggccgggggctcagagatccaagtgcgcgccctggcgggtccggaccaaggctgtaggttccatgaggacaggccttgagtctgtcctggtctctggaatcacggtgtctagtagaggccagcacacagcaaatatataaatgtacaaatgagtgaatgaagagaatctgattggccttaaggaacttacgcacttaaaataattgggcagaagagaagcagtgaaggagtgcagaggcatcacctgaaagacaaaattggccgggcgtggtggcacatgctgtaatcccagctactccggaggctgaggcaggagaatcgcttgaacctgggaggcggaggttgtggtgagccaagtttacaagtccttccactttctctctgaggcagaaagagcaagggtttttctctccattttatggttgggaaaattgaggcctgcctgagtgtgtgacttgtggcaagtcactctggtcatctagggcagaggctccccagatcccaggcctcctgcctccagtccccagcccgcagcccaggattaggcagagccagctgctttcccgtggctgccctgactccttacagggatcactgagattctgatgaacagaccttctgcccgcaatgccttggggaatgtcttcgtcagtgagctgctggaaactctggcccagctgcgggaggaccggcaagtgcgtgtcctgctcttcagaagtggagtgaagggcgtgttctgtgcaggtgcagacctgaaggagcgggaacagatgagtgaagcagaggtgggggtgtttgtccagcgactccggggcctgatgaatgacatcgggttcaagcctggccattccaaagcagttaagtttccccaagcatgctttcaagttttgacaattgctgttacctttgcctgagataccccttcttggttacttgaacttttacttgtccttcaagccctccagtacctcctcctccaggaagccttcccaacccaccctctgagctttttattggagcactgatgatcctgggtcaataatgcctgatacacatttgtcttccccatgagactgagccccatgggaacaaaggctatgtctgattcattctgtgttcccagttcccagcacccagcacagggcttggcacaaagaaagggaggccccagggaggccagcggattaggcctgaacagggatcatccagcccatcctcccattcctcttccctggctgattctgtaactttccctaaagggaaaattggcttctgagataacctggctgcgggaagcagaggttgtcgtgagcagagattgtgccattgcactccagcctgggcaacaacagcgagactccatctcaaaaaaaaaaaaaaaaaagaattaagataacctggctgaggttccatgtaatgtccccagacctgggtccactgaggcctctgtcccaaccagcttgcccctccccagccttgagtctctgtcctggtcccaccagggctttgcaggctgagcctttcttcctctccacagcagccttccctgcacccaccattgcggctatggatgggtttgccttgggcggaggcctagagcttgccctggcctgtgacctccgagtggcaggtactgggccaggactgggggcagggggtggggctagggagtcaggggtgagtgaaacagggtgagtctggacattctgcagtcagccactgttcttggcttccaaccaaaagcaaaactaaggcaaggcagagcacagagggtgctcaggcagaagctgcttcccctcctggtgcagccattagctgctgtagtatctgtgacctgtcagaacctgcttccttcattttgggaatatttgaccaacctcagagcaattgctgttacgagccaaggaggtcaaagagcaatgtccagtcttcccattctgtccaagtcagatttatcgaccatgtttcggaaaaaggtgagcctcagggatagtttgtcaatggctgagctaatcacaaaggtgcctgggcaggaatactggcaccagccaaatttgcattacttgttctgagcaattgagctttgtttgaagaatgggaggggataaagaagataactgatcattttctcaggtgactgacctggtgattaggagcagccttcttggatgcagttaggcaaagtctgaatgtcttcccttctccccccaccgctctctcctgccaccccaggagcaacatataaaaatgtgtagctccaggcatgaaagtagcttctgtctacacaatgcaggtcaaagagaaggaactgaccaggtgtccaggcaccaaaataccaggctggtctagccccaactctccttctcacatgcccacgttcacgcaactaactcacagggttttggggaagactaagacggagtgaatgtaaaacccactcccttctgcccacgttcacatggtccatgctgagggaattcagaaaaggagacagacccgggggggtgcgtcagtcaaggcaagtttctcgaaggaaggaagcagaactcaggaggacatggactggaacagtcagggcaatttcaggctgtgacaaagctggaacggacgactgtagcaggagcaggagtcactgacattctaggccaggccagggctaagccagagaacctattaatagtaatccacaaatagatatggggcacctcctaggaactctccttgttccaagcgtcgtacctcgtgtgatccttagcggctctctgaagcagacagaagagggccagccatctttcttccacctttgaggcttgggaagggtgagacttgctggtgacttacaactccatcaaaggggcatggtgaaataagggcctgggctcctgacttctgggctagggctcttccaaaggcagagtctggagaggcctggctgtggccagaccatggggcaagtggctagaggggcgagtagacagcagaggcagctgtggcccccgggattagcactgggggaccggatgggggagggaggcctcactttgttctatctgagcagcttcctcggcagtcatgggactgattgagaccacgcgagggctcctcccgggggcaggagggactcagaggctgccccgttgtctgggggtggccctggcgaaggagctcatcttcacgggccgacgactgagtggaactgaggcccacgtactggggctggtgaatcacgctgtggcccagaacgaggagggggacgccgcctaccagcgggcacgagcactggcccaggagatcctgccccaggcccccattgccgtgcggctgggcaaagtagccattgaccgaggaacggaggtggacattgcatctgggatggccattgaagggatgtgctatgcccagaatattccaacccgggaccggctagagggcatggcagccttcagggagaagcggactcccaaatttgttggcaaatgacccccattttaaccttcagcatgggagatgcatgccctgaagagcaggatccagaaggaagatttgtggccagattgccttcatcatttcacctctccagacttccatttcttcacaaggatgatgatggaaataaaatgactggcgtgatgcctggaaccaaggtgctgatcctaccacctactgctaccttccttagcttcaccctggctagaaataatcacgagggttgggtttgctttggaaaatgcctgtctctctacttgaatgataaagaattaaattagatctctctga

SEQ ID NO: 81672 - DNA, 3638 bp, Homo sapiens
agcatatgtgcaagcaaggttcacacaccccatttaatcttcacaccaccacggggtagtcactattatccccattttacaggattaaaacactgacgctgggaggttgacagagttacaccaaatcacacagaggagctgggcttcccccgacctcctccgctcaagtctccctgtccccgggaggtgcggaaggaggcaacagacgcttggcccataggtggagcaattggcgaaggcttcgcccgacgccggaactgcgagctctcagcgggagccgagacggtgcagggcgggagaagcaccttcactcccagcctgcgccccgatgctgcgcgttctgtgcctcctgcgcccctggaggccccttcgggcccgcggctgcgcttccgacggggcggccgggggctcagagatccaagtgcgcgccctggcgggtccggaccaagggatcactgagattctgatgaacagaccttctgcccgcaatgccttggggaatgtcttcgtcagtgagctgctggaaactctggcccagctgcgggaggaccggcaagtgcgtgtcctgctcttcagaagtggagtgaagggcgtgttctgtgcaggtgcagacctgaaggagcgggaacagatgagtgaagcagaggtgggggtgtttgtccagcgactccggggcctgatgaatgacatcgggttcaagcctggccattccaaagcagttaagtttccccaagcatgctttcaagttttgacaattgctgttacctttgcctgagataccccttcttggttacttgaacttttacttgtccttcaagccctccagtacctcctcctccaggaagccttcccaacccaccctctgagctttttattggagcactgatgatcctgggtcaataatgcctgatacacatttgtcttccccatgagactgagccccatgggaacaaaggctatgtctgattcattctgtgttcccagttcccagcacccagcacagggcttggcacaaagaaagggaggccccagggaggccagcggattaggcctgaacagggatcatccagcccatcctcccattcctcttccctggctgattctgtaactttccctaaagggaaaattggcttctgagataacctggctgcgggaagcagaggttgtcgtgagcagagattgtgccattgcactccagcctgggcaacaacagcgagactccatctcaaaaaaaaaaaaaaaaaagaattaagataacctggctgaggttccatgtaatgtccccagacctgggtccactgaggcctctgtcccaaccagcttgcccctccccagccttgagtctctgtcctggtcccaccagggctttgcaggctgagcctttcttcctctccacagcagccttccctgcacccaccattgcggctatggatgggtttgccttgggcggaggcctagagcttgccctggcctgtgacctccgagtggcaggtactgggccaggactgggggcagggggtggggctagggagtcaggggtgagtgaaacagggtgagtctggacattctgcagtcagccactgttcttggcttccaaccaaaagcaaaactaaggcaaggcagagcacagagggtgctcaggcagaagctgcttcccctcctggtgcagccattagctgctgtagtatctgtgacctgtcagaacctgcttccttcattttgggaatatttgaccaacctcagagcaattgctgttacgagccaaggaggtcaaagagcaatgtccagtcttcccattctgtccaagtcagatttatcgaccatgtttcggaaaaaggtgagcctcagggatagtttgtcaatggctgagctaatcacaaaggtgcctgggcaggaatactggcaccagccaaatttgcattacttgttctgagcaattgagctttgtttgaagaatgggaggggataaagaagataactgatcattttctcaggtgactgacctggtgattaggagcagccttcttggatgcagttaggcaaagtctgaatgtcttcccttctccccccaccgctctctcctgccaccccaggagcaacatataaaaatgtgtagctccaggcatgaaagtagcttctgtctacacaatgcaggtcaaagagaaggaactgaccaggtgtccaggcaccaaaataccaggctggtctagccccaactctccttctcacatgcccacgttcacgcaactaactcacagggttttggggaagactaagacggagtgaatgtaaaacccactcccttctgcccacgttcacatggtccatgctgagggaattcagaaaaggagacagacccgggggggtgcgtcagtcaaggcaagtttctcgaaggaaggaagcagaactcaggaggacatggactggaacagtcagggcaatttcaggctgtgacaaagctggaacggacgactgtagcaggagcaggagtcactgacattctaggccaggccagggctaagccagagaacctattaatagtaatccacaaatagatatggggcacctcctaggaactctccttgttccaagcgtcgtacctcgtgtgatccttagcggctctctgaagcagacagaagagggccagccatctttcttccacctttgaggcttgggaagggtgagacttgctggtgacttacaactccatcaaaggggcatggtgaaataagggcctgggctcctgacttctgggctagggctcttccaaaggcagagtctggagaggcctggctgtggccagaccatggggcaagtggctagaggggcgagtagacagcagaggcagctgtggcccccgggattagcactgggggaccggatgggggagggaggcctcactttgttctatctgagcagcttcctcggcagtcatgggactgattgagaccacgcgagggctcctcccgggggcaggagggactcagaggctgccccgttgtctgggggtggccctggcgaaggagctcatcttcacgggccgacgactgagtggaactgaggcccacgtactggggctggtgaatcacgctgtggcccagaacgaggagggggacgccgcctaccagcgggcacgagcactggcccaggagatcctgccccaggcccccattgccgtgcggctgggcaaagtagccattgaccgaggaacggaggtggacattgcatctgggatggccattgaagggatgtgctatgcccagaatattccaacccgggaccggctagagggcatggcagccttcagggagaagcggactcccaaatttgttggcaaatgacccccattttaaccttcagcatgggagatgcatgccctgaagagcaggatccagaaggaagatttgtggccagattgccttcatcatttcacctctccagacttccatttcttcacaaggatgatgatggaaataaaatgactggcgtgatgcctggaaccaaggtgctgatcctaccacctactgctaccttccttagcttcaccctggctagaaataatcacgagggttgggtttgctttggaaaatgcctgtctctctacttgaatgataaagaattaaattagatctctctga

SEQ ID NO: 81673 - DNA, 2839 bp, Homo sapiens
gtcgacagcccatcctcccattcctcttccctggctgattctgtaaccttcccaacccaccctctgagctttttattggagcactgatgatcctgggtcaataatgcctgatacacatttgtcttccccatgagactgagccccatgggaacaaaggctatgtctgattcattctgtgttcccagttcccagcacccagcacagggcttggcacaaagaaagggaggccccagggaggccagcggattaggcctgaacagggatcatccagcccatcctcccattcctcttccctggctgattctgtaactttccctaaagggaaaattggcttctgagataacctggctgcgggaagcagaggttgtcgtgagcagagattgtgccattgcactccagcctgggcaacaacagcgagactccatctcaaaaaaaaaaaaaaaaaagaattaagataacctggctgaggttccatgtaatgtccccagacctgggtccactgaggcctctgtcccaaccagcttgcccctccccagccttgagtctctgtcctggtcccaccagggctttgcaggctgagcctttcttcctctccacagcagccttccctgcacccaccattgcggctatggatgggtttgccttgggcggaggcctagagcttgccctggcctgtgacctccgagtggcaggtactgggccaggactgggggcagggggtggggctagggagtcaggggtgagtgaaacagggtgagtctggacattctgcagtcagccactgttcttggcttccaaccaaaagcaaaactaaggcaaggcagagcacagagggtgctcaggcagaagctgcttcccctcctggtgcagccattagctgctgtagtatctgtgacctgtcagaacctgcttccttcattttgggaatatttgaccaacctcagagcaattgctgttacgagccaaggaggtcaaagagcaatgtccagtcttcccattctgtccaagtcagatttatcgaccatgtttcggaaaaaggtgagcctcagggatagtttgtcaatggctgagctaatcacaaaggtgcctgggcaggaatactggcaccagccaaatttgcattacttgttctgagcaattgagctttgtttgaagaatgggaggggataaagaagataactgatcattttctcaggtgactgacctggtgattaggagcagccttcttggatgcagttaggcaaagtctgaatgtcttcccttctccccccaccgctctctcctgccaccccaggagcaacatataaaaatgtgtagctccaggcatgaaagtagcttctgtctacacaatgcaggtcaaagagaaggaactgaccaggtgtccaggcaccaaaataccaggctggtctagccccaactctccttctcacatgcccacgttcacgcaactaactcacagggttttggggaagactaagacggagtgaatgtaaaacccactcccttctgcccacgttcacatggtccatgctgagggaattcagaaaaggagacagacccgggggggtgcgtcagtcaaggcaagtttctcgaaggaaggaagcagaactcaggaggacatggactggaacagtcagggcaatttcaggctgtgacaaagctggaacggacgactgtagcaggagcaggagtcactgacattctaggccaggccagggctaagccagagaacctattaatagtaatccacaaatagatatggggcacctcctaggaactctccttgttccaagcgtcgtacctcgtgtgatccttagcggctctctgaagcagacagaagagggccagccatctttcttccacctttgaggcttgggaagggtgagacttgctggtgacttacaactccatcaaaggggcatggtgaaataagggcctgggctcctgacttctgggctagggctcttccaaaggcagagtctggagaggcctggctgtggccagaccatggggcaagtggctagaggggcgagtagacagcagaggcagctgtggcccccgggattagcactgggggaccggatgggggagggaggcctcactttgttctatctgagcagcttcctcggcagtcatgggactgattgagaccacgcgagggctcctcccgggggcaggagggactcagaggctgccccgttgtctgggggtggccctggcgaaggagctcatcttcacgggccgacgactgagtggaactgaggcccacgtactggggctggtgaatcacgctgtggcccagaacgaggagggggacgccgcctaccagcgggcacgagcactggcccaggagatcctgccccaggcccccattgccgtgcggctgggcaaagtagccattgaccgaggaacggaggtggacattgcatctgggatggccattgaagggatgtgctatgcccagaatattccaacccgggaccggctagagggcatggcagccttcagggagaagcggactcccaaatttgttggcaaatgacccccattttaaccttcagcatgggagatgcatgccctgaagagcaggatccagaaggaagatttgtggccagattgccttcatcatttcacctctccagacttccatttcttcacaaggatgatgatggaaataaaatgactggcgtgatgcctggaaccaaggtgctgatcctaccacctactgctaccttccttagcttcaccctggctagaaataatcacgagggttgggtttgctttggaaaatgcctgtctctctacttgaatgataaagaattaaattagatctctctga

SEQ ID NO: 81674 - DNA, 3434 bp, Homo sapiens
agcatatgtgcaagcaaggttcacacaccccatttaatcttcacaccaccacggggtagtcactattatccccattttacaggattaaaacactgacgctgggaggttgacagagttacaccaaatcacacagaggagctgggcttcccccgacctcctccgctcaagtctccctgtccccgggaggtgcggaaggaggcaacagacgcttggcccataggtggagcaattggcgaaggcttcgcccgacgccggaactgcgagctctcagcgggagccgagacggtgcagggcgggagaagcaccttcactcccagcctgcgccccgatgctgcgcgttctgtgcctcctgcgcccctggaggccccttcgggcccgcggctgcgcttccgacggggcggccgggggctcagagatccaagtgcgcgccctggcgggtccggaccaaggtaaatgtgcagttccggggcggcgcatgacgcgactgggactaggccggaggcagcgggggaccggcaggctgtaggttccatgaggacaggccttgagtctgtcctggtctctggaatcacggtgtctagtagaggccagcacacagcaaatatataaatgtacaaatgagtgaatgaagagaatctgattggccttaaggaacttacgcacttaaaataattgggcagaagagaagcagtgaaggagtgcagaggcatcacctgaaagtttacaagtccttccactttctctctgaggcagaaagagcaagggtttttctctccattttatggttgggaaaattgaggcctgcctgagtgtgtgacttgtggcaagtcactctggtcatctagggcagaggctccccagatcccaggcctcctgcctccagtccccagcccgcagcccaggattaggcagagccagctgctttcccgtggctgccctgactccttacagggatcactgagattctgatgaacagaccttctgcccgcaatgccttggggaatgtcttcgtcagtgagctgctggaaactctggcccagctgcgggaggaccggcaagtgcgtgtcctgctcttcagaagtggagtgaagggcgtgttctgtgcaggtgcagacctgaaggagcgggaacagatgagtgaagcagaggtgggggtgtttgtccagcgactccggggcctgatgaatgacatcgcagccttccctgcacccaccattgcggctatggatgggtttgccttgggcggaggcctagagcttgccctggcctgtgacctccgagtggcaggtactgggccaggactgggggcagggggtggggctagggagtcaggggtgagtgaaacagggtgagtctggacattctgcagtcagccactgttcttggcttccaaccaaaagcaaaactaaggcaaggcagagcacagagggtgctcaggcagaagctgcttcccctcctggtgcagccattagctgctgtagtatctgtgacctgtcagaacctgcttccttcattttgggaatatttgaccaacctcagagcaattgctgttacgagccaaggaggtcaaagagcaatgtccagtcttcccattctgtccaagtcagatttatcgaccatgtttcggaaaaaggtgagcctcagggatagtttgtcaatggctgagctaatcacaaaggtgcctgggcaggaatactggcaccagccaaatttgcattacttgttctgagcaattgagctttgtttgaagaatgggaggggataaagaagataactgatcattttctcaggtgactgacctggtgattaggagcagccttcttggatgcagttaggcaaagtctgaatgtcttcccttctccccccaccgctctctcctgccaccccaggagcaacatataaaaatgtgtagctccaggcatgaaagtagcttctgtctacacaatgcaggtcaaagagaaggaactgaccaggtgtccaggcaccaaaataccaggctggtctagccccaactctccttctcacatgcccacgttcacgcaactaactcacagggttttggggaagactaagacggagtgaatgtaaaacccactcccttctgcccacgttcacatggtccatgctgagggaattcagaaaaggagacagacccgggggggtgcgtcagtcaaggcaagtttctcgaaggaaggaagcagaactcaggaggacatggactggaacagtcagggcaatttcaggctgtgacaaagctggaacggacgactgtagcaggagcaggagtcactgacattctaggccaggccagggctaagccagagaacctattaatagtaatccacaaatagatatggggcacctcctaggaactctccttgttccaagcgtcgtacctcgtgtgatccttagcggctctctgaagcagacagaagagggccagccatctttcttccacctttgaggcttgggaagggtgagacttgctggtgacttacaactccatcaaaggggcatggtgaaataagggcctgggctcctgacttctgggctagggctcttccaaaggcagagtctggagaggcctggctgtggccagaccatggggcaagtggctagaggggcgagtagacagcagaggcagctgtggcccccgggattagcactgggggaccggatgggggagggaggcctcactttgttctatctgagcagcttcctcggcagtcatgggactgattgagaccacgcgagggctcctcccgggggcaggagggactcagaggctgccccgttgtctgggggtggccctggcgaaggagctcatcttcacgggccgacgactgagtggaactgaggcccacgtactggggctggtgaatcacgctgtggcccagaacgaggagggggacgccgcctaccagcgggcacgagcactggcccaggagatcctgccccaggcccccattgccgtgcggctgggcaaagtagccattgaccgaggaacggaggtggacattgcatctgggatggccattgaagggatgtgctatgcccagaatattccaacccgggaccggctagagggcatggcagccttcagggagaagcggactcccaaatttgttggcaaatgacccccattttaaccttcagcatgggagatgcatgccctgaagagcaggatccagaaggaagatttgtggccagattgccttcatcatttcacctctccagacttccatttcttcacaaggatgatgatggaaataaaatgactggcgtgatgcctggaaccaaggtgctgatcctaccacctactgctaccttccttagcttcaccctggctagaaataatcacgagggttgggtttgctttggaaaatgcctgtctctctacttgaatgataaagaattaaattagatctctctga

SEQ ID NO: 81675 - DNA, 1628 bp, Homo sapiens
attttgtcaccaagaccactctaacctccctgttcttatgaattcgaacagcatacccccaccgctctctcctgccaccccaggagcaacatataaaaatgtgtagctccaggcatgaaagtagcttctgtctacacaatgcaggtcaaagagaaggaactgaccaggtgtccaggcaccaaaataccaggctggtctagccccaactctccttctcacatgcccacgttcacgcaactaactcacagggttttggggaagactaagacggagtgaatgtaaaacccactcccttctgcccacgttcacatggtccatgctgagggaattcagaaaaggagacagacccgggggggtgcgtcagtcaaggcaagtttctcgaaggaaggaagcagaactcaggaggacatggactggaacagtcagggcaatttcaggctgtgacaaagctggaacggacgactgtagcaggagcaggagtcactgacattctaggccaggccagggctaagccagagaacctattaatagtaatccacaaatagatatggggcacctcctaggaactctccttgttccaagcgtcgtacctcgtgtgatccttagcggctctctgaagcagacagaagagggccagccatctttcttccacctttgaggcttgggaagggtgagacttgctggtgacttacaactccatcaaaggggcatggtgaaataagggcctgggctcctgacttctgggctagggctcttccaaaggcagagtctggagaggcctggctgtggccagaccatggggcaagtggctagaggggcgagtagacagcagaggcagctgtggcccccgggattagcactgggggaccggatgggggagggaggcctcactttgttctatctgagcagcttcctcggcagtcatgggactgattgagaccacgcgagggctcctcccgggggcaggagggactcagaggctgccccgttgtctgggggtggccctggcgaaggagctcatcttcacgggccgacgactgagtggaactgaggcccacgtactggggctggtgaatcacgctgtggcccagaacgaggagggggacgccgcctaccagcgggcacgagcactggcccaggagatcctgccccaggcccccattgccgtgcggctgggcaaagtagccattgaccgaggaacggaggtggacattgcatctgggatggccattgaagggatgtgctatgcccagaatattccaacccgggaccggctagagggcatggcagccttcagggagaagcggactcccaaatttgttggcaaatgacccccattttaaccttcagcatgggagatgcatgccctgaagagcaggatccagaaggaagatttgtggccagattgccttcatcatttcacctctccagacttccatttcttcacaaggatgatgatggaaataaaatgactggcgtgatgcctggaaccaaggtgctgatcctaccacctactgctaccttccttagcttcaccctggctagaaataatcacgagggttgggtttgctttggaaaatgcctgtctctctacttgaatgataaagaattaaattagatctctctga

SEQ ID NO: 81676 - DNA, 1612 bp, Homo sapiens
ctgggccctcttctctgccactccctctgcctgcaacaggcttctctcctggactgcccccttccctgcaccttgccaacatgcatgcacacacacaggcactcatgcacacgctcacatatgcacccatgcatgcacacttacatgcacacatgcactcttacatcttttgcctggccaattcctactctcctgtcagctctcagcttaaaggccactgcctcctctgataactcattgctgaccttctatactagggctcccctctgcccactggaggccccttacttgtttgtcctttttctccaagttctcctcacaaatagtaattatttaatgtctgtcttccccactaggctgtaggttccatgaggacaggccttgagtctgtcctggtctctggaatcacggtgtctagtagaggccagcacacagcaaatatataaatgtacaaatgagtgaatgaagagaatctgattggccttaaggaacttacgcacttaaaataattgggcagaagagaagcagtgaaggagtgcagaggcatcacctgaaagggatcactgagattctgatgaacagaccttctgcccgcaatgccttggggaatgtcttcgtcagtgagctgctggaaactctggcccagctgcgggaggaccggcaagtgcgtgtcctgctcttcagaagtggagtgaagggcgtgttctgtgcaggtgcagacctgaaggagcgggaacagatgagtgaagcagaggtgggggtgtttgtccagcgactccggggcctgatgaatgacatcgcagccttccctgcacccaccattgcggctatggatgggtttgccttgggcggaggcctagagcttgccctggcctgtgacctccgagtggcagcttcctcggcagtcatgggactgattgagaccacgcgagggctcctcccgggggcaggagggactcagaggctgccccgttgtctgggggtggccctggcgaaggagctcatcttcacgggccgacgactgagtggaactgaggcccacgtactggggctggtgaatcacgctgtggcccagaacgaggagggggacgccgcctaccagcgggcacgagcactggcccaggagatcctgccccaggcccccattgccgtgcggctgggcaaagtagccattgaccgaggaacggaggtggacattgcatctgggatggccattgaagggatgtgctatgcccagaatattccaacccgggaccggctagagggcatggcagccttcagggagaagcggactcccaaatttgttggcaaatgacccccattttaaccttcagcatgggagatgcatgccctgaagagcaggatccagaaggaagatttgtggccagattgccttcatcatttcacctctccagacttccatttcttcacaaggatgatgatggaaataaaatgactggcgtgatgcctggaaccaaggtgctgatcctaccacctactgctaccttccttagcttcaccctggctagaaataatcacgagggttgggtttgctttggaaaatgcctgtctctctacttgaatgataaagaattaaattagatctctctga

SEQ ID NO: 81677 - DNA, 3897 bp, Homo sapiens
ggcctgtcaccatgtaagaagtgaatttgctcctcgttcgccttctgccatgattgtgaggcctctccagccatgtggaactgtgcagcacttggacagagtcatgaagccagagcgacatttaaaataacatccggagttacatataatcctaatttgcaagacaaactctcagtggatttcaaagttcttgcttttgaccttcagcaaatgatagatgagatctttctatcaagcaatctgaagaatgaatataagaactcaagagttttacaatttgaaaatggcagcattatagtcgtatttgaccttttctttgcccagtgggtgtcagatcaaaatgtaaaagaagaactgattcaaggccttgaagcaaataaatccagccaactggtcactttccatattgatttgaacagcgttgatatcctagcatctttggagaatttttctacagtaagccctgcaacaacttcagacaagctaacaaccaccagtcatctggcaactccaggaaatgtctcaatagagtgcctgcctggttcaagtccttgtactgatgctctaacgtgtataaaagctgatttattttgtgatggagaagtaaactgtccagatggttctgacgaagacaataaaatgtgtgccacagtttgtgatggaagatttttgttaactggatcatctgggtctttccaggctactcattatccaaaaccttctgaaacaagtgttgtctgccagtggatcatacgtgtaaaccaaggactttccattaaactgagcttcgatgattttaatacatattatacagatatattagatatttatgaaggtgtaggatcaagcaagattttaagagcttctatttgggaaactaatcctggcacaataagaattttttccaaccaagttactgccacctttcttatagaatctgatgaaagtgattatgttggctttaatgcaacatatactgcatttaacagcagtgagcttaataattatgagaaaattaattgtaactttgaggatggcttttgtttctgggtccaggatctaaatgatgataatgaatgggaaaggattcagggaagcaccttttctccttttactggacccaattttgaccacacttttggcaatgcttcaggattttacatttctaccccaactggaccaggagggagacaagaacgagtggggcttttaagcctccctttggaccccactttggagccagcttgccttagtttctggtatcatatgtatggtgaaaatgtccataaattaagcattaatatcagcaatgaccaaaatatggagaagacagttttccaaaaggaaggaaattatggagacaattggaattatggacaagtaaccctaaatgaaacagttaaatttaaggttgcttttaatgcttttaaaaacaagatcctgagtgatattgcgttggatgacattagcctaacatatgggatttgcaatgggagtctttatccagaaccaactttggtgccaactcctccaccagaacttcctacggactgtggaggaccttttgagctgtgggagccaaatacaacattcagttctacgaactttccaaacagctaccctaatctggctttctgtgtttggattttaaatgcacaaaaaggaaagaatatacaacttcattttcaagaatttgacttagaaaatattaacgatgtagttgaaataagagatggtgaagaagctgattccttgctcttagctgtgtacacagggcctggcccagtaaaggatgtgttctctaccaccaacagaatgactgtgcttctcatcactaacgatgtgttggcaagaggagggtttaaagcaaactttactactggctatcacttggggattccagagccatgcaaggcagaccattttcaatgtaaaaatggagagtgtgttccactggtgaatctctgtgacggtcatctgcactgtgaggatggctcagatgaagcagattgtgtgcgttttttcaatggcacaacgaacaacaatggtttagtgcggttcagaatccagagcatatggcatacagcttgtgctgagaactggaccacccagatttcaaatgatgtttgtcaactgctgggactagggagtggaaactcatcaaagccaatcttctctaccgatggtggaccatttgtcaaattaaacacagcacctgatggccacttaatactaacacccagtcaacagtgtttacaggattccttgattcggttacagtgtaaccataaatcttgtggaaaaaaactggcagctcaagacatcaccccaaagattgttggaggaagtaatgccaaagaaggggcctggccctgggttgtgggtctgtattatggcggccgactgctctgcggcgcatctctcgtcagcagtgactggctggtgtccgccgcacactgcgtgtatgggagaaacttagagccatccaagtggacagcaatcctaggcctgcatatgaaatcaaatctgacctctcctcaaacagtccctcgattaatagatgaaattgtcataaaccctcattacaataggcgaagaaaggacaacgacattgccatgatgcatctggaatttaaagtgaattacacagattacatacaacctatttgtttaccggaagaaaatcaagtttttcctccaggaagaaattgttctattgctggttgggggacggttgtatatcaaggtactactgcaaacatattgcaagaagctgatgttcctcttctatcaaatgagagatgccaacagcagatgccagaatataacattactgaaaatatgatatgtgcaggctatgaagaaggaggaatagattcttgtcagggggattcaggaggaccattaatgtgccaagaaaacaacaggtggttccttgctggtgtgacctcatttggatacaagtgtgccctgcctaatcgccccggagtgtatgccagggtctcaaggtttaccgaatggatacaaagttttctacattagagcatttcttaaactaaacaggaaagtcgcattattttcccattctactctagaaagcatggaaattaagtgtttcgtacaaaaattttaaaaagttaccaaaggtttttattcttacctatgtcaatgaaatgctagggggccagggaaacaaaattttaaaaataataaaattcaccatagcaatacagaataactttaaaataccattaaatacatttgtatttcattgtgaacaggtatttcttcacagatctcatttttaaaattcttaatgattatttttattacttactgttgtttaaagggatgttattttaaagcatataccatacacttaagaaatttgagcagaatttaaaaaagaaagaaaataaattgtttttcccaaagtatgtcactgttggaaataaactgccataaattttctagttccagtttagtttgctgctattagcagaaactcaattgtttctctgtcttttctatcaaaattttcaacatatgcataaccttagtattttcccaaccaatagaaactatttattgtaagcttatgtcacaggcctggactaaattgattttacgttcctcttaaataagttaattaaataaaagataaattaactgatatagtcattgtatattagataaattttacctatttatttcaagcaagtatttttaagtctcaagaaaataatcagacataccaaagaaatgcacctattgcaaatcctggtcttggtttatgtgtgttacagtggatatttctaatatatgaaaacttatttagacacagctgaatcacccatgagaaggtcaaatatgtgtaataaatgaatttgcttcact

SEQ ID NO: 81678 - DNA, 3955 bp, Homo sapiens
accagacagttcttaaattagcaagccttcaaaaccaaaaatggggtcgaaaagaggcatatcttctaggcatcattctctcagctcctatgaaatcatgtttgcagctctctttgccatattggtagtgctctgtgctggattaattgcagtatcctgcctgacaatcaaggaatcccaacgaggtgcagcacttggacagagtcatgaagccagagcgacatttaaaataacatccggagttacatataatcctaatttgcaagacaaactctcagtggatttcaaagttcttgcttttgaccttcagcaaatgatagatgagatctttctatcaagcaatctgaagaatgaatataagaactcaagagttttacaatttgaaaatggcagcattatagtcgtatttgaccttttctttgcccagtgggtgtcagatcaaaatgtaaaagaagaactgattcaaggccttgaagcaaataaatccagccaactggtcactttccatattgatttgaacagcgttgatatcctagacaagctaacaaccaccagtcatctggcaactccaggaaatgtctcaatagagtgcctgcctggttcaagtccttgtactgatgctctaacgtgtataaaagctgatttattttgtgatggagaagtaaactgtccagatggttctgacgaagacaataaaatgtgtgccacagtttgtgatggaagatttttgttaactggatcatctgggtctttccaggctactcattatccaaaaccttctgaaacaagtgttgtctgccagtggatcatacgtgtaaaccaaggactttccattaaactgagcttcgatgattttaatacatattatacagatatattagatatttatgaaggtgtaggatcaagcaagattttaagagcttctatttgggaaactaatcctggcacaataagaattttttccaaccaagttactgccacctttcttatagaatctgatgaaagtgattatgttggctttaatgcaacatatactgcatttaacagcagtgagcttaataattatgagaaaattaattgtaactttgaggatggcttttgtttctgggtccaggatctaaatgatgataatgaatgggaaaggattcagggaagcaccttttctccttttactggacccaattttgaccacacttttggcaatgcttcaggattttacatttctaccccaactggaccaggagggagacaagaacgagtggggcttttaagcctccctttggaccccactttggagccagcttgccttagtttctggtatcatatgtatggtgaaaatgtccataaattaagcattaatatcagcaatgaccaaaatatggagaagacagttttccaaaaggaaggaaattatggagacaattggaattatggacaagtaaccctaaatgaaacagttaaatttaaggttgcttttaatgcttttaaaaacaagatcctgagtgatattgcgttggatgacattagcctaacatatgggatttgcaatgggagtctttatccagaaccaactttggtgccaactcctccaccagaacttcctacggactgtggaggaccttttgagctgtgggagccaaatacaacattcagttctacgaactttccaaacagctaccctaatctggctttctgtgtttggattttaaatgcacaaaaaggaaagaatatacaacttcattttcaagaatttgacttagaaaatattaacgatgtagttgaaataagagatggtgaagaagctgattccttgctcttagctgtgtacacagggcctggcccagtaaaggatgtgttctctaccaccaacagaatgactgtgcttctcatcactaacgatgtgttggcaagaggagggtttaaagcaaactttactactggctatcacttggggattccagagccatgcaaggcagaccattttcaatgtaaaaatggagagtgtgttccactggtgaatctctgtgacggtcatctgcactgtgaggatggctcagatgaagcagattgtgtgcgttttttcaatggcacaacgaacaacaatggtttagtgcggttcagaatccagagcatatggcatacagcttgtgctgagaactggaccacccagatttcaaatgatgtttgtcaactgctgggactagggagtggaaactcatcaaagccaatcttctctaccgatggtggaccatttgtcaaattaaacacagcacctgatggccacttaatactaacacccagtcaacagtgtttacaggattccttgattcggttacagtgtaaccataaatcttgtggaaaaaaactggcagctcaagacatcaccccaaagattgttggaggaagtaatgccaaagaaggggcctggccctgggttgtgggtctgtattatggcggccgactgctctgcggcgcatctctcgtcagcagtgactggctggtgtccgccgcacactgcgtgtatgggagaaacttagagccatccaagtggacagcaatcctaggcctgcatatgaaatcaaatctgacctctcctcaaacagtccctcgattaatagatgaaattgtcataaaccctcattacaataggcgaagaaaggacaacgacattgccatgatgcatctggaatttaaagtgaattacacagattacatacaacctatttgtttaccggaagaaaatcaagtttttcctccaggaagaaattgttctattgctggttgggggacggttgtatatcaaggtactactgcaaacatattgcaagaagctgatgttcctcttctatcaaatgagagatgccaacagcagatgccagaatataacattactgaaaatatgatatgtgcaggctatgaagaaggaggaatagattcttgtcagggggattcaggaggaccattaatgtgccaagaaaacaacaggtggttccttgctggtgtgacctcatttggatacaagtgtgccctgcctaatcgccccggagtgtatgccagggtctcaaggtttaccgaatggatacaaagttttctacattagagcatttcttaaactaaacaggaaagtcgcattattttcccattctactctagaaagcatggaaattaagtgtttcgtacaaaaattttaaaaagttaccaaaggtttttattcttacctatgtcaatgaaatgctagggggccagggaaacaaaattttaaaaataataaaattcaccatagcaatacagaataactttaaaataccattaaatacatttgtatttcattgtgaacaggtatttcttcacagatctcatttttaaaattcttaatgattatttttattacttactgttgtttaaagggatgttattttaaagcatataccatacacttaagaaatttgagcagaatttaaaaaagaaagaaaataaattgtttttcccaaagtatgtcactgttggaaataaactgccataaattttctagttccagtttagtttgctgctattagcagaaactcaattgtttctctgtcttttctatcaaaattttcaacatatgcataaccttagtattttcccaaccaatagaaactatttattgtaagcttatgtcacaggcctggactaaattgattttacgttcctcttaaataagttaattaaataaaagataaattaactgatatagtcattgtatattagataaattttacctatttatttcaagcaagtatttttaagtctcaagaaaataatcagacataccaaagaaatgcacctattgcaaatcctggtcttggtttatgtgtgttacagtggatatttctaatatatgaaaacttatttagacacagctgaatcacccatgagaaggtcaaatatgtgtaataaatgaatttgcttcact

SEQ ID NO: 81679 - DNA, 444 bp, Homo sapiens
tggatattctacatctactatgtcttccagctattttttctggttgccagttttgatgcttgtcttcttccacagatacttcagatagtataaaaatttcccttactaaaaaagaatgtacttttactgataaaatactccaactcatgttagttaccaagctttagtatattttattccataattcttgtgaagtggtctttctccaacattatcagcagcacaatgcccataaaagtattgactgtttatcccagataaaatcttatgttcacataaaaacctgcacataaatgttcataacagctttatttgtaacagacaaaactggaaacccagatgtccttcaatagatgaatgaaaaaacacaccagtaaacctataccatagaatactacttaaaaaaggaatgaaccattagtacatgcaacaacatgaatgctg

SEQ ID NO: 81680 - DNA, 393 bp, Homo sapiens
gccaaagaatataaatgcaaagctctgagtttctgcgagtatattttaaaagcatctgggctaaatccaattatcataaattatatagttcttttagctaaacatcaagaccatgcttcaggctgggagcagtggctcacacctgtaatcccagcagtttgggaggctgaggtgggcagatcacctgaagtcaggagtttgaaactagcctggccaacatggcgaaacctcgtctctactaaaaatacaaaaattagctgggcatggtggcaggcacctataatcccagttatttgggagactgagtcaggagaatcgcttgaacctgggaggcagaggttgcagtgagccaagatcgtgccactgcactccagcctggtgatagagtgaaac

SEQ ID NO: 81681 - DNA, 133 bp, Homo sapiens
attgcacctaaacccaagaatcactgtttcttatagcggtggtttaaacagaggtgcaaacagcaagcggatcttgtcgcctttggggggctgtggccgtgcccctcaaagtgaatttggaggttccacaact

SEQ ID NO: 81682 - DNA, 1110 bp, Homo sapiens
ggcacgagggtccttagccggtagcttccgggtttcctgggctactacgatggcgatgagtttcgagtggccgtggcagtatcgcttcccacccttctttacgttacaaccgaatgtggacactcggcagaagcagctggccgcctggtgctcgctggtcctgtccttctgccgcctgcacaaacagtccagcatgacggtgatggaagctcaggagagcccgctcttcaacaacgtcaagctacagcgaaagcttcctgtggagtcgatccagattgtattagaggaactgaggaagaaagggaacctcgagtggttggataagagcaagtccagcttcctgatcatgtggcggaggccagaagaatgggggaaactcatctatcagtgggtttccaggagtggccagaacaactccgtctttaccctgtatgaactgactaatggggaagacacagaggatgaggagttccacgggctggatgaagccactctactgcgggctctgcaggccctacagcaggagcacaaggccgagatcatcactgtcagcgatggccgaggcgtcaagttcttctagcagggacctgtctccctttacttcttacctcccacctttccagggctttcaaaaggagacagacccagtgtcccccaaagactggatctgtgactccaccagactcaaaaggactccagtcctgaaggctgggacctggggatgggtttctcacaccccatatgtctgtcccttggatagggtgaggctgaagcaccagggagaaaatatgtgcttcttctcgccctacctcctttcccatcctagactgtccttgagccagggtctgtaaacctgacactttatatgtgttcacacatgtaagtacatacacacatgcgcctgcagcacatgcttctgtctcctcctcctcccacccctttagctgctgttgcctcccttctcaggctggtgctggatccttcctaggggatgggggaagccctggctgcaggcagccttccaggcaatatgaagataggaggcccacgggcctggcagtgagaggtgtggccccacaccgatttatgatattaaaatctcaactccca

SEQ ID NO: 81683 - DNA, 494 bp, Homo sapiens
ttcggctaggtacgaggctgggtggtgcccagtgtcccccaaagactggatctgtgactccaccagactcaaaaggactccagtcctgaaggctgggacctggggatgggtttctcacaccccatatgtctgtcccttggatagggtgaggctgaagcaccagggagaaaatatgtgcttcttctcgccctacctcctttcccatcctagactgtccttgagccagggtctgtaaacctgacactttatatgtgttcacacatgtaagtacatacacacatgcgcctgcagcacatgcttctgtctcctcctcctcccacccctttagctgctgttgcctcccttctcaggctggtgctggatccttcctaggggatgggggaagccctggctgcaggcagccttccaggcaatatgaagataggaggcccacgggcctggcagtgagaggtgtggccccacaccgatttatgatattaaaatctcaactccca

SEQ ID NO: 81684 - DNA, 256 bp, Homo sapiens
  misc_feature (55)..(55): n is a, c, g, or t
gcggccgcctactactactactgctcgaattcaagcttctaacgatgtacggggncatgcttctgtctcctcctcctcccacccctttagctgctgttgcctcccttctcaggctggtgctggatccttcctaggggatgggggaagccctggctgcaggcagccttccaggcaatatgaagataggaggcccacgggcctggcagtgagaggtgtggccccacaccgatttatgatattaaaatctcaactccca

SEQ ID NO: 81685 - DNA, 1243 bp, Homo sapiens
ggcacgagggtccttagccggtagcttccgggtttcctgggctactacgatggcgatgagtttcgagtggccgtggcagtatcgcttcccacccttctttacgttacaaccgaatgtggacactcggcagaagcagctggccgcctggtgctcgctggtcctgtccttctgccgcctgcacaaacagtccagcatgacggtgatggaagctcaggagagcccgctcttcaacaacgtcaagctacagcgaaagcttcctgtggagtcgatccagattgtattagaggaactgaggaagaaagggaacctcgagtggttggataagagcaagtccagcttcctgatcatgtggcggaggccagaagaatgggggaaactcatctatcagtgggtttccaggagtggccagaacaactccgtctttaccctgtatgaactgactaatggggaagacacagaggatgaggagttccacgggctggatgaagccactctactgcgggctctgcaggccctacagcaggagcacaaggccgagatcatcactgtcagcgatggccgaggcgtcaagttcttctagcagggacctgtctccctttacttcttacctcccacctttccagggctttcaaaaggagacagacccagtgtcccccaaagactggatctgtgactccaccagactcaaaaggactccagtcctgaaggctgggacctggggatgggtttctcacaccccatatgtctgtcccttggatagggtgaggctgaagcaccagggagaaaatatgtgcttcttctcgccctacctcctttcccatcctagactgtccttgagccagggtctgtaaacctgacactttatatgtgttcacacatgtaagtacatacacacatgcgcctgcagcacatgcttctgtctcctcctcctcccacccctttagctgctgttgcctcccttctcaggctggtgctggatccttcctaggggatgggggaagccctggctgcaggcagccttccaggcaatatgaagataggaggcccacgggcctggcagtgagaggtgtggccccacaccgatttatgatattaaaatctcaactcccaaggagaaaggacagaggaaggagagagaaagaggagaagaagaagaacaagagaaaaagagaggggaggggcagaaggagacacggagaggacgcagccagagagacaagagagagaggaaagaggggggcga

SEQ ID NO: 81686 - DNA, 1499 bp, Homo sapiens
ggcacgagggtccttagccggtagcttccgggtttcctgggctactacgatggcgatgagtttcgagtggccgtggcagtatcgcttcccacccttctttacgttacaaccgaatgtggacactcggcagaagcagctggccgcctggtgctcgctggtcctgtccttctgccgcctgcacaaacagtccagcatgacggtgatggaagctcaggagagcccgctcttcaacaacgtcaagctacagcgaaagcttcctgtggagtcgatccagattgtattagaggaactgaggaagaaagggaacctcgagtggttggataagagcaagtccagcttcctgatcatgtggcggaggccagaagaatgggggaaactcatctatcagtgggtttccaggagtggccagaacaactccgtctttaccctgtatgaactgactaatggggaagacacagaggatgaggagttccacgggctggatgaagccactctactgcgggctctgcaggccctacagcaggagcacaaggccgagatcatcactgtcagcgatggccgaggcgtcaagttcttctagcagggacctgtctccctttacttcttacctcccacctttccagggctttcaaaaggagacagacccagtgtcccccaaagactggatctgtgactccaccagactcaaaaggactccagtcctgaaggctgggacctggggatgggtttctcacaccccatatgtctgtcccttggatagggtgaggctgaagcaccagggagaaaatatgtgcttcttctcgccctacctcctttcccatcctagactgtccttgagccagggtctgtaaacctgacactttatatgtgttcacacatgtaagtacatacacacatgcgcctgcagcacatgcttctgtctcctcctcctcccacccctttagctgctgttgcctcccttctcaggctggtgctggatccttcctaggggatgggggaagccctggctgcaggcagccttccaggcaatatgaagataggaggcccacgggcctggcagtgagaggtgtggccccacaccgatttatgatattaaaatctcaactcccaaaaaaaaaaaaaaaaaaaaaaaaaaaaaaaaaaaaaaaaaaacaaaaaaaaaaaaaaaaaaaaaaaaaaaaaaaaaaaaaaaaaaaaaaaaaaaaaagaccaaacaagacaaacacaacagcacgcaggggggcgggggcgccgcgcacatcccgccgcgcgggggacgccgacatcgcggcgcgcgcgcaaccggtgctcttgacgcgagaacgacggcgacggcggcgcggggagggcagaaaaaagcaacgcgcgcagagaggcagagcggacaggcacagcaccgcgggcggagggggagcaaaagacaccgagcgcacagagacgaggaagagaacacaccacccccccgaggaggagagcgagaatagaggggcaacacaaca

SEQ ID NO: 81687 - DNA, 1111 bp, Homo sapiens
cccaaagtatgtatggggcgagcctggtgttaatcagtcgcgaggctgtacgatggcgataagtcgagctggcgcggcagtatcgattcccacccttctttacgttacaaccgaatgtggacactcggcagaagcagctggccgcctggtgctcgctggtcctgtccttctgccgcctgcacaaacagtccagcatgacggtgatggaagctcaggagagcccgctcttcaacaacgtcaagctacagcgaaagcttcctgtggagtcgatccagattgtattagaggaactgaggaagaaagggaacctcgagtggttggataagagcaagtccagcttcctgatcatgtggcggaggccagaagaatgggggaaactcatctatcagtgggtttccaggagtggccagaacaactccgtctttaccctgtatgaactgactaatggggaagacacagaggatgaggagttccacgggctggatgaagccactctactgcgggctctgcaggccctacagcaggagcacaaggccgagatcatcactgtcagcgatggccgaggcgtcaagttcttctagcagggacctgtctccctttacttcttacctcccacctttccagggctttcaaaaggagacagacccagtgtcccccaaagactggatctgtgactccaccagactcaaaaggactccagtcctgaaggctgggacctggggatgggtttctcacaccccatatgtctgtcccttggatagggtgaggctgaagcaccagggagaaaatatgtgcttcttctcgccctacctcctttcccatcctagactgtccttgagccagggtctgtaaacctgacactttatatgtgttcacacatgtaagtacatacacacatgcgcctgcagcacatgcttctgtctcctcctcctcccacccctttagctgctgttgcctcccttctcaggctggtgctggatccttcctaggggatgggggaagccctggctgcaggcagccttccaggcaatatgaagataggaggcccacgggcctggcagtgagaggtgtggccccacaccgatttatgatattaaaatctcaactccca

SEQ ID NO: 81688 - DNA, 1547 bp, Homo sapiens
gcagagggccccgttgatcggacgaggggctactacgatggcgatgagtttcgagtggccgtggcagtatcgcttcccacccttctttacgttacaaccgaatgtggacactcggcagaagcagctggccgcctggtgctcgctggtcctgtccttctgccgcctgcacaaacagtccagcatgacggtgatggaagctcaggagagcccgctcttcaacaacgtcaagctacagcgtatcctccctcaggctcttccacagcccatacacatgcacttctgcgctttcacacatgcccagacgcccccccgcgccagcccccttttacccatggtaggcagattcccacccaaactggacttaaagagtgaaaatgtgtagctgacattttcccctggcaaatgcagtaccataccctcttgttcttggcagtgatgactgctcggatgtcattaaggtcttagaatttctgccctgaagccaagttccaagttttttaacctaaacccttttgactatttgtatcttccatccttttctgtgtgaggcccagacttgggtaactacctttaattattttctctgcccccctcctgccaggaagtaagggtcatttgtttttgctgcctgattcatccctaaaatatctgtggagaaaggctgaaggaaggcaacagacagagggaaagcttcctgtggagtcgatccagattgtattagaggaactgaggaagaaagggaacctcgagtggttggataagagcaagtccagcttcctgatcatgtggcggaggccagaagaatgggggaaactcatctatcagtgggtttccaggagtggccagaacaactccgtctttaccctgtatgaactgactaatggggaagacacagaggatgaggagttccacgggctggatgaagccactctactgcgggctctgcaggccctacagcaggagcacaaggccgagatcatcactgtcagcgatggccgaggcgtcaagttcttctagcagggacctgtctccctttacttcttacctcccacctttccagggctttcaaaaggagacagacccagtgtcccccaaagactggatctgtgactccaccagactcaaaaggactccagtcctgaaggctgggacctggggatgggtttctcacaccccatatgtctgtcccttggatagggtgaggctgaagcaccagggagaaaatatgtgcttcttctcgccctacctcctttcccatcctagactgtccttgagccagggtctgtaaacctgacactttatatgtgttcacacatgtaagtacatacacacatgcgcctgcagcacatgcttctgtctcctcctcctcccacccctttagctgctgttgcctcccttctcaggctggtgctggatccttcctaggggatgggggaagccctggctgcaggcagccttccaggcaatatgaagataggaggcccacgggcctggcagtgagaggtgtggccccacaccgatttatgatattaaaatctcaactccca

SEQ ID NO: 81689 - DNA, 1030 bp, Homo sapiens
ggcacgagggtccttagccggtagcttccgggtttcctgggctactacgatggcgatgagtttcgagtggccgtggcagtatcgcttcccacccttctttacgttacaaccgaatgtggacactcggcagaagcagctggccgcctggtgctcgctggtcctgtccttctgccgcctgcacaaacagtccagcatgacggtgatggaagctcaggagagcccgctcttcaacaacgtcaagctacagcgaaagcttcctgtggagtcgatccagattgtattagaggaactgaggaagaaagggaacctcgagtggttggataagagcaagtccagcttcctgatcatgtggcggaggccagaagaatgggggaaactcatctatcagtgggtttccaggagtggccagaacaactccgtctttaccctgtatgaactgactaatggggaagacacagaggatgaggagttccacgggctggatgaagccactctactgcgggctctgcaggccctacagcaggagcacaaggccgagatcatcactgtcagcgatggccgaggcgtcaagttcttctagcagggacctgtctccctttacttcttacctcccacctttccagggctttcaaaaggagacagacccagtgtcccccaaagactggatctgtgactccaccagactcaaaaggactccagtcctgaaggctgggacctggggatgggtttctcacaccccatcctagactgtccttgagccagggtctgtaaacctgacactttatatgtgttcacacatgtaagtacatacacacatgcgcctgcagcacatgcttctgtctcctcctcctcccacccctttagctgctgttgcctcccttctcaggctggtgctggatccttcctaggggatgggggaagccctggctgcaggcagccttccaggcaatatgaagataggaggcccacgggcctggcagtgagaggtgtggccccacaccgatttatgatattaaaatctcaactccca

SEQ ID NO: 81690 - DNA, 1419 bp, Homo sapiens
ggcacgagggtccttagccggtagcttccgggtttcctgggctactacgatggcgatgagtttcgagtggccgtggcagtatcgcttcccacccttctttacgttacaaccgaatgtggacactcggcagaagcagctggccgcctggtgctcgctggtcctgtccttctgccgcctgcacaaacagtccagcatgacggtgatggaagctcaggagagcccgctcttcaacaacgtcaagctacagcgaaagcttcctgtggagtcgatccagattgtattagaggaactgaggaagaaagggaacctcgagtggttggataagagcaagtccagcttcctgatcatgtggcggaggccagaagaatgggggaaactcatctatcagtgggtttccaggagtggccagaacaactccgtctttaccctgtatgaactgactaatggggaagacacagaggatgaggagttccacgggctggatgaagccactctactgcgggctctgcaggccctacagcaggagcacaaggccgagatcatcactgtcagcgatggccgaggcgtcaagttcttctagcagggacctgtctccctttacttcttacctcccacctttccagggctttcaaaaggagacagacccagtgtcccccaaagactggatctgtgactccaccagactcaaaaggactccagtcctgaaggctgggacctggggatgggtttctcacaccccatcctagactgtccttgagccagggtctgtaaacctgacactttatatgtgttcacacatgtaagtacatacacacatgcgcctgcagcacatgcttctgtctcctcctcctcccacccctttagctgctgttgcctcccttctcaggctggtgctggatccttcctaggggatgggggaagccctggctgcaggcagccttccaggcaatatgaagataggaggcccacgggcctggcagtgagaggtgtggccccacaccgatttatgatattaaaatctcaactcccaaaaaaaaaaaaaaaaaaaaaaaaaaaaaaaaaaaaaaaaaaacaaaaaaaaaaaaaaaaaaaaaaaaaaaaaaaaaaaaaaaaaaaaaaaaaaaaaagaccaaacaagacaaacacaacagcacgcaggggggcgggggcgccgcgcacatcccgccgcgcgggggacgccgacatcgcggcgcgcgcgcaaccggtgctcttgacgcgagaacgacggcgacggcggcgcggggagggcagaaaaaagcaacgcgcgcagagaggcagagcggacaggcacagcaccgcgggcggagggggagcaaaagacaccgagcgcacagagacgaggaagagaacacaccacccccccgaggaggagagcgagaatagaggggcaacacaaca

SEQ ID NO: 81691 - DNA, 1098 bp, Homo sapiens
gcagagggccccgttgatcggacgaggggctactacgatggcgatgagtttcgagtggccgtggcagtatcgcttcccacccttctttacgttacaaccgaatgtggacactcggcagaagcagctggccgcctggtgctcgctggtcctgtccttctgccgcctgcacaaacagtccagcatgacggtgatggaagctcaggagagcccgctcttcaacaacgtcaagctacagcgaaagcttcctgtggagtcgatccagattgtattagaggaactgaggaagaaagggaacctcgagtggttggataagagcaagtccagcttcctgatcatgtggcggaggccagaagaatgggggaaactcatctatcagtgggtttccaggagtggccagaacaactccgtctttaccctgtatgaactgactaatggggaagacacagaggatgaggagttccacgggctggatgaagccactctactgcgggctctgcaggccctacagcaggagcacaaggccgagatcatcactgtcagcgatggccgaggcgtcaagttcttctagcagggacctgtctccctttacttcttacctcccacctttccagggctttcaaaaggagacagacccagtgtcccccaaagactggatctgtgactccaccagactcaaaaggactccagtcctgaaggctgggacctggggatgggtttctcacaccccatatgtctgtcccttggatagggtgaggctgaagcaccagggagaaaatatgtgcttcttctcgccctacctcctttcccatcctagactgtccttgagccagggtctgtaaacctgacactttatatgtgttcacacatgtaagtacatacacacatgcgcctgcagcacatgcttctgtctcctcctcctcccacccctttagctgctgttgcctcccttctcaggctggtgctggatccttcctaggggatgggggaagccctggctgcaggcagccttccaggcaatatgaagataggaggcccacgggcctggcagtgagaggtgtggccccacaccgatttatgatattaaaatctcaactccca

SEQ ID NO: 81692 - DNA, 970 bp, Homo sapiens
ggcacgagggtccttagccggtagcttccgggtttcctgggctactacgatggcgatgagtttcgagtggccgtggcagtatcgcttcccacccttctttacgttacaaccgaatgtggacactcggcagaagcagctggccgcctggtgctcgctggtcctgtccttctgccgcctgcacaaacagtccagcatgacggtgatggaagctcaggagagcccgctcttcaacaacgtcaagctacagcgaaagcttcctgtggagtcgatccagattgtattagaggaactgaggaagaaagggaacctcgagtggttggataagagcaagtccagcttcctgatcatgtggcggaggccagaagaatgggggaaactcatctatcagtgggtttccaggagtggccagaacaactccgtctttaccctgtatgaactgactaatggggaagacacagaggatgaggagttccacgggctggatgaagccactctactgcgggctctgcaggccctacagcaggagcacaaggccgagatcatcactgtcagcgatggccgaggcgtcaagttcttctagcagggacctgtctccctttacttcttacctcccacctttccagggctttcaaaaggagacagacccagtgtcccccaaagactggatctgtgactccaccagactcaaaaggactccagtcctgaaggctgggacctggggatgggtttctcacaccccatatgtctgtcccttggatagggtgaggctgaagcaccagggagaaaatatgtgcttcttctcgccctacctcctttcccatcctagactgtccttgagccagggtctgtaaacctgacactttatatgtgttcacacatgtaagtacatacacacatgcgcctgcagcacatgcttctgtctcctcctcctcccagtgacgttcctcatcccgggatcctctagatgaca

SEQ ID NO: 81693 - DNA, 1302 bp, Homo sapiens
gcagagggccccgttgatcggacgaggggctactacgatggcgatgagtttcgagtggccgtggcagtatcgcttcccacccttctttacgtgaggctcagaccccaagaagcaccgctgtgcctccctcccctcccccggaccctgggctcagccctgatgcttcatatggggagggggagaaaagacccgtcggccaacaccctcagtcccttactttcttcctgaaatgcgtcccgggcaagtgctgcctcccgccctctaattctgcgccccactcccttcacccggcaggttacaaccgaatgtggacactcggcagaagcagctggccgcctggtgctcgctggtcctgtccttctgccgcctgcacaaacagtccagcatgacggtgatggaagctcaggagagcccgctcttcaacaacgtcaagctacagcgaaagcttcctgtggagtcgatccagattgtattagaggaactgaggaagaaagggaacctcgagtggttggataagagcaagtccagcttcctgatcatgtggcggaggccagaagaatgggggaaactcatctatcagtgggtttccaggagtggccagaacaactccgtctttaccctgtatgaactgactaatggggaagacacagaggatgaggagttccacgggctggatgaagccactctactgcgggctctgcaggccctacagcaggagcacaaggccgagatcatcactgtcagcgatggccgaggcgtcaagttcttctagcagggacctgtctccctttacttcttacctcccacctttccagggctttcaaaaggagacagacccagtgtcccccaaagactggatctgtgactccaccagactcaaaaggactccagtcctgaaggctgggacctggggatgggtttctcacaccccatatgtctgtcccttggatagggtgaggctgaagcaccagggagaaaatatgtgcttcttctcgccctacctcctttcccatcctagactgtccttgagccagggtctgtaaacctgacactttatatgtgttcacacatgtaagtacatacacacatgcgcctgcagcacatgcttctgtctcctcctcctcccacccctttagctgctgttgcctcccttctcaggctggtgctggatccttcctaggggatgggggaagccctggctgcaggcagccttccaggcaatatgaagataggaggcccacgggcctggcagtgagaggtgtggccccacaccgatttatgatattaaaatctcaactccca

SEQ ID NO: 81694 - DNA, 1276 bp, Homo sapiens
gcagagggccccgttgatcggacgaggggctactacgatggcgatgagtttcgagtggccgtggcagtatcgcttcccacccttctttacgttacaaccgaatgtggacactcggcagaagcagctggccgcctggtgctcgctggtcctgtccttctgccgcctgcacaaacagtccagcatgacggtgatggaagctcaggagagcccgctcttcaacaacgtcaagctacagcgtatcctccctcaggctcttccacagcccatacacatgcacttctgcgctttcacacatgcccagacgcccccccgcgccagcccccttttacccatgtaagggtcatttgtttttgctgcctgattcatccctaaaatatctgtggagaaaggctgaaggaaggcaacagacagagggaaagcttcctgtggagtcgatccagattgtattagaggaactgaggaagaaagggaacctcgagtggttggataagagcaagtccagcttcctgatcatgtggcggaggccagaagaatgggggaaactcatctatcagtgggtttccaggagtggccagaacaactccgtctttaccctgtatgaactgactaatggggaagacacagaggatgaggagttccacgggctggatgaagccactctactgcgggctctgcaggccctacagcaggagcacaaggccgagatcatcactgtcagcgatggccgaggcgtcaagttcttctagcagggacctgtctccctttacttcttacctcccacctttccagggctttcaaaaggagacagacccagtgtcccccaaagactggatctgtgactccaccagactcaaaaggactccagtcctgaaggctgggacctggggatgggtttctcacaccccatatgtctgtcccttggatagggtgaggctgaagcaccagggagaaaatatgtgcttcttctcgccctacctcctttcccatcctagactgtccttgagccagggtctgtaaacctgacactttatatgtgttcacacatgtaagtacatacacacatgcgcctgcagcacatgcttctgtctcctcctcctcccacccctttagctgctgttgcctcccttctcaggctggtgctggatccttcctaggggatgggggaagccctggctgcaggcagccttccaggcaatatgaagataggaggcccacgggcctggcagtgagaggtgtggccccacaccgatttatgatattaaaatctcaactccca

SEQ ID NO: 81695 - DNA, 1190 bp, Homo sapiens
tgcactccagcctgggcaacagagcgagatgctatcttaaaaaataacaataggcgtgagccaccgcgcctggcctgtgctcccagctaaaagctagaaaaagggcagataatagtgctggagtttaacagtctcctggccaggggtactggctatattctttgtgttaggatagatcctctagggtcagtgtctagtgacaatggctccgatctccctaggcctgattttcacggcccctttgtggccctgaagcagatggtgtcattctcgtgcatcagacacaaatgctaggtgtgggggaggctgagtctgagaggagaaccaagaagggggaaataagcacaaactcatttcatgctgattcaggctttcttccaccccttactcctaaggagtgcctgggaagtgtggatggcagctgtagcagtatagatggcttatgcataccctgcctctgggaggtctcggcttccagccagagcactctcctcagaggccttgggcctcaggagctgattgtctctgcctatctctccctgttcagagttccacgggctggatgaagccactctactgcgggctctgcaggccctacagcaggagcacaaggccgagatcatcactgtcagcgatggccgaggcgtcaagttcttctagcagggacctgtctccctttacttcttacctcccacctttccagggctttcaaaaggagacagacccagtgtcccccaaagactggatctgtgactccaccagactcaaaaggactccagtcctgaaggctgggacctggggatgggtttctcacaccccatatgtctgtcccttggatagggtgaggctgaagcaccagggagaaaatatgtgcttcttctcgccctacctcctttcccatcctagactgtccttgagccagggtctgtaaacctgacactttatatgtgttcacacatgtaagtacatacacacatgcgcctgcagcacatgcttctgtctcctcctcctcccacccctttagctgctgttgcctcccttctcaggctggtgctggatccttcctaggggatgggggaagccctggctgcaggcagccttccaggcaatatgaagataggaggcccacgggcctggcagtgagaggtgtggccccacaccgatttatgatattaaaatctcaactccca

SEQ ID NO: 81696 - DNA, 365 bp, Homo sapiens
tgtttgaagaattttttaattttcatattgatttggtttttgccccaatggttattcaggagcagcttatttaatttccatatatttgcgtggctttgaagttttctttgggagttgatgtccagttttattccactgtggtctgagagagtgcttgatatagtttcagttttcttaaatgttttgaggctcgtattatgacctatcatatgatctgtcttggagaaagttccatgtgctgttgaggagaatgtgtgttctgcagttgttgaatgaaatgttttgtatatatctgttaagtccatttttttccaaggtatggtttaaatccactctttctttgtcgactttctgtcttgatggcc

SEQ ID NO: 81697 - DNA, 552 bp, Homo sapiens
agagacagggtttcaccatgttgcccacactggtctcgaactctggacctcaggtgatctgcccacctcagcttcccagtgtgctgggattacaggagtgagccaccgcacccggacttcacagctcagcttctaagcaaatcagatcttttagatttaagtcatttgctttttggttgtccagaaagttgattaattaaagttgatttccttcctgaaggaatattttctgccctcagagagagggcttgtttggtttggtttctgtgccactgtaagcagatgcgtacagccctggcggtgcagaccagcagaggtgttgaaggcacctcttcctcctttgccggctccttattttttgctccattgacctttatggctgtgactggaagaaacaagagatgacactttgaatcagtagatgtctttgtagtttacaggtggttttctattttttttgagacagtctccctctgccgcctagactggtgtgcagtggcgcaatttccggtctctgcaacctctgcctcttgggttcaagtgattctcctg

SEQ ID NO: 81698 - DNA, 769 bp, Homo sapiens
tacaggcatgagccgtcatccctggctggtggtttcttatgacgtgaaacatgcaattaccatatgacctagcagttgcactctgtatttatcccagataaatgaaaacttaccttccaataaaaacctgtgcacaaatgttcatagcagcttaatattgaaaaactggatgttcttcagcaggtgaatgaactggttcattcataccatggaataccattcagcaataaaaaggaacaaactgttgatacatttaaccacctggatgaatatcaagggaattatgctgtcagacaaaaaccagtccctaaagactacatatagtatgattccgtttggataatattcttgaaatagagaaattaagagaaatgaaaagattagtgtttgccagatgttagagacagggaggtgagaggggtaagtgggtgtagttataaaagtgcaacatgagggatctttgtgatgttgaagttgtatcttggcagtggatgcagaaatctcaatgtgataaaattacaaagaactaaaaacaagaatgagtatagataaaactggggaaatctgaacaagttagagtgttgtatcactgtcagtatcttagagtgatattgtactatagctttgcaagatgttaccatgggagaaactaaagtgtacaagggatctctaggtattattatttttttagagatggggtttcactatgttccccaggccggtcttgaactcctgggctctagtgatccgcctgccccagcctcctaaa

SEQ ID NO: 81699 - DNA, 570 bp, Homo sapiens
atgatgggtgcctgtaatcccagctactcgggaggctgagacaggagaattgtttgaacccaggaggtggaggttgcagtgagccgagatcgcaccactgcactccagactgggtgactgagactccatctcaaaaaaaaacaacaacaaaaaacagctcttagaattcttcattagttacaattttgtttcctccgtggcaatatgaattgcaatttgtgaattaaaaacattagaatttgaaaaaattttggctggacatggtagcttatgcctgtaatccctagcactttgggacgccgagcgaggcaggcagatcacctgaggtctggagttcaagaccagcctgaccaacatggtgaaaccccttctctactaaaaaaatacaaaaattagcccagtgtggtggcgcatgcctgtggtcccagctactcaggaggctgaggcaggagaatcgcttgaacccgggaggcagaggttgcagtgagccaagatcatgccactgtactccagcctgggtgacagagtgagactcagtctcaaaaaataaataaataataataaataaaa

SEQ ID NO: 81700 - DNA, 1087 bp, Homo sapiens
agatgctcttccacttatgttgagcttacattctgataaacctattgtaagttgaaaatactgtaggtcgaatattgtaagtgcatttttgattttgcactattgtaaactcagacaaattctaagtccaaccattgctaagttggggaccatttgtaatggtttttaaataatagaagaatgtttcctcagctgtctgtaccattcacaatataatggccacagacacataatacctttaagtttaacctgtcttattaacactctgtacatcactttcttaaatccagacaatcaacaaaatgatcaaaccctgatttgcagcactggccattatccctggtgtaaatattcccattgtggcttatttcaagctaccagtgtgacgtcattgaatgtggagttggggagagatgcatagataccattatatgtgtttcaaccatataggtacaattcatgctaataactagtgtactccatacaattgtaagcttatataatttaattttatgattgcatttcacaagctgctcataaaattcctgaaaatttaatgattagctcttgtgggctggtatgagctgcacccagcacactgctataaatcactgtggccatgtacttcctgctcagtgggtaataaatggcaaagaccccatgccatagttcagatggccttttgtcttcttccttggaagttctttttacactggaggctccttctaagggcatccttcctgtccggataaagcaggactttacctttcttctcttccaaaagcctctcttttttcccttcatagcacatagtcacagttggcagcaacgtctccttttgggtgtggatttatttgttccccaatgcaactgtgagcaccatgagtgcaggaaagtgcctgtttctgatcatggtatttcctgggtgtgacttcatgtacagtcaagaggagaaactctgagtgggagcactagggaatagttgaagcttaatcttcattttggagaagagggagtgttattatccacgttcattattcacagtagcaaatttcacagtagcaaaaaggtgacagacactcaattg

SEQ ID NO: 81701 - DNA, 976 bp, Homo sapiens
tggggctggctccagcatgatgtgggggtctgcaaggccctggagaaagtggggtggtgcagcagggggcacacccacagctggagctgacccagatggacagcttgggctctgccacgcgggactaggcaaggaaggggcacgaacaagcaggaagtggtgaggcggtctccagctagctgctctcccctgcccagactttggtttcctccctgctggcttggcctggctccctggctctgtgtggtatggtcacacccccgtgcaccccctccactgagatggggcggggagagcaccgaggcagcggcttcctctcctgggccgtcctctgagcagcagacggggctaagcgttccccagctcgccttcacacacagcccgtgccaccacaccgacggtaccatgaaggacgaggtagctctactggctgctgtcaccctcctgggagtcctgctgcaagcctacttctccctgcaggtgatctcggcgcgcagggccttccgcgtgtcgccgccgctcaccaccggcccacccgagttcgagcgcgtctaccgagcccaggtgaactgcagcgagtacttcccgctgttcctcgccacgctctgggtcgccggcatcttctttcatgaaggggcggcggccctgtgcggcctggtctacctgttcgcgcgcctccgctacttccagggctacgcgcgctccgcgcagctcaggctggcaccgctgtacgcgagcgcgcgcgccctctggctgctggtggcgctggctgcgctcggcctgctcgcccacttcctcccggccgcgctgcgcgccgcgctcctcggacggctccggacgctgctgccgtgggcctgagaccaaggcccccgggccgacggagccgggaaagaagagccggagcctccagctgccccggggaggggcgctcgcttccgcatcctagtctctatcattaaagttctagtgaccgaga

SEQ ID NO: 81702 - DNA, 1223 bp, Homo sapiens
tggggctggctccagcatgatgtgggggtctgcaaggccctggagaaagtggggtggtgcagcagggggcacacccacagctggagctgacccagatggacagcttgggctctgccacgcgggactaggcaaggaaggggcacgaacaagcaggaagtggtgaggcggtctccagctagctgctctcccctgcccagactttggtttcctccctgctggcttggcctggctccctggctctgtgtggtatggtcacacccccgtgcaccccctccactgagatggggcggggagagcaccgaggcagcggcttcctctcctgggccgtcctctgagcagcagacggggctaagcgttccccagctcgccttcacacacagcccgtgccaccacaccgacggtaccatgaaggacgaggtagctctactggctgctgtcaccctcctgggagtcctgctgcaagcctacttctccctgcaggtgatctcggcgcgcagggccttccgcgtgtcgccgccgctcaccaccggcccacccgagttcgagcgcgtctaccgagcccagtgaggcgcggcgggagggcgcggggcggggagcgagccccaggcgggtccgggtcgcaggaccatcccggccggcgcgctcatcccacccgcccaccgcagggtgaactgcagcgagtacttcccgctgttcctcgccacgctctgggtcgccggcatcttctttcatgaaggggcggcggccctgtgcggcctggtctacctgttcgcgcgcctccgctacttccagggctacgcgcgctccgcgcagctcaggctggcaccgctgtacgcgagcgcgcgcgccctctggctgctggtggcgctggctgcgctcggcctgctcgcccacttcctcccggccgcgctgcgcgccgcgctcctcggacggctccggacgctgctgccgtgggcctgagaccaaggcccccgggccgacggagccgggaaagaagagccggagcctccagctgccccggggaggggcgctcgcttccgcatcctagtctctatcattaaagttctagtgaccgagacccgggctgcgttctctgggtccgcgggggtggcgcaccgcgggctacggagcctggaggggcccagcccgagtccgggcagcccggggcgggcttcctagtggcggcgtgagagtggctgcgaaggaacgagccctccccctgg

SEQ ID NO: 81703 - DNA, 924 bp, Homo sapiens
tggggctggctccagcatgatgtgggggtctgcaaggccctggagaaagtggggtggtgcagcagggggcacacccacagctggagctgacccagatggacagcttgggctctgccacgcgggactaggcaaggaaggggcacgaacaagcaggaagtggtgaggcggtctccagctagctgctctcccctgcccagactttggtttcctccctgctggcttggcctggctccctggctctgtgtggtatggtcacacccccgtgcaccccctccactgagatggggcggggagagcaccgaggcagcggcttcctctcctgggccgtcctctgagcagcagacggggctaagcgttccccagctcgccttcacacacagcccgtgccaccacaccgacggtaccatgaaggacgaggtagctctactggctgctgtcaccctcctgggagtcctgctgcaaggtgggctggttcctatctaggaagagggtgggccttagatccctacagcttgccctctgccccctaggcccaggtggagggcagaggtggggactccagcccaggcccaagctggaagagggtggggactttcagggaactggggggcacctggctgtgagagctgtaggacttgggggtggcaagggtgccaggacaaatggtaggatagccatgggcttggggaagctgatctctgctctttccagctgtcccctctctgggcgtcccagcaagcggcccccattccctggctctgcttcaaaggcacctccatactgggaccacgtggagcagggtagaggtgggactccttcctccagccccctaaaaagagcctgcttaatgcctttctcagactggccctaaaggacacattccttggccagatatccttgccacctaagagacaccactactcc

SEQ ID NO: 81704 - DNA, 1078 bp, Homo sapiens
tggggctggctccagcatgatgtgggggtctgcaaggccctggagaaagtggggtggtgcagcagggggcacacccacagctggagctgacccagatggacagcttgggctctgccacgcgggactaggcaaggaaggggcacgaacaagcaggaagtggtgaggcggtctccagctagctgctctcccctgcccagactttggtttcctccctgctggcttggcctggctccctggctctgtgtggtatggtcacacccccgtgcaccccctccactgagatggggcggggagagcaccgaggcagcggcttcctctcctgggccgtcctctgagcagcagacggggctaagcgttccccagctcgccttcacacacagcccgtgccaccacaccgacggtaccatgaaggacgaggtagctctactggctgctgtcaccctcctgggagtcctgctgcaagcctacttctccctgcaggtgatctcggcgcgcagggccttccgcgtgtcgccgccgctcaccaccggcccacccgagttcgagcgcgtctaccgagcccagtgaggcgcggcgggagggcgcggggcggggagcgagccccaggcgggtccgggtcgcaggaccatcccggccggcgcgctcatcccacccgcccaccgcagggtgaactgcagcgagtacttcccgctgttcctcgccacgctctgggtcgccggcatcttctttcatgaaggggcggcggccctgtgcggcctggtctacctgttcgcgcgcctccgctacttccagggctacgcgcgctccgcgcagctcaggctggcaccgctgtacgcgagcgcgcgcgccctctggctgctggtggcgctggctgcgctcggcctgctcgcccacttcctcccggccgcgctgcgcgccgcgctcctcggacggctccggacgctgctgccgtgggcctgagaccaaggcccccgggccgacggagccgggaaagaagagccggagcctccagctgccccggggaggggcgctcgcttccgcatcctagtctctatcattaaagttctagtgaccgaga

SEQ ID NO: 81705 - DNA, 1279 bp, Homo sapiens
  misc_feature (1230)..(1230): n is a, c, g, or t
  misc_feature (1233)..(1233): n is a, c, g, or t
  misc_feature (1235)..(1235): n is a, c, g, or t
  misc_feature (1237)..(1237): n is a, c, g, or t
  misc_feature (1241)..(1242): n is a, c, g, or t
  misc_feature (1257)..(1257): n is a, c, g, or t
  misc_feature (1262)..(1263): n is a, c, g, or t
  misc_feature (1267)..(1267): n is a, c, g, or t
tggggctggctccagcatgatgtgggggtctgcaaggccctggagaaagtggggtggtgcagcagggggcacacccacagctggagctgacccagatggacagcttgggctctgccacgcgggactaggcaaggaaggggcacgaacaagcaggaagtggtgaggcggtctccagctagctgctctcccctgcccagactttggtttcctccctgctggcttggcctggctccctggctctgtgtggtatggtcacacccccgtgcaccccctccactgagatggggcggggagagcaccgaggcagcggcttcctctcctgggccgtcctctgagcagcagacggggctaagcgttccccagctcgccttcacacacagcccgtgccaccacaccgacggtaccatgaaggacgaggtagctctactggctgctgtcaccctcctgggagtcctgctgcaagcctacttctccctgcaggtgatctcggcgcgcagggccttccgcgtgtcgccgccgctcaccaccggcccacccgagttcgagcgcgtctaccgagcccaggtgaactgcagcgagtacttcccgctgttcctcgccacgctctgggtcgccggcatcttctttcatgaaggggcggcggccctgtgcggcctggtctacctgttcgcgcgcctccgctacttccagggctacgcgcgctccgcgcagctcaggtgagggccgggcggggagcggggcggggccggggaaagatcgcgggcgggcggggctcctggggagcgggaccgaagctgggggcgggcgacgggccggagcccagcgcctttggggattcggtgggcgagccctggcggcggccagaggaagtccccgtggggccagggttgcggcggggaagaagcgggcctcctcgcgccacctccccgctgaccgccgcccgcaggctggcaccgctgtacgcgagcgcgcgcgccctctggctgctggtggcgctggctgcgctcggcctgctcgcccacttcctcccggccgcgctgcgcgccgcgctcctcggacggctccggacgctgctgccgtgggcctgagaccaaggcccccgggccgacggagccgggaaagaagagccggagcctccagctgccccggggaggggcgctcgcttccgcatcctagtctctatcattaaagttctagtgaccgagaaaaaaaaaaaaaaaaaaaaaaaanaanananaaannaaaaaaaaaaaaaanaaaannaaanaaaaaaaaagaa

SEQ ID NO: 81706 - DNA, 1007 bp, Homo sapiens
tggggctggctccagcatgatgtgggggtctgcaaggccctggagaaagtggggtggtgcagcagggggcacacccacagctggagctgacccagatggacagcttgggctctgccacgcgggactaggcaaggaaggggcacgaacaagcaggaagtggtgaggcggtctccagctagctgctctcccctgcccagactttggtttcctccctgctggcttggcctggctccctggctctgtgtggtatggtcacacccccgtgcaccccctccactgagatggggcggggagagcaccgaggcagcggcttcctctcctgggccgtcctctgagcagcagacggggctaagcgttccccagctcgccttcacacacagcccgtgccaccacaccgacggtaccatgaaggacgaggtagctctactggctgctgtcaccctcctgggagtcctgctgcaagcctacttctccctgcaggtgatctcggcgcgcagggccttccgcgtgtcgccgccgctcaccaccggcccacccgagttcgagcgcgtctaccgagcccagtgaggcgcggcgggagggcgcggggcggggagcgagccccaggcgggtccgggtcgcaggaccatcccggccggcgcgctcatcccacccgcccaccgcagggtgaactgcagcgagtacttcccgctgttcctcgccacgctctgggtcgccggcatcttctttcatgaaggggcggcggccctgtgcggcctggtctacctgttcgcgcgccctctggctgctggtggcgctggctgcgctcggcctgctcgcccacttcctcccggccgcgctgcgcgccgcgctcctcggacggctccggacgctgctgccgtgggcctgagaccaaggcccccgggccgacggagccgggaaagaagagccggagcctccagctgccccggggaggggcgctcgcttccgcatcctagtctctatcattaaagttctagtgaccgaga

SEQ ID NO: 81707 - DNA, 503 bp, Homo sapiens
cagggccttccgcgtgtcgccgccgctcaccaccggcccacccgagttcgagcgcgtctaccgagcccagtgaggcgcggcgggagggcgcggggcggggagcgagccccaggcgggtccgggtcgcaggaccatcccggccggcgcgctcatcccacccgcccaccgcagggtgaactgcagcgagtacttcccgctgttcctcgccacgctctgggtcgccggcatcttctttcatgaaggtcggggtgtggggcaggggcgcacgcgctggacccccgggacccgcgcagggcgctcaccaggcccgtgcgtacctctcgcaggggcggcggccctgtgcggcctggtctacctgttcgcgcgcctccgctacttccagggctacgcgcgctccgcgcagctcaggtgagggccgggcggggagcggggcggggccggggaaagatcgcgggcgggcggggctcctggggagcgggaccgaagctgggggcgggcgacgg

SEQ ID NO: 81708 - DNA, 1049 bp, Homo sapiens
  misc_feature (1000)..(1000): n is a, c, g, or t
  misc_feature (1003)..(1003): n is a, c, g, or t
  misc_feature (1005)..(1005): n is a, c, g, or t
  misc_feature (1007)..(1007): n is a, c, g, or t
  misc_feature (1011)..(1012): n is a, c, g, or t
  misc_feature (1027)..(1027): n is a, c, g, or t
  misc_feature (1032)..(1033): n is a, c, g, or t
  misc_feature (1037)..(1037): n is a, c, g, or t
tggggctggctccagcatgatgtgggggtctgcaaggccctggagaaagtggggtggtgcagcagggggcacacccacagctggagctgacccagatggacagcttgggctctgccacgcgggactaggcaaggaaggggcacgaacaagcaggaagtggtgaggcggtctccagctagctgctctcccctgcccagactttggtttcctccctgctggcttggcctggctccctggctctgtgtggtatggtcacacccccgtgcaccccctccactgagatggggcggggagagcaccgaggcagcggcttcctctcctgggccgtcctctgagcagcagacggggctaagcgttccccagctcgccttcacacacagcccgtgccaccacaccgacggtaccatgaaggacgaggtagctctactggctgctgtcaccctcctgggagtcctgctgcaagcctacttctccctgcaggtgatctcggcgcgcagggccttccgcgtgtcgccgccgctcaccaccggcccacccgagttcgagcgcgtctaccgagcccaggtgaactgcagcgagtacttcccgctgttcctcgccacgctctgggtcgccggcatcttctttcatgaaggggcggcggccctgtgcggcctggtctacctgttcgcgcgcctccgctacttccagggctacgcgcgctccgcgcagctcaggctggcaccgctgtacgcgagcgcgcgcgccctctggctgctggtggcgctggctgcgctcggcctgctcgcccacttcctcccggccgcgctgcgcgccgcgctcctcggacggctccggacgctgctgccgtgggcctgagaccaaggcccccgggccgacggagccgggaaagaagagccggagcctccagctgccccggggaggggcgctcgcttccgcatcctagtctctatcattaaagttctagtgaccgagaaaaaaaaaaaaaaaaaaaaaaaanaanananaaannaaaaaaaaaaaaaanaaaannaaanaaaaaaaaagaa

SEQ ID NO: 81709 - DNA, 663 bp, Homo sapiens
ggggcttcgggtgtccagacctgactcccgctccccctcctcccccagcctacttctccctgcaggtgatctcggcgcgcagggccttccgcgtgtcgccgccgctcaccaccggcccacccgagttcgagcgcgtctaccgagcccagtgaggcgcggcgggagggcgcggggcggggagcgagccccaggcgggtccgggtcgcaggaccatcccggccggcgcgctcatcccacccgcccaccgcagggtgaactgcagcgagtacttcccgctgttcctcgccacgctctgggtcgccggcatcttctttcatgaaggggcggcggccctgtgcggcctggtctacctgttcgcgcgcctccgctacttccagggctacgcgcgctccgcgcagctcaggctggcaccgctgtacgcgagcgcgcgcgccctctggctgctggtggcgctggctgcgctcggcctgctcgcccacttcctcccggccgcgctgcgcgccgcgctcctcggacggctccggacgctgctgccgtgggcctgagaccaaggcccccgggccgacggagccgggaaagaagagccggagcctccagctgccccggggaggggcgctcgcttccgcatcctagtctctatcattaaagttctagtgaccgaga

SEQ ID NO: 81710 - DNA, 978 bp, Homo sapiens
  misc_feature (929)..(929): n is a, c, g, or t
  misc_feature (932)..(932): n is a, c, g, or t
  misc_feature (934)..(934): n is a, c, g, or t
  misc_feature (936)..(936): n is a, c, g, or t
  misc_feature (940)..(941): n is a, c, g, or t
  misc_feature (956)..(956): n is a, c, g, or t
  misc_feature (961)..(962): n is a, c, g, or t
  misc_feature (966)..(966): n is a, c, g, or t
tggggctggctccagcatgatgtgggggtctgcaaggccctggagaaagtggggtggtgcagcagggggcacacccacagctggagctgacccagatggacagcttgggctctgccacgcgggactaggcaaggaaggggcacgaacaagcaggaagtggtgaggcggtctccagctagctgctctcccctgcccagactttggtttcctccctgctggcttggcctggctccctggctctgtgtggtatggtcacacccccgtgcaccccctccactgagatggggcggggagagcaccgaggcagcggcttcctctcctgggccgtcctctgagcagcagacggggctaagcgttccccagctcgccttcacacacagcccgtgccaccacaccgacggtaccatgaaggacgaggtagctctactggctgctgtcaccctcctgggagtcctgctgcaagcctacttctccctgcaggtgatctcggcgcgcagggccttccgcgtgtcgccgccgctcaccaccggcccacccgagttcgagcgcgtctaccgagcccagggcggcggccctgtgcggcctggtctacctgttcgcgcgcctccgctacttccagggctacgcgcgctccgcgcagctcaggctggcaccgctgtacgcgagcgcgcgcgccctctggctgctggtggcgctggctgcgctcggcctgctcgcccacttcctcccggccgcgctgcgcgccgcgctcctcggacggctccggacgctgctgccgtgggcctgagaccaaggcccccgggccgacggagccgggaaagaagagccggagcctccagctgccccggggaggggcgctcgcttccgcatcctagtctctatcattaaagttctagtgaccgagaaaaaaaaaaaaaaaaaaaaaaaanaanananaaannaaaaaaaaaaaaaanaaaannaaanaaaaaaaaagaa

SEQ ID NO: 81711 - DNA, 432 bp, Homo sapiens
agatcttattcaccatttttgatgtcagtaaagtgtgttacgcaaattggccttcaaaaattaaaacctgtaacaaactttgagtcttgaaatgcatgctatgtatgatcttaaaaacatgtaggtaggcttattagttcatagaggttcatagtatttcatatgtttttcagactatatgtagggaattgctgacaaatcttggtatcactaaatccattatcatgttctgaaatgtcaccaaattgagcctacatattgtgaagagtgagtgtatggccatatagtgtatggcctcaagattttgtcttataatttaagtttcaatgtccacacctcatctaaattagggtaccatttggactatcatgtttaataaatttaccactaagtaattacattaaaaacaaatttatcttaaagatgtataaa

SEQ ID NO: 81712 - DNA, 465 bp, Homo sapiens
tcccaaagtgcagggattacaggcatgagccatcgaacccggcccaagaagaaagacattgaacaagtaattacagggtattgggtgttatgaaagaaaagcatggtactgtataatgaggtcatctaatttagtctggggtgacaaggaatgcctactaaagaaggtatcgtttaagacatacctggggaatagcggtagtgaaaatagaagctccagaaatgcagggaccatggctgacatgtttaccatgccagtgtctggcatggaagaggcccaattcctttggttgaaaggatgaagtaatctagctgaataaagggtgtgtgcgtgcacgcaggtgtgtttgtagttaaccttcctttagctcagcttaggaaacagcttttgtaaaactgcgtaactagtagtaggtgagagaggaatacgaatgatatacacaccattaaagacaacttactaaca

SEQ ID NO: 81713 - DNA, 562 bp, Homo sapiens
aaaatccagcttgaagaagtttagtaacttattcaaagttccaggctagtaagtgatatgagtggctcataagcgaggggctgttagattccaaaagctacaactgagagtaataactaagaaagttttgcaacaagaacttaattaagcagactaaactttttttttttttctttaacttcagagactcagggctgctcctggaaatggtagctcactgagggaaaaacttgtgcaagagggacaaactagtattttctcagaatggcaataagaagggaaaggggccgggtgtggtggctgacgcctgtaatgccagcactttgagaggctgaagtggacggatcacctgaggtcaggagttcgagattagcatggtgaaacctcgtctccactaaaaatacaaaaaaaaattagctgagcttggtggcgggtgcctgtagtcccagctactaggaaggccaaggcgggagaatcacttgaacccaggaggtggagcttgcagtgagccgagatcgcagcactgcactccagcctgggcggcagagcgagattctgtctc

SEQ ID NO: 81714 - DNA, 404 bp, Homo sapiens
aagatatgattaccattttacagatgagaaaacctgagaagaatagaagttaagtagcatgccaagcttacccaactagctctcattcattcattcatgattcatgaagtatttatcaaacaactactatatactgtcattaaagatacaaaaaggatcaaacataatccttgccttcaaagaagccacagtctaaggttaacaagtggactggagcggaatttggttttatcatttcaaaggcaaaggaacccagattggagagttttctggcaactgccttaggactttttggccaagattaatgtaatatataaaggtaagcatcaatgtgttggtgggaagaagtatcctagaaatgttttttgttttttactgtatctaggactcttatgaactactaa

SEQ ID NO: 81715 - DNA, 249 bp, Homo sapiens
gagggcccccaacaccctctgctgggccccacttgccctgtggttcccttccctgctataatcatgttgtcagatagaaacttgggatccgttacctcccatcttgttggacacagaccactgcttcggcctctgtgaccccagatttctcaacatcatttctgaaccttcattgttaagtgtggggaggccaggtatgcagcagacacggttgctgaagaaggatgaatctgcccactatggcagtga

SEQ ID NO: 81716 - DNA, 230 bp, Homo sapiens
ttttggaggataagaggagaaacaggcagactggttaggaggctattgcagtaatccaagtaaaagatgatggtggccgggtatctagtggttgaaatgatgagaactagctggatctaggtaaagccagccagactgttggtatgtataatgaaggaaagaggagtcaaggatgatgccagtgttacatcgcccaaatgagaaagaaagtcatttggcagggagaattt

SEQ ID NO: 81717 - DNA, 394 bp, Homo sapiens
gccagtgtgaaagtgaggaactctgtgatgtgtgagttctggccctttctgcctgcaaggagaggtaagaaccccagtcttgcaaaatactcttccactgccacgcgatcctgtagtgactgctctgctcatgtgtgagaagctctggaaacaatcacaaatagaaatatgaagaaaaacaagacaagtagacactggtgctattaggaaacagtatttcattatgcgagactctatggcattcgcaccacctgagaggaagaatgagacaagttcattaattcttcttttatccttagctgagcactttcgatgtgaagcctaatgagggaaagaaaacaagacttcttccacctagggtatagaatgatggaaaagattttcactcccgtgg

SEQ ID NO: 81718 - DNA, 198 bp, Homo sapiens
  misc_feature (191)..(191): n is a, c, g, or t
  misc_feature (198)..(198): n is a, c, g, or t
ctgtccaaaggcagagttccattgtgacactccagaatgctgtcctttgaaaccatttgaaatgaaagacaggacatagagtgaacatgggatttaggaaagtggaggactatgagaaagacaattttggtcagagtcttattcaagaatggggacttggaagaacatgtggaaataaataccgatgctgnccggagn

SEQ ID NO: 81719 - DNA, 569 bp, Homo sapiens
ctgtccaaaggcagagttccattgtgacactccagaatgctgtcctttgaaaccatttgaaatgaaagacaggacatagagtgaacatgggatttaggaaagtggaggactatgagaaagacaattttggttggtaatttggtatttcactttcttctcatttatacaaatgatatatcaaaaaccataaatgacaataattattaattactgtgacagttgtatagatgttgatggggctcaagaaacaccaccccaaaatatggtaccttggcatttgagaaaacagcaggagcaggaaagccaactctcaccttccccttgcccttctcccttgaagcaggtcataagaccctcattcgagaggtgccctccatatactcaaaggaaaggaacatccttatctttgaagacacagtgccacacagaagaatctgaacaagtaggccttgctaagttcccctcagtttatagacattaaaccacatctcttttgtccaatcatacttttctatgactacccacatcttcatcaaacccaagcataaaaacatatgtttacttatttc

SEQ ID NO: 81720 - DNA, 448 bp, Homo sapiens
ataaaaaggaaaggggcccaagaagaggggtcccagaagagaggtccaagtttcctagagggcaaggacaggccatgattgacaagccagaagtgggctcatgagaactgggctttctctgccaatagttgtgctgtcctgacctaagcttaccttctctaaatgtgtcaatctagaaagagaacagggctttggttttgcaagattaaaaaggtctgcaaattaattgcacacacattgtaataaatctccacccctttttcatcttgcaaattctatgaattttggatgcctcatataagtgaaatcacagtgttagtttttttgtgactgccttatttcgcttagcattatgtcttcaagattcatccatgtagcaagggtcagaatttccttcctttaaaggctgaatgatattccactgtagggatattactatccattcatc

SEQ ID NO: 81721 - DNA, 520 bp, Homo sapiens
ttaaactcccatgtcaggaaattcactcatcattcccttggcagcttttgtttctctgcactgcacaccccacttacagacagccccttcttgccaaagcccagcccagccatgaccatgagttatggcagattgggaatcgttaccttgatcttctcaacccttgggtgtttaccttttccaagttaatgcctgttctttaatgttacattatcttgtagcaaggtagtcatttataatttatatactagagctgccttaaaatagagacaagaggataatcagcatcctgaaacttctagttttccaaaataacatttcttcagtgaagtctgcctgtaggaattaaaacttttggtgaattaaaaagctttttgtcctattgtcagactgggaaatggatgtgcccattactcagccttaaaaacgaggaaggagatcatctgttaaaaataaaactcatcattttcttttattcttctcaaaataatccctaaagacctcaatctttatagtgttc

SEQ ID NO: 81722 - DNA, 665 bp, Homo sapiens
ggcttacacctgtaatcccagtactttgggaggctgaggcgggcagatcaggaggttaggagatcgagaccatcctggctaacatggtgaaaccccgtctctactaaaaatacaaaaaattagccgggcgttgtggcgggtgcctgtagtcccagctactcgggaggctgaggcaggagaatggcgtaaacctgggaggtggagcttgcagtgagccgagattgtgccactgcacgctccagcctgggcaacagagtgaggctccctctaaaaaaaaaaaaaaaaaaaaatacagggtctcatcatctggcccaggctggacttaaactgctgggctcaagtaattcccccacctcagcctcccaagtagctaggactaaaggcatgaaaccaccatgcccggcttgtccaatttcattctacacactttcttggtatttaaacagctgccgttgctcttcattctgtagctctatgtccaattcatgctctagtcctgtatatccaaatgatgactagactgtgctactctgctctctcaaaggcacaccaagcttagcctatgtacaaaactctcccttttccaatccagctttccctcctgcatcacctatctctacatctggaaacaccactcctgcttccctctagcatgtgctaacagt

SEQ ID NO: 81723 - DNA, 415 bp, Homo sapiens
gagatggagtttcgctcttggcacccagactggagtgcaatggcgtgatctcggctccctgcaacctctgctccacaggttcaagcaatctcctgttcagcctccaaagtacctgggactacaggtgcctgccatcatgcccagctaatttttgtatttttagtagagacggggtttcactatgttggccaggcttgtcttaaactcctgacctcaagtgatccgccaacctcggcctcccaaagtgctaggattacaggcctgagccaccgtgcccaaccttttttctttttttagagacaaagcctcccatgatctttcacccaggctggagtataatggcatgatcatagcacactataatctcaaactcctctgtgttcaagcaatcctcccacctcagcctcctgagtag

SEQ ID NO: 81724 - DNA, 412 bp, Homo sapiens
ttgtggttttcttcaggtgtgctgggaggcacaggctaagaggccacagacttccaccacctgagaaagggaacaagccgaacacgctgccgtcaggggtgcaacaaacagaaaaaggagaaaaagctacacaggggagagggaagctggggacttattggtgtggccacaacattaccgaaatagagttaagtcaatgcccatctccagtatttccatctctttcttcacaataaacatgcttcagtcacactttgttccagtcagctagggctgctctacctatagcttgtgaaaatggaaaattgggcttttggtcctctgaatcatctttatccatttttaaatgtccaatcagatgttcttcaaaatggacctgcttcaactttctgtgaacaggaaatgtccagtt

SEQ ID NO: 81725 - DNA, 280 bp, Homo sapiens
gggtaaatctgttaccagttattccataatggctggaagcatacatttcacactattggattattgaggagtttggcaaagacttttgggtgaagttacaggaaagaattacaataaacctttgctgactttagacttgatggctgtttaataattgtatgtttatgggctttgggagtagttgactatgtcttcttcaaatagatgtatgagataatgtaaataataaagcattatacaggctgggcatggtggctcatgtttgcaatcccggcacttt

SEQ ID NO: 81726 - DNA, 773 bp, Homo sapiens
ccatgcctcctccaggggcctctcaacaagtgttctcctttagggctggcatgcatgtgcccaacttgctcactgaacagactaccttggcctgctcagctactcacccttgacaccttcatcaagcactggtgctctgctcagcccagggtcccacagctcctgtgtccacacgtgagtatgcacatgtccgttctcccagcatgtgctgcctgtctgcccaggaggcggctgacagggcaatcctcccaccagggttctggccaggacaaacgaggggcttccccatgatccgggtccctggcagttaacaggctccttgtcttgcctcgatggccccaggagacaatcccaaaaagaccacagttagaaatcaggacgtttcccagggtttagctgccaggtttatccatggccatctgattacatattttaaatcattgcaacggtaaattatccattttaccagcctggtgctggaattcacttttttattgatggaaactctgcagttttacattagttataaggggacttcaaggttgcttatgagaggttttgcccatacaaaaaagtttaggagttatttatgtcccaaaaatgagggactgggatgggctggttgtttcccaaaaatcagtgatttggcttgatttgctattaatcaattttcctcacttcttttgaatttgatcttatctaatgagaagtaaataagtggacaaagttagtgagtcgaatcaagaagcaactggaaaattcccaccaaaatg

SEQ ID NO: 81727 - DNA, 2036 bp, Homo sapiens
ggatctggcagcgccgcgaagacgagcggtcaccggcgcccgacccgagcgcgcccagaggacggcggggagccaagccgacccccgagcagcgccgcgcgggccctgaggctcaaaggggcagcttcaggggaggacaccccactggccaggacgccccaggctctgctgctctgccactcagctgccctcggaggagcgtacacacacaccaggactgcattgccccagctgtgcagcccctgccagatgtgggaggcagctagctgcccagaggcatgcccccctgccagccacagcgacccctgctgctgttgctgctgctgctggcctgccagccacaggtcccctccgctcaggtgatggacttcctgtttgagaagtggaagctctacggtgaccagtgtcaccacaacctgagcctgctgccccctcccacggagctggtgtgcaacagaaccttcgacaagtattcctgctggccggacacccccgccaataccacggccaacatctcctgcccctggtacctgccttggcaccacaaagtgcaacaccgcttcgtgttcaagagatgcgggcccgacggtcagtgggtgcgtggaccccgggggcagccttggcgtgatgcctcccagtgccagatggatggcgaggagattgaggtccagaaggaggtggccaagatgtacagcagcttccaggtgatgtacacagtgggctacagcctgtccctgggggccctgctcctcgccttggccatcctggggggcctcagcaagctgcactgcacccgcaatgccatccacgcgaatctgtttgcgtccttcgtgctgaaagccagctccgtgctggtcattgatgggctgctcaggacccgctacagccagaaaattggcgacgacctcagtgtcagcacctggctcagtgatggagcggtggctggctgccgtgtggccgcggtgttcatgcaatatggcatcgtggccaactactgctggctgctggtggagggcctgtacctgcacaacctgctgggcctggccaccctccccgagaggagcttcttcagcctctacctgggcatcggctggggtgcccccatgctgttcgtcgtcccctgggcagtggtcaagtgtctgttcgagaacgtccagtgctggaccagcaatgacaacatgggcttctggtggatcctgcggttccccgtcttcctggccatcctgatcaacttcttcatcttcgtccgcatcgttcagctgctcgtggccaagctgcgggcacggcagatgcaccacacagactacaagttccggctggccaagtccacgctgaccctcatccctctgctgggcgtccacgaagtggtctttgccttcgtgacggacgagcacgcccagggcaccctgcgctccgccaagctcttcttcgacctcttcctcagctccttccagggcctgctggtggctgtcctctactgcttcctcaacaaggaggtgcagtcggagctgcggcggcgttggcaccgctggcgcctgggcaaagtgctatgggaggagcggaacaccagcaaccacagggcctcatcttcgcccggccacggccctcccagcaaggagctgcagtttgggaggggtggtggcagccaggattcatctgcggagacccccttggctggtggcctccctagattggctgagagccccttctgaaccctgctgggaccccagctagggctggactctggcacccagagggcgtcgctggacaacccagaactggacgcccagctgaggctgggggcgggggagccaacagcagcccccacctaccccccacccccagtgtggctgtctgcgagattgggcctcctctccctgcacctgccttgtccctggtgcagaggtgagcagaggagtccagggcgggagtgggggctgtgccgtgaactgcgtgccagtgtccccacgtatgtcggcacgtcccatgtgcatggaaatgtcctccaacaataaagagctcaagtggtcaccgtg

SEQ ID NO: 81728 - DNA, 2276 bp, Homo sapiens
ggatctggcagcgccgcgaagacgagcggtcaccggcgcccgacccgagcgcgcccagaggacggcggggagccaagccgacccccgagcagcgccgcgcgggccctgaggctcaaaggggcagcttcaggggaggacaccccactggccaggacgccccaggctctgctgctctgccactcagctgccctcggaggagcgtacacacacaccaggactgcattgccccagctgtgcagcccctgccagatgtgggaggcagctagctgcccagaggcatgcccccctgccagccacagcgacccctgctgctgttgctgctgctgctggcctgccagccacaggtcccctccgctcaggtgatggacttcctgtttgagaagtggaagctctacggtgaccagtgtcaccacaacctgagcctgctgccccctcccacgggtgagccccccacccagagcctttcagcctgtgcctggcctcagcacttcctgagttctcttcatgggaaggttcctgggtgcttatgcagcctttgaggaccccgccaaggggccctgtcattcctcaggcccccaccaccgtgggcagagctggtgtgcaacagaaccttcgacaagtattcctgctggccggacacccccgccaataccacggccaacatctcctgcccctggtacctgccttggcaccacaaagtgcaacaccgcttcgtgttcaagagatgcgggcccgacggtcagtgggtgcgtggaccccgggggcagccttggcgtgatgcctcccagtgccagatggatggcgaggagattgaggtccaggtcagtgggcggcaggcaggcgcggtggggctggatgggaacgggcatgggggcccctgcctggccctcacaggccactgtaactcgcagaaggaggtggccaagatgtacagcagcttccaggtgatgtacacagtgggctacagcctgtccctgggggccctgctcctcgccttggccatcctggggggcctcagcaagctgcactgcacccgcaatgccatccacgcgaatctgtttgcgtccttcgtgctgaaagccagctccgtgctggtcattgatgggctgctcaggacccgctacagccagaaaattggcgacgacctcagtgtcagcacctggctcagtgatggagcggtggctggctgccgtgtggccgcggtgttcatgcaatatggcatcgtggccaactactgctggctgctggtggagggcctgtacctgcacaacctgctgggcctggccaccctccccgagaggagcttcttcagcctctacctgggcatcggctggggtgcccccatgctgttcgtcgtcccctgggcagtggtcaagtgtctgttcgagaacgtccagtgctggaccagcaatgacaacatgggcttctggtggatcctgcggttccccgtcttcctggccatcctgatcaacttcttcatcttcgtccgcatcgttcagctgctcgtggccaagctgcgggcacggcagatgcaccacacagactacaagttccggctggccaagtccacgctgaccctcatccctctgctgggcgtccacgaagtggtctttgccttcgtgacggacgagcacgcccagggcaccctgcgctccgccaagctcttcttcgacctcttcctcagctccttccagggcctgctggtggctgtcctctactgcttcctcaacaaggaggtgcagtcggagctgcggcggcgttggcaccgctggcgcctgggcaaagtgctatgggaggagcggaacaccagcaaccacagggcctcatcttcgcccggccacggccctcccagcaaggagctgcagtttgggaggggtggtggcagccaggattcatctgcggagacccccttggctggtggcctccctagattggctgagagccccttctgaaccctgctgggaccccagctagggctggactctggcacccagagggcgtcgctggacaacccagaactggacgcccagctgaggctgggggcgggggagccaacagcagcccccacctaccccccacccccagtgtggctgtctgcgagattgggcctcctctccctgcacctgccttgtccctggtgcagaggtgagcagaggagtccagggcgggagtgggggctgtgccgtgaactgcgtgccagtgtccccacgtatgtcggcacgtcccatgtgcatggaaatgtcctccaacaataaagagctcaagtggtcaccgtg

SEQ ID NO: 81729 - DNA, 248 bp, Homo sapiens
cgccgcagaggacagggaggaggacgggcgctgactggctgtgccacagcaagctgcactgcacccgcaatgccatccacgcgaatctgtttgcgtccttcgtgctgaaagccagctccgtgctggtcattgatgggctgctcaggacccgctacagccagaaaattggcgacgacctcagtgtcagcacctggctcagtgatggagtgagccctctcggcggcctcaggcaggtgggtgggtcggca

SEQ ID NO: 81730 - DNA, 208 bp, Homo sapiens
agaaaacctcaaagcctgggtactgctggggctaagataataaattctcagtaataagatctgcctatttcagcaaaggtctagtgcagtgtttttcaaaccagggactgcaacttgttgatggacattatatcaatttagtgggctacaatgagctttctttcatatcaaggtgggtttcgtgaaacttgttctggggtgtgtgtgt

SEQ ID NO: 81731 - DNA, 336 bp, Homo sapiens
  misc_feature (22)..(22): n is a, c, g, or t
  misc_feature (35)..(35): n is a, c, g, or t
  misc_feature (49)..(49): n is a, c, g, or t
atgttgagcgtgaaattacatngagctgtgaagcntttggtgctgccgnctggaaggagcagcaagtcaagccgccaaggaaacacacattagagtcattcgttctcaccactcggcggaagtggtaactcgctccactggccaggcttcccaccatctggagtggagtccgggtgctcctaccagggatggatgagctccaagtgcaggcagcctggcacaagggccgcggccaccaatgctggaagatagagcctcctgcttcctgcagacagcagagcaatgaggatggcgctttgtgccttttctggttacaaggtgctattgtgaatcact

SEQ ID NO: 81732 - DNA, 828 bp, Homo sapiens
cagagatggatgccattgtaaggagcctggaaatcccaggtgtaggtactgaataaacaagaaagatattgtaataatctcagttttgaggacaagggaaagaaacaaccactgaagaattttgataagaggtttttctagtcttcacaccattttcaggaatatttcagcagggtaggacttagggccacttattcagcctcatgattggccagtttctgtccattcctgcaccttttctcctccttctcttgtgggtagttctctccagttgcctcttctctttgcatatccaggacatgctgataacattagtgtttctgcaaagatattgattttaacagggaaaggagatggggtctggcatatggtagataatcaatgttggttgactaaataaaagccaaacttcatctccactgactttattactacttaaactgaacattaaaaaaaagaattagtcttggacatgatgcaacattattgctgagccaaacttttttactatcttgggttttacagccttcttatccttctggttaagtgagagcaggcaactccatctggcatgtaaagaactggaaaaaatttctatggatttttgtacctgtttatttctccttgtacatgttgtagctactggtagaatatttggatttttgccagtttgttagaagagtaaattttactttacatttactttttatgagcaagattgagcatcttgttatatgtttaagtgtcatttgtgtttctttttaaaataattttttattgttacctctcgcccattcttttctatcaggttgttggtcttttctccac

SEQ ID NO: 81733 - DNA, 228 bp, Homo sapiens
ctgcctgagagtgaagccagaagggaggacagcagagccaagacaggggtgagccaagggtccacagaacatcatttgagtctctggactcagagctagtcctgtagttttcagttataggagccaacatctccttttgtgtttatgccagtttgaactgagtatgggaggagttctaccaagaagttacagctaatccacctgggcttatgaggatcacctgtatcc

SEQ ID NO: 81734 - DNA, 664 bp, Homo sapiens
ccagctcttagtgactctagccctctcccgccctcctctgcaccctgcatgcacttgtgttgctgaatgtggccggagaaaaacacagccatcttgactgttctgtgagacttcatagatttccagggctgtgtggaatcaaaaaatcttcctgcatttccccagccatctggcctccaggatgactatttcacatctcctcaagcctttcacatctcatccccctcacacctgatgattttgcttcctatttcactgggaaaatgaagtagggacggggtttcatcatgttggccaggctggtctcgatcttctgacctcgtgagccgcccacctcggcctcccaaagtgctgggattacaggcatgagccaccgcgcccagccaaagagcctagaaccatgcctggcacacagtgggcatctagaccctttgctgagtggtgaaattgaagtgtgacagggtgcgtggcttccctgctcaggctccctcagttcccaaagctgtgctccttcctggatctcatgtagcacaaggaggcatacgtgggtcgcaccacatggcttctagaggagtatgtgtgaatgtgttcatgttcatgtggaaatagggaggcggccctgaggtgggaggagccttcccaagaggaatcacctgagagagga

SEQ ID NO: 81735 - DNA, 509 bp, Homo sapiens
catggaaaacccaaatggctagaaaaacctcctttagaaaacaggagctttcagatctgcatgcagtgacggtgaaatggtctatttgggtccctaaacagcgtccagcacatcatgaaggttcatcgattgctgctgtgttgcatatttgtaaactcacagtcgtctgactcaccacctgggattctacctgggaggctggcaaggcagatgttaccaccaccattgttctctctaagattaaaaccattttattttgtctctaatacatttctccccaagttgatagatgcagtagtaaccaatagtaaaacagtcatgcatacaattcatcttctcacagagaatcatgactttacaagcacagacttacaatctatcgggaaagaagaaggctgtttttagagagcaagccccttgtaaacctcactttgttataaagtactgttctttgtatatgatgttaaatttgatgtgcttaaattttattaaacatttttatatctgga

SEQ ID NO: 81736 - DNA, 926 bp, Homo sapiens
tgctgtggccctggcacctgcccctgggctgggacagcccactgttccatgctgcccaagaaggctcagcacaggcacaaaccattgcccggcactggcccgtgctgcctgagaaggattggcacgggcacagaccactgcccccacctgccctgcgccatctacccaagaaggctcggcacgggcaccaaccactgcctccaactgccccatgctgcctgagaaggcactgcacggccacccccaactgccccgcactgtccctacccgggcagccatgcgagcggctggaactctgctggccttctgctgcctggtcttgagcaccactgggggcccttccccagatacttgttcccaggaccttaactcacgtgtgaagccaggatttcctaaaacaataaagaccaatgacccaggagtcctccaagcagccagatacagtgttgaaaagttcaacaactgcacgaacgacatgttcttgttcaaggagtcccgcatcacaagggccctagttcagatagtgaaaggcctgaaatatatgctcgaggtggaaattggcagaactacctgcaagaaaaaccagcacctgcgtctggatgactgtgacttccaaaccaaccacaccttgaagcagactctgagctgctactctgaagtctgggtcgtgccctggctccagcacttcgaggtgcctgttctccgttgtcactgacccccgcctcttcagcaagaccacagccatgacaaacaccaggatgcatgctccttgtcccctcccacccgcctcatgacccagcctcacagaccctctcaggcctctgacgagtgagcgggtgaagtgccactgggtcaccgcagggcagctggaatggcagcatggtagcgcctcctaacagattaaatagatcacatttgcttctaaa

SEQ ID NO: 81737 - DNA, 867 bp, Homo sapiens
gccagtgggatgccctggttctgagtccttggggttctctgggaggggacttggaggttgtctctctctagcttggtgatattggggacaacgtaattcccctaaagctgagactaaaacctgaggaatttttcttcaactcctctaagaccacaaatgagaatgaacaaggcggctgccatatccaagtggagaagggctgtccagaaactcaaaactcccgaccccaggaatggagaggggaagcccgcagaccccaggcctgacacagaggccacaagaaacagccatcatggggctggagtgagggctgcagggcgggcccagcagggcatgcaggagacctagtgtgacgtccctcctgagtgcagagctctggccagaaaggagacatctgtctcaggaaggggcacaaacccagcacggggcagggaggggagtgggaggggtctgcaggctctgccgtaagcccgaagcattgccccaagatgctggcccacttcccttctcctcggtgggcacctgcaccactgtcttgaggccctgcttcctagtggagaagcctgccctccctcccctgtgcccagtaacccagtccctttgctccctccagatagtgaaaggcctgaaatatatgctcgaggtggaaattggcagaactacctgcaagaaaaaccagcacctgcgtctggatgactgtgacttccaaaccaaccacaccttgaagcaggtaaagcagcaggcccttctctcagatgtgccctctcttccccagcccactccctcccaggactgtgaaaaacaccgtcaccacgtctctaacgcagcgccccaaacctcacccctgaggaagccaggcctcccaga

SEQ ID NO: 81738 - DNA, 1067 bp, Homo sapiens
tgctgtggccctggcacctgcccctgggctgggacagcccactgttccatgctgcccaagaaggctcagcacaggcacaaaccattgcccggcactggcccgtgctgcctgagaaggattggcacgggcacagaccactgcccccacctgccctgcgccatctacccaagaaggctcggcacgggcaccaaccactgcctccaactgccccatgctgcctgagaaggcactgcacggccacccccaactgccccgcactgtccctacccgggcagccatgcgagcggctggaactctgctggccttctgctgcctggtcttgagcaccactgggggcccttccccagatacttgttcccaggaccttaactcacgtgtgaagccaggatttcctaaaacaataaagaccaatgacccaggagtcctccaagcagccagatacagtgttgaaaagttcaacaactgcacgaacgacatgttcttgttcaaggagtcccgcatcacaagggccctagttcagatagtgaaaggcctgaaatatatgctcgaggtggaaattggcagaactacctgcaagaaaaaccagcacctgcgtctggatgactgtgacttccaaaccaaccacaccttgaagcaggtaaagcagcaggcccttctctcagatgtgccctctcttccccagcccactccctcccaggactgtgaaaaacaccgtcaccacgtctctaacgcagcgccccaaacctcacccctgaggaagccaggcctcccagactcccgcacgactgaggatccgggagaacaggaggtagagcctgtgccaggagctcctcagatgacatcctcccgtcccagaggcggagacacagctctggaagagcgtcctggggtgcgagtggagagggttagagtaagaaaagctttcaaacaatccagaaattatatatgtatcatatacatacatatgatatgtatcatatgtatatcatatatagcatatctctgcagagagagcaagagaacgggaacacagcaacatttagcaattacagaggtgaaaagcacat

SEQ ID NO: 81739 - DNA, 375 bp, Homo sapiens
ccagctccagccagtggaggtaggacaaagcaatagggacttcacccataagggataaatattcctgtgtctctttgttcagtgtgctctcgtggcaggattgctgatgggcagcaccctttctgcagaaagtaaaattgtcttgctgagaaaactttttgtctgaatgctgattcttctttgtagcaccaaggaataagcattcctttccaacagaaatgatgtgtctttttgtatgcttatgaattgactgagggctggcagccccttggtcacttcagtaggggagttggtcacctgaaaaaccaagacaagattagagggttgagactttcagtcccactccaacccacagggttggggagagaggctgaa

SEQ ID NO: 81740 - DNA, 445 bp, Homo sapiens
aaccagcacctcagtgaacagctgttggggctaagaacaattaccgtctctgcagtaagctctaccatgaaataaataatggcacctatggagaaacaacaaaacaaaaataaaaacagagcactaaaaggaaaagcagaattcattcatgctaaagacttaagagaaagtctctgaatgtgattccttttttttttttttaacttttgttttaagttcaggggtacaagtgcagatttgttacataggtcaacttgcgtcatgggaattggttgtatggattatttcatcaccgaggtattaagcctagtacccacgagttgtcttcctgatcctctccctcctcccaccctccaccctccaccctccaaaaggccccagcatgtgttgtttccctctgtatgtccatgtgttctcatcatttacatgattctttacttgaact

SEQ ID NO: 81741 - DNA, 206 bp, Homo sapiens
cagactggtttcaaactcctgacctcaggtgatccaccaggctcagcctcccaaaatgctgcgattacaggcatgagccagtttgcccagactatgctaaattattaatagggtgacagaagacacggttcagtgatcagcctttttttttttttttgctataaaacttttttttttttttttttttttttacacagggtctcact

SEQ ID NO: 81742 - DNA, 374 bp, Homo sapiens
gagacagagtcttgctctgtcacccaggcttaagtgcagtggtgcgatcttggctcactgcaacctccacctcctgggttgaagcaattctcctgcgtcagtctcctgagtggctggaatcacaggtgcctgccatcatgcctggctaatttttgcatttttagtagagacgggatttcatcatggtggccaaactggtttcgaactcttggcctcaagtgatccacccacctcggcctcctaaagtgctgggattacaggtgtgaaccgagccgccatagccggcatcaaccaatggtgatgtaaaacagttattgtaaaatagttatttttctacaattctttctacactcattagttatcatttttctgta

SEQ ID NO: 81743 - DNA, 504 bp, Homo sapiens
ttaaacatagtaggtgtaaaataagtgaccattgattgctgaaaatcaggagtaatacctttatggtaaagtggtagaaaggctgcatacctgctagataaatacagaaatatgcaggttattttctgataatttaggagtgccctctaccttttactacttcactgatcagagctcttctcattctgtgtgagctattaacattcattcctcaggtctcaggtaccttaaaatgtcatttttttttttttttcagcaaaaccagcaaagtgtgggtaggggtatgaataatcaggcctgtgaaattttgttatcttttggggggtcattagtgatctaaatgatcatttctaacctttccaatgaagtgtgaaattctataaagtttaactgttatttttgggcctttatttgtgtatctctgaggagataggaggtggtagtagaataaagaatccttacatttaaaaatacttttcaagaaatgccattaccgtaatcaca

SEQ ID NO: 81744 - DNA, 412 bp, Homo sapiens
attcccttgctggcagcagggaaattaactaccagccacacacttgtctccaacagcacccaccgaccacgtcctgctcccctgtcattaccaccactaaacccggtagcagagagatgagctgtgaggtaggtgccttctagataaatgaggtgctactggacatgcactgtggtcttctctgcagtagaaaaatgtccaaggaaggtcagcatcattgatagaaaataaatgtgaggctgcatctcgccagctcatccatgagcaattccttcagctccagcaggctactgacaatttgcttttaacccaaatccagctctaccctccctaaagcatgcacctagggccccagtcagaaaaacaaaacaaaaactaaaccagacaggataattaaggaggcaaaaagctt

SEQ ID NO: 81745 - DNA, 1031 bp, Homo sapiens
ttactgactacttccccagaccgccctagaggttttatatgtagtgtgtgtatttatatatctttttctaaactcaaaaaatctaaactgaattctgaaacaactctgcccccaggggttgtagatcaaagactgggactacaggcatgcgccaccatgcctggcttatttttgtatttttagtagagacagggtttcactatgttggccaggttggtctcaaactcctgacctcgtgatccgcccacctcagcctcccaaagtgctgggattacaggtgtgagccaccacgcccggccttgcctctcgtctttaaacaataaggttcaaagttccgtgggagcacaaaggagacatgatgaggacaacgggagtagggcctgagtttttttttgtttttttttttttaagcgttttgctcttgttgcctaggctggagtgcaatggcgagatctcagctcactgcaacccctgcctctcaggttcatgtgattctcctgcctcagcctcccgattagctgggcttacaggcacgtgccaccactcccagctaatttttttgtatttttagtagagatggagttataccatgttggccaggctggttttgaactcctgacctcaggtgatccacccgacccggcctcccaaagtgctgggattacaggcatgagccaccacacacggcccaaggcctgagttcttagcaggagtataaggcgcctaagcttagtctaccttctaaggaagcctgcgtttgtcaccatcactcagcaaataacctgaatgtctcctgtctctcagccttaatttttcaggcagcatcatgggacacatacttttagttttgagacaaggccttgctctcacccagggtggagtgcagtggtgcagtcacggcccactgaacttcaaactcctaggctcaagcagctcaagcgatatccgcctcagcctcctgagtagctgagaccacaggcgcgtgccagcatgcctggctagtatttttttacagatggggtcttgctgtg

SEQ ID NO: 81746 - DNA, 682 bp, Homo sapiens
actatgcttattacctgggtgatgaaataatctgtacaccaaacccccatgacatgcaatttacctacataacaaatctgtacacataccccgaacctaaaataaaagttaaaaaaaaaatcttacttgatccctcatggaatctcatatcaacaaaggagaggatcttttataataacaaaatcaggtaacacttttataatttcctttatgtctgtacttattgaaatagttgattgtcagaagatagttttctccttgcaatgattagccatacccttgagaaaaactcctaaaagggtataaaacacagtttggatatgtaaggtttgagatatctattaaactttgatgaggaagtatattggaaatcagtacttggagctagagaaaaggatagatctggagataaatatttgggagtcattaatgtatagatgacatttaaattcaaaggactaaatgaactcacctagggagactgaacagataaagagaagagatagagacctccaacattcagaggccagtcaaacagaggaaagtaggcaaaggagaatgagaaagaataggcagagaggtaggaggaaaatcaggaaagtgtttctaataggaagaagtggtcaagagaatggaataccactgaggtctggtaagatggaaacaaagagatgaccaccgg

SEQ ID NO: 81747 - DNA, 323 bp, Homo sapiens
gtgctaatctctcaatagatttttgttcaaaatgacctttttgattactattagaagacaatgttatcaagagagtagcgtgtaataaaaaatgacaagaaatgactttacctcattataatcaccttagctcagacaaatctttgtaacagtctgtttgcatattacattcactatccttaggagccatttttggaaactgttttagaatccatgagtcaagtcgattcattttgcctgaaatacattaagttatggccaaagttccctaaatgtaatatcagtacttagtgaaagtatgatccaggaaaaattgctgatta

SEQ ID NO: 81748 - DNA, 523 bp, Homo sapiens
ttccagtctgacagtgcttctacttgtggggatgtacctttcttcacttggctcctaatgttggggggaaaggccaacgctgaaaaccccagagcttcaactgacccctacaaaaaggattccacagcttcttaccgtttcaactactgcttcttcatgagaaattccaaacctcaatctctaactatagtttatcttcttattccaaaacgccaaacacctactagacacccacctgtgtacacaagcatctaaaatcatattgctctcatcacaaattaacttctcccaaatttcctgccaattatgctaatattatatccaccattaggtacaaatcttggtcattcaagactccttgcctcatttccatgcttggcttccaaaaccactgtttgagttggacagccttactcctgcttgtgactaccacctagacattgtacctgtaagtctaccctaaaatgacttttatatctgtctagtccaccaatttcttggccgttaagccttcgctgaaact

SEQ ID NO: 81749 - DNA, 328 bp, Homo sapiens
catggtttggaacagcagaaactactccaggaaaggtttagaaaaatgtgtttcctacttgcccccgtcaagtttccaaaaacttggtttgtatcttagaaaccattgcataggatgaaatcccccaccaaactccctcttctctttttctacataggctattgttctgaagataatgattcattcttcctgataccttttggccacctgacggggaagacacaggagagaagggttaagactcttcttgtctccagaatgcttttcaggggcccgtctccaagaggaaactccctatatacacatcagaattcataaagaaagctct

SEQ ID NO: 81750 - DNA, 806 bp, Homo sapiens
cggagcctcgacgccagccgagccccttcgtgtcccagacggcgcctcctcccggggcaacggctaggggtgcaccgaggaagccctgtaccggggctgcgaggaaaggcgtcgaccacagtggaggacgccgaggcttcgcccagaacctcgccggcaccgtcgcgttttctcggtcagctcccaaacgtctgccctcgggtttgccgcccgcgtggcccactcttgcggagggtaggcggcccggcagacgcctctgttccccgaggttctgcgagaggccccagactggcctccgcagcttgtgccttctcgaatgacccggcaggccctgcacttaggattttctgatctctaaaaggggaagctggactgtggctcttggcgttaacaatctcgcaagggaacggcaccggctgagagactcccactttggaactgacttgaggtcccgacgtcccagcaaaaaagtcacttcaattccttctgcatgggggtggggtaggaaatgaaaaaacgggaagcgccaggcggagtccgaggagtccctggagcttccctgggactctggagagccgcgtgtggtccaggaggaggcgggaggactgtggcacccagcatcgctggaggcagaagtgcccaccctggcggagctccggctcaagggagcccaggaggtccagctgcctctctgcgcccaggctctggtgccaccattccttgactcgcccagcctctccccgtgttttcccgtgggagggttggtgctccccgcctttctcatgagctgggtcacgggaggaggg

SEQ ID NO: 81751 - DNA, 146 bp, Homo sapiens
agagcaaaactccatctcaaaaaaataaatacagattttaaacctgtataaataaattcaattcatattacatgccacaaataatatttaaaaatacagctctggtagtaggcctagcttctattccagaaaatggcaggctcttg

SEQ ID NO: 81752 - DNA, 593 bp, Homo sapiens
ctgggaaatcactttgttcctgcctgggagcaggagctgcatgtgtctgggagctgcagtgcggcgctcactcccgggctgcccggccttccctgcaaacctccgtaatcccttcccgcaggtgtttctgcgaggccacgctgggtgacctctgaggtctcctttaggtctgtgctgagacgctttgacgcgacatgggaagcaggcgcaggccacagagtttctagcaatgagcccaaagtgagagtcagtgtgatggggtggctcccggagaaggacacactcttccctgggaacatatttgagaggtaaaagggcaggccccatctccaggcctggcgctggaagagaattccacagaaagcagagaacaacgggcacatccctgtggaaaacaccaacctggcatttcacacacacaatccatgtgttggcattccgtctttagtcactgacaggtcatatgagttggaatctgaggcaagcttctcctgcccctttctcccatttgctccccacacctggtttctcatttagaacaaaggagagaaagtgcagtttcggtgagtggaggagccggcagcatctccagg

SEQ ID NO: 81753 - DNA, 424 bp, Homo sapiens
tgggctattcccctgggtggaagagggatggcagaggaggggagcaggaaagacatgagacatgggggccttgtccttgtactagaggcatcatgcagaaacacaaaacagtcaaccccaaatggaactaaagcacacactaagggtcaatggaagagtgccttcctccctctcaaatgttttgaaactcttctaaaccaacagcattttcttaacatattcaagatcatgtcagtacactagaatccaattatgctggtactacatgcaccatctcttttaaaggatttattacttaattaaaagcctattttattggtaaaatggatcaattttacccaatttactctattgtattaatcacacattcttttccgtaaagatcattttaaaaattaaatattaaaatgctacaattaaaaat

SEQ ID NO: 81754 - DNA, 410 bp, Homo sapiens
cagaagcctagccggcttcacctctcactggcgctcttcgcgggattttgcggcacttaccccgggtgctccagtagcccagaaggagcttgtcccagacaaccaagaggaaaagaggggaagcgagaaagagagggagacccgccattctggccaacgaccctgcgaagagggaatggcggtgcacgcacgggacccagcctctgatcaagcccagcaggcgccggccagctgcgctgagtgctgggcccgtggagcccgcgcccacccggaacctgcgccggcccgcgagcggtgagcgccgggcgcagccccgggttccgcccgcgcctctccctccacacttctccgggagaggagggagccggctccggcctcggccagccccagagagggacccccacagcgca

SEQ ID NO: 81755 - DNA, 132 bp, Homo sapiens
aaagcaggttgcaattacagtgcttcattttgtggaagtactgccattatcctgctgaaagaaaagccgtgttaatcatttttgattttgcctttatgagggtaaaatcatgacagattgacatggacaatt

SEQ ID NO: 81756 - DNA, 396 bp, Homo sapiens
atcaagagttggtaaaaatattaaatcaccaagtcaggaatatctgatggaagaattctaaagcaggccactgggaagaaaaagaaaacaagccctaatacagagttctaaagctgatttgatcttgaggagctaatgccagattcttgcttaaggcttatagaaggtgagagtgcgtaagctatggggtgggaagaggagaatgtttggagaatacattttaaaaccttctataaaacagttcactttaaatctgtctctcagatatttgtatgattaataatcaaatacatatatgtcacaatatattaagaactgggttagaaaccagtatctacctacacactgtttacacttaaaattatgcaggacaaaaataaaacagtgaaaacttag

SEQ ID NO: 81757 - DNA, 327 bp, Homo sapiens
tcttgaactagtggtgagaactagggttcaaaccctggtctcatccactacatgctgcctatctctgccagtggtgttattcagtgtgtttttggctgcacctggcttctgtcctacatcctgccctgcaaggcatgtgactctgtctgacactgctccatatgcccagcacctcgctcttcctggcatctcatagatgttgatgacacaagtgctggcccgaggtgggttcttgtgactgtgtctaatgagctggccgggcacggtggctcatgcactttaaaggaccgaggtgggtggatcacttgaggccaggagtattgagac

SEQ ID NO: 81758 - DNA, 654 bp, Homo sapiens
gtaagaagagccatacgcctcccgccatgattctgagacctccacagcgatgtggaactgtcctgtttctgctgggaggacaatttgagctaactggaaaggggattgtgagaaccattactgggagtacagaaagaaaagcaagaggcagttttgcaatttggagtgagaaccagccccctacacccaaggctaagctcctaccatttcagaaattgagagatgggggtgctatcttccttgatgattgcacttcagagagatggttccaggtcattgaaaaagatattccttgaccttaaagctgtgccgaataatatttcattttctggatatacctcactttatctacttgctacagaagggcatcctgcttactttaaagttttggcaattaggaataaagctgctataagcatccagtcctgcaggttgaaaaatccaagatcatggcactggcaggttttgtgtctgctgagggcctgatcttcacttccaagatggtggctcgagtgctgccttctccaggatacaggaatactgttcctcacatggaagaagtgaaagatcaatgaatccactcttgcaagccaatttttgctctgtttgtttgtttttgagacaaggtctcactctgtcaccctagaggttgga

SEQ ID NO: 81759 - DNA, 915 bp, Homo sapiens
tagttcaggacaggccggtggtaatcggccgaggccagaacttcaatatctacaaaaggatcttcactgacatggtgagctctcctggaaccaactgtgccgaggcctatcatagctgggctgatcttcgagatgtcctcttcaacctgtgtgaaaacctggtgaagtccagtgaggcaaactctccagcccatgaggagttcaagacgatgctgctgatcgctcattactatgccacgcgctctgcagcccagagtgtcaaacagctggaaaccgtggctgccaggctttctgtttcactcttgcgtcacacccagctactacctgtagacaaagccttctatgaagcaggcattgctgccaaggcagttggctgggataacatggcattcatcttcctcaatcgctttttggacctgaccgatgcaatcgaggaagggactctagatggccttgaccactctgattttcaggatacagacattccctttgaggtgccactcccagctaagcagcatgtaccggaggctgagagagaagaggttcgagactgggtgcttacagtctccatggaccagcggctggagcaggttctgcctcgggatgagcgtggcgcctacgaggcctccctagtggcagcgagcactggtgttcgagccctgccctgccttattacaggataccccattctgaggaacaaaattgaatttaagcggccagggaaggctgctaacaaggacaactggaataaattccttatggccatcaagacctcccacagcccagtgtgccaggacgtgctgaaattcatcagtcagtggtgtggagggctccccagcaccagcttttcctttcagtagttggtagagctgaggaagagttagggcctctccctcattaaagttttataaataa

SEQ ID NO: 81760 - DNA, 1332 bp, Homo sapiens
gctcaagtgctcctcccaccttggtctcgaaaagtgctgggattacaggtatgagccaccgagcccggcctttaactgttatttttaatatctgaaattcttgaagatctaaaactgttgtttgtagttattgtttactttttcatagtggttggtttccttgtatttttttcctttttattgtgagctcatgttgctttgaatgtatttttttggaatcctgagggcttaaaatggatatgttctcctccagtgatgattcggtcttgcttctgcaggaatcaggcatattaatgatctgtaaccatttcttttgttccctttactaaagagtggatcctaggtttaattaaggattttcaaattcagactccccatcctgctggagggcctgaggtttattctcctgacactgcatttgctttcaggacaactgtacttttcccatttgctcactttcttttttttcttgctcaggatttagcttattgacctttttctttcagtctgtctttttctgagagagaagggtaggatatgggtagggaatattcttagtgatttcttcaagtaagcccaagcaatgcattaaaaagtatgttccaggttcaagtcatattttaatgagagatcccttaagaatatcttactcttatggtactgctggaagcagaagtgaatgccacactttatacctccaagagttggtgctgtcataggagtatactttaacccaaggatattgctataaatgaagtatttttttatgcttgagagaaactaaaatgttaggaaaatcagggccgctgtgactctcttgaccactgactgggtcggatgagggtgggtcttttctataattgattcagtggaaactaacctgaaattggggtgggttgggggataaacttttacagggtgatgttataggtctggagcggggcgggggaaagaccgaggtgatggtgatggaaggtgtgactactgttgcctacacattggatgagggcctcatcgagtttggaacagccattgatgatggcaactacatccgggcaacagccttcttagagactctggaaatgaccccagaaacagaggcaatgtggaaaaccttgagtaaactggcactagaggcaaggcaactacacattgcggagaggtgaggtagacatgtagaacagaggtgccacgcagctaggagggataatcacatgagtattttccctgtgggctactccaatccggtgttaaggtactccctcccttcccactgccagcaaatagcatagagcccttctgcagtacaatattccaaacactctcccatcc

SEQ ID NO: 81761 - DNA, 360 bp, Homo sapiens
tcttacttgaccagagttaggatataccagctcagcagaaagcagttgcatctgtatgatattgaaagctgctctaagacaatgatcctcaacttctgctcctatatgcagtgggtcccaggaagtgacgtgctggtagctcagaaccgaaacagtctgtgtgtatggtacaacattgaggcacctgagagagtcaccatgttcactattagggtatgttggacactaggggccctcagatgtggtattgagctgattaattagagccatgaggagactctgaaggctacttggttttctgtgtccaccacccttaatctctgtgatagaattggcaaataaagcttagacttatggacc

SEQ ID NO: 81762 - DNA, 5323 bp, Homo sapiens
gaaagacaggtgtgcgtcatgcacttgaagcacctgaggaccctgctgagccctcaggatggagctgcaaaggtgacctgcatggcttggtcccagaacaatgccaaatttgctgtctgcacagtggaccgagtggtcttgctgtatgatgaacatggagaacggagagataaattctccaccaaaccagctgacatgaagtatggcaggaagagctatatggtgaagggcatggctttttctcctgattccactaaaattgccataggacagactgacaacatcatctatgtctacaagattggagaagattggggtgacaagaaagtcatctgcaacaagttcatccagacgagtgctgtcacttgtctgcaatggccggcagaatacatcattgtctttggactggctgaagggaaggttcgtttagcaaacaccaaaactaataaatcatctaccatctatgggacagagtcttacgtggtgtccctgacaacaaattgctctgggaaaggaattctctctggtcatgcagatggtaccatcgttaggtatttctttgatgatgaaggctctggagagtcacaggggaagttggttaaccacccgtgtccaccctatgccttggcatgggcaaccaatagcatcgtggctgcaggctgtgatcggaaaattgtagcctatggaaaagaaggtcacatgctacaaacttttgattatagccgtgaccctcaggagcgggagttcaccacagctgtatcaagtcctgggggccagtctgttgtgctaggaagttatgacaggcttcgggtgttcaactggatccctcgaagaagcatctgggaagaggcaaagcccaaggagattaccaatttatacaccatcactgccttggcctggaagcgggatggctcacggctctgtgtgggcacactatgtggtggggtggaacagtttgactgctgcctccgaaggagtatttacaagaacaagtttgagttgacgtatgtgggacctagccaggtgattgtgaagaacctgtcatcaggaacccgagtggtgctcaagtcacactatggctatgaggtggaagaggtgaaaatcctaggaaaggaacgttacttggtggctcacacatcagaaacactgctgctgggggacctgaacactaatcggcttagtgagatagcctggcaaggatctggtggcaatgagaagtatttctttgaaaatgagaatgtatgcatgatcttcaatgccggagagctaaccctggtggaatatgggaataatgacaccctgggttctgtacgcactgaattcatgaacccccacctcatcagtgttcgtattaatgagaggtgtcagcgaggaacagaagataataagaaattggcttatcttattgatattaagactattgctatagtggatctgattggtggctacaacattggcaccgtcagccatgagagccgtgtggattggctggaacttaatgagactggacacaagctcctcttcagggaccggaaacttcgtttgcatctgtatgatattgaaagctgctctaagacaatgatcctcaacttctgctcctatatgcagtgggtcccaggaagtgacgtgctggtagctcagaaccgaaacagtctgtgtgtatggtacaacattgaggcacctgagagagtcaccatgttcactattaggggtgatgttataggtctggagcggggcgggggaaagaccgaggtgatggtgatggaaggtgtgactactgttgcctacacattggatgagggcctcatcgagtttggaacagccattgatgatggcaactacatccgggcaacagccttcttagagactctggaaatgaccccagaaacagaggcaatgtggaaaaccttgagtaaactggcactagaggcaaggcaactacacattgcggagaggtgcttttctgctttgggccaagtagcaaaagctcgattcctgcatgagaccaatgagattgcagatcaagtatcccgggaatatggcggagaaggaacagacttttatcaggtccgagcacgtctagccatgctggaaaagaactacaaactggctgaaatgatctttttggaacagaatgctgtggaggaggccatgggcatgtaccaggagctacaccgttgggatgagtgtatcgctgtggctgaagccaaggggcacccagccctggagaagctacgtcgtagttactaccagtggctgatggacacacagcaagaggagcgagcaggtgaactacaggagagccaaggggatgggctagcagccatcagcctctacctcaaagctgggctccctgccaaagctgctcggctggtgctgacccgagaggaactgctagccaacacagagctggtagaacacatcactgcagcccttatcaagggggaactctacgaaagggcaggtgatctctttgagaagattcacaatccacagaaggccctggagtgctaccgtaaaggcaacgcattcatgaaagcggtagagctggctcgattggccttcccagtggaggtggtgaaactagaggaggcatggggggaccacctggtgcagcagaagcagcttgatgcagccattaatcactacatcgaagccaggtgctccattaaggcaattgaggccgccctgggtgcccgccagtggaagaaggcaatttatatattagatctacaggaccggaacactgcatccaaatactatcctctcgtggcccaacactatgcatccctgcaggagtatgagattgctgaggagctctatactaagggagatcggacaaaagatgccatagacatgtacacccaggctggtcgttgggaacaagcccacaagctggcgatgaaatgcatgagaccagaagatgtgtcagtgctatacatcactcaggcccaggaaatggagaagcagggcaagtaccgtgaggctgaaaggctatatgtgacagtacaagagcctgatcttgccatcaccatgtacaaaaagcacaagttgtatgatgacatgatccgcctggtagggaagcaccatccagatctcctcagtgatacacacctacatctgggcaaggagctggaggctgaaggccgactacaggaggctgagtaccactacctcgaggcccaggaatggaaggcaacagtgaacatgtaccgggccagtgggctttgggaagaggcctacagggtggccagaactcaaggaggggctaatgcccacaaacacgtggcctatctgtgggcaaagagcctgggaggagaggctgcagttagactgcttaataagctgggactcctggaagctgctgttgaccacgctgcagacaattgctcctttgaatttgcgtttgaactctctcggctggccctcaagcacaaaacccccgaggttcatctcaaatatgctatgttcctggaggatgagggtaaattcgaagaggctgaagctgaattcatcagagctggtaaacccaaggaggcagtcctcatgtttgtccataaccaggattgggaggcagctcagcgtgtggctgaggctcacgaccctgacagtgtcgccgaggtgcttgtgggacaggcccggggggccttggaggagaaggactttcagaaagcagaagggctgctgctccgggcccagagaccaggcctggccctcaattattataaggaggctggattatggagtgacgctctgcgcatctgcaaggactatgtgcccagccagctggaggctctgcaggaagaatatgagcgggaagctactaagaagggggccaggggtgtggagggatttgtggaacaagctcgacactgggagcaggctggagagtacagccgtgccgtggactgctacctcaaagtgcgagactctggaaacagcggcctggcggagaagtgctggatgaaggcagctgaactctccatcaagtttctgcctccccaacgtaatatggaagtcgttctggctgtaggaccccagctgattggaattggaaagcacagtgcagctgcagagctctatctgaatctggaccttgtcaaggaagcaatcgatgctttcatcgagggtgaggagtggaacaaggcgaagcgtgtagctaaggagttagatcccaggtatgaagactatgtggaccagcattataaagagttcctcaagaatcagggcaaagtggactcgctggtgggtgtggatgtgatagctgctttggacctgtatgtggagcagggccagtgggacaagtgcattgaaacagctaccaagcagaactacaagattctgcacaagtatgtggctttgtatgcaactcacttgatccgggagggtagctctgcccaggcattggccctgtatgtacagcacggagcccctgctaacccacagaacttcaatatctacaaaaggatcttcactgacatggtgagctctcctggaaccaactgtgccgaggcctatcatagctgggctgatcttcgagatgtcctcttcaacctgtgtgaaaacctggtgaagtccagtgaggcaaactctccagcccatgaggagttcaagacgatgctgctgatcgctcattactatgccacgcgctctgcagcccagagtgtcaaacagctggaaaccgtggctgccaggctttctgtttcactcttgcgtcacacccagctactacctgtagacaaagccttctatgaagcaggcattgctgccaaggcagttggctgggataacatggcattcatcttcctcaatcgctttttggacctgaccgatgcaatcgaggaagggactctagatggccttgaccactctgattttcaggatacagacattccctttgaggtgccactcccagctaagcagcatgtaccggaggctgagagagaagaggttcgagactgggtgcttacagtctccatggaccagcggctggagcaggttctgcctcgggatgagcgtggcgcctacgaggcctccctagtggcagcgagcactggtgttcgagccctgccctgccttattacaggataccccattctgaggaacaaaattgaatttaagcggccagggaaggctgctaacaaggacaactggaataaattccttatggccatcaagacctcccacagcccagtgtgccaggacgtgctgaaattcatcagtcagtggtgtggagggctccccagcaccagcttttcctttcagtagttggtagagctgaggaagagttagggcctctccctcattaaagttttataaataa

SEQ ID NO: 81763 - DNA, 5283 bp, Homo sapiens
gaaagacaggtgtgcgtcatgcacttgaagcacctgaggaccctgctgagccctcaggatggagctgcaaaggtgacctgcatggcttggtcccagaacaatgccaaatttgctgtctgcacagtggaccgagtggtcttgctgtatgatgaacatggagaacggagagataaattctccaccaaaccagctgacatgaagtatggcaggaagagctatatggtgaagggcatggctttttctcctgattccactaaaattgccataggacagactgacaacatcatctatgtctacaagattggagaagattgagtgctgtcacttgtctgcaatggccggcagaatacatcattgtctttggactggctgaagggaaggttcgtttagcaaacaccaaaactaataaatcatctaccatctatgggacagagtcttacgtggtgtccctgacaacaaattgctctgggaaaggaattctctctggtcatgcagatggtaccatcgttaggtatttctttgatgatgaaggctctggagagtcacaggggaagttggttaaccacccgtgtccaccctatgccttggcatgggcaaccaatagcatcgtggctgcaggctgtgatcggaaaattgtagcctatggaaaagaaggtcacatgctacaaacttttgattatagccgtgaccctcaggagcgggagttcaccacagctgtatcaagtcctgggggccagtctgttgtgctaggaagttatgacaggcttcgggtgttcaactggatccctcgaagaagcatctgggaagaggcaaagcccaaggagattaccaatttatacaccatcactgccttggcctggaagcgggatggctcacggctctgtgtgggcacactatgtggtggggtggaacagtttgactgctgcctccgaaggagtatttacaagaacaagtttgagttgacgtatgtgggacctagccaggtgattgtgaagaacctgtcatcaggaacccgagtggtgctcaagtcacactatggctatgaggtggaagaggtgaaaatcctaggaaaggaacgttacttggtggctcacacatcagaaacactgctgctgggggacctgaacactaatcggcttagtgagatagcctggcaaggatctggtggcaatgagaagtatttctttgaaaatgagaatgtatgcatgatcttcaatgccggagagctaaccctggtggaatatgggaataatgacaccctgggttctgtacgcactgaattcatgaacccccacctcatcagtgttcgtattaatgagaggtgtcagcgaggaacagaagataataagaaattggcttatcttattgatattaagactattgctatagtggatctgattggtggctacaacattggcaccgtcagccatgagagccgtgtggattggctggaacttaatgagactggacacaagctcctcttcagggaccggaaacttcgtttgcatctgtatgatattgaaagctgctctaagacaatgatcctcaacttctgctcctatatgcagtgggtcccaggaagtgacgtgctggtagctcagaaccgaaacagtctgtgtgtatggtacaacattgaggcacctgagagagtcaccatgttcactattaggggtgatgttataggtctggagcggggcgggggaaagaccgaggtgatggtgatggaaggtgtgactactgttgcctacacattggatgagggcctcatcgagtttggaacagccattgatgatggcaactacatccgggcaacagccttcttagagactctggaaatgaccccagaaacagaggcaatgtggaaaaccttgagtaaactggcactagaggcaaggcaactacacattgcggagaggtgcttttctgctttgggccaagtagcaaaagctcgattcctgcatgagaccaatgagattgcagatcaagtatcccgggaatatggcggagaaggaacagacttttatcaggtccgagcacgtctagccatgctggaaaagaactacaaactggctgaaatgatctttttggaacagaatgctgtggaggaggccatgggcatgtaccaggagctacaccgttgggatgagtgtatcgctgtggctgaagccaaggggcacccagccctggagaagctacgtcgtagttactaccagtggctgatggacacacagcaagaggagcgagcaggtgaactacaggagagccaaggggatgggctagcagccatcagcctctacctcaaagctgggctccctgccaaagctgctcggctggtgctgacccgagaggaactgctagccaacacagagctggtagaacacatcactgcagcccttatcaagggggaactctacgaaagggcaggtgatctctttgagaagattcacaatccacagaaggccctggagtgctaccgtaaaggcaacgcattcatgaaagcggtagagctggctcgattggccttcccagtggaggtggtgaaactagaggaggcatggggggaccacctggtgcagcagaagcagcttgatgcagccattaatcactacatcgaagccaggtgctccattaaggcaattgaggccgccctgggtgcccgccagtggaagaaggcaatttatatattagatctacaggaccggaacactgcatccaaatactatcctctcgtggcccaacactatgcatccctgcaggagtatgagattgctgaggagctctatactaagggagatcggacaaaagatgccatagacatgtacacccaggctggtcgttgggaacaagcccacaagctggcgatgaaatgcatgagaccagaagatgtgtcagtgctatacatcactcaggcccaggaaatggagaagcagggcaagtaccgtgaggctgaaaggctatatgtgacagtacaagagcctgatcttgccatcaccatgtacaaaaagcacaagttgtatgatgacatgatccgcctggtagggaagcaccatccagatctcctcagtgatacacacctacatctgggcaaggagctggaggctgaaggccgactacaggaggctgagtaccactacctcgaggcccaggaatggaaggcaacagtgaacatgtaccgggccagtgggctttgggaagaggcctacagggtggccagaactcaaggaggggctaatgcccacaaacacgtggcctatctgtgggcaaagagcctgggaggagaggctgcagttagactgcttaataagctgggactcctggaagctgctgttgaccacgctgcagacaattgctcctttgaatttgcgtttgaactctctcggctggccctcaagcacaaaacccccgaggttcatctcaaatatgctatgttcctggaggatgagggtaaattcgaagaggctgaagctgaattcatcagagctggtaaacccaaggaggcagtcctcatgtttgtccataaccaggattgggaggcagctcagcgtgtggctgaggctcacgaccctgacagtgtcgccgaggtgcttgtgggacaggcccggggggccttggaggagaaggactttcagaaagcagaagggctgctgctccgggcccagagaccaggcctggccctcaattattataaggaggctggattatggagtgacgctctgcgcatctgcaaggactatgtgcccagccagctggaggctctgcaggaagaatatgagcgggaagctactaagaagggggccaggggtgtggagggatttgtggaacaagctcgacactgggagcaggctggagagtacagccgtgccgtggactgctacctcaaagtgcgagactctggaaacagcggcctggcggagaagtgctggatgaaggcagctgaactctccatcaagtttctgcctccccaacgtaatatggaagtcgttctggctgtaggaccccagctgattggaattggaaagcacagtgcagctgcagagctctatctgaatctggaccttgtcaaggaagcaatcgatgctttcatcgagggtgaggagtggaacaaggcgaagcgtgtagctaaggagttagatcccaggtatgaagactatgtggaccagcattataaagagttcctcaagaatcagggcaaagtggactcgctggtgggtgtggatgtgatagctgctttggacctgtatgtggagcagggccagtgggacaagtgcattgaaacagctaccaagcagaactacaagattctgcacaagtatgtggctttgtatgcaactcacttgatccgggagggtagctctgcccaggcattggccctgtatgtacagcacggagcccctgctaacccacagaacttcaatatctacaaaaggatcttcactgacatggtgagctctcctggaaccaactgtgccgaggcctatcatagctgggctgatcttcgagatgtcctcttcaacctgtgtgaaaacctggtgaagtccagtgaggcaaactctccagcccatgaggagttcaagacgatgctgctgatcgctcattactatgccacgcgctctgcagcccagagtgtcaaacagctggaaaccgtggctgccaggctttctgtttcactcttgcgtcacacccagctactacctgtagacaaagccttctatgaagcaggcattgctgccaaggcagttggctgggataacatggcattcatcttcctcaatcgctttttggacctgaccgatgcaatcgaggaagggactctagatggccttgaccactctgattttcaggatacagacattccctttgaggtgccactcccagctaagcagcatgtaccggaggctgagagagaagaggttcgagactgggtgcttacagtctccatggaccagcggctggagcaggttctgcctcgggatgagcgtggcgcctacgaggcctccctagtggcagcgagcactggtgttcgagccctgccctgccttattacaggataccccattctgaggaacaaaattgaatttaagcggccagggaaggctgctaacaaggacaactggaataaattccttatggccatcaagacctcccacagcccagtgtgccaggacgtgctgaaattcatcagtcagtggtgtggagggctccccagcaccagcttttcctttcagtagttggtagagctgaggaagagttagggcctctccctcattaaagttttataaataa

SEQ ID NO: 81764 - DNA, 4530 bp, Homo sapiens
gctcaagtgctcctcccaccttggtctcgaaaagtgctgggattacaggtatgagccaccgagcccggcctttaactgttatttttaatatctgaaattcttgaagatctaaaactgttgtttgtagttattgtttactttttcatagtggttggtttccttgtatttttttcctttttattgtgagctcatgttgctttgaatgtatttttttggaatcctgagggcttaaaatggatatgttctcctccagtgatgattcggtcttgcttctgcaggaatcaggcatattaatgatctgtaaccatttcttttgttccctttactaaagagtggatcctaggtttaattaaggattttcaaattcagactccccatcctgctggagggcctgaggtttattctcctgacactgcatttgctttcaggacaactgtacttttcccatttgctcactttcttttttttcttgctcaggatttagcttattgacctttttctttcagtctgtctttttctgagagagaagggtaggatatgggtagggaatattcttagtgatttcttcaagtaagcccaagcaatgcattaaaaagtatgttccaggttcaagtcatattttaatgagagatcccttaagaatatcttactcttatggtactgctggaagcagaagtgaatgccacactttatacctccaagagttggtgctgtcataggagtatactttaacccaaggatattgctataaatgaagtatttttttatgcttgagagaaactaaaatgttaggaaaatcagggccgctgtgactctcttgaccactgactgggtcggatgagggtgggtcttttctataattgattcagtggaaactaacctgaaattggggtgggttgggggataaacttttacagggtgatgttataggtctggagcggggcgggggaaagaccgaggtgatggtgatggaaggtgtgactactgttgcctacacattggatgagggcctcatcgagtttggaacagccattgatgatggcaactacatccgggcaacagccttcttagagactctggaaatgaccccagaaacagaggcaatgtggaaaaccttgagtaaactggcactagaggcaaggcaactacacattgcggagaggtgcttttctgctttgggccaagtagcaaaagctcgattcctgcatgagaccaatgagattgcagatcaagtatcccgggaatatggcggagaaggaacagacttttatcaggtccgagcacgtctagccatgctggaaaagaactacaaactggctgaaatgatctttttggaacagaatgctgtggaggaggccatgggcatgtaccaggagctacaccgttgggatgagtgtatcgctgtggctgaagccaaggggcacccagccctggagaagctacgtcgtagttactaccagtggctgatggacacacagcaagaggagcgagcaggtgaactacaggagagccaaggggatgggctagcagccatcagcctctacctcaaagctgggctccctgccaaagctgctcggctggtgctgacccgagaggaactgctagccaacacagagctggtagaacacatcactgcagcccttatcaagggggaactctacgaaagggcaggtgatctctttgagaagattcacaatccacagaaggccctggagtgctaccgtaaaggcaacgcattcatgaaagcggtagagctggctcgattggccttcccagtggaggtggtgaaactagaggaggcatggggggaccacctggtgcagcagaagcagcttgatgcagccattaatcactacatcgaagccaggtgctccattaaggcaattgaggccgccctgggtgcccgccagtggaagaaggcaatttatatattagatctacaggaccggaacactgcatccaaatactatcctctcgtggcccaacactatgcatccctgcaggagtatgagattgctgaggagctctatactaagggagatcggacaaaagatgccatagacatgtacacccaggctggtcgttgggaacaagcccacaagctggcgatgaaatgcatgagaccagaagatgtgtcagtgctatacatcactcaggcccaggaaatggagaagcagggcaagtaccgtgaggctgaaaggctatatgtgacagtacaagagcctgatcttgccatcaccatgtacaaaaagcacaagttgtatgatgacatgatccgcctggtagggaagcaccatccagatctcctcagtgatacacacctacatctgggcaaggagctggaggctgaaggccgactacaggaggctgagtaccactacctcgaggcccaggaatggaaggcaacagtgaacatgtaccgggccagtgggctttgggaagaggcctacagggtggccagaactcaaggaggggctaatgcccacaaacacgtggcctatctgtgggcaaagagcctgggaggagaggctgcagttagactgcttaataagctgggactcctggaagctgctgttgaccacgctgcagacaattgctcctttgaatttgcgtttgaactctctcggctggccctcaagcacaaaacccccgaggttcatctcaaatatgctatgttcctggaggatgagggtaaattcgaagaggctgaagctgaattcatcagagctggtaaacccaaggaggcagtcctcatgtttgtccataaccaggattgggaggcagctcagcgtgtggctgaggctcacgaccctgacagtgtcgccgaggtgcttgtgggacaggcccggggggccttggaggagaaggactttcagaaagcagaagggctgctgctccgggcccagagaccaggcctggccctcaattattataaggaggctggattatggagtgacgctctgcgcatctgcaaggactatgtgcccagccagctggaggctctgcaggaagaatatgagcgggaagctactaagaagggggccaggggtgtggagggatttgtggaacaagctcgacactgggagcaggctggagagtacagccgtgccgtggactgctacctcaaagtgcgagactctggaaacagcggcctggcggagaagtgctggatgaaggcagctgaactctccatcaagtttctgcctccccaacgtaatatggaagtcgttctggctgtaggaccccagctgattggaattggaaagcacagtgcagctgcagagctctatctgaatctggaccttgtcaaggaagcaatcgatgctttcatcgagggtgaggagtggaacaaggcgaagcgtgtagctaaggagttagatcccaggtatgaagactatgtggaccagcattataaagagttcctcaagaatcagggcaaagtggactcgctggtgggtgtggatgtgatagctgctttggacctgtatgtggagcagggccagtgggacaagtgcattgaaacagctaccaagcagaactacaagattctgcacaagtatgtggctttgtatgcaactcacttgatccgggagggtagctctgcccaggcattggccctgtatgtacagcacggagcccctgctaacccacagaacttcaatatctacaaaaggatcttcactgacatggtgagctctcctggaaccaactgtgccgaggcctatcatagctgggctgatcttcgagatgtcctcttcaacctgtgtgaaaacctggtgaagtccagtgaggcaaactctccagcccatgaggagttcaagacgatgctgctgatcgctcattactatgccacgcgctctgcagcccagagtgtcaaacagctggaaaccgtggctgccaggctttctgtttcactcttgcgtcacacccagctactacctgtagacaaagccttctatgaagcaggcattgctgccaaggcagttggctgggataacatggcattcatcttcctcaatcgctttttggacctgaccgatgcaatcgaggaagggactctagatggccttgaccactctgattttcaggatacagacattccctttgaggtgccactcccagctaagcagcatgtaccggaggctgagagagaagaggttcgagactgggtgcttacagtctccatggaccagcggctggagcaggttctgcctcgggatgagcgtggcgcctacgaggcctccctagtggcagcgagcactggtgttcgagccctgccctgccttattacaggataccccattctgaggaacaaaattgaatttaagcggccagggaaggctgctaacaaggacaactggaataaattccttatggccatcaagacctcccacagcccagtgtgccaggacgtgctgaaattcatcagtcagtggtgtggagggctccccagcaccagcttttcctttcagtagttggtagagctgaggaagagttagggcctctccctcattaaagttttataaataa

SEQ ID NO: 81765 - DNA, 5275 bp, Homo sapiens
gaaagacaggtgtgcgtcatgcacttgaagcacctgaggaccctgctgagccctcaggatggagctgcaaaggtgacctgcatggcttggtcccagaacaatgccaaatttgctgtctgcacagtggaccgagtggtcttgctgtatgatgaacatggagaacggagagataaattctccaccaaaccagctgacatgaagtatggcaggaagagctatatggtgaagggcatggctttttctcctgattccactaaaattgccataggacagactgacaacatcatctatgtctacaagattggagaagattggggtgacaagaaagtcatctgcaacaagttcatccagacgagtgctgtcacttgtctgcaatggccggcagaatacatcattgtctttggactggctgaagggaaggttcgtttagcaaacaccaaaactaataaatcatctaccatctatgggacagagtcttacgtggtgtccctgacaacaaattgctctgggaaaggaattctctctggtcatgcagatggtaccatcgttaggtatttctttgatgatgaaggctctggagagtcacaggggaagttggttaaccacccgtgtccaccctatgccttggcatgggcaaccaatagcatcgtggctgcaggctgtgatcggaaaattgtagcctatggaaaagaaggtcacatgctacaaacttttgattatagccgtgaccctcaggagcgggagttcaccacagctgtatcaagtcctgggggccagtctgttgtgctaggaagttatgacaggcttcgggtgttcaactggatccctcgaagaagcatctgggaagaggcaaagcccaaggagattaccaatttatacaccatcactgccttggcctggaagcgggatggctcacggctctgtgtgggcacactatgtggtggggtggaacagtttgactgctgcctccgaaggagtatttacaagaacaagtttgagttgacgtatgtgggacctagccaggtgattgtgaagaacctgtcatcaggaacccgagtggtgctcaagtcacactatggctatgaggtggaagaggtgaaaatcctaggaaaggaacgttacttggtggctcacacatcagaaacactgctgctgggggacctgaacactaatcggcttagtgagatagcctggcaaggatctggtggcaatgagaagtatttctttgaaaatgagaatgtatgcatgatcttcaatgccggagagctaaccctggtggaatatgggaataatgacaccctgggttctgtacgcactgaattcatgaacccccacctcatcagtgttcgtattaatgagaggtgtcagcgaggaacagaagataataagaaattggcttatcttattgatattaagactattgctatagtggatctgattggtggctacaacattggcaccgtcagccatgagagccgtgtggattggctggaacttaatgagactggacacaagctcctcttcagggaccggaaacttcgtttgcatctgtatgatattgaaagctgctctaagacaatgatcctcaacttctgctcctatatgcagtgggtcccaggaagtgacgtgctggtagctcagaaccgaaacagtctgtgtgtatggtacaacattgaggcacctgagagagtcaccatgttcactattaggggtgatgttataggtctggagcggggcgggggaaagaccgaggtgatggtgatggaaggtgtgactactgttgcctacacattggatgagggcctcatcgagtttggaacagccattgatgatggcaactacatccgggcaacagccttcttagagactctggaaatgaccccagaaacagaggcaatgtggaaaaccttgagtaaactggcactagaggcaaggcaactacacattgcggagaggtgcttttctgctttgggccaagtagcaaaagctcgattcctgcatgagaccaatgagattgcagatcaagtatcccgggaatatggcggagaaggaacagacttttatcaggtccgagcacgtctagccatgctggaaaagaactacaaactggctgaaatgatctttttggaacagaatgctgtggaggaggccatgggcatgtaccaggagctacaccgttgggatgagtgtatcgctgtggctgaagccaaggggcacccagccctggagaagctacgtcgtagttactaccagtggctgatggacacacagcaagaggagcgagcaggtgaactacaggagagccaaggggatgggctagcagccatcagcctctacctcaaagctgggctccctgccaaagctgctcggctggtgctgacccgagaggaactgctagccaacacagagctggtagaacacatcactgcagcccttatcaagggggaactctacgaaagggcaggtgatctctttgagaagattcacaatccacagaaggccctggagtgctaccgtaaaggcaacgcattcatgaaagcggtagagctggctcgattggccttcccagtggaggtggtgaaactagaggaggcatggggggaccacctggtgcagcagaagcagcttgatgcagccattaatcactacatcgaagccaggtgctccattaaggcaattgaggccgccctgggtgcccgccagtggaagaaggcaatttatatattagatctacaggaccggaacactgcatccaaatactatcctctcgtggcccaacactatgcatccctgcaggagtatgagattgctgaggagctctatactaagggagatcggacaaaagatgccatagacatgtacacccaggctggtcgttgggaacaagcccacaagctggcgatgaaatgcatgagaccagaagatgtgtcagtgctatacatcactcaggcccaggaaatggagaagcagggcaagtaccgtgaggctgaaaggctatatgtgacagtacaagagcctgatcttgccatcaccatgtacaaaaagcacaagttgtatgatgacatgatccgcctggtagggaagcaccatccagatctcctcagtgatacacacctacatctgggcaaggagctggaggctgaaggccgactacaggaggctgagtaccactacctcgaggcccaggaatggaaggcaacagtgaacatgtaccgggccagtgggctttgggaagaggcctacagggtggccagaactcaaggaggggctaatgcccacaaacacgtggcctatctgtgggcaaagagcctgggaggagaggctgcagttagactgcttaataagctgggactcctggaagctgctgttgaccacgctgcagacaattgctcctttgaatttgcgtttgaactctctcggctggccctcaagcacggtaaattcgaagaggctgaagctgaattcatcagagctggtaaacccaaggaggcagtcctcatgtttgtccataaccaggattgggaggcagctcagcgtgtggctgaggctcacgaccctgacagtgtcgccgaggtgcttgtgggacaggcccggggggccttggaggagaaggactttcagaaagcagaagggctgctgctccgggcccagagaccaggcctggccctcaattattataaggaggctggattatggagtgacgctctgcgcatctgcaaggactatgtgcccagccagctggaggctctgcaggaagaatatgagcgggaagctactaagaagggggccaggggtgtggagggatttgtggaacaagctcgacactgggagcaggctggagagtacagccgtgccgtggactgctacctcaaagtgcgagactctggaaacagcggcctggcggagaagtgctggatgaaggcagctgaactctccatcaagtttctgcctccccaacgtaatatggaagtcgttctggctgtaggaccccagctgattggaattggaaagcacagtgcagctgcagagctctatctgaatctggaccttgtcaaggaagcaatcgatgctttcatcgagggtgaggagtggaacaaggcgaagcgtgtagctaaggagttagatcccaggtatgaagactatgtggaccagcattataaagagttcctcaagaatcagggcaaagtggactcgctggtgggtgtggatgtgatagctgctttggacctgtatgtggagcagggccagtgggacaagtgcattgaaacagctaccaagcagaactacaagattctgcacaagtatgtggctttgtatgcaactcacttgatccgggagggtagctctgcccaggcattggccctgtatgtacagcacggagcccctgctaacccacagaacttcaatatctacaaaaggatcttcactgacatggtgagctctcctggaaccaactgtgccgaggcctatcatagctgggctgatcttcgagatgtcctcttcaacctgtgtgaaaacctggtgaagtccagtgaggcaaactctccagcccatgaggagttcaagacgatgctgctgatcgctcattactatgccacgcgctctgcagcccagagtgtcaaacagctggaaaccgtggctgccaggctttctgtttcactcttgcgtcacacccagctactacctgtagacaaagccttctatgaagcaggcattgctgccaaggcagttggctgggataacatggcattcatcttcctcaatcgctttttggacctgaccgatgcaatcgaggaagggactctagatggccttgaccactctgattttcaggatacagacattccctttgaggtgccactcccagctaagcagcatgtaccggaggctgagagagaagaggttcgagactgggtgcttacagtctccatggaccagcggctggagcaggttctgcctcgggatgagcgtggcgcctacgaggcctccctagtggcagcgagcactggtgttcgagccctgccctgccttattacaggataccccattctgaggaacaaaattgaatttaagcggccagggaaggctgctaacaaggacaactggaataaattccttatggccatcaagacctcccacagcccagtgtgccaggacgtgctgaaattcatcagtcagtggtgtggagggctccccagcaccagcttttcctttcagtagttggtagagctgaggaagagttagggcctctccctcattaaagttttataaataa

SEQ ID NO: 81766 - DNA, 5346 bp, Homo sapiens
gaaagacaggtgtgcgtcatgcacttgaagcacctgaggaccctgctgagccctcaggatggagctgcaaaggtgacctgcatggcttggtcccagaacaatgccaaatttgctgtctgcacagtggaccgagtggtcttgctgtatgatgaacatggagaacggagagataaattctccaccaaaccagctgacatgaagtatggcaggaagagctatatggtgaagggcatggctttttctcctgattccactaaaattgccataggacagactgacaacatcatctatgtctacaagattggagaagattggggtgacaagaaagtcatctgcaacaagttcatccagacgagtgctgtcacttgtctgcaatggccggcagaatacatcattgtctttggactggctgaagggaaggttcgtttagcaaacaccaaaactaataaatcatctaccatctatgggacagagtcttacgtggtgtccctgacaacaaattgctctgggaaaggaattctctctggtcatgcagatggtaccatcgttaggtatttctttgatgatgaaggctctggagagtcacaggggaagttggttaaccacccgtgtccaccctatgccttggcatgggcaaccaatagcatcgtggctgcaggctgtgatcggaaaattgtagcctatggaaaagaaggtcacatgctacaaacttttgattatagccgtgaccctcaggagcgggagttcaccacagctgtatcaagtcctgggggccagtctgttgtgctaggaagttatgacaggcttcgggtgttcaactggatccctcgaagaagcatctgggaagaggcaaagcccaaggagattaccaatttatacaccatcactgccttggcctggaagcgggatggctcacggctctgtgtgggcacactatgtggtggggtggaacagtttgactgctgcctccgaaggagtatttacaagaacaagtttgagttgacgtatgtgggacctagccaggtgattgtgaagaacctgtcatcaggaacccgagtggtgctcaagtcacactatggctatgaggtggaagaggtgaaaatcctaggaaaggaacgttacttggtggctcacacatcagaaacactgctgctgggggacctgaacactaatcggcttagtgagatagcctggcaaggatctggtggcaatgagaagtatttctttgaaaatgagaatgtatgcatgatcttcaatgccggagagctaaccctggtggaatatgggaataatgacaccctgggttctgtacgcactgaattcatgaacccccacctcatcagtgttcgtattaatgagaggtgtcagcgaggaacagaagataataagaaattggcttatcttattgatattaagactattgctatagtggatctgattggtggctacaacattggcaccgtcagccatgagagccgtgtggattggctggaacttaatgagactggacacaagctcctcttcagggaccggaaacttcgtttgcatctgtatgatattgaaagctgctctaagacaatgatcctcaacttctgctcctatatgcagtgggtcccaggaagtgacgtgctggtagctcagaaccgaaacagtctgtgtgtatggtacaacattgaggcacctgagagagtcaccatgttcactattaggggtgatgttataggtctggagcggggcgggggaaagaccgaggtgatggtgatggaaggtgtgactactgttgcctacacattggatgagggcctcatcgagtttggaacagccattgatgatggcaactacatccgggcaacagccttcttagagactctggaaatgaccccagaaacagaggcaatgtggaaaaccttgagtaaactggcactagaggcaaggcaactacacattgcggagaggtgcttttctgctttgggccaagtagcaaaagctcgattcctgcatgagaccaatgagattgcagatcaagtatcccgggaatatggcggagaaggaacagacttttatcaggtccgagcacgtctagccatgctggaaaagaactacaaactggctgaaatgatctttttggaacagaatgctgtggaggaggccatgggcatgtaccaggagctacaccgttgggatgagtgtatcgctgtggctgaagccaaggggcacccagccctggagaagctacgtcgtagttactaccagtggctgatggacacacagcaagaggagcgagcaggtgaactacaggagagccaaggggatgggctagcagccatcagcctctacctcaaagctgggctccctgccaaagctgctcggctggtgctgacccgagaggaactgctagccaacacagagctggtagaacacatcactgcagcccttatcaagggggaactctacgaaagggcaggtgatctctttgagaagattcacaatccacagaaggccctggagtgctaccgtaaaggcaacgcattcatgaaagcggtagagctggctcgattggccttcccagtggaggtggtgaaactagaggaggcatggggggaccacctggtgcagcagaagcagcttgatgcagccattaatcactacatcgaagccaggtgctccattaaggcaattgaggccgccctgggtgcccgccagtggaagaaggcaatttatatattagatctacaggaccggaacactgcatccaaatactatcctctcgtggcccaacactatgcatccctgcaggagtatgagattgctgaggagctctatactaagggagatcggacaaaagatgccatagacatgtacacccaggctggtcgttgggaacaagcccacaagctggcgatgaaatgcatgagaccagaagatgtgtcagtgctatacatcactcaggcccaggaaatggagaagcagggcaagtaccgtgaggctgaaaggctatatgtgacagtacaagagcctgatcttgccatcaccatgtacaaaaagcacaagttgtatgatgacatgatccgcctggtagggaagcaccatccagatctcctcagtgatacacacctacatctgggcaaggagctggaggctgaaggccgactacaggaggctgagtaccactacctcgaggcccaggaatggaaggcaacagtgaacatgtaccgggccagtgggctttgggaagaggcctacagggtggccagaactcaaggaggggctaatgcccacaaacacgtggcctatctgtgggcaaagagcctgggaggagaggctgcagttagactgcttaataagctgggactcctggaagctgctgttgaccacgctgcagacaattgctcctttgaatttgcgtttgaactctctcggctggccctcaagcacaaaacccccgaggttcatctcaaatatgctatgttcctggaggatgagggtaaattcgaagaggctgaagctgaattcatcagagctggtaaacccaaggaggcagtcctcatgtttgtccataaccaggattgggaggcagctcagcgtgtggctgaggctcacgaccctgacagtgtcgccgaggtgcttgtgggacaggcccggggggccttggaggagaaggactttcagaaagcagaagggctgctgctccgggcccagagaccaggcctggccctcaattattataaggaggctggattatggagtgacgctctgcgcatctgcaaggactatgtgcccagccagctggaggctctgcaggaagaatatgagcgggaagctactaagaagggggccaggggtgtggagggatttgtggaacaagctcgacactgggagcaggctggagagtacagccgtgccgtggactgctacctcaaagtgcgagactctggaaacagcggcctggcggagaagtgctggatgaaggcagctgaactctccatcaagtttctgcctccccaacgtaatatggaagtcgttctggctgtaggaccccagctgattggaattggaaagcacagtgcagctgcagagctctatctgaatctggaccttgtcaaggaagcaatcgatgctttcatcgagggtgaggagtggaacaaggcgaagcgtgtagctaaggagttagatcccaggtatgaagactatgtggaccagcattataaagagttcctcaagaatcagggcaaagtggactcgctggtgggtgtggatgtgatagctgctttggacctgtatgtggagcagggccagtgggacaagtgcattgaaacagctaccaagcagaactacaagattctgcacaagtatgtggctttgtatgcaactcacttgatccgggagggtagctctgcccaggcattggccctgtatgtacagcacggagcccctgctaacccacagaacttcaatatctacaaaaggatcttcactgacatggtgagctctcctggaaccaactgtgccgaggcctatcatagctgggctgatcttcgagatgtcctcttcaacctggctgtgctgtctccctcctctagtgtgaaaacctggtgaagtccagtgaggcaaactctccagcccatgaggagttcaagacgatgctgctgatcgctcattactatgccacgcgctctgcagcccagagtgtcaaacagctggaaaccgtggctgccaggctttctgtttcactcttgcgtcacacccagctactacctgtagacaaagccttctatgaagcaggcattgctgccaaggcagttggctgggataacatggcattcatcttcctcaatcgctttttggacctgaccgatgcaatcgaggaagggactctagatggccttgaccactctgattttcaggatacagacattccctttgaggtgccactcccagctaagcagcatgtaccggaggctgagagagaagaggttcgagactgggtgcttacagtctccatggaccagcggctggagcaggttctgcctcgggatgagcgtggcgcctacgaggcctccctagtggcagcgagcactggtgttcgagccctgccctgccttattacaggataccccattctgaggaacaaaattgaatttaagcggccagggaaggctgctaacaaggacaactggaataaattccttatggccatcaagacctcccacagcccagtgtgccaggacgtgctgaaattcatcagtcagtggtgtggagggctccccagcaccagcttttcctttcagtagttggtagagctgaggaagagttagggcctctccctcattaaagttttataaataa

SEQ ID NO: 81767 - DNA, 5224 bp, Homo sapiens
gaaagacaggtgtgcgtcatgcacttgaagcacctgaggaccctgctgagccctcaggatggagctgcaaaggtgacctgcatggcttggtcccagaacaatgccaaatttgctgtctgcacagtggaccgagtggtcttgctgtatgatgaacatggagaacggagagataaattctccaccaaaccagctgacatgaagtatggcaggaagagctatatggtgaagggcatggctttttctcctgattccactaaaattgccataggacagactgacaacatcatctatgtctacaagattggagaagattggggtgacaagaaagtcatctgcaacaagttcatccagacgagtgctgtcacttgtctgcaatggccggcagaatacatcattgtctttggactggctgaagggaaggttcgtttagcaaacaccaaaactaataaatcatctaccatctatgggacagagtcttacgtggtgtccctgacaacaaattgctctgggaaaggaattctctctggtcatgcagatggtaccatcgttaggtatttctttgatgatgaaggctctggagagtcacaggggaagttggttaaccacccgtgtccaccctatgccttggcatgggcaaccaatagcatcgtggctgcaggctgtgatcggaaaattgtagcctatggaaaagaaggtcacatgctacaaacttttgattatagccgtgaccctcaggagcgggagttcaccacagctgtatcaagtcctgggggccagtctgttgtgctaggaagttatgacaggcttcgggtgttcaactggatccctcgaagaagcatctgggaagaggcaaagcccaaggagattaccaatttatacaccatcactgccttggcctggaagcgggatggctcacggctctgtgtgggcacactatgtggtggggtggaacagtttgactgctgcctccgaaggagtatttacaagaacaagtttgagttgacgtatgtgggacctagccaggtgattgtgaagaacctgtcatcaggaacccgagtggtgctcaagtcacactatggctatgaggtggaagaggtgaaaatcctaggaaaggaacgttacttggtggctcacacatcagaaacactgctgctgggggacctgaacactaatcggcttagtgagatagcctggcaaggatctggtggcaatgagaagtatttctttgaaaatgagaatgtatgcatgatcttcaatgccggagagctaaccctggtggaatatgggaataatgacaccctgggttctgtacgcactgaattcatgaacccccacctcatcagtgttcgtattaatgagaggtgtcagcgaggaacagaagataataagaaattggcttatcttattgatattaagactattgctatagtggatctgattggtggctacaacattggcaccgtcagccatgagagccgtgtggattggctggaacttaatgagactggacacaagctcctcttcagggaccggaaacttcgtttgcatctgtatgatattgaaagctgctctaagacaatgatcctcaacttctgctcctatatgcagtgggtcccaggaagtgacgtgctggtagctcagaaccgaaacagtctgtgtgtatggtacaacattgaggcacctgagagagtcaccatgttcactattaggggtgatgttataggtctggagcggggcgggggaaagaccgaggtgatggtgatggaaggtgtgactactgttgcctacacattggatgagggcctcatcgagtttggaacagccattgatgatggcaactacatccgggcaacagccttcttagagactctggaaatgaccccagaaacagaggcaatgtggaaaaccttgagtaaactggcactagaggcaaggcaactacacattgcggagaggtgcttttctgctttgggccaagtagcaaaagctcgattcctgcatgagaccaatgagattgcagatcaagtatcccgggaatatggcggagaaggaacagacttttatcaggtccgagcacgtctagccatgctggaaaagaactacaaactggctgaaatgatctttttggaacagaatgctgtggaggaggccatgggcatgtaccaggagctacaccgttgggatgagtgtatcgctgtggctgaagccaaggggcacccagccctggagaagctacgtcgtagttactaccagtggctgatggacacacagcaagaggagcgagcaggtgaactacaggagagccaaggggatgggctagcagccatcagcctctacctcaaagctgggctccctgccaaagctgctcggctggtgctgacccgagaggaactgctagccaacacagagctggtagaacacatcactgcagcccttatcaagggggaactctacgaaagggcaggtgatctctttgagaagattcacaatccacagaaggccctggagtgctaccgtaaaggcaacgcattcatgaaagcggtagagctggctcgattggccttcccagtggaggtggtgaaactagaggaggcatggggggaccacctggtgcagcagaagcagcttgatgcagccattaatcactacatcgaagccaggtgctccattaaggcaattgaggccgccctgggtgcccgccagtggaagaaggcaatttatatattagatctacaggaccggaacactgcatccaaatactatcctctcgtggcccaacactatgcatccctgcaggagtatgagattgctgaggagctctatactaagggagatcggacaaaagatgccatagacatgtacacccaggctggtcgttgggaacaagcccacaagctggcgatgaaatgcatgagaccagaagatgtgtcagtgctatacatcactcaggcccaggaaatggagaagcagggcaagtaccgtgaggctgaaaggctatatgtgacagtacaagagcctgatcttgccatcaccatgtacaaaaagcacaagttgtatgatgacatgatccgcctggtagggaagcaccatccagatctcctcagtgatacacacctacatctgggcaaggagctggaggctgaaggccgactacaggaggctgagtaccactacctcgaggcccaggaatggaaggcaacagtgaacatgtaccgggccagtgggctttgggaagaggcctacagggtggccagaactcaaggaggggctaatgcccacaaacacgtggcctatctgtgggcaaagagcctgggaggagaggctgcagttagactgcttaataagctgggactcctggaagctgctgttgaccacgctgcagacaattgctcctttgaatttgcgtttgaactctctcggctggccctcaagcacaaaacccccgaggttcatctcaaatatgctatgttcctggaggatgagggtaaattcgaagaggctgaagctgaattcatcagagctggtaaacccaaggaggcagtcctcatgtttgtccataaccaggattgggaggcagctcagcgtgtggctgaggctcacgaccctgacagtgtcgccgaggtgcttgtgggacaggcccggggggccttggaggagaaggactttcagaaagcagaagggctgctgctccgggcccagagaccaggcctggccctcaattattataaggaggctggattatggagtgacgctctgcgcatctgcaaggactatgtgcccagccagctggaggctctgcaggaagaatatgagcgggaagctactaagaagggggccaggggtgtggagggatttgtggaacaagctcgacactgggagcaggctggagagtacagccgtgccgtggactgctacctcaaagtgcgagactctggaaacagcggcctggcggagaagtgctggatgaaggcagctgaactctccatcaagtttctgcctccccaacgtaatatggaagtcgttctggctgtaggaccccagctgattggaattggaaagcacagtgcagctgcagagctctatctgaatctggaccttgtcaaggaagcaatcgatgctttcatcgagggtgaggagtggaacaaggcgaagcgtgtagctaaggagttagatcccaggtatgaagactatgtggaccagcattataaagagttcctcaagaatcagggcaaagtggactcgctggtgggtgtggatgtgatagctgctttggacctgtatgtggagcagggccagtgggacaagtgcattgaaacagctaccaagcagaactacaagattctgcacaagtatgtggctttgtatgcaactcacttgatccgggagggtagctctgcccaggcattggccctgtatgtacagcacggagcccctgctaacccacagaacttcaatatctacaaaaggatcttcactgacatggtgagctctcctggaaccaactgtgccgaggcctatcatagctgggctgatcttcgagatgtcctcttcaacctgtgtgaaaacctggtgaagtccagtgaggcaaactctccagcccatgaggagttcaagacgatgctgctgatcgctcattactatgccacgcgctctgcagcccagagtgtcaaacagctggaaaccgtggctgccaggctttctgtttcactcttgcgtcacacccagctactacctgtagacaaagccttctatgaagcaggcattgctgccaaggcagttggctgggataacatggcattcatcttcctcaatcgctttttggacctgaccgatgaggctgagagagaagaggttcgagactgggtgcttacagtctccatggaccagcggctggagcaggttctgcctcgggatgagcgtggcgcctacgaggcctccctagtggcagcgagcactggtgttcgagccctgccctgccttattacaggataccccattctgaggaacaaaattgaatttaagcggccagggaaggctgctaacaaggacaactggaataaattccttatggccatcaagacctcccacagcccagtgtgccaggacgtgctgaaattcatcagtcagtggtgtggagggctccccagcaccagcttttcctttcagtagttggtagagctgaggaagagttagggcctctccctcattaaagttttataaataa

SEQ ID NO: 81768 - DNA, 5247 bp, Homo sapiens
gaaagacaggtgtgcgtcatgcacttgaagcacctgaggaccctgctgagccctcaggatggagctgcaaaggtgacctgcatggcttggtcccagaacaatgccaaatttgctgtctgcacagtggaccgagtggtcttgctgtatgatgaacatggagaacggagagataaattctccaccaaaccagctgacatgaagtatggcaggaagagctatatggtgaagggcatggctttttctcctgattccactaaaattgccataggacagactgacaacatcatctatgtctacaagattggagaagattggggtgacaagaaagtcatctgcaacaagttcatccagacgagtgctgtcacttgtctgcaatggccggcagaatacatcattgtctttggactggctgaagggaaggttcgtttagcaaacaccaaaactaataaatcatctaccatctatgggacagagtcttacgtggtgtccctgacaacaaattgctctgggaaaggaattctctctggtcatgcagatggtaccatcgttaggtatttctttgatgatgaaggctctggagagtcacaggggaagttggttaaccacccgtgtccaccctatgccttggcatgggcaaccaatagcatcgtggctgcaggctgtgatcggaaaattgtagcctatggaaaagaaggtcacatgctacaaacttttgattatagccgtgaccctcaggagcgggagttcaccacagctgtatcaagtcctgggggccagtctgttgtgctaggaagttatgacaggcttcgggtgttcaactggatccctcgaagaagcatctgggaagaggcaaagcccaaggagattaccaatttatacaccatcactgccttggcctggaagcgggatggctcacggctctgtgtgggcacactatgtggtggggtggaacagtttgactgctgcctccgaaggagtatttacaagaacaagtttgagttgacgtatgtgggacctagccaggtgattgtgaagaacctgtcatcaggaacccgagtggtgctcaagtcacactatggctatgaggtggaagaggtgaaaatcctaggaaaggaacgttacttggtggctcacacatcagaaacactgctgctgggggacctgaacactaatcggcttagtgagatagcctggcaaggatctggtggcaatgagaagtatttctttgaaaatgagaatgtatgcatgatcttcaatgccggagagctaaccctggtggaatatgggaataatgacaccctgggttctgtacgcactgaattcatgaacccccacctcatcagtgttcgtattaatgagaggtgtcagcgaggaacagaagataataagaaattggcttatcttattgatattaagactattgctatagtggatctgattggtggctacaacattggcaccgtcagccatgagagccgtgtggattggctggaacttaatgagactggacacaagctcctcttcagggaccggaaacttcgtttgcatctgtatgatattgaaagctgctctaagacaatgatcctcaacttctgctcctatatgcagtgggtcccaggaagtgacgtgctggtagctcagaaccgaaacagtctgtgtgtatggtacaacattgaggcacctgagagagtcaccatgttcactattaggggtgatgttataggtctggagcggggcgggggaaagaccgaggtgatggtgatggaaggtgtgactactgttgcctacacattggatgagggcctcatcgagtttggaacagccattgatgatggcaactacatccgggcaacagccttcttagagactctggaaatgaccccagaaacagaggcaatgtggaaaaccttgagtaaactggcactagaggcaaggcaactacacattgcggagaggtgcttttctgctttgggccaagtagcaaaagctcgattcctgcatgagaccaatgagattgcagatcaagtatcccgggaatatggcggagaaggaacagacttttatcaggtccgagcacgtctagccatgctggaaaagaactacaaactggctgaaatgatctttttggaacagaatgctgtggaggaggccatgggcatgtaccaggagctacaccgttgggatgagtgtatcgctgtggctgaagccaaggggcacccagccctggagaagctacgtcgtagttactaccagtggctgatggacacacagcaagaggagcgagcaggtgaactacaggagagccaaggggatgggctagcagccatcagcctctacctcaaagctgggctccctgccaaagctgctcggctggtgctgacccgagaggaactgctagccaacacagagctggtagaacacatcactgcagcccttatcaagggggaactctacgaaagggcaggtgatctctttgagaagattcacaatccacagaaggccctggagtgctaccgtaaaggcaacgcattcatgaaagcggtagagctggctcgattggccttcccagtggaggtggtgaaactagaggaggcatggggggaccacctggtgcagcagaagcagcttgatgcagccattaatcactacatcgaagccaggtgctccattaaggcaattgaggccgccctgggtgcccgccagtggaagaaggcaatttatatattagatctacaggaccggaacactgcatccaaatactatcctctcgtggcccaacactatgcatccctgcaggagtatgagattgctgaggagctctatactaagggagatcggacaaaagatgccatagacatgtacacccaggctggtcgttgggaacaagcccacaagctggcgatgaaatgcatgagaccagaagatgtgtcagtgctatacatcactcaggcccaggaaatggagaagcagggcaagtaccgtgaggctgaaaggctatatgtgacagtacaagagcctgatcttgccatcaccatgtacaaaaagcacaagttgtatgatgacatgatccgcctggtagggaagcaccatccagatctcctcagtgatacacacctacatctgggcaaggagctggaggctgaaggccgactacaggaggctgagtaccactacctcgaggcccaggaatggaaggcaacagtgaacatgtaccgggccagtgggctttgggaagaggcctacagggtggccagaactcaaggaggggctaatgcccacaaacacgtggcctatctgtgggcaaagagcctgggaggagaggctgcagttagactgcttaataagctgggactcctggaagctgctgttgaccacgctgcagacaattgctcctttgaatttgcgtttgaactctctcggctggccctcaagcacaaaacccccgaggttcatctcaaatatgctatgttcctggaggatgagggtaaattcgaagaggctgaagctgaattcatcagagctggtaaacccaaggaggcagtcctcatgtttgtccataaccaggattgggaggcagctcagcgtgtggctgaggctcacgaccctgacagtgtcgccgaggtgcttgtgggacaggcccggggggccttggaggagaaggactttcagaaagcagaagggctgctgctccgggcccagagaccaggcctggccctcaattattataaggaggctggattatggagtgacgctctgcgcatctgcaaggactatgtgcccagccagctggaggctctgcaggaagaatatgagcgggaagctactaagaagggggccaggggtgtggagggatttgtggaacaagctcgacactgggagcaggctggagagtacagccgtgccgtggactgctacctcaaagtgcgagactctggaaacagcggcctggcggagaagtgctggatgaaggcagctgaactctccatcaagtttctgcctccccaacgtaatatggaagtcgttctggctgtaggaccccagctgattggaattggaaagcacagtgcagctgcagagctctatctgaatctggaccttgtcaaggaagcaatcgatgctttcatcgagggtgaggagtggaacaaggcgaagcgtgtagctaaggagttagatcccaggtatgaagactatgtggaccagcattataaagagttcctcaagaatcagggcaaagtggactcgctggtgggtgtggatgtgatagctgctttggacctgtatgtggagcagggccagtgggacaagtgcattgaaacagctaccaagcagaactacaagattctgcacaagtatgtggctttgtatgcaactcacttgatccgggagggtagctctgcccaggcattggccctgtatgtacagcacggagcccctgctaacccacagaacttcaatatctacaaaaggatcttcactgacatggtgagctctcctggaaccaactgtgccgaggcctatcatagctgggctgatcttcgagatgtcctcttcaacctggctgtgctgtctccctcctctagtgtgaaaacctggtgaagtccagtgaggcaaactctccagcccatgaggagttcaagacgatgctgctgatcgctcattactatgccacgcgctctgcagcccagagtgtcaaacagctggaaaccgtggctgccaggctttctgtttcactcttgcgtcacacccagctactacctgtagacaaagccttctatgaagcaggcattgctgccaaggcagttggctgggataacatggcattcatcttcctcaatcgctttttggacctgaccgatgaggctgagagagaagaggttcgagactgggtgcttacagtctccatggaccagcggctggagcaggttctgcctcgggatgagcgtggcgcctacgaggcctccctagtggcagcgagcactggtgttcgagccctgccctgccttattacaggataccccattctgaggaacaaaattgaatttaagcggccagggaaggctgctaacaaggacaactggaataaattccttatggccatcaagacctcccacagcccagtgtgccaggacgtgctgaaattcatcagtcagtggtgtggagggctccccagcaccagcttttcctttcagtagttggtagagctgaggaagagttagggcctctccctcattaaagttttataaataa

SEQ ID NO: 81769 - DNA, 5439 bp, Homo sapiens
gaaagacaggtgtgcgtcatgcacttgaagcacctgaggaccctgctgagccctcaggatggagctgcaaaggtgacctgcatggcttggtcccagaacaatgccaaatttgctgtctgcacagtggaccgagtggtcttgctgtatgatgaacatggagaacggagagataaattctccaccaaaccagctgacatgaagtatggcaggaagagctatatggtgaagggcatggctttttctcctgattccactaaaattgccataggacagactgacaacatcatctatgtctacaagattggagaagattggggtgacaagaaagtcatctgcaacaagttcatccagacgagtgctgtcacttgtctgcaatggccggcagaatacatcattgtctttggactggctgaagggaaggttcgtttagcaaacaccaaaactaataaatcatctaccatctatgggacagagtcttacgtggtgtccctgacaacaaattgctctgggaaaggaattctctctggtcatgcagatggtaccatcgttaggtatttctttgatgatgaaggctctggagagtcacaggggaagttggttaaccacccgtgtccaccctatgccttggcatgggcaaccaatagcatcgtggctgcaggctgtgatcggaaaattgtagcctatggaaaagaaggtcacatgctacaaacttttgattatagccgtgaccctcaggagcgggagttcaccacagctgtatcaagtcctgggggccagtctgttgtgctaggaagttatgacaggcttcgggtgttcaactggatccctcgaagaagcatctgggaagaggcaaagcccaaggagattaccaatttatacaccatcactgccttggcctggaagcgggatggctcacggctctgtgtgggcacactatgtggtggggtggaacagtttgactgctgcctccgaaggagtatttacaagaacaagtttgagttgacgtatgtgggacctagccaggtgattgtgaagaacctgtcatcaggaacccgagtggtgctcaagtcacactatggctatgaggtggaagaggtgaaaatcctaggaaaggaacgttacttggtggctcacacatcagaaacactgctgctgggggacctgaacactaatcggcttagtgagatagcctggcaaggatctggtggcaatgagaagtatttctttgaaaatgagaatgtatgcatgatcttcaatgccggagagctaaccctggtggaatatgggaataatgacaccctgggttctgtacgcactgaattcatgaacccccacctcatcagtgttcgtattaatgagaggtgtcagcgaggaacagaagataataagaaattggcttatcttattgatattaagactattgctatagtggatctgattggtggctacaacattggcaccgtcagccatgagagccgtgtggattggctggaacttaatgagactggacacaagctcctcttcagggaccggaaacttcgtttgcatctgtatgatattgaaagctgctctaagacaatgatcctcaacttctgctcctatatgcagtgggtcccaggaagtgacgtgctggtagctcagaaccgaaacagtctgtgtgtatggtacaacattgaggcacctgagagagtcaccatgttcactattaggggtgatgttataggtctggagcggggcgggggaaagaccgaggtgatggtgatggaaggtgtgactactgttgcctacacattggatgagggcctcatcgagtttggaacagccattgatgatggcaactacatccgggcaacagccttcttagagactctggaaatgaccccagaaacagaggcaatgtggaaaaccttgagtaaactggcactagaggcaaggcaactacacattgcggagaggtgcttttctgctttgggccaagtagcaaaagctcgattcctgcatgagaccaatgagattgcagatcaagtatcccgggaatatggcggagaaggaacagacttttatcaggtccgagcacgtctagccatgctggaaaagaactacaaactggctgaaatgatctttttggaacagaatgctgtggaggaggccatgggcatgtaccaggagctacaccgttgggatgagtgtatcgctgtggctgaagccaaggggcacccagccctggagaagctacgtcgtagttactaccagtggctgatggacacacagcaagaggagcgagcaggtgaactacaggagagccaaggggatgggctagcagccatcagcctctacctcaaagctgggctccctgccaaagctgctcggctggtgctgacccgagaggaactgctagccaacacagagctggtagaacacatcactgcagcccttatcaagggggaactctacgaaagggcaggtgatctctttgagaagattcacaatccacagaaggccctggagtgctaccgtaaaggcaacgcattcatgaaagcggtagagctggctcgattggccttcccagtggaggtggtgaaactagaggaggcatggggggaccacctggtgcagcagaagcagcttgatgcagccattaatcactacatcgaagccaggtgctccattaaggcaattgaggccgccctgggtgcccgccagtggaagaaggcaatttatatattagatctacaggaccggaacactgcatccaaatactatcctctcgtggcccaacactatgcatccctgcaggagtatgagattgctgaggagctctatactaagggagatcggacaaaagatgccatagacatgtacacccaggctggtcgttgggaacaagcccacaagctggcgatgaaatgcatgagaccagaagatgtgtcagtgctatacatcactcaggcccaggaaatggagaagcagggcaagtaccgtgaggctgaaaggctatatgtgacagtacaagagcctgatcttgccatcaccatgtacaaaaagcacaagttgtatgatgacatgatccgcctggtagggaagcaccatccagatctcctcagtgatacacacctacatctgggcaaggagctggaggctgaaggccgactacaggaggctgagtaccactacctcgaggcccaggaatggaaggcaacagtgaacatgtaccgggccagtgggctttgggaagaggcctacagggtggccagaactcaaggaggggctaatgcccacaaacacgtggcctatctgtgggcaaagagcctgggaggagaggctgcagttagactgcttaataagctgggactcctggaagctgctgttgaccacgctgcagacaattgctcctttgaatttgcgtttgaactctctcggctggccctcaagcacaaaacccccgaggttcatctcaaatatgctatgttcctggaggatgagggtaaattcgaagaggctgaagctgaattcatcagagctggtaaacccaaggaggcagtcctcatgtttgtccataaccaggattgggaggcagctcagcgtgtggctgaggctcacgaccctgacagtgtcgccgaggtgcttgtgggacaggcccggggggccttggaggagaaggactttcagaaagcagaagggctgctgctccgggcccagagaccaggcctggccctcaattattataaggaggctggattatggagtgacgctctgcgcatctgcaaggactatgtgcccagccagctggaggctctgcaggaagaatatgagcgggaagctactaagaagggggccaggggtgtggagggatttgtggaacaagctcgacactgggagcaggctggagagtacagccgtgccgtggactgctacctcaaagtgcgagactctggaaacagcggcctggcggagaagtgctggatgaaggcagctgaactctccatcaagtttctgcctccccaacgtaatatggaagtcgttctggctgtaggaccccagctgattggaattggaaagcacagtgcagctgcagagctctatctgaatctggaccttgtcaaggaagcaatcgatgctttcatcgagggtgaggagtggaacaaggcgaagcgtgtagctaaggagttagatcccaggtatgaagactatgtggaccagcattataaagagttcctcaagaatcagggcaaagtggactcgctggtgggtgtggatgtgatagctgctttggacctgtatgtggagcagggccagtgggacaagtgcattgaaacagctaccaagcagaactacaagattctgcacaagtatgtggctttgtatgcaactcacttgatccgggagggtagctctgcccaggcattggccctgtatgtacagcacggagcccctgctaacccacagaacttcaatatctacaaaaggatcttcactgacatggtgagctctcctggaaccaactgtgccgaggcctatcatagctgggctgatcttcgagatgtcctcttcaacctgtgtgaaaacctggtgaagtccagtgaggcaaactctccagcccatgaggagttcaagacgatgctgctgatcgctcattactatgccacgcgctctgcagcccagagtgtcaaacagctggaaaccgtggctgccaggctttctgtttcactcttgcgtcacacccagctactacctgtagacaaagccttctatgaagcaggcattgctgccaaggcagttggctgggataacatggcattcatcttcctcaatcgctttttggacctgaccgatgcaatcgaggaagggactctagatggccttgaccactctgattttcaggatacagacattccctttgaggtgccactcccagctaagcagcatgtaccggaggctgagagagaagaggttcgagactgggtgcttacagtctccatggaccagcggctggagcaggttctgcctcgggatgagcgtggcgcctacgaggcctccctagtggcagcgagcactggtgttcgagccctgccctgccttattacaggataccccattctgaggaacaaaattgaatttaagcggccagggaaggctgctaacaaggacaactggaataaattccttatggccatcaaggttagagaggaggacttggagaatgaaggcagagagggcagcactaaaaaaagaaaaaaaaacaagtctgggtgcagtggctcatacctttaatcccagcactttgggaggccaagacctcccacagcccagtgtgccaggacgtgctgaaattcatcagtcagtggtgtggagggctccccagcaccagcttttcctttcagtagttggtagagctgaggaagagttagggcctctccctcattaaagttttataaataa

SEQ ID NO: 81770 - DNA, 5629 bp, Homo sapiens
gaaagacaggtgtgcgtcatgcacttgaagcacctgaggaccctgctgagccctcaggatggagctgcaaaggtgacctgcatggcttggtcccagaacaatgccaaatttgctgtctgcacagtggaccgagtggtcttgctgtatgatgaacatggagaacggagagataaattctccaccaaaccagctgacatgaagtatggcaggaagagctatatggtgaagggcatggctttttctcctgattccactaaaattgccataggacagactgacaacatcatctatgtctacaagattggagaagattggggtgacaagaaagtcatctgcaacaagttcatccagacgagtgctgtcacttgtctgcaatggccggcagaatacatcattgtctttggactggctgaagggaaggttcgtttagcaaacaccaaaactaataaatcatctaccatctatgggacagagtcttacgtggtgtccctgacaacaaattgctctgggaaaggaattctctctggtcatgcagatggtaccatcgttaggtatttctttgatgatgaaggctctggagagtcacaggggaagttggttaaccacccgtgtccaccctatgccttggcatgggcaaccaatagcatcgtggctgcaggctgtgatcggaaaattgtagcctatggaaaagaaggtcacatgctacaaacttttgattatagccgtgaccctcaggagcgggagttcaccacagctgtatcaagtcctgggggccagtctgttgtgctaggaagttatgacaggcttcgggtgttcaactggatccctcgaagaagcatctgggaagaggcaaagcccaaggagattaccaatttatacaccatcactgccttggcctggaagcgggatggctcacggctctgtgtgggcacactatgtggtggggtggaacagtttgactgctgcctccgaaggagtatttacaagaacaagtttgagttgacgtatgtgggacctagccaggtgattgtgaagaacctgtcatcaggaacccgagtggtgctcaagtcacactatggctatgaggtggaagaggtgaaaatcctaggaaaggaacgttacttggtggctcacacatcagaaacactgctgctgggggacctgaacactaatcggcttagtgagatagcctggcaaggatctggtggcaatgagaagtatttctttgaaaatgagaatgtatgcatgatcttcaatgccggagagctaaccctggtggaatatgggaataatgacaccctgggttctgtacgcactgaattcatgaacccccacctcatcagtgttcgtattaatgagaggtgtcagcgaggaacagaagataataagaaattggcttatcttattgatattaagactattgctatagtggatctgattggtggctacaacattggcaccgtcagccatgagagccgtgtggattggctggaacttaatgagactggacacaagctcctcttcagggaccggaaacttcgtttgcatctgtatgatattgaaagctgctctaagacaatgatcctcaacttctgctcctatatgcagtgggtcccaggaagtgacgtgctggtagctcagaaccgaaacagtctgtgtgtatggtacaacattgaggcacctgagagagtcaccatgttcactattaggggtgatgttataggtctggagcggggcgggggaaagaccgaggtgatggtgatggaaggtgtgactactgttgcctacacattggatgagggcctcatcgagtttggaacagccattgatgatggcaactacatccgggcaacagccttcttagagactctggaaatgaccccagaaacagaggcaatgtggaaaaccttgagtaaactggcactagaggcaaggcaactacacattgcggagaggtgcttttctgctttgggccaagtagcaaaagctcgattcctgcatgagaccaatgagattgcagatcaagtatcccgggaatatggcggagaaggaacagacttttatcaggtccgagcacgtctagccatgctggaaaagaactacaaactggctgaaatgatctttttggaacagaatgctgtggaggaggccatgggcatgtaccaggagctacaccgttgggatgagtgtatcgctgtggctgaagccaaggggcacccagccctggagaagctacgtcgtagttactaccagtggctgatggacacacagcaagaggagcgagcaggtgaactacaggagagccaaggggatgggctagcagccatcagcctctacctcaaagctgggctccctgccaaagctgctcggctggtgctgacccgagaggaactgctagccaacacagagctggtagaacacatcactgcagcccttatcaagggggaactctacgaaagggcaggtgatctctttgagaagattcacaatccacagaaggccctggagtgctaccgtaaaggcaacgcattcatgaaagcggtagagctggctcgattggccttcccagtggaggtggtgaaactagaggaggcatggggggaccacctggtgcagcagaagcagcttgatgcagccattaatcactacatcgaagccaggtgctccattaaggcaattgaggccgccctgggtgcccgccagtggaagaaggcaatttatatattagatctacaggaccggaacactgcatccaaatactatcctctcgtggcccaacactatgcatccctgcaggagtatgagattgctgaggagctctatactaagggagatcggacaaaagatgccatagacatgtacacccaggctggtcgttgggaacaagcccacaagctggcgatgaaatgcatgagaccagaagatgtgtcagtgctatacatcactcaggcccaggaaatggagaagcagggcaagtaccgtgaggctgaaaggctatatgtgacagtacaagagcctgatcttgccatcaccatgtacaaaaagcacaagttgtatgatgacatgatccgcctggtagggaagcaccatccagatctcctcagtgatacacacctacatctgggcaaggagctggaggctgaaggccgactacaggaggctgagtaccactacctcgaggcccaggaatggaaggcaacagtgaacatgtaccgggccagtgggctttgggaagaggcctacagggtggccagaactcaaggaggggctaatgcccacaaacacgtggcctatctgtgggcaaagagcctgggaggagaggctgcagttagactgcttaataagctgggactcctggaagctgctgttgaccacgctgcagacaattgctcctttgaatttgcgtttgaactctctcggctggccctcaagcacaaaacccccgaggttcatctcaaatatgctatgttcctggaggatgagggtaaattcgaagaggctgaagctgaattcatcagagctggtaaacccaaggaggcagtcctcatgtttgtccataaccaggattgggaggcagctcagcgtgtggctgaggctcacgaccctgacagtgtcgccgaggtgcttgtgggacaggcccggggggccttggaggagaaggactttcagaaagcagaagggctgctgctccgggcccagagaccaggcctggccctcaattattataaggaggctggattatggagtgacgctctgcgcatctgcaaggactatgtgcccagccagctggaggctctgcaggaagaatatgagcgggaagctactaagaagggggccaggggtgtggagggatttgtggaacaagctcgacactgggagcaggctggagagtacagccgtgccgtggactgctacctcaaagtgcgagactctggaaacagcggcctggcggagaagtgctggatgaaggcagctgaactctccatcaagtttctgcctccccaacgtaatatggaagtcgttctggctgtaggaccccagctgattggaattggaaagcacagtgcagctgcagagctctatctgaatctggaccttgtcaaggaagcaatcgatgctttcatcgagggtgaggagtggaacaaggcgaagcgtgtagctaaggagttagatcccaggtatgaagactatgtggaccagcattataaagagttcctcaagaatcagggcaaagtggactcgctggtgggtgtggatgtgatagctgctttggacctgtatgtggagcagggccagtgggacaagtgcattgaaacagctaccaagcagaactacaagattctgcacaagtatgtggctttgtatgcaactcacttgatccgggagggtagctctgcccaggcattggccctgtatgtacagcacggagcccctgctaacccacagaacttcaatatctacaaaaggatcttcactgacatggtgagctctcctggaaccaactgtgccgaggcctatcatagctgggctgatcttcgagatgtcctcttcaacctgtgtgaaaacctggtgaagtccagtgaggcaaactctccagcccatgaggagttcaagacgatgctgctgatcgctcattactatgccacgcgctctgcagcccagagtgtcaaacagctggaaaccgtggctgccaggctttctgtttcactcttgcgtcacacccagctactacctgtagacaaagccttctatgaagcaggcattgctgccaaggcagttggctgggataacatggcattcatcttcctcaatcgctttttggacctgaccgatgcaatcgaggaagggactctagatggccttgaccactctgattttcaggatacagacattccctttgaggtgccactcccagctaagcagcatgtaccggaggctgagagagaagaggttcgagactgggtgcttacagtctccatggaccagcggctggagcaggttctgcctcgggatgagcgtggcgcctacgaggcctccctagtggcagcgagcactggtgttcgagccctgccctgccttattacaggtatagaagcctacagcaccccagatcctgtggtgggtagaaagcagcaggatcaataaacttaattttactaggattcagtaaagggtacaaaagacaggactgtgctttctaccccccaggctgctcctcatttttccctcctcaatctctctcaaaccccagttcatcattttttcttcctccacaggataccccattctgaggaacaaaattgaatttaagcggccagggaaggctgctaacaaggacaactggaataaattccttatggccatcaaggttagagaggaggacttggagaatgaaggcagagagggcagcactaaaaaaagaaaaaaaaacaagtctgggtgcagtggctcatacctttaatcccagcactttgggaggccaagacctcccacagcccagtgtgccaggacgtgctgaaattcatcagtcagtggtgtggagggctccccagcaccagcttttcctttcagtagttggtagagctgaggaagagttagggcctctccctcattaaagttttataaataa

SEQ ID NO: 81771 - DNA, 5016 bp, Homo sapiens
gaaagacaggtgtgcgtcatgcacttgaagcacctgaggaccctgctgagccctcaggatggagctgcaaaggtgacctgcatggcttggtcccagaacaatgccaaatttgctgtctgcacagtggaccgagtggtcttgctgtatgatgaacatggagaacggagagataaattctccaccaaaccagctgacatgaagtatggcaggaagagctatatggtgaagggcatggctttttctcctgattccactaaaattgccataggacagactgacaacatcatctatgtctacaagattggagaagattggggtgacaagaaagtcatctgcaacaagttcatccagacgagtgctgtcacttgtctgcaatggccggcagaatacatcattgtctttggactggctgaagggaaggttcgtttagcaaacaccaaaactaataaatcatctaccatctatgggacagagtcttacgtggtgtccctgacaacaaattgctctgggaaaggaattctctctggtcatgcagatggtaccatcgttaggtatttctttgatgatgaaggctctggagagtcacaggggaagttggttaaccacccgtgtccaccctatgccttggcatgggcaaccaatagcatcgtggctgcaggctgtgatcggaaaattgtagcctatggaaaagaaggtcacatgctacaaacttttgattatagccgtgaccctcaggagcgggagttcaccacagctgtatcaagtcctgggggccagtctgttgtgctaggaagttatgacaggcttcgggtgttcaactggatccctcgaagaagcatctgggaagaggcaaagcccaaggagattaccaatttatacaccatcactgccttggcctggaagcgggatggctcacggctctgtgtgggcacactatgtggtggggtggaacagtttgactgctgcctccgaaggagtatttacaagaacaagtttgagttgacgtatgtgggacctagccaggtgattgtgaagaacctgtcatcaggaacccgagtggtgctcaagtcacactatggctatgaggtggaagaggtgaaaatcctaggaaaggaacgttacttggtggctcacacatcagaaacactgctgctgggggacctgaacactaatcggcttagtgagatagcctggcaaggatctggtggcaatgagaagtatttctttgaaaatgagaatgtatgcatgatcttcaatgccggagagctaaccctggtggaatatgggaataatgacaccctgggttctgtacgcactgaattcatgaacccccacctcatcagtgttcgtattaatgagaggtgtcagcgaggaacagaagataataagaaattggcttatcttattgatattaagactattgctatagtggatctgattggtggctacaacattggcaccgtcagccatgagagccgtgtggattggctggaacttaatgagactggacacaagctcctcttcagggaccggaaacttcgtttgcatctgtatgatattgaaagctgctctaagacaatgatcctcaacttctgctcctatatgcagtgggtcccaggaagtgacgtgctggtagctcagaaccgaaacagtctgtgtgtatggtacaacattgaggcacctgagagagtcaccatgttcactattaggggtgatgttataggtctggagcggggcgggggaaagaccgaggtgatggtgatggaaggtgtgactactgttgcctacacattggatgagggcctcatcgagtttggaacagccattgatgatggcaactacatccgggcaacagccttcttagagactctggaaatgaccccagaaacagaggcaatgtggaaaaccttgagtaaactggcactagaggcaaggcaactacacattgcggagaggtgcttttctgctttgggccaagtagcaaaagctcgattcctgcatgagaccaatgagattgcagatcaagtatcccgggaatatggcggagaaggaacagacttttatcaggtccgagcacgtctagccatgctggaaaagaactacaaactggctgaaatgatctttttggaacagaatgctgtggaggaggccatgggcatgtaccaggagctacaccgttgggatgagtgtatcgctgtggctgaagccaaggggcacccagccctggagaagctacgtcgtagttactaccagtggctgatggacacacagcaagaggagcgagcaggtgaactacaggagagccaaggggatgggctagcagccatcagcctctacctcaaagctgggctccctgccaaagctgctcggctggtgctgacccgagaggaactgctagccaacacagagctggtagaacacatcactgcagcccttatcaagggggaactctacgaaagggcaggtgatctctttgagaagattcacaatccacagaaggccctggagtgctaccgtaaaggcaacgcattcatgaaagcggtagagctggctcgattggccttcccagtggaggtggtgaaactagaggaggcatggggggaccacctggtgcagcagaagcagcttgatgcagccattaatcactacatcgaagccaggtgctccattaaggcaattgaggccgccctgggtgcccgccagtggaagaaggcaatttatatattagatctacaggaccggaacactgcatccaaatactatcctctcgtggcccaacactatgcatccctgcaggagtatgagattgctgaggagctctatactaagggagatcggacaaaagatgccatagacatgtacacccaggctggtcgttgggaacaagcccacaagctggcgatgaaatgcatgagaccagaagatgtgtcagtgctatacatcactcaggcccaggaaatggagaagcagggcaagtaccgtgaggctgaaaggctatatgtgacagtacaagagcctgatcttgccatcaccatgtacaaaaagcacaagttgtatgatgacatgatccgcctggtagggaagcaccatccagatctcctcagtgatacacacctacatctgggcaaggagctggaggctgaaggccgactacaggaggctgagtaccactacctcgaggcccaggaatggaaggcaacagtgaacatgtaccgggccagtgggctttgggaagaggcctacagggtggccagaactcaaggaggggctaatgcccacaaacacgtggcctatctgtgggcaaagagcctgggaggagaggctgcagttagactgcttaataagctgggactcctggaagctgctgttgaccacgctgcagacaattgctcctttgaatttgcgtttgaactctctcggctggccctcaagcacaaaacccccgaggttcatctcaaatatgctatgttcctggaggatgagggtaaattcgaagaggctgaagctgaattcatcagagctggtaaacccaaggaggcagtcctcatgtttgtccataaccaggattgggaggcagctcagcgtgtggctgaggctcacgaccctgacagtgtcgccgaggtgcttgtgggacaggcccggggggccttggaggagaaggactttcagaaagcagaagggctgctgctccgggcccagagaccaggcctggccctcaattattataaggaggctggattatggagtgacgctctgcgcatctgcaaggactatgtgcccagccagctggaggctctgcaggaagaatatgagcgggaagctactaagaagggggccaggggtgtggagggatttgtggaacaagctcgacactgggagcaggctggagagtacagccgtgccgtggactgctacctcaaagtgcgagactctggaaacagcggcctggcggagaagtgctggatgaaggcagctgaactctccatcaagtttctgcctccccaacgtaatatggaagtcgttctggctgtaggaccccagctgattggaattggaaagcacagtgcagctgcagagctctatctgaatctggaccttgtcaaggaagcaatcgatgctttcatcgagggtgaggagtggaacaaggcgaagcgtgtagctaaggagttagatcccaggtatgaagactatgtggaccagcattataaagagttcctcaagaatcagggcaaagtggactcgctggtgggtgtggatgtgatagctgctttggacctgtatgtggagcagggccagtgggacaagtgcattgaaacagctaccaagcagaactacaagattctgcacaagtatgtggctttgtatgcaactcacttgatccgggagggtagctctgcccaggcattggccctgtatgtacagcacggagcccctgctaacccacagaacttcaatatctacaaaaggatcttcactgacatggtgagctctcctggaaccaactgtgccgaggcctatcatagctgggctgatcttcgagatgtcctcttcaacctgtgtgaaaacctggtgaagtccagtgaggcaaactctccagcccatgaggagttcaagacgatgctgctgatcgctcattactatgccacgcgctctgcagcccagagtgtcaaacagctggaaaccgtggctgccaggctttctgtttcactcttgcgtcacacccagctactacctgtagacaaagccttctatgaagcaggcattgctgccaaggcagttggctgggataacatggcattcatcttcctcaatcgctttttggacctgaccgatgcaatcgaggaagggactctagatggccttgaccactctgattttcaggatacagacattccctttgaggtgccactcccagctaagcagcatgtaccgtgaaagtagaagcaaaatagaaagaaaaggctgtgactgcatcccccaatccaaggaggattcgtggctaaaagctggtataca

SEQ ID NO: 81772 - DNA, 1041 bp, Homo sapiens
gagaatccagagcagtttaataataattgttgttttttagttctgtggctgccttacaggatcattggtctggtagctcagtcactttagtgccatattcataatgctttgactttaatcccaggaaaccgtggctgccaggctttctgtttcactcttgcgtcacacccagctactacctgtagacaaagccttctatgaagcaggcattgctgccaaggtgagctgggacaaggaagggtggggcagataggaggaagttaaaggttggaaaatagaatatcccttctgctctggtagaggaaagctgagtgtagggctgatgttacggaggatgtagtcctcctatgtcttcctggatttttctccctggatcccagagaaatagcattcaagcccagcttgctcactcccatttgcatctggatcccagagaagtagcattcaaacccagcttgttcactcccatttgcaactcttctttgctgcaggcagttggctgggataacatggcattcatcttcctcaatcgctttttggacctgaccgatgcaatcgaggaagggactctagatggccttgaccactctgattttcaggatacagacattccctttgaggtgccactcccagctaagcagcatgtaccggaggctgagagagaagaggttcgagactgggtgcttacagtctccatggaccagcggctggagcaggttctgcctcgggatgagcgtggcgcctacgaggcctccctagtggcagcgagcactggtgttcgagccctgccctgccttattacaggataccccattctgaggaacaaaattgaatttaagcggccagggaaggctgctaacaaggacaactggaataaattccttatggccatcaagacctcccacagcccagtgtgccaggacgtgctgaaattcatcagtcagtggtgtggagggctccccagcaccagcttttcctttcagtagttggtagagctgaggaagagttagggcctctccctcattaaagttttataaataa

SEQ ID NO: 81773 - DNA, 516 bp, Homo sapiens
agcggccgctcgcgatctagaactagcggacgcgtgggttatgatataaaattgctttgcattgcagaaatgtgaggcccttttggattccactgtttggggctggtctttctttttaaatggtagaatgtatgagacacccatactcatcttttcttctctattattacaaggttgtatcgcaggctctccaccatcccagccaaggtttgttctttcctcattcaagctgctttaagtctgttgctctgaccttttgtatctacctcccatcaactacagattgctgaggagctctatactaagggagatcggacaaaagatgccatagacatgtacacccaggctggtcgttgggaacaagcccacaagctggcgatgaaatgcatgagaccagaagatgtgtcagtgctatacatcactcaggcccaggaaatggagaagcagggcaagtaccgtgaggctgaaaggtgagccgtggccccagaggaggtgttagagggagatgagatttca

SEQ ID NO: 81774 - DNA, 432 bp, Homo sapiens
ttagggcctagttaaatataaaatagcctaaccatacttgtatcaatttttccattttcaggttcgtttagcaaacaccaaaactaataaatcatctaccatctatgggacagagtcttacgtggtgtccctgacaacaaagtgagtaaagaggagtagtatcactagagtctggaagtgttaggaaaatgctgtggggaagtctggactgcaagaccatagtatgaaaggcaggagaactggtagcaggaagcacagacaaggttgtgtttgacagagaaaggggctttcttggtgagataaaatagtctcttcctgtatttctctcctttctccttttttagttgctctgggaaaggaattctctctggtcatgcagatggtaccatcgttaggtatttctttgatgatgaaggctctggagagtcacag

SEQ ID NO: 81775 - DNA, 408 bp, Homo sapiens
caaggaagcaatcgatgctttcatcgagggtgaggagtggaacaaggcgaagcgtgtagctaaggagttagatcccaggtaagcttgtaaccccttcttactgcgaaattctcttttacttccttttgtaaagactgggagaaagtcttaccgggagggttggtattctggaacatgaagatggagctctctgaacatcttcacaggtatgaagactatgtggaccagcattataaagagttcctcaagaatcagggcaaagtggactcggtgagacttggagagttagcaggaggcagaatgcagggagagactcacaagactctctccctcttctttccctcatgtcatctcttttctcttgtaactctgtcttccattgacccagctggtgggtgtggatgtgat

SEQ ID NO: 81776 - DNA, 363 bp, Homo sapiens
tattctggaacatgaagatggagctctctgaacatcttcacaggtatgaagactatgtggaccagcattataaagagttcctcaagaatcagggcaaagtggactcggtgagacttggagagttagcaggaggcagaatgcagggagagactcacaagactctctccctcttctttccctcatgtcatctcttttctcttgtaactctgtcttccattgacccagctggtgggtgtggatgtgatagctgctttggacctgtatgtggagcagggccagtgggacaagtgcattgaaacagctaccaagcaggtactgctctcttcccattcccagtttttctttacattttcccttgattcc

SEQ ID NO: 81777 - DNA, 524 bp, Homo sapiens
gctgatgttacggaggatgtagtcctcctatgtcttcctggatttttctccctggatcccagagaaatagcattcaagcccagcttgctcactcccatttgcatctggatcccagagaagtagcattcaaacccagcttgttcactcccatttgcaactcttctttgctgcaggcagttggctgggataacatggcattcatcttcctcaatcgctttttggacctgaccgatgtgagtagggaagctgtgccccgagggtggaggtttttgccagtcgcgagctgtgcctagttcatggttgcccactctactgcaggcaatcgaggaagggactctagatggccttgaccactctgattttcaggatacagacattccctttgaggtgccactcccagctaagcagcatgtaccggtaagggcacagggttggaaaaccggaaggcctcaccagtgtgagtgccttgaggagggagaatatctttgtgctgccatctttggaaggacctcagccctcactgt

SEQ ID NO: 81778 - DNA, 5522 bp, Homo sapiens
gaaagacaggtgtgcgtcatgcacttgaagcacctgaggaccctgctgagccctcaggatggagctgcaaaggtgacctgcatggcttggtcccagaacaatgccaaatttgctgtctgcacagtggaccgagtggtcttgctgtatgatgaacatggagaacggagagataaattctccaccaaaccagctgacatgaagtatggcaggaagagctatatggtgaagggcatggctttttctcctgattccactaaaattgccataggacagactgacaacatcatctatgtctacaagattggagaagattggggtgacaagaaagtcatctgcaacaagttcatccagacggtaaagttcagaccagtccctggaaccttaggatgaacaaacatatatcagtatatctacttataaatacagccaggagttgcatttctaacatctgaatgtgacttttcctactgcaaggatggtgcttcatggctgttcatggtcatctgctgtcttccttagagccctgctgtgtccttccctataggagattgagagtgctgtcacttgtctgcaatggccggcagaatacatcattgtctttggactggctgaagggaaggttcgtttagcaaacaccaaaactaataaatcatctaccatctatgggacagagtcttacgtggtgtccctgacaacaaattgctctgggaaaggaattctctctggtcatgcagatggtaccatcgttaggtatttctttgatgatgaaggctctggagagtcacaggggaagttggttaaccacccgtgtccaccctatgccttggcatgggcaaccaatagcatcgtggctgcaggctgtgatcggaaaattgtagcctatggaaaagaaggtcacatgctacaaacttttgattatagccgtgaccctcaggagcgggagttcaccacagctgtatcaagtcctgggggccagtctgttgtgctaggaagttatgacaggcttcgggtgttcaactggatccctcgaagaagcatctgggaagaggcaaagcccaaggagattaccaatttatacaccatcactgccttggcctggaagcgggatggctcacggctctgtgtgggcacactatgtggtggggtggaacagtttgactgctgcctccgaaggagtatttacaagaacaagtttgagttgacgtatgtgggacctagccaggtgattgtgaagaacctgtcatcaggaacccgagtggtgctcaagtcacactatggctatgaggtggaagaggtgaaaatcctaggaaaggaacgttacttggtggctcacacatcagaaacactgctgctgggggacctgaacactaatcggcttagtgagatagcctggcaaggatctggtggcaatgagaagtatttctttgaaaatgagaatgtatgcatgatcttcaatgccggagagctaaccctggtggaatatgggaataatgacaccctgggttctgtacgcactgaattcatgaacccccacctcatcagtgttcgtattaatgagaggtgtcagcgaggaacagaagataataagaaattggcttatcttattgatattaagactattgctatagtggatctgattggtggctacaacattggcaccgtcagccatgagagccgtgtggattggctggaacttaatgagactggacacaagctcctcttcagggaccggaaacttcgtttgcatctgtatgatattgaaagctgctctaagacaatgatcctcaacttctgctcctatatgcagtgggtcccaggaagtgacgtgctggtagctcagaaccgaaacagtctgtgtgtatggtacaacattgaggcacctgagagagtcaccatgttcactattaggggtgatgttataggtctggagcggggcgggggaaagaccgaggtgatggtgatggaaggtgtgactactgttgcctacacattggatgagggcctcatcgagtttggaacagccattgatgatggcaactacatccgggcaacagccttcttagagactctggaaatgaccccagaaacagaggcaatgtggaaaaccttgagtaaactggcactagaggcaaggcaactacacattgcggagaggtgcttttctgctttgggccaagtagcaaaagctcgattcctgcatgagaccaatgagattgcagatcaagtatcccgggaatatggcggagaaggaacagacttttatcaggtccgagcacgtctagccatgctggaaaagaactacaaactggctgaaatgatctttttggaacagaatgctgtggaggaggccatgggcatgtaccaggagctacaccgttgggatgagtgtatcgctgtggctgaagccaaggggcacccagccctggagaagctacgtcgtagttactaccagtggctgatggacacacagcaagaggagcgagcaggtgaactacaggagagccaaggggatgggctagcagccatcagcctctacctcaaagctgggctccctgccaaagctgctcggctggtgctgacccgagaggaactgctagccaacacagagctggtagaacacatcactgcagcccttatcaagggggaactctacgaaagggcaggtgatctctttgagaagattcacaatccacagaaggccctggagtgctaccgtaaaggcaacgcattcatgaaagcggtagagctggctcgattggccttcccagtggaggtggtgaaactagaggaggcatggggggaccacctggtgcagcagaagcagcttgatgcagccattaatcactacatcgaagccaggtgctccattaaggcaattgaggccgccctgggtgcccgccagtggaagaaggcaatttatatattagatctacaggaccggaacactgcatccaaatactatcctctcgtggcccaacactatgcatccctgcaggagtatgagattgctgaggagctctatactaagggagatcggacaaaagatgccatagacatgtacacccaggctggtcgttgggaacaagcccacaagctggcgatgaaatgcatgagaccagaagatgtgtcagtgctatacatcactcaggcccaggaaatggagaagcagggcaagtaccgtgaggctgaaaggctatatgtgacagtacaagagcctgatcttgccatcaccatgtacaaaaagcacaagttgtatgatgacatgatccgcctggtagggaagcaccatccagatctcctcagtgatacacacctacatctgggcaaggagctggaggctgaaggccgactacaggaggctgagtaccactacctcgaggcccaggaatggaaggcaacagtgaacatgtaccgggccagtgggctttgggaagaggcctacagggtggccagaactcaaggaggggctaatgcccacaaacacgtggcctatctgtgggcaaagagcctgggaggagaggctgcagttagactgcttaataagctgggactcctggaagctgctgttgaccacgctgcagacaattgctcctttgaatttgcgtttgaactctctcggctggccctcaagcacaaaacccccgaggttcatctcaaatatgctatgttcctggaggatgagggtaaattcgaagaggctgaagctgaattcatcagagctggtaaacccaaggaggcagtcctcatgtttgtccataaccaggattgggaggcagctcagcgtgtggctgaggctcacgaccctgacagtgtcgccgaggtgcttgtgggacaggcccggggggccttggaggagaaggactttcagaaagcagaagggctgctgctccgggcccagagaccaggcctggccctcaattattataaggaggctggattatggagtgacgctctgcgcatctgcaaggactatgtgcccagccagctggaggctctgcaggaagaatatgagcgggaagctactaagaagggggccaggggtgtggagggatttgtggaacaagctcgacactgggagcaggctggagagtacagccgtgccgtggactgctacctcaaagtgcgagactctggaaacagcggcctggcggagaagtgctggatgaaggcagctgaactctccatcaagtttctgcctccccaacgtaatatggaagtcgttctggctgtaggaccccagctgattggaattggaaagcacagtgcagctgcagagctctatctgaatctggaccttgtcaaggaagcaatcgatgctttcatcgagggtgaggagtggaacaaggcgaagcgtgtagctaaggagttagatcccaggtatgaagactatgtggaccagcattataaagagttcctcaagaatcagggcaaagtggactcgctggtgggtgtggatgtgatagctgctttggacctgtatgtggagcagggccagtgggacaagtgcattgaaacagctaccaagcagaactacaagattctgcacaagtatgtggctttgtatgcaactcacttgatccgggagggtagctctgcccaggcattggccctgtatgtacagcacggagcccctgctaacccacagaacttcaatatctacaaaaggatcttcactgacatggtgagctctcctggaaccaactgtgccgaggcctatcatagctgggctgatcttcgagatgtcctcttcaacctgtgtgaaaacctggtgaagtccagtgaggcaaactctccagcccatgaggagttcaagacgatgctgctgatcgctcattactatgccacgcgctctgcagcccagagtgtcaaacagctggaaaccgtggctgccaggctttctgtttcactcttgcgtcacacccagctactacctgtagacaaagccttctatgaagcaggcattgctgccaaggcagttggctgggataacatggcattcatcttcctcaatcgctttttggacctgaccgatgcaatcgaggaagggactctagatggccttgaccactctgattttcaggatacagacattccctttgaggtgccactcccagctaagcagcatgtaccggaggctgagagagaagaggttcgagactgggtgcttacagtctccatggaccagcggctggagcaggttctgcctcgggatgagcgtggcgcctacgaggcctccctagtggcagcgagcactggtgttcgagccctgccctgccttattacaggataccccattctgaggaacaaaattgaatttaagcggccagggaaggctgctaacaaggacaactggaataaattccttatggccatcaagacctcccacagcccagtgtgccaggacgtgctgaaattcatcagtcagtggtgtggagggctccccagcaccagcttttcctttcagtagttggtagagctgaggaagagttagggcctctccctcattaaagttttataaataa

SEQ ID NO: 81779 - DNA, 2800 bp, Homo sapiens
agcggccgctcgcgatctagaactagcggacgcgtgggttatgatataaaattgctttgcattgcagaaatgtgaggcccttttggattccactgtttggggctggtctttctttttaaatggtagaatgtatgagacacccatactcatcttttcttctctattattacaaggttgtatcgcaggctctccaccatcccagccaaggtttgttctttcctcattcaagctgctttaagtctgttgctctgaccttttgtatctacctcccatcaactacagattgctgaggagctctatactaagggagatcggacaaaagatgccatagacatgtacacccaggctggtcgttgggaacaagcccacaagctggcgatgaaatgcatgagaccagaagatgtgtcagtgctatacatcactcaggcccaggaaatggagaagcagggcaagtaccgtgaggctgaaaggctatatgtgacagtacaagagcctgatcttgccatcaccatgtacaaaaagcacaagttgtatgatgacatgatccgcctggtagggaagcaccatccagatctcctcagtgatacacacctacatctgggcaaggagctggaggctgaaggccgactacaggaggctgagtaccactacctcgaggcccaggaatggaaggcaacagtgaacatgtaccgggccagtgggctttgggaagaggcctacagggtggccagaactcaaggaggggctaatgcccacaaacacgtggcctatctgtgggcaaagagcctgggaggagaggctgcagttagactgcttaataagctgggactcctggaagctgctgttgaccacgctgcagacaattgctcctttgaatttgcgtttgaactctctcggctggccctcaagcacaaaacccccgaggttcatctcaaatatgctatgttcctggaggatgagggtaaattcgaagaggctgaagctgaattcatcagagctggtaaacccaaggaggcagtcctcatgtttgtccataaccaggattgggaggcagctcagcgtgtggctgaggctcacgaccctgacagtgtcgccgaggtgcttgtgggacaggcccggggggccttggaggagaaggactttcagaaagcagaagggctgctgctccgggcccagagaccaggcctggccctcaattattataaggaggctggattatggagtgacgctctgcgcatctgcaaggactatgtgcccagccagctggaggctctgcaggaagaatatgagcgggaagctactaagaagggggccaggggtgtggagggatttgtggaacaagctcgacactgggagcaggctggagagtacagccgtgccgtggactgctacctcaaagtgcgagactctggaaacagcggcctggcggagaagtgctggatgaaggcagctgaactctccatcaagtttctgcctccccaacgtaatatggaagtcgttctggctgtaggaccccagctgattggaattggaaagcacagtgcagctgcagagctctatctgaatctggaccttgtcaaggaagcaatcgatgctttcatcgagggtgaggagtggaacaaggcgaagcgtgtagctaaggagttagatcccaggtatgaagactatgtggaccagcattataaagagttcctcaagaatcagggcaaagtggactcgctggtgggtgtggatgtgatagctgctttggacctgtatgtggagcagggccagtgggacaagtgcattgaaacagctaccaagcagaactacaagattctgcacaagtatgtggctttgtatgcaactcacttgatccgggagggtagctctgcccaggcattggccctgtatgtacagcacggagcccctgctaacccacagaacttcaatatctacaaaaggatcttcactgacatggtgagctctcctggaaccaactgtgccgaggcctatcatagctgggctgatcttcgagatgtcctcttcaacctgtgtgaaaacctggtgaagtccagtgaggcaaactctccagcccatgaggagttcaagacgatgctgctgatcgctcattactatgccacgcgctctgcagcccagagtgtcaaacagctggaaaccgtggctgccaggctttctgtttcactcttgcgtcacacccagctactacctgtagacaaagccttctatgaagcaggcattgctgccaaggcagttggctgggataacatggcattcatcttcctcaatcgctttttggacctgaccgatgcaatcgaggaagggactctagatggccttgaccactctgattttcaggatacagacattccctttgaggtgccactcccagctaagcagcatgtaccggaggctgagagagaagaggttcgagactgggtgcttacagtctccatggaccagcggctggagcaggttctgcctcgggatgagcgtggcgcctacgaggcctccctagtggcagcgagcactggtgttcgagccctgccctgccttattacaggataccccattctgaggaacaaaattgaatttaagcggccagggaaggctgctaacaaggacaactggaataaattccttatggccatcaagacctcccacagcccagtgtgccaggacgtgctgaaattcatcagtcagtggtgtggagggctccccagcaccagcttttcctttcagtagttggtagagctgaggaagagttagggcctctccctcattaaagttttataaataa

SEQ ID NO: 81780 - DNA, 5495 bp, Homo sapiens
gaaagacaggtgtgcgtcatgcacttgaagcacctgaggaccctgctgagccctcaggatggagctgcaaaggtgacctgcatggcttggtcccagaacaatgccaaatttgctgtctgcacagtggaccgagtggtcttgctgtatgatgaacatggagaacggagagataaattctccaccaaaccagctgacatgaagtatggcaggaagagctatatggtgaagggcatggctttttctcctgattccactaaaattgccataggacagactgacaacatcatctatgtctacaagattggagaagattggggtgacaagaaagtcatctgcaacaagttcatccagacgagtgctgtcacttgtctgcaatggccggcagaatacatcattgtctttggactggctgaagggaaggttcgtttagcaaacaccaaaactaataaatcatctaccatctatgggacagagtcttacgtggtgtccctgacaacaaattgctctgggaaaggaattctctctggtcatgcagatggtaccatcgttaggtatttctttgatgatgaaggctctggagagtcacaggggaagttggttaaccacccgtgtccaccctatgccttggcatgggcaaccaatagcatcgtggctgcaggctgtgatcggaaaattgtagcctatggaaaagaaggtcacatgctacaaacttttgattatagccgtgaccctcaggagcgggagttcaccacagctgtatcaagtcctgggggccagtctgttgtgctaggaagttatgacaggcttcgggtgttcaactggatccctcgaagaagcatctgggaagaggcaaagcccaaggagattaccaatttatacaccatcactgccttggcctggaagcgggatggctcacggctctgtgtgggcacactatgtggtggggtggaacagtttgactgctgcctccgaaggagtatttacaagaacaagtttgagttgacgtatgtgggacctagccaggtgattgtgaagaacctgtcatcaggaacccgagtggtgctcaagtcacactatggctatgaggtggaagaggtgaaaatcctaggaaaggaacgttacttggtggctcacacatcagaaacactgctgctgggggacctgaacactaatcggcttagtgagatagcctggcaaggatctggtggcaatgagaagtatttctttgaaaatgagaatgtatgcatgatcttcaatgccggagagctaaccctggtggaatatgggaataatgacaccctgggttctgtacgcactgaattcatgaacccccacctcatcagtgttcgtattaatgagaggtgtcagcgaggaacagaagataataagaaattggcttatcttattgatattaagactattgctatagtggatctgattggtggctacaacattggcaccgtcagccatgagagccgtgtggattggctggaacttaatgagactggacacaagctcctcttcagggaccggaaacttcgtttgcatctgtatgatattgaaagctgctctaagacaatgatcctcaacttctgctcctatatgcagtgggtcccaggaagtgacgtgctggtagctcagaaccgaaacagtctgtgtgtatggtacaacattgaggcacctgagagagtcaccatgttcactattaggggtgatgttataggtctggagcggggcgggggaaagaccgaggtgatggtgatggaaggtgtgactactgttgcctacacattggatgagggcctcatcgagtttggaacagccattgatgatggcaactacatccgggcaacagccttcttagagactctggaaatgaccccagaaacagaggcaatgtggaaaaccttgagtaaactggcactagaggcaaggcaactacacattgcggagaggtgcttttctgctttgggccaagtagcaaaagctcgattcctgcatgagaccaatgagattgcagatcaagtatcccgggaatatggcggagaaggaacagacttttatcaggtccgagcacgtctagccatgctggaaaagaactacaaactggctgaaatgatctttttggaacagaatgctgtggaggaggccatgggcatgtaccaggagctacaccgttgggatgagtgtatcgctgtggctgaagccaaggggcacccagccctggagaagctacgtcgtagttactaccagtggctgatggacacacagcaagaggagcgagcaggtgaactacaggagagccaaggggatgggctagcagccatcagcctctacctcaaagctgggctccctgccaaagctgctcggctggtgctgacccgagaggaactgctagccaacacagagctggtagaacacatcactgcagcccttatcaagggggaactctacgaaagggcaggtgatctctttgagaagattcacaatccacagaaggccctggagtgctaccgtaaaggcaacgcattcatgaaagcggtagagctggctcgattggccttcccagtggaggtggtgaaactagaggaggcatggggggaccacctggtgcagcagaagcagcttgatgcagccattaatcactacatcgaagccaggtgctccattaaggcaattgaggccgccctgggtgcccgccagtggaagaaggcaatttatatattagatctacaggaccggaacactgcatccaaatactatcctctcgtggcccaacactatgcatccctgcaggagtatgagattgctgaggagctctatactaagggagatcggacaaaagatgccatagacatgtacacccaggctggtcgttgggaacaagcccacaagctggcgatgaaatgcatgagaccagaagatgtgtcagtgctatacatcactcaggcccaggaaatggagaagcagggcaagtaccgtgaggctgaaaggctatatgtgacagtacaagagcctgatcttgccatcaccatgtacaaaaagcacaagttgtatgatgacatgatccgcctggtagggaagcaccatccagatctcctcagtgatacacacctacatctgggcaaggagctggaggctgaaggccgactacaggaggctgagtaccactacctcgaggcccaggaatggaaggcaacagtgaacatgtaccgggccagtgggctttgggaagaggcctacagggtggccagaactcaaggaggggctaatgcccacaaacacgtggcctatctgtgggcaaagagcctgggaggagaggctgcagttagactgcttaataagctgggactcctggaagctgctgttgaccacgctgcagacaattgctcctttgaatttgcgtttgaactctctcggctggccctcaagcacaaaacccccgaggttcatctcaaatatgctatgttcctggaggatgagggtaaattcgaagaggctgaagctgaattcatcagagctggtaaacccaaggaggcagtcctcatgtttgtccataaccaggattgggaggcagctcagcgtgtggctgaggctcacgaccctgacagtgtcgccgaggtgcttgtgggacaggcccggggggccttggaggagaaggactttcagaaagcagaagggctgctgctccgggcccagagaccaggcctggccctcaattattataaggaggctggattatggagtgacgctctgcgcatctgcaaggactatgtgcccagccagctggaggctctgcaggaagaatatgagcgggaagctactaagaagggggccaggggtgtggagggatttgtggaacaagctcgacactgggagcaggctggagagtacagccgtgccgtggactgctacctcaaagtgcgagactctggaaacagcggcctggcggagaagtgctggatgaaggcagctgaactctccatcaagtttctgcctccccaacgtaatatggaagtcgttctggctgtaggaccccagctgattggaattggaaagcacagtgcagctgcagagctctatctgaatctggaccttgtcaaggaagcaatcgatgctttcatcgagggtgaggagtggaacaaggcgaagcgtgtagctaaggagttagatcccaggtatgaagactatgtggaccagcattataaagagttcctcaagaatcagggcaaagtggactcgctggtgggtgtggatgtgatagctgctttggacctgtatgtggagcagggccagtgggacaagtgcattgaaacagctaccaagcagaactacaagattctgcacaagtatgtggctttgtatgcaactcacttgatccgggagggtagctctgcccaggcattggccctgtatgtacagcacggagcccctgctaacccacagaacttcaatatctacaaaaggatcttcactgacatggtgagctctcctggaaccaactgtgccgaggcctatcatagctgggctgatcttcgagatgtcctcttcaacctgtgtgaaaacctggtgaagtccagtgaggcaaactctccagcccatgaggagttcaagacgatgctgctgatcgctcattactatgccacgcgctctgcagcccagagtgtcaaacagctggaaaccgtggctgccaggctttctgtttcactcttgcgtcacacccagctactacctgtagacaaagccttctatgaagcaggcattgctgccaaggtgagctgggacaaggaagggtggggcagataggaggaagttaaaggttggaaaatagaatatcccttctgctctggtagaggaaagctgagtgtagggctgatgttacggaggatgtagtcctcctatgtcttcctggatttttctccctggatcccagagaaatagcattcaagcccagcttgctcactcccatttgcatctggatcccagagaagtagcattcaaacccagcttgttcactcccatttgcaactcttctttgctgcaggcagttggctgggataacatggcattcatcttcctcaatcgctttttggacctgaccgatgaggctgagagagaagaggttcgagactgggtgcttacagtctccatggaccagcggctggagcaggttctgcctcgggatgagcgtggcgcctacgaggcctccctagtggcagcgagcactggtgttcgagccctgccctgccttattacaggataccccattctgaggaacaaaattgaatttaagcggccagggaaggctgctaacaaggacaactggaataaattccttatggccatcaagacctcccacagcccagtgtgccaggacgtgctgaaattcatcagtcagtggtgtggagggctccccagcaccagcttttcctttcagtagttggtagagctgaggaagagttagggcctctccctcattaaagttttataaataa

SEQ ID NO: 81781 - DNA, 5408 bp, Homo sapiens
gaaagacaggtgtgcgtcatgcacttgaagcacctgaggaccctgctgagccctcaggatggagctgcaaaggtgacctgcatggcttggtcccagaacaatgccaaatttgctgtctgcacagtggaccgagtggtcttgctgtatgatgaacatggagaacggagagataaattctccaccaaaccagctgacatgaagtatggcaggaagagctatatggtgaagggcatggctttttctcctgattccactaaaattgccataggacagactgacaacatcatctatgtctacaagattggagaagattggggtgacaagaaagtcatctgcaacaagttcatccagacgagtgctgtcacttgtctgcaatggccggcagaatacatcattgtctttggactggctgaagggaaggttcgtttagcaaacaccaaaactaataaatcatctaccatctatgggacagagtcttacgtggtgtccctgacaacaaattgctctgggaaaggaattctctctggtcatgcagatggtaccatcgttaggtatttctttgatgatgaaggctctggagagtcacaggggaagttggttaaccacccgtgtccaccctatgccttggcatgggcaaccaatagcatcgtggctgcaggctgtgatcggaaaattgtagcctatggaaaagaaggtcacatgctacaaacttttgattatagccgtgaccctcaggagcgggagttcaccacagctgtatcaagtcctgggggccagtctgttgtgctaggaagttatgacaggcttcgggtgttcaactggatccctcgaagaagcatctgggaagaggcaaagcccaaggagattaccaatttatacaccatcactgccttggcctggaagcgggatggctcacggctctgtgtgggcacactatgtggtggggtggaacagtttgactgctgcctccgaaggagtatttacaagaacaagtttgagttgacgtatgtgggacctagccaggtgattgtgaagaacctgtcatcaggaacccgagtggtgctcaagtcacactatggctatgaggtggaagaggtgaaaatcctaggaaaggaacgttacttggtggctcacacatcagaaacactgctgctgggggacctgaacactaatcggcttagtgagatagcctggcaaggatctggtggcaatgagaagtatttctttgaaaatgagaatgtatgcatgatcttcaatgccggagagctaaccctggtggaatatgggaataatgacaccctgggttctgtacgcactgaattcatgaacccccacctcatcagtgttcgtattaatgagaggtgtcagcgaggaacagaagataataagaaattggcttatcttattgatattaagactattgctatagtggatctgattggtggctacaacattggcaccgtcagccatgagagccgtgtggattggctggaacttaatgagactggacacaagctcctcttcagggaccggaaacttcgtttgcatctgtatgatattgaaagctgctctaagacaatgatcctcaacttctgctcctatatgcagtgggtcccaggaagtgacgtgctggtagctcagaaccgaaacagtctgtgtgtatggtacaacattgaggcacctgagagagtcaccatgttcactattaggggtgatgttataggtctggagcggggcgggggaaagaccgaggtgatggtgatggaaggtgtgactactgttgcctacacattggatgagggcctcatcgagtttggaacagccattgatgatggcaactacatccgggcaacagccttcttagagactctggaaatgaccccagaaacagaggcaatgtggaaaaccttgagtaaactggcactagaggcaaggcaactacacattgcggagaggtgcttttctgctttgggccaagtagcaaaagctcgattcctgcatgagaccaatgagattgcagatcaagtatcccgggaatatggcggagaaggaacagacttttatcaggtccgagcacgtctagccatgctggaaaagaactacaaactggctgaaatgatctttttggaacagaatgctgtggaggaggccatgggcatgtaccaggagctacaccgttgggatgagtgtatcgctgtggctgaagccaaggggcacccagccctggagaagctacgtcgtagttactaccagtggctgatggacacacagcaagaggagcgagcaggtgaactacaggagagccaaggggatgggctagcagccatcagcctctacctcaaagctgggctccctgccaaagctgctcggctggtgctgacccgagaggaactgctagccaacacagagctggtagaacacatcactgcagcccttatcaagggggaactctacgaaagggcaggtgatctctttgagaagattcacaatccacagaaggccctggagtgctaccgtaaaggcaacgcattcatgaaagcggtagagctggctcgattggccttcccagtggaggtggtgaaactagaggaggcatggggggaccacctggtgcagcagaagcagcttgatgcagccattaatcactacatcgaagccaggtgctccattaaggcaattgaggccgccctgggtgcccgccagtggaagaaggcaatttatatattagatctacaggaccggaacactgcatccaaatactatcctctcgtggcccaacactatgcatccctgcaggagtatgagattgctgaggagctctatactaagggagatcggacaaaagatgccatagacatgtacacccaggctggtcgttgggaacaagcccacaagctggcgatgaaatgcatgagaccagaagatgtgtcagtgctatacatcactcaggcccaggaaatggagaagcagggcaagtaccgtgaggctgaaaggctatatgtgacagtacaagagcctgatcttgccatcaccatgtacaaaaagcacaagttgtatgatgacatgatccgcctggtagggaagcaccatccagatctcctcagtgatacacacctacatctgggcaaggagctggaggctgaaggccgactacaggaggctgagtaccactacctcgaggcccaggaatggaaggcaacagtgaacatgtaccgggccagtgggctttgggaagaggcctacagggtggccagaactcaaggaggggctaatgcccacaaacacgtggcctatctgtgggcaaagagcctgggaggagaggctgcagttagactgcttaataagctgggactcctggaagctgctgttgaccacgctgcagacaattgctcctttgaatttgcgtttgaactctctcggctggccctcaagcacaaaacccccgaggttcatctcaaatatgctatgttcctggaggatgagggtaaattcgaagaggctgaagctgaattcatcagagctggtaaacccaaggaggcagtcctcatgtttgtccataaccaggattgggaggcagctcagcgtgtggctgaggctcacgaccctgacagtgtcgccgaggtgcttgtgggacaggcccggggggccttggaggagaaggactttcagaaagcagaagggctgctgctccgggcccagagaccaggcctggccctcaattattataaggaggctggattatggagtgacgctctgcgcatctgcaaggactatgtgcccagccagctggaggctctgcaggaagaatatgagcgggaagctactaagaagggggccaggggtgtggagggatttgtggaacaagctcgacactgggagcaggctggagagtacagccgtgccgtggactgctacctcaaagtgcgagactctggaaacagcggcctggcggagaagtgctggatgaaggcagctgaactctccatcaagtttctgcctccccaacgtaatatggaagtcgttctggctgtaggaccccagctgattggaattggaaagcacagtgcagctgcagagctctatctgaatctggaccttgtcaaggaagcaatcgatgctttcatcgagggtgaggagtggaacaaggcgaagcgtgtagctaaggagttagatcccaggtatgaagactatgtggaccagcattataaagagttcctcaagaatcagggcaaagtggactcgctggtgggtgtggatgtgatagctgctttggacctgtatgtggagcagggccagtgggacaagtgcattgaaacagctaccaagcagaactacaagattctgcacaagtatgtggctttgtatgcaactcacttgatccgggagggtagctctgcccaggcattggccctgtatgtacagcacggagcccctgctaacccacagaacttcaatatctacaaaaggatcttcactgacatggtgagctctcctggaaccaactgtgccgaggcctatcatagctgggctgatcttcgagatgtcctcttcaacctgtgtgaaaacctggtgaagtccagtgaggcaaactctccagcccatgaggagttcaagacgatgctgctgatcgctcattactatgccacgcgctctgcagcccagagtgtcaaacagctggaaaccgtggctgccaggctttctgtttcactcttgcgtcacacccagctactacctgtagacaaagccttctatgaagcaggcattgctgccaaggcagttggctgggataacatggcattcatcttcctcaatcgctttttggacctgaccgatgcaatcgaggaagggactctagatggccttgaccactctgattttcaggatacagacattccctttgaggtgccactcccagctaagcagcatgtaccggaggctgagagagaagaggttcgagactgggtgcttacagtctccatggaccagcggctggagcaggttctgcctcgggatgagcgtggcgcctacgaggcctccctagtggcagcgagcactggtgttcgagccctgccctgccttattacaggataccccattctgaggaacaaaattgaatttaagcggccagggaaggctgctaacaaggacaactggaataaattccttatggccatcaagacctcccacagcccagtgtgccaggacgtgctgaaattcatcagtcagtggtgtggagggctccccagcaccagcttttcctttcagtagttggtagagctgaggaagagttagggcctctccctcattaaagttttataaataaaaaacaccaagaaaaaaaaaaaccgggtttttttggggggcaaaaaagaaggggggtattttccgcccctttaaagggaatccgg

SEQ ID NO: 81782 - DNA, 5900 bp, Homo sapiens
gaaagacaggtgtgcgtcatgcacttgaagcacctgaggaccctgctgagccctcaggatggagctgcaaaggtgacctgcatggcttggtcccagaacaatgccaaatttgctgtctgcacagtggaccgagtggtcttgctgtatgatgaacatggagaacggagagataaattctccaccaaaccagctgacatgaagtatggcaggaagagctatatggtgaagggcatggctttttctcctgattccactaaaattgccataggacagactgacaacatcatctatgtctacaagattggagaagattggggtgacaagaaagtcatctgcaacaagttcatccagacgagtgctgtcacttgtctgcaatggccggcagaatacatcattgtctttggactggctgaagggaaggttcgtttagcaaacaccaaaactaataaatcatctaccatctatgggacagagtcttacgtggtgtccctgacaacaaattgctctgggaaaggaattctctctggtcatgcagatggtaccatcgttaggtatttctttgatgatgaaggctctggagagtcacaggggaagttggttaaccacccgtgtccaccctatgccttggcatgggcaaccaatagcatcgtggctgcaggctgtgatcggaaaattgtagcctatggaaaagaaggtcacatgctacaaacttttgattatagccgtgaccctcaggagcgggagttcaccacagctgtatcaagtcctgggggccagtctgttgtgctaggaagttatgacaggcttcgggtgttcaactggatccctcgaagaagcatctgggaagaggcaaagcccaaggagattaccaatttatacaccatcactgccttggcctggaagcgggatggctcacggctctgtgtgggcacactatgtggtggggtggaacagtttgactgctgcctccgaaggagtatttacaagaacaagtttgagttgacgtatgtgggacctagccaggtgattgtgaagaacctgtcatcaggaacccgagtggtgctcaagtcacactatggctatgaggtggaagaggtgaaaatcctaggaaaggaacgttacttggtggctcacacatcagaaacactgctgctgggggacctgaacactaatcggcttagtgagatagcctggcaaggatctggtggcaatgagaagtatttctttgaaaatgagaatgtatgcatgatcttcaatgccggagagctaaccctggtggaatatgggaataatgacaccctgggttctgtacgcactgaattcatgaacccccacctcatcagtgttcgtattaatgagaggtgtcagcgaggaacagaagataataagaaattggcttatcttattgatattaagactattgctatagtggatctgattggtggctacaacattggcaccgtcagccatgagagccgtgtggattggctggaacttaatgagactggacacaagctcctcttcagggaccggaaacttcgtttgcatctgtatgatattgaaagctgctctaagacaatgatcctcaacttctgctcctatatgcagtgggtcccaggaagtgacgtgctggtagctcagaaccgaaacagtctgtgtgtatggtacaacattgaggcacctgagagagtcaccatgttcactattaggggtgatgttataggtctggagcggggcgggggaaagaccgaggtgatggtgatggaaggtgtgactactgttgcctacacattggatgagggcctcatcgagtttggaacagccattgatgatggcaactacatccgggcaacagccttcttagagactctggaaatgaccccagaaacagaggcaatgtggaaaaccttgagtaaactggcactagaggcaaggcaactacacattgcggagaggtgcttttctgctttgggccaagtagcaaaagctcgattcctgcatgagaccaatgagattgcagatcaagtatcccgggaatatggcggagaaggaacagacttttatcaggtccgagcacgtctagccatgctggaaaagaactacaaactggctgaaatgatctttttggaacagaatgctgtggaggaggccatgggcatgtaccaggagctacaccgttgggatgagtgtatcgctgtggctgaagccaaggggcacccagccctggagaagctacgtcgtagttactaccagtggctgatggacacacagcaagaggagcgagcaggtgaactacaggagagccaaggggatgggctagcagccatcagcctctacctcaaagctgggctccctgccaaagctgctcggctggtgctgacccgagaggaactgctagccaacacagagctggtagaacacatcactgcagcccttatcaagggggaactctacgaaagggcaggtgatctctttgagaagattcacaatccacagaaggccctggagtgctaccgtaaaggcaacgcattcatgaaagcggtagagctggctcgattggccttcccagtggaggtggtgaaactagaggaggcatggggggaccacctggtgcagcagaagcagcttgatgcagccattaatcactacatcgaagccaggtgctccattaaggcaattgaggccgccctgggtgcccgccagtggaagaaggcaatttatatattagatctacaggaccggaacactgcatccaaatactatcctctcgtggcccaacactatgcatccctgcaggagtatgagattgctgaggagctctatactaagggagatcggacaaaagatgccatagacatgtacacccaggctggtcgttgggaacaagcccacaagctggcgatgaaatgcatgagaccagaagatgtgtcagtgctatacatcactcaggcccaggaaatggagaagcagggcaagtaccgtgaggctgaaaggctatatgtgacagtacaagagcctgatcttgccatcaccatgtacaaaaagcacaagttgtatgatgacatgatccgcctggtagggaagcaccatccagatctcctcagtgatacacacctacatctgggcaaggagctggaggctgaaggccgactacaggaggctgagtaccactacctcgaggcccaggaatggaaggcaacagtgaacatgtaccgggccagtgggctttgggaagaggcctacagggtggccagaactcaaggaggggctaatgcccacaaacacgtggcctatctgtgggcaaagagcctgggaggagaggctgcagttagactgcttaataagctgggactcctggaagctgctgttgaccacgctgcagacaattgctcctttgaatttgcgtttgaactctctcggctggccctcaagcacaaaacccccgaggttcatctcaaatatgctatgttcctggaggatgagggtaaattcgaagaggctgaagctgaattcatcagagctggtaaacccaaggaggcagtcctcatgtttgtccataaccaggattgggaggcagctcagcgtgtggctgaggctcacgaccctgacagtgtcgccgaggtgcttgtgggacaggcccggggggccttggaggagaaggactttcagaaagcagaagggctgctgctccgggcccagagaccaggcctggccctcaattattataaggaggctggattatggagtgacgctctgcgcatctgcaaggactatgtgcccagccagctggaggctctgcaggaagaatatgagcgggaagctactaagaagggggccaggggtgtggagggatttgtggaacaagctcgacactgggagcaggctggagagtacagccgtgccgtggactgctacctcaaagtgcgagactctggaaacagcggcctggcggagaagtgctggatgaaggcagctgaactctccatcaagtttctgcctccccaacgtaatatggaagtcgttctggctgtaggaccccagctgattggaattggaaagcacagtgcagctgcagagctctatctgaatctggaccttgtcaaggaagcaatcgatgctttcatcgagggtgaggagtggaacaaggcgaagcgtgtagctaaggagttagatcccaggtatgaagactatgtggaccagcattataaagagttcctcaagaatcagggcaaagtggactcgctggtgggtgtggatgtgatagctgctttggacctgtatgtggagcagggccagtgggacaagtgcattgaaacagctaccaagcagaactacaagattctgcacaagtatgtggctttgtatgcaactcacttgatccgggagggtagctctgcccaggcattggccctgtatgtacagcacggagcccctgctaacccacagaacttcaatatctacaaaaggatcttcactgacatggtgagctctcctggaaccaactgtgccgaggcctatcatagctgggctgatcttcgagatgtcctcttcaacctgtgtgaaaacctggtgaagtccagtgaggcaaactctccagcccatgaggagttcaagacgatgctgctgatcgctcattactatgccacgcgctctgcagcccagagtgtcaaacagctggaaaccgtggctgccaggctttctgtttcactcttgcgtcacacccagctactacctgtagacaaagccttctatgaagcaggcattgctgccaaggtgagctgggacaaggaagggtggggcagataggaggaagttaaaggttggaaaatagaatatcccttctgctctggtagaggaaagctgagtgtagggctgatgttacggaggatgtagtcctcctatgtcttcctggatttttctccctggatcccagagaaatagcattcaagcccagcttgctcactcccatttgcatctggatcccagagaagtagcattcaaacccagcttgttcactcccatttgcaactcttctttgctgcaggcagttggctgggataacatggcattcatcttcctcaatcgctttttggacctgaccgatgcaatcgaggaagggactctagatggccttgaccactctgattttcaggatacagacattccctttgaggtgccactcccagctaagcagcatgtaccggaggctgagagagaagaggttcgagactgggtgcttacagtctccatggaccagcggctggagcaggttctgcctcgggatgagcgtggcgcctacgaggcctccctagtggcagcgagcactggtgttcgagccctgccctgccttattacaggtatagaagcctacagcaccccagatcctgtggtgggtagaaagcagcaggatcaataaacttaattttactaggattcagtaaagggtacaaaagacaggactgtgctttctaccccccaggctgctcctcatttttccctcctcaatctctctcaaaccccagttcatcattttttcttcctccacaggataccccattctgaggaacaaaattgaatttaagcggccagggaaggctgctaacaaggacaactggaataaattccttatggccatcaaggttagagaggaggacttggagaatgaaggcagagagggcagcactaaaaaaagaaaaaaaaacaagtctgggtgcagtggctcatacctttaatcccagcactttgggaggccaagacctcccacagcccagtgtgccaggacgtgctgaaattcatcagtcagtggtgtggagggctccccagcaccagcttttcctttcagtagttggtagagctgaggaagagttagggcctctccctcattaaagttttataaataa

SEQ ID NO: 81783 - DNA, 5147 bp, Homo sapiens
gaaagacaggtgtgcgtcatgcacttgaagcacctgaggaccctgctgagccctcaggatggagctgcaaaggtgacctgcatggcttggtcccagaacaatgccaaatttgctgtctgcacagtggaccgagtggtcttgctgtatgatgaacatggagaacggagagataaattctccaccaaaccagctgacatgaagtatggcaggaagagctatatggtgaagggcatggctttttctcctgattccactaaaattgccataggacagactgacaacatcatctatgtctacaagattggagaagattggggtgacaagaaagtcatctgcaacaagttcatccagacgagtgctgtcacttgtctgcaatggccggcagaatacatcattgtctttggactggctgaagggaaggttcgtttagcaaacaccaaaactaataaatcatctaccatctatgggacagagtcttacgtggtgtccctgacaacaaattgctctgggaaaggaattctctctggtcatgcagatggtaccatcgttaggtatttctttgatgatgaaggctctggagagtcacaggggaagttggttaaccacccgtgtccaccctatgccttggcatgggcaaccaatagcatcgtggctgcaggctgtgatcggaaaattgtagcctatggaaaagaaggtcacatgctacaaacttttgattatagccgtgaccctcaggagcgggagttcaccacagctgtatcaagtcctgggggccagtctgttgtgctaggaagttatgacaggcttcgggtgttcaactggatccctcgaagaagcatctgggaagaggcaaagcccaaggagattaccaatttatacaccatcactgccttggcctggaagcgggatggctcacggctctgtgtgggcacactatgtggtggggtggaacagtttgactgctgcctccgaaggagtatttacaagaacaagtttgagttgacgtatgtgggacctagccaggtgattgtgaagaacctgtcatcaggaacccgagtggtgctcaagtcacactatggctatgaggtggaagaggtgaaaatcctaggaaaggaacgttacttggtggctcacacatcagaaacactgctgctgggggacctgaacactaatcggcttagtgagatagcctggcaaggatctggtggcaatgagaagtatttctttgaaaatgagaatgtatgcatgatcttcaatgccggagagctaaccctggtggaatatgggaataatgacaccctgggttctgtacgcactgaattcatgaacccccacctcatcagtgttcgtattaatgagaggtgtcagcgaggaacagaagataataagaaattggcttatcttattgatattaagactattgctatagtggatctgattggtggctacaacattggcaccgtcagccatgagagccgtgtggattggctggaacttaatgagactggacacaagctcctcttcagggaccggaaacttcgtttgcatctgtatgatattgaaagctgctctaagacaatgatcctcaacttctgctcctatatgcagtgggtcccaggaagtgacgtgctggtagctcagaaccgaaacagtctgtgtgtatggtacaacattgaggcacctgagagagtcaccatgttcactattaggggtgatgttataggtctggagcggggcgggggaaagaccgaggtgatggtgatggaaggtgtgactactgttgcctacacattggatgagggcctcatcgagtttggaacagccattgatgatggcaactacatccgggcaacagccttcttagagactctggaaatgaccccagaaacagaggcaatgtggaaaaccttgagtaaactggcactagaggcaaggcaactacacattgcggagaggtgcttttctgctttgggccaagtagcaaaagctcgattcctgcatgagaccaatgagattgcagatcaagtatcccgggaatatggcggagaaggaacagacttttatcaggtccgagcacgtctagccatgctggaaaagaactacaaactggctgaaatgatctttttggaacagaatgctgtggaggaggccatgggcatgtaccaggagctacaccgttgggatgagtgtatcgctgtggctgaagccaaggggcacccagccctggagaagctacgtcgtagttactaccagtggctgatggacacacagcaagaggagcgagcaggtgaactacaggagagccaaggggatgggctagcagccatcagcctctacctcaaagctgggctccctgccaaagctgctcggctggtgctgacccgagaggaactgctagccaacacagagctggtagaacacatcactgcagcccttatcaagggggaactctacgaaagggcaggtgatctctttgagaagattcacaatccacagaaggccctggagtgctaccgtaaaggcaacgcattcatgaaagcggtagagctggctcgattggccttcccagtggaggtggtgaaactagaggaggcatggggggaccacctggtgcagcagaagcagcttgatgcagccattaatcactacatcgaagccaggtgctccattaaggcaattgaggccgccctgggtgcccgccagtggaagaaggcaatttatatattagatctacaggaccggaacactgcatccaaatactatcctctcgtggcccaacactatgcatccctgcaggagtatgagattgctgaggagctctatactaagggagatcggacaaaagatgccatagacatgtacacccaggctggtcgttgggaacaagcccacaagctggcgatgaaatgcatgagaccagaagatgtgtcagtgctatacatcactcaggcccaggaaatggagaagcagggcaagtaccgtgaggctgaaaggctatatgtgacagtacaagagcctgatcttgccatcaccatgtacaaaaagcacaagttgtatgatgacatgatccgcctggtagggaagcaccatccagatctcctcagtgatacacacctacatctgggcaaggagctggaggctgaaggccgactacaggaggctgagtaccactacctcgaggcccaggaatggaaggcaacagtgaacatgtaccgggccagtgggctttgggaagaggcctacagggtggccagaactcaaggaggggctaatgcccacaaacacgtggcctatctgtgggcaaagagcctgggaggagaggctgcagttagactgcttaataagctgggactcctggaagctgctgttgaccacgctgcagacaattgctcctttgaatttgcgtttgaactctctcggctggccctcaagcacaaaacccccgaggttcatctcaaatatgctatgttcctggaggatgagggtaaattcgaagaggctgaagctgaattcatcagagctggtaaacccaaggaggcagtcctcatgtttgtccataaccaggattgggaggcagctcagcgtgtggctgaggctcacgaccctgacagtgtcgccgaggtgcttgtgggacaggcccggggggccttggaggagaaggactttcagaaagcagaagggctgctgctccgggcccagagaccaggcctggccctcaattattataaggaggctggattatggagtgacgctctgcgcatctgcaaggactatgtgcccagccagctggaggctctgcaggaagaatatgagcgggaagctactaagaagggggccaggggtgtggagggatttgtggaacaagctcgacactgggagcaggctggagagtacagccgtgccgtggactgctacctcaaagtgcgagactctggaaacagcggcctggcggagaagtgctggatgaaggcagctgaactctccatcaagtttctgcctccccaacgtaatatggaagtcgttctggctgtaggaccccagctgattggaattggaaagcacagtgcagctgcagagctctatctgaatctggaccttgtcaaggaagcaatcgatgctttcatcgagggtgaggagtggaacaaggcgaagcgtgtagctaaggagttagatcccaggtatgaagactatgtggaccagcattataaagagttcctcaagaatcagggcaaagtggactcgctggtgggtgtggatgtgatagctgctttggacctgtatgtggagcagggccagtgggacaagtgcattgaaacagctaccaagcagaactacaagattctgcacaagtatgtggctttgtatgcaactcacttgatccgggagggtagctctgcccaggcattggccctgtatgtacagcacggagcccctgctaacccacagaacttcaatatctacaaaaggatcttcactgacatggtgagctctcctggaaccaactgtgccgaggcctatcatagctgggctgatcttcgagatgtcctcttcaacctgtgtgaaaacctggtgaagtccagtgaggcaaactctccagcccatgaggagttcaagacgatgctgctgatcgctcattactatgccacgcgctctgcagcccagagtgtcaaacagctggtgagatgtagggggtcgaaggaacactcagtcagaagggctcatctgcaaatgtataaagctgaattgattcacgttctggattcttcagcttgggctcttgaatctccccacctgtctttcagcttctcttctgtctaaacaaatctttagcccttgctgaggttttcttcttccgacctttttagggctctgtgcccacacagcctcagcctcattatgtttaaacatccaaatcccatgatttctttattcacctcttataatgtacacatattctgggcttatttttgactgttcactgtatatttatttcatgtacttggatgatagaattctagaagtggaaagaaccttagaaacaatctaggtgggtgggtgtggtggctcacccctgtaatcccagcactttgggaggccgaggcgggtggatcacttgaggccaggagttcgagaccagcctggccaac

SEQ ID NO: 81784 - DNA, 1857 bp, Homo sapiens
gaaagacaggtgtgcgtcatgcacttgaagcacctgaggaccctgctgagccctcaggatggagctgcaaaggtgacctgcatggcttggtcccagaacaatgccaaatttgctgtctgcacagtggaccgagtggtcttgctgtatgatgaacatggagaacggagagataaattctccaccaaaccagctgacatgaagtatggcaggaagagctatatggtgaagggcatggctttttctcctgattccactaaaattgccataggacagactgacaacatcatctatgtctacaagattggagaagattggggtgacaagaaagtcatctgcaacaagttcatccagacgagtgctgtcacttgtctgcaatggccggcagaatacatcattgtctttggactggctgaagggaaggttcgtttagcaaacaccaaaactaataaatcatctaccatctatgggacagagtcttacgtggtgtccctgacaacaaattgctctgggaaaggaattctctctggtcatgcagatggtaccatcgttaggtatttctttgatgatgaaggctctggagagtcacaggggaagttggttaaccacccgtgtccaccctatgccttggcatgggcaaccaatagcatcgtggctgcaggctgtgatcggaaaattgtagcctatggaaaagaaggtcacatgctacaaacttttgattatagccgtgaccctcaggagcgggagttcaccacagctgtatcaagtcctgggggccagtctgttgtgctaggaagttatgacaggcttcgggtgttcaactggatccctcgaagaagcatctgggaagaggcaaagcccaaggagattaccaatttatacaccatcactgccttggcctggaagcgggatggctcacggctctgtgtgggcacactatgtggtggggtggaacagtttgactgctgcctccgaaggagtatttacaagaacaagtttgagttgacgtatgtgggacctagccaggtgattgtgaagaacctgtcatcaggaacccgagtggtgctcaagtcacactatggctatgaggtggaagaggtgaaaatcctaggaaaggaacgttacttggtggctcacacatcagaaacactgctgctgggggacctgaacactaatcggcttagtgagatagcctggcaaggatctggtggcaatgagaagtatttctttgaaaatgagaatgtatgcatgatcttcaatgccggagagctaaccctggtggaatatgggaataatgacaccctgggttctgtacgcactgaattcatgaacccccacctcatcagtgttcgtattaatgagaggtgtcagcgaggaacagaagataataagaaattggcttatcttattgatattaagactattgctatagtggatctgattggtggctacaacattggcaccgtcagccatgagagccgtgtggattggctggaacttaatgagactggacacaagctcctcttcagggaccggaaacttcgtttgcatctgtatgatattgaaagctgctctaagacaatgatcctcaacttctgctcctatatgcagtgggtcccaggaagtgacgtgctggtagctcagaaccgaaacagtctgtgtgtatggtacaacattgaggcacctgagagagtcaccatgttcactattagggtatgttggacactaggggccctcagatgtggtattgagctgattaattagagccatgaggagactctgaaggctacttggttttctgtgtccaccacccttaatctctgtgatagaattggcaaataaagcttagacttatggacc

SEQ ID NO: 81785 - DNA, 535 bp, Homo sapiens
ctgaccttcacctaacttaaaattcctgggatgtagatctttgttctatgggtcatctcttacttgaccagagttaggatataccagctcagcagaaagcaggtcagtaagctttgaaatgcagcatgaacctgagtggtgggttagctcaccacatctcaccattaggaaaatggtcaaaagcaggagacaaccccacatccccttgtaattgtgttacctgccttttctttcttcagttgcatctgtatgatattgaaagctgctctaagacaatgatcctcaacttctgctcctatatgcagtgggtcccaggaagtgacgtgctggtagctcagaaccgaaacagtctgtgtgtatggtacaacattgaggcacctgagagagtcaccatgttcactattagggtatgttggacactaggggccctcagatgtggtattgagctgattaattagagccatgaggagactctgaaggctacttggttttctgtgtccaccacccttaatctctgtgatagaattggcaaata

SEQ ID NO: 81786 - DNA, 6453 bp, Homo sapiens
ggcacgaggtccccgcggcggcggcggctgcccagtgacagcggcggcggtgccaggtcggccgtggtagcgtagggttgcgcggcccggaaacgcagagccggccaaagagcggcgcgacgtgagccggggccgtgcgcgaagagacctcgcgggcgcggagcgaaaggccggcgtgagtgagcgcggagacagtggccgccggcggcccaacccgtctatcccttcggccgccgccggcatgagccacatccagatcccgccggggctcacggagctgctgcagggctacacggtggaggtgctgcgacagcagccgcctgacctcgtcgaattcgcagtggagtacttcacccgcctgcgcgaggcccgcgccccagcctcagtcctgcccgccgccaccccacgccagagcctgggccaccccccgccagaacccggcccggaccgtgtcgccgacgccaaaggggacagcgagtcggaggaggacgaggacttggaagttccagttcctagcagatttaatagacgagtatcagtctgtgctgagacctataaccctgatgaggaagaggaagatacagatccaagggtgattcatcctaaaactgatgaacagagatgcagacttcaggaagcttgcaaagatattctccttttcaaaaatcttgatcaggaacagctttctcaagttctcgatgccatgtttgaaaggatagtcaaagctgatgagcatgtcattgaccaaggagatgatggagacaacttttatgtcatagaacggggaacttatgacattttagtaacaaaagataatcaaacccgctctgttggtcaatatgacaaccgtggcagttttggagaactagctctgatgtacaacaccccgagagctgctaccattgttgctacctcagaaggctccctttggggactggaccgggtgacttttagaagaatcatagtgaaaaataatgcaaagaagaggaagatgtttgaatcatttattgagtctgtgcccctccttaaatcactagaggtgtcagaacgaatgaagattgtggatgtaataggagagaagatctataaggatggagaacgcataatcactcagggtgaaaaggctgatagcttttacatcatagagtctggcgaagtgagcatcttgattagaagcaggactaaatcaaacaaggatggtgggaaccaggaggtcgagattgcccgctgccataaggggcagtactttggagagcttgccctggtcaccaacaaacccagagctgcctcagcttatgcagttggagatgtcaaatgcttagttatggatgtacaagcattcgagaggcttctggggccctgcatggacatcatgaagaggaacatctcacactatgaggaacagctggtgaagatgtttggctccagcgtggatctgggcaacctcgggcagtaggtgtgccacaccccagagccttcttagtgtgacaccaaaaccttctggtcagccacagaacacatacagaaaacagacatgacagaactgttcctgccgttgccgccactgctgccattgctgtggttatgggcatttagaaaacttgaaagtcagcactaaaggatgggcagaggttcaacccacacctccactttgcttctgaaggcccattcattagaccacttgtaaagattactccaacccagtttttatatctttggttcaaaacggcatgtctctccaacaatttaagtgcctgatacaaagtccaaagtataaacatgctcctttcctctcttgctgctactcttgcttttggaagttaccacagggtctgcagaaacctgttgtataactgtagacactctctaatggttctcaaaggaggaaatgtagccttcagtctcctcatttgtcctttgaggaagtccacatttgttcacagttgcagcctttggttttacagtgggaaatggtggtggatgatatggacatatgtagcccagtggcattgtactttctgctgacagctgcacacattacagctgtctccaaacccacagtgatgcttagggaaagaccctgctcaggacccagcaggtcagcaccccagagcagactgataggtccgtgggacccatgttagagcagaaaatttgggctcagcacattttactgttagtagagagccaggaaacgttttctgggttggggattttgtgggattttttaatttttttagtaggttttgtttaacctctgtgcagtttgtatgaatgaattgctatacatttataaggagccagggtctggagggttgctatcactttgtccagcccaaataccttcctgggcaactcctaccatttgtttgcagttgcctctactagctgatggcagtatgctggaaagaggttgtactataaagagagttctttccttctactccagagttgttgtgtagctttgccattgaaccgatcaatttttaaactctttaaagaagcagcagctatttttttgaaattaaagaaaattctcaggccaggctcaatggctcatgcctataattgtagtgctttgggaggctgagctgggaggatcgcttaagaccagcctaggcaacagagtgagatcctgtctctacaaaaacaaaaattttttttttgttttctttttgagacggagtttcgctcttgttgcccaggctggagtgcaatggtgcggtcttggctcaccgcaacctccgcctcccagattaaagtgattctcctgcctcaacctcctgagtagctgggattgcaggcatgcgccaccatgccgggcgaattttgtatttttaatagagacggggtttctctgtgttggtcaggctggtctcaaactcccaacctcaggtgatccgcccacctcagcctctcagagtgctgggattacagatgtgagccactgcacctggcaaaaaaaaaatttttttttaatttgtcaggtgtggtgatgcatgcatgtagtcccaaatacttaggaggctgaggtggaaggatcacttgagcccaggaggtcaaggcaacagtgagctgtgatcatgccactgcactccagtctgggtgacacagtgagaccctgtctcttaaaaaaaaaaaaagaaagaaaaaaaattattctttaggtaatttcacttggacatattcatgtatatggagtttgtcagctgactcaggcatttaccctaaagatcaaatctgttttcaaaaattggcattggccaggcacggtgacccacacctgtaatcccagcactttgggaggccgaggcgggcggatcacgaggtcaggggttcaagaccagcctggccaacatagtgaaaccccgtctctactaaaaatacaaaaaattagctgggcatggtggtgggcgcctgtaatcccagctacttgagaggctcaggcaggagaatcgcttgaacctgggagtggaggttgcagtgagccgagattgcaccattgtattccaccccgggtgacagtgcaagactccatctcaaaaaaaaaaaaaaaatttggcatcatttacaatttcatagaattactgtgaaggcctttctagttgagatgttggggtatttgggattctaattgttaaccccagaagaaggtaatttagcttgtatttatttaaaacccatttagccttttacttatatctggtagaattccagtgatcatcctaataaggtatatttcagaataatttttttttccttcagaataacttagaatcagatgctataagggctcctaggagcagtgtgaaatttccgtaaagataaatttgaatgttgtaaccaagtttatattaaaccaagaggccatttccaatatgattttttgtttctttttaacttgttaagtccctaagagattacatgctagggcttgagtcatttctattgtagataatgatggcccacacagtcaccttcaactatccacataagctaggctttccgcttttgccacggacagtgtgaccaagatatttccagagtaaataacccaccacaaccttggtaattcctcttttcttcttaagctccaggaagcgaaagcagaaggactcttttcagactgccctctgtagcctacattgcagctttccaaaacaggcagctagcactgggaaagcccatgtggtgaccccatatttttctgaggttcttcttttccatggtgttactttattatcagaaagtaaattcagaaaacaggtcttgcccttagcagacaagaaccacaccagtttcttgtaaaggtaacggatacattgggattcaggagtgacacagaggtccagccccagaacttgtaaggattttgtttgaacactgagcagatgcctcctccctgccacccatcacactagttagggctggccatgaattctatgccagagtcactcctgcagtctgctagggatgggccttcttatcccactctcgcacacatcccagtctagtctttgccttcacagagtcctccttgacacccctgacttaatgatagttgctgttttggagtagaattgatcaggtttaagtcatcctgctcaggttgggcatagtggctcatgcctgtaatctcagcactttgggaagccaaagtgggaggattgcttgagcccaggagttccaaaccatcctgggcaacagagggagaccctgtctctaccaagaaaaaaaaaaaaaaaaaaaagttaaaaaaacaattagctggacctggtggtgcacactcagtaggctgaggtgaaaggattcctttaacctgggagactgaagctgcagtgagccatgatcgtgccactgcactccagtctgggggacaaagtgggaccctatctcaaaaaaaaaaaaaaaaagtcatcctcctccaactactgattgacatatggatcatcagttcagaccctcactgcatacaggatccctagagggttctatttaatagcttgaggaagggagactttaaaaggacgtgtgtgagtgaaataggatatagccattaccacggtgccaggacctgacagcgttccaattctttttgcagcatggggaatcaaaggtggcatgccaagttcaactcagggctgaggtatccacattgtccacatcaggcaagccctgcactgacggttgagcctcatggagaggagcatgtgttggaaagagatccctttgttaactgttttgtggtgttctcttcaatgaattagagctcatgccccttttctggctttgctgttgattttggatggtagagaatattcctgagagccttccttttggcccccagcttatgccacccactctcttctcttggttgaattctctgaaggaaaggttcatgtgctattgtcctgttagtcaatagtcttcatatataattgtgttacatatattgctgtagactctcagaaatcagggtagagcttttcctttgagcagtttaatgagtgaattcagcagcaaagtcgcaagaaatggttctccagccaggagaggttatgtttatcctctgattgcccgttttctctgcacacagtgatatcgtattcagtgagaggtgctgttggcacccagcagcaccctgggcacacagcatttcatgtcatgtcacagtgtacaagctaccctctaattcagaaagaagagcattttgcacagagaaaaataaaaagatccatgaatgtcatcttttatcttttattttcagttggctgatgttggaatttttgttcttgtcatgaacttgtaaaccaatcttgccaagatacaagttgttttggtttttcactacaatgacctcttgttcctcctgtcttgactgctgacgttcctcaatgattctattgtctattttatgggaagcagccttcccataggtttccttttacacactgcagggctatctttatactttaaaaaaaacaacaaaaaaaaaaaaggacaagaactgtcactaacctcatggaggggtttgcgtaaaaccatttagcccaccttgagcaaagggtagattccgtgttgtttttttaagctcactgtaataaaatagatctaattcagcattattgtgctacctcaaaggtaaaaaatgttttaaggtcttcttttggtcctgagttctatatacagtgtttgaaatgtctttcatttggaattattttttaaattcttggagtgaattttattttaatctgttttaatcttgtattttaatctcagaagaataagtgattgaaacgtgatcaattcttgctctgtggtgttaaacatataatgaacagtcattaagaattaagtcactgtttgccataaacaaggttgatgttctttttgttgttgttaaggaaaccctagggctcggctttactcttgattaataaaggctgacaaatc

SEQ ID NO: 81787 - DNA, 6387 bp, Homo sapiens
ggcacgaggtccccgcggcggcggcggctgcccagtgacagcggcggcggtgccaggtcggccgtggtagcgtagggttgcgcggcccggaaacgcagagccggccaaagagcggcgcgacgtgagccggggccgtgcgcgaagagacctcgcgggcgcggagcgaaaggccggcgtgagtgagcgcggagacagtggccgccggcggcccaacccgtctatcccttcggccgccgccggcatgagccacatccagatcccgccggggctcacggagctgctgcagggctacacggtggaggtgctgcgacagcagccgcctgacctcgtcgaattcgcagtggagtacttcacccgcctgcgcgaggcccgcgccccagcctcagtcctgcccgccgccaccccacgccagagcctgggccaccccccgccagaacccggcccggaccgtgtcgccgacgccaaaggggacagcgagtcggaggaggacgaggacttggaagttccagttcctagcagatttaatagacgagtatcagtctgtgctgagacctataaccctgatgaggaagaggaagatacagatccaagggtgattcatcctaaaactgatgaacagagatgcagacttcaggaagcttgcaaagatattctccttttcaaaaatcttgatcaggaacagctttctcaagttctcgatgccatgtttgaaaggatagtcaaagctgatgagcatgtcattgaccaaggagatgatggagacaacttttatgtcatagaacggggaacttatgacattttagtaacaaaagataatcaaacccgctctgttggtcaatatgacaaccgtggcagttttggagaactagctctgatgtacaacaccccgagagctgctaccattgttgctacctcagaaggctccctttggggactggaccgggtgacttttagaagaatcatagtgaaaaataatgcaaagaagaggaagatgtttgaatcatttattgagtctgtgcccctccttaaatcactagaggtgtcagaacgaatgaagattgtggatgtaataggagagaagatctataaggatggagaacgcataatcactcagactaaatcaaacaaggatggtgggaaccaggaggtcgagattgcccgctgccataaggggcagtactttggagagcttgccctggtcaccaacaaacccagagctgcctcagcttatgcagttggagatgtcaaatgcttagttatggatgtacaagcattcgagaggcttctggggccctgcatggacatcatgaagaggaacatctcacactatgaggaacagctggtgaagatgtttggctccagcgtggatctgggcaacctcgggcagtaggtgtgccacaccccagagccttcttagtgtgacaccaaaaccttctggtcagccacagaacacatacagaaaacagacatgacagaactgttcctgccgttgccgccactgctgccattgctgtggttatgggcatttagaaaacttgaaagtcagcactaaaggatgggcagaggttcaacccacacctccactttgcttctgaaggcccattcattagaccacttgtaaagattactccaacccagtttttatatctttggttcaaaacggcatgtctctccaacaatttaagtgcctgatacaaagtccaaagtataaacatgctcctttcctctcttgctgctactcttgcttttggaagttaccacagggtctgcagaaacctgttgtataactgtagacactctctaatggttctcaaaggaggaaatgtagccttcagtctcctcatttgtcctttgaggaagtccacatttgttcacagttgcagcctttggttttacagtgggaaatggtggtggatgatatggacatatgtagcccagtggcattgtactttctgctgacagctgcacacattacagctgtctccaaacccacagtgatgcttagggaaagaccctgctcaggacccagcaggtcagcaccccagagcagactgataggtccgtgggacccatgttagagcagaaaatttgggctcagcacattttactgttagtagagagccaggaaacgttttctgggttggggattttgtgggattttttaatttttttagtaggttttgtttaacctctgtgcagtttgtatgaatgaattgctatacatttataaggagccagggtctggagggttgctatcactttgtccagcccaaataccttcctgggcaactcctaccatttgtttgcagttgcctctactagctgatggcagtatgctggaaagaggttgtactataaagagagttctttccttctactccagagttgttgtgtagctttgccattgaaccgatcaatttttaaactctttaaagaagcagcagctatttttttgaaattaaagaaaattctcaggccaggctcaatggctcatgcctataattgtagtgctttgggaggctgagctgggaggatcgcttaagaccagcctaggcaacagagtgagatcctgtctctacaaaaacaaaaattttttttttgttttctttttgagacggagtttcgctcttgttgcccaggctggagtgcaatggtgcggtcttggctcaccgcaacctccgcctcccagattaaagtgattctcctgcctcaacctcctgagtagctgggattgcaggcatgcgccaccatgccgggcgaattttgtatttttaatagagacggggtttctctgtgttggtcaggctggtctcaaactcccaacctcaggtgatccgcccacctcagcctctcagagtgctgggattacagatgtgagccactgcacctggcaaaaaaaaaatttttttttaatttgtcaggtgtggtgatgcatgcatgtagtcccaaatacttaggaggctgaggtggaaggatcacttgagcccaggaggtcaaggcaacagtgagctgtgatcatgccactgcactccagtctgggtgacacagtgagaccctgtctcttaaaaaaaaaaaaagaaagaaaaaaaattattctttaggtaatttcacttggacatattcatgtatatggagtttgtcagctgactcaggcatttaccctaaagatcaaatctgttttcaaaaattggcattggccaggcacggtgacccacacctgtaatcccagcactttgggaggccgaggcgggcggatcacgaggtcaggggttcaagaccagcctggccaacatagtgaaaccccgtctctactaaaaatacaaaaaattagctgggcatggtggtgggcgcctgtaatcccagctacttgagaggctcaggcaggagaatcgcttgaacctgggagtggaggttgcagtgagccgagattgcaccattgtattccaccccgggtgacagtgcaagactccatctcaaaaaaaaaaaaaaaatttggcatcatttacaatttcatagaattactgtgaaggcctttctagttgagatgttggggtatttgggattctaattgttaaccccagaagaaggtaatttagcttgtatttatttaaaacccatttagccttttacttatatctggtagaattccagtgatcatcctaataaggtatatttcagaataatttttttttccttcagaataacttagaatcagatgctataagggctcctaggagcagtgtgaaatttccgtaaagataaatttgaatgttgtaaccaagtttatattaaaccaagaggccatttccaatatgattttttgtttctttttaacttgttaagtccctaagagattacatgctagggcttgagtcatttctattgtagataatgatggcccacacagtcaccttcaactatccacataagctaggctttccgcttttgccacggacagtgtgaccaagatatttccagagtaaataacccaccacaaccttggtaattcctcttttcttcttaagctccaggaagcgaaagcagaaggactcttttcagactgccctctgtagcctacattgcagctttccaaaacaggcagctagcactgggaaagcccatgtggtgaccccatatttttctgaggttcttcttttccatggtgttactttattatcagaaagtaaattcagaaaacaggtcttgcccttagcagacaagaaccacaccagtttcttgtaaaggtaacggatacattgggattcaggagtgacacagaggtccagccccagaacttgtaaggattttgtttgaacactgagcagatgcctcctccctgccacccatcacactagttagggctggccatgaattctatgccagagtcactcctgcagtctgctagggatgggccttcttatcccactctcgcacacatcccagtctagtctttgccttcacagagtcctccttgacacccctgacttaatgatagttgctgttttggagtagaattgatcaggtttaagtcatcctgctcaggttgggcatagtggctcatgcctgtaatctcagcactttgggaagccaaagtgggaggattgcttgagcccaggagttccaaaccatcctgggcaacagagggagaccctgtctctaccaagaaaaaaaaaaaaaaaaaaaagttaaaaaaacaattagctggacctggtggtgcacactcagtaggctgaggtgaaaggattcctttaacctgggagactgaagctgcagtgagccatgatcgtgccactgcactccagtctgggggacaaagtgggaccctatctcaaaaaaaaaaaaaaaaagtcatcctcctccaactactgattgacatatggatcatcagttcagaccctcactgcatacaggatccctagagggttctatttaatagcttgaggaagggagactttaaaaggacgtgtgtgagtgaaataggatatagccattaccacggtgccaggacctgacagcgttccaattctttttgcagcatggggaatcaaaggtggcatgccaagttcaactcagggctgaggtatccacattgtccacatcaggcaagccctgcactgacggttgagcctcatggagaggagcatgtgttggaaagagatccctttgttaactgttttgtggtgttctcttcaatgaattagagctcatgccccttttctggctttgctgttgattttggatggtagagaatattcctgagagccttccttttggcccccagcttatgccacccactctcttctcttggttgaattctctgaaggaaaggttcatgtgctattgtcctgttagtcaatagtcttcatatataattgtgttacatatattgctgtagactctcagaaatcagggtagagcttttcctttgagcagtttaatgagtgaattcagcagcaaagtcgcaagaaatggttctccagccaggagaggttatgtttatcctctgattgcccgttttctctgcacacagtgatatcgtattcagtgagaggtgctgttggcacccagcagcaccctgggcacacagcatttcatgtcatgtcacagtgtacaagctaccctctaattcagaaagaagagcattttgcacagagaaaaataaaaagatccatgaatgtcatcttttatcttttattttcagttggctgatgttggaatttttgttcttgtcatgaacttgtaaaccaatcttgccaagatacaagttgttttggtttttcactacaatgacctcttgttcctcctgtcttgactgctgacgttcctcaatgattctattgtctattttatgggaagcagccttcccataggtttccttttacacactgcagggctatctttatactttaaaaaaaacaacaaaaaaaaaaaaggacaagaactgtcactaacctcatggaggggtttgcgtaaaaccatttagcccaccttgagcaaagggtagattccgtgttgtttttttaagctcactgtaataaaatagatctaattcagcattattgtgctacctcaaaggtaaaaaatgttttaaggtcttcttttggtcctgagttctatatacagtgtttgaaatgtctttcatttggaattattttttaaattcttggagtgaattttattttaatctgttttaatcttgtattttaatctcagaagaataagtgattgaaacgtgatcaattcttgctctgtggtgttaaacatataatgaacagtcattaagaattaagtcactgtttgccataaacaaggttgatgttctttttgttgttgttaaggaaaccctagggctcggctttactcttgattaataaaggctgacaaatc

SEQ ID NO: 81788 - DNA, 6405 bp, Homo sapiens
ggcacgaggtccccgcggcggcggcggctgcccagtgacagcggcggcggtgccaggtcggccgtggtagcgtagggttgcgcggcccggaaacgcagagccggccaaagagcggcgcgacgtgagccggggccgtgcgcgaagagacctcgcgggcgcggagcgaaaggccggcgtgagtgagcgcggagacagtggccgccggcggcccaacccgtctatcccttcggccgccgccggcatgagccacatccagatcccgccggggctcacggagctgctgcagggctacacggtggaggtgctgcgacagcagccgcctgacctcgtcgaattcgcagtggagtacttcacccgcctgcgcgaggcccgcgccccagcctcagtcctgcccgccgccaccccacgccagagcctgggccaccccccgccagaacccggcccggaccgtgtcgccgacgccaaaggggacagcgagtcggaggaggacgaggacttggaagttccagttcctagcagatttaatagacgagtatcagtctgtgctgagacctataaccctgatgaggaagaggaagatacagatccaagggtgattcatcctaaaactgatgaacagagatgcagacttcaggaagcttgcaaagatattctccttttcaaaaatcttgatcaggaacagctttctcaagttctcgatgccatgtttgaaaggatagtcaaagctgatgagcatgtcattgaccaaggagatgatggagacaacttttatgtcatagaacggggaacttatgacattttagtaacaaaagataatcaaacccgctctgttggtcaatatgacaaccgtggcagttttggagaactagctctgatgtacaacaccccgagagctgctaccattgttgctacctcagaaggctccctttggggactggaccgggtgacttttagaagaatcatagtgaaaaataatgcaaagaagaggaagatgtttgaatcatttattgagtctgtgcccctccttaaatcactagaggtgtcagaacgaatgaagattgtggatgtaataggagagaagatctataaggatggagaacgcataatcactcagggtgaaaaggctgatagcttttacatcatagagtctggcgaagtgagcatcttgattagaagcaggactaaatcaaacaaggatggtgggaaccaggaggtcgagattgcccgctgccataaggggcagtactttggagagcttgccctggtcaccaacaaacccagagctgcctcagcttatgcagttggagatgtcaaatgcttagttatggatgtacaagcattcgagaggcttctggggccctgcatggacatcatgaagaggaacatctcacactatgaggaacagctggtgaagatgtttggctccagcgtggatctgggcaacctcgggcagtaggtgtgccacaccccagagccttcttagtgtgacaccaaaaccttctggtcagccacagaacacatacagaaaacagacatgacagaactgttcctgccgttgccgccactgctgccattgctgtggttatgggcatttagaaaacttgaaagtcagcactaaaggatgggcagaggttcaacccacacctccactttgcttctgaaggcccattcattagaccacttgtaaagattactccaacccagtttttatatctttggttcaaaacggcatgtctctccaacaatttaagtgcctgatacaaagtccaaagtataaacatgctcctttcctctcttgctgctactcttgcttttggaagttaccacagggtctgcagaaacctgttgtataactgtagacactctctaatggttctcaaaggaggaaatgtagccttcagtctcctcatttgtcctttgaggaagtccacatttgttcacagttgcagcctttggttttacagtgggaaatggtggtggatgatatggacatatgtagcccagtggcattgtactttctgctgacagctgcacacattacagctgtctccaaacccacagtgatgcttagggaaagaccctgctcaggacccagcaggtcagcaccccagagcagactgataggtccgtgggacccatgttagagcagaaaatttgggctcagcacattttactgttagtagagagccaggaaacgttttctgggttggggattttgtgggattttttaatttttttagtaggttttgtttaacctctgtgcagtttgtatgaatgaattgctatacatttataaggagccagggtctggagggttgctatcactttgtccagcccaaataccttcctgggcaactcctaccatttgtttgcagttgcctctactagctgatggcagtatgctggaaagaggttgtactataaagagagttctttccttctactccagagttgttgtgtagctttgccattgaaccgatcaatttttaaactctttaaagaagcagcagctatttttttgaaattaaagaaaattctcaggccaggctcaatggctcatgcctataattgtagtgctttgggaggctgagctgggaggatcgcttaagaccagcctaggcaacagagtgagatcctgtctctacaaaaacaaaaattttttttttgttttctttttgagacggagtttcgctcttgttgcccaggctggagtgcaatggtgcggtcttggctcaccgcaacctccgcctcccagattaaagtgattctcctgcctcaacctcctgagtagctgggattgcaggcatgcgccaccatgccgggcgaattttgtatttttaatagagacggggtttctctgtgttggtcaggctggtctcaaactcccaacctcaggtgatccgcccacctcagcctctcagagtgctgggattacagatgtgagccactgcacctggcaaaaaaaaaatttttttttaatttgtcaggtgtggtgatgcatgcatgtagtcccaaatacttaggaggctgaggtggaaggatcacttgagcccaggaggtcaaggcaacagtgagctgtgatcatgccactgcactccagtctgggtgacacagtgagaccctgtctcttaaaaaaaaaaaaagaaagaaaaaaaattattctttaggtaatttcacttggacatattcatgtatatggagtttgtcagctgactcaggcatttaccctaaagatcaaatctgttttcaaaaattggcattggccaggcacggtgacccacacctgtaatcccagcactttgggaggccgaggcgggcggatcacgaggtcaggggttcaagaccagcctggccaacatagtgaaaccccgtctctactaaaaatacaaaaaattagctgggcatggtggtgggcgcctgtaatcccagctacttgagaggctcaggcaggagaatcgcttgaacctgggagtggaggttgcagtgagccgagattgcaccattgtattccaccccgggtgacagtgcaagactccatctcaaaaaaaaaaaaaaaatttggcatcatttacaatttcatagaattactgtgaaggcctttctagttgagatgttggggtatttgggattctaattgttaaccccagaagaaggtaatttagcttgtatttatttaaaacccatttagccttttacttatatctggtagaattccagtgatcatcctaataaggtatatttcagaataatttttttttccttcagaataacttagaatcagatgctataagggctcctaggagcagtgtgaaatttccgtaaagataaatttgaatgttgtaaccaagtttatattaaaccaagaggccatttccaatatgattttttgtttctttttaacttgttaagtccctaagagattacatgctagggcttgagtcatttctattgtagataatgatggcccacacagtcaccttcaactatccacataagctaggctttccgcttttgccacggacagtgtgaccaagatatttccagagtaaataacccaccacaaccttggtaattcctcttttcttcttaagctccaggaagcgaaagcagaaggactcttttcagactgccctctgtagcctacattgcagctttccaaaacaggcagctagcactgggaaagcccatgtggtgaccccatatttttctgaggttcttcttttccatggtgttactttattatcagaaagtaaattcagaaaacaggtcttgcccttagcagacaagaaccacaccagtttcttgtaaaggtaacggatacattgggattcaggagtgacacagaggtccagccccagaacttgtaaggattttgtttgaacactgagcagatgcctcctccctgccacccatcacactagttagggctggccatgaattctatgccagagtcactcctgcagtctgctagggatgggccttcttatcccactctcgcacacatcccagtctagtctttgccttcacagagtcctccttgacacccctgacttaatgatagttgctgttttggagtagaattgatcaggtttaagtcatcctgctcaggttgggcatagtggctcatgcctgtaatctcagcactttgggaagccaaagtgggaggattgcttgagcccaggagttccaaaccatcctgggcaacagagggagaccctgtctctaccaagaaaaaaaaaaaaaaaaaaaagttaaaaaaacaattagctggacctggtggtgcacactcagtaggctgaggtgaaaggattcctttaacctgggagactgaagctgcagtgagccatgatcgtgccactgcactccagtctgggggacaaagtgggaccctatctcaaaaaaaaaaaaaaaaagtcatcctcctccaactactgattgacatatggatcatcagttcagaccctcactgcatacaggatccctagagggttctatttaatagcttgaggaagggagactttaggacctgacagcgttccaattctttttgcagcatggggaatcaaaggtggcatgccaagttcaactcagggctgaggtatccacattgtccacatcaggcaagccctgcactgacggttgagcctcatggagaggagcatgtgttggaaagagatccctttgttaactgttttgtggtgttctcttcaatgaattagagctcatgccccttttctggctttgctgttgattttggatggtagagaatattcctgagagccttccttttggcccccagcttatgccacccactctcttctcttggttgaattctctgaaggaaaggttcatgtgctattgtcctgttagtcaatagtcttcatatataattgtgttacatatattgctgtagactctcagaaatcagggtagagcttttcctttgagcagtttaatgagtgaattcagcagcaaagtcgcaagaaatggttctccagccaggagaggttatgtttatcctctgattgcccgttttctctgcacacagtgatatcgtattcagtgagaggtgctgttggcacccagcagcaccctgggcacacagcatttcatgtcatgtcacagtgtacaagctaccctctaattcagaaagaagagcattttgcacagagaaaaataaaaagatccatgaatgtcatcttttatcttttattttcagttggctgatgttggaatttttgttcttgtcatgaacttgtaaaccaatcttgccaagatacaagttgttttggtttttcactacaatgacctcttgttcctcctgtcttgactgctgacgttcctcaatgattctattgtctattttatgggaagcagccttcccataggtttccttttacacactgcagggctatctttatactttaaaaaaaacaacaaaaaaaaaaaaggacaagaactgtcactaacctcatggaggggtttgcgtaaaaccatttagcccaccttgagcaaagggtagattccgtgttgtttttttaagctcactgtaataaaatagatctaattcagcattattgtgctacctcaaaggtaaaaaatgttttaaggtcttcttttggtcctgagttctatatacagtgtttgaaatgtctttcatttggaattattttttaaattcttggagtgaattttattttaatctgttttaatcttgtattttaatctcagaagaataagtgattgaaacgtgatcaattcttgctctgtggtgttaaacatataatgaacagtcattaagaattaagtcactgtttgccataaacaaggttgatgttctttttgttgttgttaaggaaaccctagggctcggctttactcttgattaataaaggctgacaaatc

SEQ ID NO: 81789 - DNA, 6071 bp, Homo sapiens
ggcacgaggtccccgcggcggcggcggctgcccagtgacagcggcggcggtgccaggtcggccgtggtagcgtagggttgcgcggcccggaaacgcagagccggccaaagagcggcgcgacgtgagccggggccgtgcgcgaagagacctcgcgggcgcggagcgaaaggccggcgtgagtgagcgcggagacagtggccgccggcggcccaacccgtctatcccttcggccgccgccggcatgagccacatccagatcccgccggggctcacggagctgctgcagggctacacggtggaggtgctgcgacagcagccgcctgacctcgtcgaattcgcagtggagtacttcacccgcctgcgcgaggcccgcgccccagcctcagtcctgcccgccgccaccccacgccagagcctgggccaccccccgccagaacccggcccggaccgtgtcgccgacgccaaaggggacagcgagtcggaggaggacgaggacttggaagttccagttcctagcagatttaatagacgagtatcagtctgtgctgagacctataaccctgatgaggaagaggaagatacagatccaagggtgattcatcctaaaactgatgaacagagatgcagacttcaggaagcttgcaaagatattctccttttcaaaaatcttgatcaggaacagctttctcaagttctcgatgccatgtttgaaaggatagtcaaagctgatgagcatgtcattgaccaaggagatgatggagacaacttttatgtcatagaacggggaacttatgacattttagtaacaaaagataatcaaacccgctctgttggtcaatatgacaaccgtggcagttttggagaactagctctgatgtacaacaccccgagagctgctaccattgttgctacctcagaaggctccctttggggactggaccgggtgacttttagaagaatcatagtgaaaaataatgcaaagaagaggaagatgtttgaatcatttattgagtctgtgcccctccttaaatcactagaggtgtcagaacgaatgaagattgtggatgtaataggagagaagatctataaggatggagaacgcataatcactcagggtgaaaaggctgatagcttttacatcatagagtctggcgaagtgagcatcttgattagaagcaggactaaatcaaacaaggatggtgggaaccaggaggtcgagattgcccgctgccataaggggcagtactttggagagcttgccctggtcaccaacaaacccagagctgcctcagcttatgcagttggagatgtcaaatgcttagttatggatgtacaagcattcgagaggcttctggggccctgcatggacatcatgaagaggaacatctcacactatgaggaacagctggtgaagatgtttggctccagcgtggatctgggcaacctcgggcagtaggtgtgccacaccccagagccttcttagtgtgacaccaaaaccttctggtcagccacagaacacatacagaaaacagacatgacagaactgttcctgccgttgccgccactgctgccattgctgtggttatgggcatttagaaaacttgaaagtcagcactaaaggatgggcagaggttcaacccacacctccactttgcttctgaaggcccattcattagaccacttgtaaagattactccaacccagtttttatatctttggttcaaaacggcatgtctctccaacaatttaagtgcctgatacaaagtccaaagtataaacatgctcctttcctctcttgctgctactcttgcttttggaagttaccacagggtctgcagaaacctgttgtataactgtagacactctctaatggttctcaaaggaggaaatgtagccttcagtctcctcatttgtcctttgaggaagtccacatttgttcacagttgcagcctttggttttacagtgggaaatggtggtggatgatatggacatatgtagcccagtggcattgtactttctgctgacagctgcacacattacagctgtctccaaacccacagtgatgcttagggaaagaccctgctcaggacccagcaggtcagcaccccagagcagactgataggtccgtgggacccatgttagagcagaaaatttgggctcagcacattttactgttagtagagagccaggaaacgttttctgggttggggattttgtgggattttttaatttttttagtaggttttgtttaacctctgtgcagtttgtatgaatgaattgctatacatttataaggagccagggtctggagggttgctatcactttgtccagcccaaataccttcctgggcaactcctaccatttgtttgcagttgcctctactagctgatggcagtatgctggaaagaggttgtactataaagagagttctttccttctactccagagttgttgtgtagctttgccattgaaccgatcaatttttaaactctttaaagaagcagcagctatttttttgaaattaaagaaaattctcaggccaggctcaatggctcatgcctataattgtagtgctttgggaggctgagctgggaggatcgcttaagaccagcctaggcaacagagtgagatcctgtctctacaaaaacaaaaattttttttttgttttctttttgagacggagtttcgctcttgttgcccaggctggagtgcaatggtgcggtcttggctcaccgcaacctccgcctcccagattaaagtgattctcctgcctcaacctcctgagtagctgggattgcaggcatgcgccaccatgccgggcgaattttgtatttttaatagagacggggtttctctgtgttggtcaggctggtctcaaactcccaacctcaggtgatccgcccaccccagcactttgggaggccgaggcgggcggatcacgaggtcaggggttcaagaccagcctggccaacatagtgaaaccccgtctctactaaaaatacaaaaaattagctgggcatggtggtgggcgcctgtaatcccagctacttgagaggctcaggcaggagaatcgcttgaacctgggagtggaggttgcagtgagccgagattgcaccattgtattccaccccgggtgacagtgcaagactccatctcaaaaaaaaaaaaaaaatttggcatcatttacaatttcatagaattactgtgaaggcctttctagttgagatgttggggtatttgggattctaattgttaaccccagaagaaggtaatttagcttgtatttatttaaaacccatttagccttttacttatatctggtagaattccagtgatcatcctaataaggtatatttcagaataatttttttttccttcagaataacttagaatcagatgctataagggctcctaggagcagtgtgaaatttccgtaaagataaatttgaatgttgtaaccaagtttatattaaaccaagaggccatttccaatatgattttttgtttctttttaacttgttaagtccctaagagattacatgctagggcttgagtcatttctattgtagataatgatggcccacacagtcaccttcaactatccacataagctaggctttccgcttttgccacggacagtgtgaccaagatatttccagagtaaataacccaccacaaccttggtaattcctcttttcttcttaagctccaggaagcgaaagcagaaggactcttttcagactgccctctgtagcctacattgcagctttccaaaacaggcagctagcactgggaaagcccatgtggtgaccccatatttttctgaggttcttcttttccatggtgttactttattatcagaaagtaaattcagaaaacaggtcttgcccttagcagacaagaaccacaccagtttcttgtaaaggtaacggatacattgggattcaggagtgacacagaggtccagccccagaacttgtaaggattttgtttgaacactgagcagatgcctcctccctgccacccatcacactagttagggctggccatgaattctatgccagagtcactcctgcagtctgctagggatgggccttcttatcccactctcgcacacatcccagtctagtctttgccttcacagagtcctccttgacacccctgacttaatgatagttgctgttttggagtagaattgatcaggtttaagtcatcctgctcaggttgggcatagtggctcatgcctgtaatctcagcactttgggaagccaaagtgggaggattgcttgagcccaggagttccaaaccatcctgggcaacagagggagaccctgtctctaccaagaaaaaaaaaaaaaaaaaaaagttaaaaaaacaattagctggacctggtggtgcacactcagtaggctgaggtgaaaggattcctttaacctgggagactgaagctgcagtgagccatgatcgtgccactgcactccagtctgggggacaaagtgggaccctatctcaaaaaaaaaaaaaaaaagtcatcctcctccaactactgattgacatatggatcatcagttcagaccctcactgcatacaggatccctagagggttctatttaatagcttgaggaagggagactttaaaaggacgtgtgtgagtgaaataggatatagccattaccacggtgccaggacctgacagcgttccaattctttttgcagcatggggaatcaaaggtggcatgccaagttcaactcagggctgaggtatccacattgtccacatcaggcaagccctgcactgacggttgagcctcatggagaggagcatgtgttggaaagagatccctttgttaactgttttgtggtgttctcttcaatgaattagagctcatgccccttttctggctttgctgttgattttggatggtagagaatattcctgagagccttccttttggcccccagcttatgccacccactctcttctcttggttgaattctctgaaggaaaggttcatgtgctattgtcctgttagtcaatagtcttcatatataattgtgttacatatattgctgtagactctcagaaatcagggtagagcttttcctttgagcagtttaatgagtgaattcagcagcaaagtcgcaagaaatggttctccagccaggagaggttatgtttatcctctgattgcccgttttctctgcacacagtgatatcgtattcagtgagaggtgctgttggcacccagcagcaccctgggcacacagcatttcatgtcatgtcacagtgtacaagctaccctctaattcagaaagaagagcattttgcacagagaaaaataaaaagatccatgaatgtcatcttttatcttttattttcagttggctgatgttggaatttttgttcttgtcatgaacttgtaaaccaatcttgccaagatacaagttgttttggtttttcactacaatgacctcttgttcctcctgtcttgactgctgacgttcctcaatgattctattgtctattttatgggaagcagccttcccataggtttccttttacacactgcagggctatctttatactttaaaaaaaacaacaaaaaaaaaaaaggacaagaactgtcactaacctcatggaggggtttgcgtaaaaccatttagcccaccttgagcaaagggtagattccgtgttgtttttttaagctcactgtaataaaatagatctaattcagcattattgtgctacctcaaaggtaaaaaatgttttaaggtcttcttttggtcctgagttctatatacagtgtttgaaatgtctttcatttggaattattttttaaattcttggagtgaattttattttaatctgttttaatcttgtattttaatctcagaagaataagtgattgaaacgtgatcaattcttgctctgtggtgttaaacatataatgaacagtcattaagaattaagtcactgtttgccataaacaaggttgatgttctttttgttgttgttaaggaaaccctagggctcggctttactcttgattaataaaggctgacaaatc

SEQ ID NO: 81790 - DNA, 5974 bp, Homo sapiens
atcctcctgcctcagcctcccaaatagctgggactacaggtgtgtgccaccacacccagctaattttttttttttttttttttgaaatgagggtctcactctgtcacccaggctggagtgcagtgacatgatctcggctcactagaggtgtcttttttgatattgaacagtgacagtgagctcataaatgtttaggtgttttctgttttgggttctatttatgacccataggtggcacctattgagtgctagatagcaagcaacagcatgtgggcatctggctggctcaggctataggtcctttacttccagtgatgactcaagattgaagtatcattaaacacttaattaacacagtaacttacatattcctctaatatttgctttggccagttaattaaaccatagatgttcctgtatataggcatttactagaattttcatattctttcttgtaggaccgggtgacttttagaagaatcatagtgaaaaataatgcaaagaagaggaagatgtttgaatcatttattgagtctgtgcccctccttaaatcactagaggtgtcagaacgaatgaagattgtggatgtaataggagagaagatctataaggatggagaacgcataatcactcagggtgaaaaggctgatagcttttacatcatagagtctggcgaagtgagcatcttgattagaagcaggactaaatcaaacaaggatggtgggaaccaggaggtcgagattgcccgctgccataaggggcagtactttggagagcttgccctggtcaccaacaaacccagagctgcctcagcttatgcagttggagatgtcaaatgcttagttatggatgtacaagcattcgagaggcttctggggccctgcatggacatcatgaagaggaacatctcacactatgaggaacagctggtgaagatgtttggctccagcgtggatctgggcaacctcgggcagtaggtgtgccacaccccagagccttcttagtgtgacaccaaaaccttctggtcagccacagaacacatacagaaaacagacatgacagaactgttcctgccgttgccgccactgctgccattgctgtggttatgggcatttagaaaacttgaaagtcagcactaaaggatgggcagaggttcaacccacacctccactttgcttctgaaggcccattcattagaccacttgtaaagattactccaacccagtttttatatctttggttcaaaacggcatgtctctccaacaatttaagtgcctgatacaaagtccaaagtataaacatgctcctttcctctcttgctgctactcttgcttttggaagttaccacagggtctgcagaaacctgttgtataactgtagacactctctaatggttctcaaaggaggaaatgtagccttcagtctcctcatttgtcctttgaggaagtccacatttgttcacagttgcagcctttggttttacagtgggaaatggtggtggatgatatggacatatgtagcccagtggcattgtactttctgctgacagctgcacacattacagctgtctccaaacccacagtgatgcttagggaaagaccctgctcaggacccagcaggtcagcaccccagagcagactgataggtccgtgggacccatgttagagcagaaaatttgggctcagcacattttactgttagtagagagccaggaaacgttttctgggttggggattttgtgggattttttaatttttttagtaggttttgtttaacctctgtgcagtttgtatgaatgaattgctatacatttataaggagccagggtctggagggttgctatcactttgtccagcccaaataccttcctgggcaactcctaccatttgtttgcagttgcctctactagctgatggcagtatgctggaaagaggttgtactataaagagagttctttccttctactccagagttgttgtgtagctttgccattgaaccgatcaatttttaaactctttaaagaagcagcagctatttttttgaaattaaagaaaattctcaggccaggctcaatggctcatgcctataattgtagtgctttgggaggctgagctgggaggatcgcttaagaccagcctaggcaacagagtgagatcctgtctctacaaaaacaaaaattttttttttgttttctttttgagacggagtttcgctcttgttgcccaggctggagtgcaatggtgcggtcttggctcaccgcaacctccgcctcccagattaaagtgattctcctgcctcaacctcctgagtagctgggattgcaggcatgcgccaccatgccgggcgaattttgtatttttaatagagacggggtttctctgtgttggtcaggctggtctcaaactcccaacctcaggtgatccgcccacctcagcctctcagagtgctgggattacagatgtgagccactgcacctggcaaaaaaaaaatttttttttaatttgtcaggtgtggtgatgcatgcatgtagtcccaaatacttaggaggctgaggtggaaggatcacttgagcccaggaggtcaaggcaacagtgagctgtgatcatgccactgcactccagtctgggtgacacagtgagaccctgtctcttaaaaaaaaaaaaagaaagaaaaaaaattattctttaggtaatttcacttggacatattcatgtatatggagtttgtcagctgactcaggcatttaccctaaagatcaaatctgttttcaaaaattggcattggccaggcacggtgacccacacctgtaatcccagcactttgggaggccgaggcgggcggatcacgaggtcaggggttcaagaccagcctggccaacatagtgaaaccccgtctctactaaaaatacaaaaaattagctgggcatggtggtgggcgcctgtaatcccagctacttgagaggctcaggcaggagaatcgcttgaacctgggagtggaggttgcagtgagccgagattgcaccattgtattccaccccgggtgacagtgcaagactccatctcaaaaaaaaaaaaaaaatttggcatcatttacaatttcatagaattactgtgaaggcctttctagttgagatgttggggtatttgggattctaattgttaaccccagaagaaggtaatttagcttgtatttatttaaaacccatttagccttttacttatatctggtagaattccagtgatcatcctaataaggtatatttcagaataatttttttttccttcagaataacttagaatcagatgctataagggctcctaggagcagtgtgaaatttccgtaaagataaatttgaatgttgtaaccaagtttatattaaaccaagaggccatttccaatatgattttttgtttctttttaacttgttaagtccctaagagattacatgctagggcttgagtcatttctattgtagataatgatggcccacacagtcaccttcaactatccacataagctaggctttccgcttttgccacggacagtgtgaccaagatatttccagagtaaataacccaccacaaccttggtaattcctcttttcttcttaagctccaggaagcgaaagcagaaggactcttttcagactgccctctgtagcctacattgcagctttccaaaacaggcagctagcactgggaaagcccatgtggtgaccccatatttttctgaggttcttcttttccatggtgttactttattatcagaaagtaaattcagaaaacaggtcttgcccttagcagacaagaaccacaccagtttcttgtaaaggtaacggatacattgggattcaggagtgacacagaggtccagccccagaacttgtaaggattttgtttgaacactgagcagatgcctcctccctgccacccatcacactagttagggctggccatgaattctatgccagagtcactcctgcagtctgctagggatgggccttcttatcccactctcgcacacatcccagtctagtctttgccttcacagagtcctccttgacacccctgacttaatgatagttgctgttttggagtagaattgatcaggtttaagtcatcctgctcaggttgggcatagtggctcatgcctgtaatctcagcactttgggaagccaaagtgggaggattgcttgagcccaggagttccaaaccatcctgggcaacagagggagaccctgtctctaccaagaaaaaaaaaaaaaaaaaaaagttaaaaaaacaattagctggacctggtggtgcacactcagtaggctgaggtgaaaggattcctttaacctgggagactgaagctgcagtgagccatgatcgtgccactgcactccagtctgggggacaaagtgggaccctatctcaaaaaaaaaaaaaaaaagtcatcctcctccaactactgattgacatatggatcatcagttcagaccctcactgcatacaggatccctagagggttctatttaatagcttgaggaagggagactttaaaaggacgtgtgtgagtgaaataggatatagccattaccacggtgccaggacctgacagcgttccaattctttttgcagcatggggaatcaaaggtggcatgccaagttcaactcagggctgaggtatccacattgtccacatcaggcaagccctgcactgacggttgagcctcatggagaggagcatgtgttggaaagagatccctttgttaactgttttgtggtgttctcttcaatgaattagagctcatgccccttttctggctttgctgttgattttggatggtagagaatattcctgagagccttccttttggcccccagcttatgccacccactctcttctcttggttgaattctctgaaggaaaggttcatgtgctattgtcctgttagtcaatagtcttcatatataattgtgttacatatattgctgtagactctcagaaatcagggtagagcttttcctttgagcagtttaatgagtgaattcagcagcaaagtcgcaagaaatggttctccagccaggagaggttatgtttatcctctgattgcccgttttctctgcacacagtgatatcgtattcagtgagaggtgctgttggcacccagcagcaccctgggcacacagcatttcatgtcatgtcacagtgtacaagctaccctctaattcagaaagaagagcattttgcacagagaaaaataaaaagatccatgaatgtcatcttttatcttttattttcagttggctgatgttggaatttttgttcttgtcatgaacttgtaaaccaatcttgccaagatacaagttgttttggtttttcactacaatgacctcttgttcctcctgtcttgactgctgacgttcctcaatgattctattgtctattttatgggaagcagccttcccataggtttccttttacacactgcagggctatctttatactttaaaaaaaacaacaaaaaaaaaaaaggacaagaactgtcactaacctcatggaggggtttgcgtaaaaccatttagcccaccttgagcaaagggtagattccgtgttgtttttttaagctcactgtaataaaatagatctaattcagcattattgtgctacctcaaaggtaaaaaatgttttaaggtcttcttttggtcctgagttctatatacagtgtttgaaatgtctttcatttggaattattttttaaattcttggagtgaattttattttaatctgttttaatcttgtattttaatctcagaagaataagtgattgaaacgtgatcaattcttgctctgtggtgttaaacatataatgaacagtcattaagaattaagtcactgtttgccataaacaaggttgatgttctttttgttgttgttaaggaaaccctagggctcggctttactcttgattaataaaggctgacaaatc

SEQ ID NO: 81791 - DNA, 5686 bp, Homo sapiens
ggcacgaggtccccgcggcggcggcggctgcccagtgacagcggcggcggtgccaggtcggccgtggtagcgtagggttgcgcggcccggaaacgcagagccggccaaagagcggcgcgacgtgagccggggccgtgcgcgaagagacctcgcgggcgcggagcgaaaggccggcgtgagtgagcgcggagacagtggccgccggcggcccaacccgtctatcccttcggccgccgccggcatgagccacatccagatcccgccggggctcacggagctgctgcagggctacacggtggaggtgctgcgacagcagccgcctgacctcgtcgaattcgcagtggagtacttcacccgcctgcgcgaggcccgcgccccagcctcagtcctgcccgccgccaccccacgccagagcctgggccaccccccgccagaacccggcccggaccgtgtcgccgacgccaaaggggacagcgagtcggaggaggacgaggacttggaagttccagttcctagcagatttaatagacgagtatcagtctgtgctgagacctataaccctgatgaggaagaggaagatacagatccaagggtgattcatcctaaaactgatgaacagagatgcagacttcaggaagcttgcaaagatattctccttttcaaaaatcttgatcaggaacagctttctcaagttctcgatgccatgtttgaaaggatagtcaaagctgatgagcatgtcattgaccaaggagatgatggagacaacttttatgtcatagaacggggaacttatgacattttagtaacaaaagataatcaaacccgctctgttggtcaatatgacaaccgtggcagttttggagaactagctctgatgtacaacaccccgagagctgctaccattgttgctacctcagaaggctccctttggggactggaccgggtgacttttagaagaatcatagtgaaaaataatgcaaagaagaggaagatgtttgaatcatttattgagtctgtgcccctccttaaatcactagaggtgtcagaacgaatgaagattgtggatgtaataggagagaagatctataaggatggagaacgcataatcactcagggtgaaaaggctgatagcttttacatcatagagtctggcgaagtgagcatcttgattagaagcaggactaaatcaaacaaggatggtgggaaccaggaggtcgagattgcccgctgccataaggggcagtactttggagagcttgccctggtcaccaacaaacccagagctgcctcagcttatgcagttggagatgtcaaatgcttagttatggatgtacaagcattcgagaggcttctggggccctgcatggacatcatgaagaggaacatctcacactatgaggaacagctggtgaagatgtttggctccagcgtggatctgggcaacctcgggcagtaggtgtgccacaccccagagccttcttagtgtgacaccaaaaccttctggtcagccacagaacacatacagaaaacagacatgacagaactgttcctgccgttgccgccactgctgccattgctgtggttatgggcatttagaaaacttgaaagtcagcactaaaggatgggcagaggttcaacccacacctccactttgcttctgaaggcccattcattagaccacttgtaaagattactccaacccagtttttatatctttggttcaaaacggcatgtctctccaacaatttaagtgcctgatacaaagtccaaagtataaacatgctcctttcctctcttgctgctactcttgcttttggaagttaccacagggtctgcagaaacctgttgtataactgtagacactctctaatggttctcaaaggaggaaatgtagccttcagtctcctcatttgtcctttgaggaagtccacatttgttcacagttgcagcctttggttttacagtgggaaatggtggtggatgatatggacatatgtagcccagtggcattgtactttctgctgacagctgcacacattacagctgtctccaaacccacagtgatgcttagggaaagaccctgctcaggacccagcaggtcagcaccccagagcagactgataggtccgtgggacccatgttagagcagaaaatttgggctcagcacattttactgttagtagagagccaggaaacgttttctgggttggggattttgtgggattttttaatttttttagtaggttttgtttaacctctgtgcagtttgtatgaatgaattgctatacatttataaggagccagggtctggagggttgctatcactttgtccagcccaaataccttcctgggcaactcctaccatttgtttgcagttgcctctactagctgatggcagtatgctggaaagaggttgtactataaagagagttctttccttctactccagagttgttgtgtagctttgccattgaaccgatcaatttttaaactctttaaagaagcagcagctatttttttgaaattaaagaaaattctcaggccaggctcaatggctcatgcctataattgtagtgctttgggaggctgagctgggaggatcgcttaagaccagcctaggcaacagagtgagatcctgtctctacaaaaacaaaaattttttttttgttttctttttgagacggagtttcgctcttgttgcccaggctggagtgcaatggtgcggtcttggctcaccgcaacctccgcctcccagattaaagtgattctcctgcctcaacctcctgagtagctgggattgcaggcatgcgccaccatgccgggcgaattttgtatttttaatagagacggggtttctctgtgttggtcaggctggtctcaaactcccaacctcaggtgatccgcccacctcagcctctcagagtgctgggattacagatgtgagccactgcacctggcaaaaaaaaaatttttttttaatttgtcaggtgtggtgatgcatgcatgtagtcccaaatacttaggaggctgaggtggaaggatcacttgagcccaggaggtcaaggcaacagtgagctgtgatcatgccactgcactccagtctgggtgacacagtgagaccctgtctcttaaaaaaaaaaaaagaaagaaaaaaaattattctttaggtaatttcacttggacatattcatgtatatggagtttgtcagctgactcaggcatttaccctaaagatcaaatctgttttcaaaaattggcattggccaggcacggtgacccacacctgtaatcccagcactttgggaggccgaggcgggcggatcacgaggtcaggggttcaagaccagcctggccaacatagtgaaaccccgtctctactaaaaatacaaaaaattagctgggcatggtggtgggcgcctgtaatcccagctacttgagaggctcaggcaggagaatcgcttgaacctgggagtggaggttgcagtgagccgagattgcaccattgtattccaccccgggtgacagtgcaagactccatctcaaaaaaaaaaaaaaaatttggcatcatttacaatttcatagaattactgtgaaggcctttctagttgagatgttggggtatttgggattctaattgttaaccccagaagaaggtaatttagcttgtatttatttaaaacccatttagccttttacttatatctggtagaattccagtgatcatcctaataaggtatatttcagaataatttttttttccttcagaataacttagaatcagatgctataagggctcctaggagcagtgtgaaatttccgtaaagataaatttgaatgttgtaaccaagtttatattaaaccaagaggccatttccaatatgattttttgtttctttttaacttgttaagtccctaagagattacatgctagggcttgagtcatttctattgtagataatgatggcccacacagtcaccttcaactatccacataagctaggctttccgcttttgccacggacagtgtgaccaagatatttccagagtaaataacccaccacaaccttggtaattcctcttttcttcttaagctccaggaagcgaaagcagaaggactcttttcagactgccctctgtagcctacattgcagctttccaaaacaggcagctagcactgggaaagcccatgtggtgaccccatatttttctgaggttcttcttttccatggtgttactttattatcagaaagtaaattcagaaaacaggtcttgcccttagcagacaagaaccacaccagtttcttgtaaaggtaacggatacattgggattcaggagtgacacagaggtccagccccagaacttgtaaggattttgtttgaacactgagcagatgcctcctccctgccacccatcacactagttagggctggccatgaattctatgccagagtcactcctgcagtctgctagggatgggccttcttatcccactctcgcacacatcccagtctagtctttgccttcacagagtcctccttgacacccctgacttaatgatagttgctgttttggagtagaattgatcaggtttaagtcatcctgctcaggttgggcatagtggctcatgcctgtaatctcagcactttgggaagccaaagtgggaggattgcttgagcccaggagttccaaaccatcctgggcaacagagggagaccctgtctctaccaagaaaaaaaaaaaaaaaaaaaagttaaaaaaacaattagctggacctggtggtgcacactcagtaggctgaggtgaaaggattcctttaacctgggagactgaagctgcagtgagccatgatcgtgccactgcactccagtctgggggacaaagtgggaccctatctcaaaaaaaaaaaaaaaaagtcatcctcctccaactactgattgacatatggatcatcagttcagaccctcactgcatacaggatccctagagggttctatttaatagcttgaggaagggagactttaaaaggacgtgtgtgagtgaaataggatatagccattaccacggtgccaggacctgacagcgttccaattctttttgcagcatggggaatcaaaggtggcatgccaagttcaactcagggctgaggtatccacattgtccacatcaggcaagccctgcactgacggttgagcctcatggagaggagcatgtgttggaaagagatccctttgttaactgttttgtggtgttctcttcaatgaattagagctcatgccccttttctggctttgctgttgattttggatggtagagaatattcctgagagccttccttttggcccccagcttatgccacccactctcttctcttggttgaattctctgaaggaaaggttcatgtgctattgtcctgttagtcaatagtcttcatatataattgtgttacatatattgctgtagactctcagaaatcagggtagagcttttcctttgagcagtttaatgagtgaattcagcagcaaagtcgcaagaaatggttctccagccaggagaggttatgtttatcctctgattgcccgttttctctgcacacagtgacatgacatgaaatgctgtgtgcccagggtgctgctgggtgccaacagcacctctcactgaatacgatatcactgtgtgcagtcgacg

SEQ ID NO: 81792 - DNA, 5615 bp, Homo sapiens
ggcacgaggtccccgcggcggcggcggctgcccagtgacagcggcggcggtgccaggtcggccgtggtagcgtagggttgcgcggcccggaaacgcagagccggccaaagagcggcgcgacgtgagccggggccgtgcgcgaagagacctcgcgggcgcggagcgaaaggccggcgtgagtgagcgcggagacagtggccgccggcggcccaacccgtctatcccttcggccgccgccggcatgagccacatccagatcccgccggggctcacggagctgctgcagggctacacggtggaggtgctgcgacagcagccgcctgacctcgtcgaattcgcagtggagtacttcacccgcctgcgcgaggcccgcgccccagcctcagtcctgcccgccgccaccccacgccagagcctgggccaccccccgccagaacccggcccggaccgtgtcgccgacgccaaaggggacagcgagtcggaggaggacgaggacttggaagttccagttcctagcagatttaatagacgagtatcagtctgtgctgagacctataaccctgatgaggaagaggaagatacagatccaagggtgattcatcctaaaactgatgaacagagatgcagacttcaggaagcttgcaaagatattctccttttcaaaaatcttgatcaggaacagctttctcaagttctcgatgccatgtttgaaaggatagtcaaagctgatgagcatgtcattgaccaaggagatgatggagacaacttttatgtcatagaacggggaacttatgacattttagtaacaaaagataatcaaacccgctctgttggtcaatatgacaaccgtggcagttttggagaactagctctgatgtacaacaccccgagagctgctaccattgttgctacctcagaaggctccctttggggactggaccgggtgacttttagaagaatcatagtgaaaaataatgcaaagaagaggaagatgtttgaatcatttattgagtctgtgcccctccttaaatcactagaggtgtcagaacgaatgaagattgtggatgtaataggagagaagatctataaggatggagaacgcataatcactcagggtgaaaaggctgatagcttttacatcatagagtctggcgaagtgagcatcttgattagaagcaggactaaatcaaacaaggatggtgggaaccaggaggtcgagattgcccgctgccataaggggcagtactttggagagcttgccctggtcaccaacaaacccagagctgcctcagcttatgcagttggagatgtcaaatgcttagttatggatgtacaagcattcgagaggcttctggggccctgcatggacatcatgaagaggaacatctcacactatgaggaacagctggtgaagatgtttggctccagcgtggatctgggcaacctcgggcagtaggtgtgccacaccccagagccttcttagtgtgacaccaaaaccttctggtcagccacagaacacatacagaaaacagacatgacagaactgttcctgccgttgccgccactgctgccattgctgtggttatgggcatttagaaaacttgaaagtcagcactaaaggatgggcagaggttcaacccacacctccactttgcttctgaaggcccattcattagaccacttgtaaagattactccaacccagtttttatatctttggttcaaaacggcatgtctctccaacaatttaagtgcctgatacaaagtccaaagtataaacatgctcctttcctctcttgctgctactcttgcttttggaagttaccacagggtctgcagaaacctgttgtataactgtagacactctctaatggttctcaaaggaggaaatgtagccttcagtctcctcatttgtcctttgaggaagtccacatttgttcacagttgcagcctttggttttacagtgggaaatggtggtggatgatatggacatatgtagcccagtggcattgtactttctgctgacagctgcacacattacagctgtctccaaacccacagtgatgcttagggaaagaccctgctcaggacccagcaggtcagcaccccagagcagactgataggtccgtgggacccatgttagagcagaaaatttgggctcagcacattttactgttagtagagagccaggaaacgttttctgggttggggattttgtgggattttttaatttttttagtaggttttgtttaacctctgtgcagtttgtatgaatgaattgctatacatttataaggagccagggtctggagggttgctatcactttgtccagcccaaataccttcctgggcaactcctaccatttgtttgcagttgcctctactagctgatggcagtatgctggaaagaggttgtactataaagagagttctttccttctactccagagttgttgtgtagctttgccattgaaccgatcaatttttaaactctttaaagaagcagcacctggccaacatagtgaaaccccgtctctactaaaaatacaaaaaattagctgggcatggtggtgggcgcctgtaatcccagctacttgagaggctcaggcaggagaatcgcttgaacctgggagtggaggttgcagtgagccgagattgcaccattgtattccaccccgggtgacagtgcaagactccatctcaaaaaaaaaaaaaaaatttggcatcatttacaatttcatagaattactgtgaaggcctttctagttgagatgttggggtatttgggattctaattgttaaccccagaagaaggtaatttagcttgtatttatttaaaacccatttagccttttacttatatctggtagaattccagtgatcatcctaataaggtatatttcagaataatttttttttccttcagaataacttagaatcagatgctataagggctcctaggagcagtgtgaaatttccgtaaagataaatttgaatgttgtaaccaagtttatattaaaccaagaggccatttccaatatgattttttgtttctttttaacttgttaagtccctaagagattacatgctagggcttgagtcatttctattgtagataatgatggcccacacagtcaccttcaactatccacataagctaggctttccgcttttgccacggacagtgtgaccaagatatttccagagtaaataacccaccacaaccttggtaattcctcttttcttcttaagctccaggaagcgaaagcagaaggactcttttcagactgccctctgtagcctacattgcagctttccaaaacaggcagctagcactgggaaagcccatgtggtgaccccatatttttctgaggttcttcttttccatggtgttactttattatcagaaagtaaattcagaaaacaggtcttgcccttagcagacaagaaccacaccagtttcttgtaaaggtaacggatacattgggattcaggagtgacacagaggtccagccccagaacttgtaaggattttgtttgaacactgagcagatgcctcctccctgccacccatcacactagttagggctggccatgaattctatgccagagtcactcctgcagtctgctagggatgggccttcttatcccactctcgcacacatcccagtctagtctttgccttcacagagtcctccttgacacccctgacttaatgatagttgctgttttggagtagaattgatcaggtttaagtcatcctgctcaggttgggcatagtggctcatgcctgtaatctcagcactttgggaagccaaagtgggaggattgcttgagcccaggagttccaaaccatcctgggcaacagagggagaccctgtctctaccaagaaaaaaaaaaaaaaaaaaaagttaaaaaaacaattagctggacctggtggtgcacactcagtaggctgaggtgaaaggattcctttaacctgggagactgaagctgcagtgagccatgatcgtgccactgcactccagtctgggggacaaagtgggaccctatctcaaaaaaaaaaaaaaaaagtcatcctcctccaactactgattgacatatggatcatcagttcagaccctcactgcatacaggatccctagagggttctatttaatagcttgaggaagggagactttaaaaggacgtgtgtgagtgaaataggatatagccattaccacggtgccaggacctgacagcgttccaattctttttgcagcatggggaatcaaaggtggcatgccaagttcaactcagggctgaggtatccacattgtccacatcaggcaagccctgcactgacggttgagcctcatggagaggagcatgtgttggaaagagatccctttgttaactgttttgtggtgttctcttcaatgaattagagctcatgccccttttctggctttgctgttgattttggatggtagagaatattcctgagagccttccttttggcccccagcttatgccacccactctcttctcttggttgaattctctgaaggaaaggttcatgtgctattgtcctgttagtcaatagtcttcatatataattgtgttacatatattgctgtagactctcagaaatcagggtagagcttttcctttgagcagtttaatgagtgaattcagcagcaaagtcgcaagaaatggttctccagccaggagaggttatgtttatcctctgattgcccgttttctctgcacacagtgatatcgtattcagtgagaggtgctgttggcacccagcagcaccctgggcacacagcatttcatgtcatgtcacagtgtacaagctaccctctaattcagaaagaagagcattttgcacagagaaaaataaaaagatccatgaatgtcatcttttatcttttattttcagttggctgatgttggaatttttgttcttgtcatgaacttgtaaaccaatcttgccaagatacaagttgttttggtttttcactacaatgacctcttgttcctcctgtcttgactgctgacgttcctcaatgattctattgtctattttatgggaagcagccttcccataggtttccttttacacactgcagggctatctttatactttaaaaaaaacaacaaaaaaaaaaaaggacaagaactgtcactaacctcatggaggggtttgcgtaaaaccatttagcccaccttgagcaaagggtagattccgtgttgtttttttaagctcactgtaataaaatagatctaattcagcattattgtgctacctcaaaggtaaaaaatgttttaaggtcttcttttggtcctgagttctatatacagtgtttgaaatgtctttcatttggaattattttttaaattcttggagtgaattttattttaatctgttttaatcttgtattttaatctcagaagaataagtgattgaaacgtgatcaattcttgctctgtggtgttaaacatataatgaacagtcattaagaattaagtcactgtttgccataaacaaggttgatgttctttttgttgttgttaaggaaaccctagggctcggctttactcttgattaataaaggctgacaaatc

SEQ ID NO: 81793 - DNA, 5206 bp, Homo sapiens
ggcacgaggtccccgcggcggcggcggctgcccagtgacagcggcggcggtgccaggtcggccgtggtagcgtagggttgcgcggcccggaaacgcagagccggccaaagagcggcgcgacgtgagccggggccgtgcgcgaagagacctcgcgggcgcggagcgaaaggccggcgtgagtgagcgcggagacagtggccgccggcggcccaacccgtctatcccttcggccgccgccggcatgagccacatccagatcccgccggggctcacggagctgctgcagggctacacggtggaggtgctgcgacagcagccgcctgacctcgtcgaattcgcagtggagtacttcacccgcctgcgcgaggcccgcgccccagcctcagtcctgcccgccgccaccccacgccagagcctgggccaccccccgccagaacccggcccggaccgtgtcgccgacgccaaaggggacagcgagtcggaggaggacgaggacttggaagttccagttcctagcagatttaatagacgagtatcagtctgtgctgagacctataaccctgatgaggaagaggaagatacagatccaagggtgattcatcctaaaactgatgaacagagatgcagacttcaggaagcttgcaaagatattctccttttcaaaaatcttgatcaggaacagctttctcaagttctcgatgccatgtttgaaaggatagtcaaagctgatgagcatgtcattgaccaaggagatgatggagacaacttttatgtcatagaacggggaacttatgacattttagtaacaaaagataatcaaacccgctctgttggtcaatatgacaaccgtggcagttttggagaactagctctgatgtacaacaccccgagagctgctaccattgttgctacctcagaaggctccctttggggactggaccgggtgacttttagaagaatcatagtgaaaaataatgcaaagaagaggaagatgtttgaatcatttattgagtctgtgcccctccttaaatcactagaggtgtcagaacgaatgaagattgtggatgtaataggagagaagatctataaggatggagaacgcataatcactcagggtgaaaaggctgatagcttttacatcatagagtctggcgaagtgagcatcttgattagaagcaggactaaatcaaacaaggatggtgggaaccaggaggtcgagattgcccgctgccataaggggcagtactttggagagcttgccctggtcaccaacaaacccagagctgcctcagcttatgcagttggagatgtcaaatgcttagttatggatgtacaagcattcgagaggcttctggggccctgcatggacatcatgaagaggaacatctcacactatgaggaacagctggtgaagatgtttggctccagcgtggatctgggcaacctcgggcagtaggtgtgccacaccccagagccttcttagtgtgacaccaaaaccttctggtcagccacagaacacatacagaaaacagacatgacagaactgttcctgccgttgccgccactgctgccattgctgtggttatgggcatttagaaaacttgaaagtcagcactaaaggatgggcagaggttcaacccacacctccactttgcttctgaaggcccattcattagaccacttgtaaagattactccaacccagtttttatatctttggttcaaaacggcatgtctctccaacaatttaagtgcctgatacaaagtccaaagtataaacatgctcctttcctctcttgctgctactcttgcttttggaagttaccacagggtctgcagaaacctgttgtataactgtagacactctctaatggttctcaaaggaggaaatgtagccttcagtctcctcatttgtcctttgaggaagtccacatttgttcacagttgcagcctttggttttacagtgggaaatggtggtggatgatatggacatatgtagcccagtggcattgtactttctgctgacagctgcacacattacagctgtctccaaacccacagtgatgcttagggaaagaccctgctcaggacccagcaggtcagcaccccagagcagactgataggtccgtgggacccatgttagagcagaaaatttgggctcagcacattttactgttagtagagagccaggaaacgttttctgggttggggattttgtgggattttttaatttttttagtaggttttgtttaacctctgtgcagtttgtatgaatgaattgctatacatttataaggagccagggtctggagggttgctatcactttgtccagcccaaataccttcctgggcaactcctaccatttgtttgcagttgcctctactagctgatggcagtatgctggaaagaggttgtactataaagagagttctttccttctactccagagttgttgtgtagctttgccattgaaccgatcaatttttaaactctttaaagaagcagcagctatttttttgaaattaaagaaaattctcaggccaggctcaatggctcatgcctataattgtagtgctttgggaggctgagctgggaggatcgcttaagaccagcctaggcaacagagtgagatcctgtctctacaaaaacaaaaattttttttttgttttctttttgagacggagtttcgctcttgttgcccaggctggagtgcaatggtgcggtcttggctcaccgcaacctccgcctcccagattaaagtgattctcctgcctcaacctcctgagtagctgggattgcaggcatgcgccaccatgccgggcgaattttgtatttttaatagagacggggtttctctgtgttggtcaggctggtctcaaactcccaacctcaggtgatccgcccacctcagcctctcagagtgctgggattacagatgtgagccactgcacctggcaaaaaaaaaatttttttttaatttgtcaggtgtggtgatgcatgcatgtagtcccaaatacttaggaggctgaggtggaaggatcacttgagcccaggaggtcaaggcaacagtgagctgtgatcatgccactgcactccagtctgggtgacacagtgagaccctgtctcttaaaaaaaaaaaaagaaagaaaaaaaattattctttaggtaatttcacttggacatattcatgtatatggagtttgtcagctgactcaggcatttaccctaaagatcaaatctgttttcaaaaattggcattggccaggcacggtgacccacacctgtaatcccagcactttgggaggccgaggcgggcggatcacgaggtcaggggttcaagaccagcctggccaacatagtgaaaccccgtctctactaaaaatacaaaaaattagctgggcatggtggtgggcgcctgtaatcccagctacttgagaggctcaggcaggagaatcgcttgaacctgggagtggaggttgcagtgagccgagattgcaccattgtattccaccccgggtgacagtgcaagactccatctcaaaaaaaaaaaaaaaatttggcatcatttacaatttcatagaattactgtgaaggcctttctagttgagatgttggggtatttgggattctaattgttaaccccagaagaaggtaatttagcttgtatttatttaaaacccatttagccttttacttatatctggtagaattccagtgatcatcctaataaggtatatttcagaataatttttttttccttcagaataacttagaatcagatgctataagggctcctaggagcagtgtgaaatttccgtaaagataaatttgaatgttgtaaccaagtttatattaaaccaagaggccatttccaatatgattttttgtttctttttaacttgttaagtccctaagagattacatgctagggcttgagtcatttctattgtagataatgatggcccacacagtcaccttcaactatccacataagctaggctttccgcttttgccacggacagtgtgaccaagatatttccagagtaaataacccaccacaaccttggtaattcctcttttcttcttaagctccaggaagcgaaagcagaaggactcttttcagactgccctctgtagcctacattgcagctttccaaaacaggcagctagcactgggaaagcccatgtggtgaccccatatttttctgaggttcttcttttccatggtgttactttattatcagaaagtaaattcagaaaacaggtcttgcccttagcagacaagaaccacaccagtttcttgtaaaggtaacggatacattgggattcaggagtgacacagaggtccagccccagaacttgtaaggattttgtttgaacactgagcagatgcctcctccctgccacccatcacactagttagggctggccatgaattctatgccagagtcactcctgcagtctgctagggatgggccttcttatcccactctcgcacacatcccagtctagtctttgccttcacagagtcctccttgacacccctgacttaatgatagttgctgttttggagtagaattgatcaggtttaagtcatcctgctcaggttgggcatagtggctcatgcctgtaatctcagcactttgggaagccaaagtgggaggattgcttgagcccaggagttccaaaccatcctgggcaacagagggagaccctgtctctaccaagaaaaaaaaaaaaaaaaaaaagttaaaaaaacaattagctggacctggtggtgcacactcagtaggctgaggtgaaaggattcctttaacctgggagactgaagctgcagtgagccatgatcgtgccactgcactccagtctgggggacaaagtgggaccctatctcaaaaaaaaaaaaaaaaagtcatcctcctccaactactgattgacatatggatcatcagttcagaccctcactgcatacaggatccctagagggttctatttaatagcttgaggaagggagactttaaaaggacgtgtgtgagtgaaataggatatagccattaccacggtgccgatgaatagggtgccgatgaatagcgatattcatcggcacctcgctattcatcggcaccggggttggtgtaaaataggcgtaggtagaagtagaggttaaggagggtgatagcgccgatggaatagctattctatcc

SEQ ID NO: 81794 - DNA, 5534 bp, Homo sapiens
tcccatcagcaagccttgacatattctgccatcttttactgctgtctaggcctaggcagtttatgtgaccaaccagagatggatgaatggatgctttcagcaaacatttctgagtactgatgacagcctgtgagcaagacaggcatgcaggttctttagccgtatgaaaagaactgatgtccagggctgtgggagaatggggagaacaggagctgctggactctgtaaagtctctaacctggatgacagtcttctgaattcatatagaaacatccctttttgcaagtggctggtgtcccaaggcgtaatctcatacaacatgaatgggtatgtttaggaaaaggtttgcatgagggaaatggcttgaattcattctctccctcacctctttttaacaatgcagttatggatgtacaagcattcgagaggcttctggggccctgcatggacatcatgaagaggaacatctcacactatgaggaacagctggtgaagatgtttggctccagcgtggatctgggcaacctcgggcagtaggtgtgccacaccccagagccttcttagtgtgacaccaaaaccttctggtcagccacagaacacatacagaaaacagacatgacagaactgttcctgccgttgccgccactgctgccattgctgtggttatgggcatttagaaaacttgaaagtcagcactaaaggatgggcagaggttcaacccacacctccactttgcttctgaaggcccattcattagaccacttgtaaagattactccaacccagtttttatatctttggttcaaaacggcatgtctctccaacaatttaagtgcctgatacaaagtccaaagtataaacatgctcctttcctctcttgctgctactcttgcttttggaagttaccacagggtctgcagaaacctgttgtataactgtagacactctctaatggttctcaaaggaggaaatgtagccttcagtctcctcatttgtcctttgaggaagtccacatttgttcacagttgcagcctttggttttacagtgggaaatggtggtggatgatatggacatatgtagcccagtggcattgtactttctgctgacagctgcacacattacagctgtctccaaacccacagtgatgcttagggaaagaccctgctcaggacccagcaggtcagcaccccagagcagactgataggtccgtgggacccatgttagagcagaaaatttgggctcagcacattttactgttagtagagagccaggaaacgttttctgggttggggattttgtgggattttttaatttttttagtaggttttgtttaacctctgtgcagtttgtatgaatgaattgctatacatttataaggagccagggtctggagggttgctatcactttgtccagcccaaataccttcctgggcaactcctaccatttgtttgcagttgcctctactagctgatggcagtatgctggaaagaggttgtactataaagagagttctttccttctactccagagttgttgtgtagctttgccattgaaccgatcaatttttaaactctttaaagaagcagcagctatttttttgaaattaaagaaaattctcaggccaggctcaatggctcatgcctataattgtagtgctttgggaggctgagctgggaggatcgcttaagaccagcctaggcaacagagtgagatcctgtctctacaaaaacaaaaattttttttttgttttctttttgagacggagtttcgctcttgttgcccaggctggagtgcaatggtgcggtcttggctcaccgcaacctccgcctcccagattaaagtgattctcctgcctcaacctcctgagtagctgggattgcaggcatgcgccaccatgccgggcgaattttgtatttttaatagagacggggtttctctgtgttggtcaggctggtctcaaactcccaacctcaggtgatccgcccacctcagcctctcagagtgctgggattacagatgtgagccactgcacctggcaaaaaaaaaatttttttttaatttgtcaggtgtggtgatgcatgcatgtagtcccaaatacttaggaggctgaggtggaaggatcacttgagcccaggaggtcaaggcaacagtgagctgtgatcatgccactgcactccagtctgggtgacacagtgagaccctgtctcttaaaaaaaaaaaaagaaagaaaaaaaattattctttaggtaatttcacttggacatattcatgtatatggagtttgtcagctgactcaggcatttaccctaaagatcaaatctgttttcaaaaattggcattggccaggcacggtgacccacacctgtaatcccagcactttgggaggccgaggcgggcggatcacgaggtcaggggttcaagaccagcctggccaacatagtgaaaccccgtctctactaaaaatacaaaaaattagctgggcatggtggtgggcgcctgtaatcccagctacttgagaggctcaggcaggagaatcgcttgaacctgggagtggaggttgcagtgagccgagattgcaccattgtattccaccccgggtgacagtgcaagactccatctcaaaaaaaaaaaaaaaatttggcatcatttacaatttcatagaattactgtgaaggcctttctagttgagatgttggggtatttgggattctaattgttaaccccagaagaaggtaatttagcttgtatttatttaaaacccatttagccttttacttatatctggtagaattccagtgatcatcctaataaggtatatttcagaataatttttttttccttcagaataacttagaatcagatgctataagggctcctaggagcagtgtgaaatttccgtaaagataaatttgaatgttgtaaccaagtttatattaaaccaagaggccatttccaatatgattttttgtttctttttaacttgttaagtccctaagagattacatgctagggcttgagtcatttctattgtagataatgatggcccacacagtcaccttcaactatccacataagctaggctttccgcttttgccacggacagtgtgaccaagatatttccagagtaaataacccaccacaaccttggtaattcctcttttcttcttaagctccaggaagcgaaagcagaaggactcttttcagactgccctctgtagcctacattgcagctttccaaaacaggcagctagcactgggaaagcccatgtggtgaccccatatttttctgaggttcttcttttccatggtgttactttattatcagaaagtaaattcagaaaacaggtcttgcccttagcagacaagaaccacaccagtttcttgtaaaggtaacggatacattgggattcaggagtgacacagaggtccagccccagaacttgtaaggattttgtttgaacactgagcagatgcctcctccctgccacccatcacactagttagggctggccatgaattctatgccagagtcactcctgcagtctgctagggatgggccttcttatcccactctcgcacacatcccagtctagtctttgccttcacagagtcctccttgacacccctgacttaatgatagttgctgttttggagtagaattgatcaggtttaagtcatcctgctcaggttgggcatagtggctcatgcctgtaatctcagcactttgggaagccaaagtgggaggattgcttgagcccaggagttccaaaccatcctgggcaacagagggagaccctgtctctaccaagaaaaaaaaaaaaaaaaaaaagttaaaaaaacaattagctggacctggtggtgcacactcagtaggctgaggtgaaaggattcctttaacctgggagactgaagctgcagtgagccatgatcgtgccactgcactccagtctgggggacaaagtgggaccctatctcaaaaaaaaaaaaaaaaagtcatcctcctccaactactgattgacatatggatcatcagttcagaccctcactgcatacaggatccctagagggttctatttaatagcttgaggaagggagactttaaaaggacgtgtgtgagtgaaataggatatagccattaccacggtgccaggacctgacagcgttccaattctttttgcagcatggggaatcaaaggtggcatgccaagttcaactcagggctgaggtatccacattgtccacatcaggcaagccctgcactgacggttgagcctcatggagaggagcatgtgttggaaagagatccctttgttaactgttttgtggtgttctcttcaatgaattagagctcatgccccttttctggctttgctgttgattttggatggtagagaatattcctgagagccttccttttggcccccagcttatgccacccactctcttctcttggttgaattctctgaaggaaaggttcatgtgctattgtcctgttagtcaatagtcttcatatataattgtgttacatatattgctgtagactctcagaaatcagggtagagcttttcctttgagcagtttaatgagtgaattcagcagcaaagtcgcaagaaatggttctccagccaggagaggttatgtttatcctctgattgcccgttttctctgcacacagtgatatcgtattcagtgagaggtgctgttggcacccagcagcaccctgggcacacagcatttcatgtcatgtcacagtgtacaagctaccctctaattcagaaagaagagcattttgcacagagaaaaataaaaagatccatgaatgtcatcttttatcttttattttcagttggctgatgttggaatttttgttcttgtcatgaacttgtaaaccaatcttgccaagatacaagttgttttggtttttcactacaatgacctcttgttcctcctgtcttgactgctgacgttcctcaatgattctattgtctattttatgggaagcagccttcccataggtttccttttacacactgcagggctatctttatactttaaaaaaaacaacaaaaaaaaaaaaggacaagaactgtcactaacctcatggaggggtttgcgtaaaaccatttagcccaccttgagcaaagggtagattccgtgttgtttttttaagctcactgtaataaaatagatctaattcagcattattgtgctacctcaaaggtaaaaaatgttttaaggtcttcttttggtcctgagttctatatacagtgtttgaaatgtctttcatttggaattattttttaaattcttggagtgaattttattttaatctgttttaatcttgtattttaatctcagaagaataagtgattgaaacgtgatcaattcttgctctgtggtgttaaacatataatgaacagtcattaagaattaagtcactgtttgccataaacaaggttgatgttctttttgttgttgttaaggaaaccctagggctcggctttactcttgattaataaaggctgacaaatc

SEQ ID NO: 81795 - DNA, 6399 bp, Homo sapiens
ggcacgaggtccccgcggcggcggcggctgcccagtgacagcggcggcggtgccaggtcggccgtggtagcgtagggttgcgcggcccggaaacgcagagccggccaaagagcggcgcgacgtgagccggggccgtgcgcgaagagacctcgcgggcgcggagcgaaaggccggcgtgagtgagcgcggagacagtggccgccggcggcccaacccgtctatcccttcggccgccgccggcatgagccacatccagatcccgccggggctcacggagctgctgcagggctacacggtggaggtgctgcgacagcagccgcctgacctcgtcgaattcgcagtggagtacttcacccgcctgcgcgaggcccgcgccccagcctcagtcctgcccgccgccaccccacgccagagcctgggccaccccccgccagaacccggcccggaccgtgtcgccgacgccaaaggggacagcgagtcggaggaggacgaggacttggaagttccagttcctagcagatttaatagacgagtatcagtctgtgctgagacctataaccctgatgaggaagaggaagatacagatccaagggtgattcatcctaaaactgatgaacagagatgcagacttcaggaagcttgcaaagatattctccttttcaaaaatcttgatcaggaacagctttctcaagttctcgatgccatgtttgaaaggatagtcaaagctgatgagcatgtcattgaccaaggagatgatggagacaacttttatgtcatagaacggggaacttatgacattttagtaacaaaagataatcaaacccgctctgttggtcaatatgacaaccgtggcagttttggagaactagctctgatgtacaacaccccgagagctgctaccattgttgctacctcagaaggctccctttggggactggaccgggtgacttttagaagaatcatagtgaaaaataatgcaaagaagaggaagatgtttgaatcatttattgagtctgtgcccctccttaaatcactagaggtgtcagaacgaatgaagattgtggatgtaataggagagaagatctataaggatggagaacgcataatcactcagggtgaaaaggctgatagcttttacatcatagagtctggcgaagtgagcatcttgattagaagcaggactaaatcaaacaaggatggtgggaaccaggaggtcgagattgcccgctgccataaggggcagtactttggagagcttgccctggtcaccaacaaacccagagctgcctcagcttatgcagttggagatgtcaaatgcttagttatggatgtacaagcattcgagaggcttctggggccctgcatggacatcatgaagaggaacatctcacactatgaggaacagctggtgaagatgtttggctccagcgtggatctgggcaacctcgggcagtaggtgtgccacaccccagagccttcttagtgtgacaccaaaaccttctggtcagccacagaacacatacagaaaacagacatgacagaactgttcctgccgttgccgccactgctgccattgctgtggttatgggcatttagaaaacttgaaagtcagcactaaaggatgggcagaggttcaacccacacctccactttgcttctgaaggcccattcattagaccacttgtaaagattactccaacccagtttttatatctttggttcaaaacggcatgtctctccaacaatttaagtgcctgatacaaagtccaaagtataaacatgctcctttcctctcttgctgctactcttgcttttggaagttaccacagggtctgcagaaacctgttgtataactgtagacactctctaatggttctcaaaggaggaaatgtagccttcagtctcctcatttgtcctttgaggaagtccacatttgttcacagttgcagcctttggttttacagtgggaaatggtggtggatgatatggacatatgtagcccagtggcattgtactttctgctgacagctgcacacattacagctgtctccaaacccacagtgatgcttagggaaagaccctgctcaggacccagcaggtcagcaccccagagcagactgataggtccgtgggacccatgttagagcagaaaatttgggctcagcacattttactgttagtagagagccaggaaacgttttctgggttggggattttgtgggattttttaatttttttagtaggttttgtttaacctctgtgcagtttgtatgaatgaattgctatacatttataaggagccagggtctggagggttgctatcactttgtccagcccaaataccttcctgggcaactcctaccatttgtttgcagttgcctctactagctgatggcagtatgctggaaagaggttgtactataaagagagttctttccttctactccagagttgttgtgtagctttgccattgaaccgatcaatttttaaactctttaaagaagcagcagctatttttttgaaattaaagaaaattctcaggccaggctcaatggctcatgcctataattgtagtgctttgggaggctgagctgggaggatcgcttaagaccagcctaggcaacagagtgagatcctgtctctacaaaaacaaaaattttttttttgttttctttttgagacggagtttcgctcttgttgcccaggctggagtgcaatggtgcggtcttggctcaccgcaacctccgcctcccagattaaagtgattctcctgcctcaacctcctgagtagctgggattgcaggcatgcgccaccatgccgggcgaattttgtatttttaatagagacggggtttctctgtgttggtcaggctggtctcaaactcccaacctcaggtgatccgcccacctcagcctctcagagtgctgggattacagatgtgagccactgcacctggcaaaaaaaaaatttttttttaatttgtcaggtgtggtgatgcatgcatgtagtcccaaatacttaggaggctgaggtggaaggatcacttgagcccaggaggtcaaggcaacagtgagctgtgatcatgccactgcactccagtctgggtgacacagtgagaccctgtctcttaaaaaaaaaaaaagaaagaaaaaaaattattctttaggtaatttcacttggacatattcatgtatatggagtttgtcagctgactcaggcatttaccctaaagatcaaatctgttttcaaaaattggcattggccaggcacggtgacccacacctgtaatcccagcactttgggaggccgaggcgggcggatcacgaggtcaggggttcaagaccagcctggccaacatagtgaaaccccgtctctactaaaaatacaaaaaattagctgggcatggtggtgggcgcctgtaatcccagctacttgagaggctcaggcaggagaatcgcttgaacctgggagtggaggttgcagtgagccgagattgcaccattgtattccaccccgggtgacagtgcaagactccatctcaaaaaaaaaaaaaaaatttggcatcatttacaatttcatagaattactgtgaaggcctttctagttgagatgttggggtatttgggattctaattgttaaccccagaagaaggtaatttagcttgtatttatttaaaacccatttagccttttacttatatctggtagaattccagtgatcatcctaataaggtatatttcagaataatttttttttccttcagaataacttagaatcagatgctataagggctcctaggagcagtgtgaaatttccgtaaagataaatttgaatgttgtaaccaagtttatattaaaccaagaggccatttccaatatgattttttgtttctttttaacttgttaagtccctaagagattacatgctagggcttgagtcatttctattgtagataatgatggcccacacagtcaccttcaactatccacataagctaggctttccgcttttgccacggacagtgtgaccaagatatttccagagtaaataacccaccacaaccttggtaattcctcttttcttcttaagctccaggaagcgaaagcagaaggactcttttcagactgccctctgtagcctacattgcagctttccaaaacaggcagctagcactgggaaagcccatgtggtgaccccatatttttctgaggttcttcttttccatggtgttactttattatcagaaagtaaattcagaaggatacattgggattcaggagtgacacagaggtccagccccagaacttgtaaggattttgtttgaacactgagcagatgcctcctccctgccacccatcacactagttagggctggccatgaattctatgccagagtcactcctgcagtctgctagggatgggccttcttatcccactctcgcacacatcccagtctagtctttgccttcacagagtcctccttgacacccctgacttaatgatagttgctgttttggagtagaattgatcaggtttaagtcatcctgctcaggttgggcatagtggctcatgcctgtaatctcagcactttgggaagccaaagtgggaggattgcttgagcccaggagttccaaaccatcctgggcaacagagggagaccctgtctctaccaagaaaaaaaaaaaaaaaaaaaagttaaaaaaacaattagctggacctggtggtgcacactcagtaggctgaggtgaaaggattcctttaacctgggagactgaagctgcagtgagccatgatcgtgccactgcactccagtctgggggacaaagtgggaccctatctcaaaaaaaaaaaaaaaaagtcatcctcctccaactactgattgacatatggatcatcagttcagaccctcactgcatacaggatccctagagggttctatttaatagcttgaggaagggagactttaaaaggacgtgtgtgagtgaaataggatatagccattaccacggtgccaggacctgacagcgttccaattctttttgcagcatggggaatcaaaggtggcatgccaagttcaactcagggctgaggtatccacattgtccacatcaggcaagccctgcactgacggttgagcctcatggagaggagcatgtgttggaaagagatccctttgttaactgttttgtggtgttctcttcaatgaattagagctcatgccccttttctggctttgctgttgattttggatggtagagaatattcctgagagccttccttttggcccccagcttatgccacccactctcttctcttggttgaattctctgaaggaaaggttcatgtgctattgtcctgttagtcaatagtcttcatatataattgtgttacatatattgctgtagactctcagaaatcagggtagagcttttcctttgagcagtttaatgagtgaattcagcagcaaagtcgcaagaaatggttctccagccaggagaggttatgtttatcctctgattgcccgttttctctgcacacagtgatatcgtattcagtgagaggtgctgttggcacccagcagcaccctgggcacacagcatttcatgtcatgtcacagtgtacaagctaccctctaattcagaaagaagagcattttgcacagagaaaaataaaaagatccatgaatgtcatcttttatcttttattttcagttggctgatgttggaatttttgttcttgtcatgaacttgtaaaccaatcttgccaagatacaagttgttttggtttttcactacaatgacctcttgttcctcctgtcttgactgctgacgttcctcaatgattctattgtctattttatgggaagcagccttcccataggtttccttttacacactgcagggctatctttatactttaaaaaaaacaacaaaaaaaaaaaaggacaagaactgtcactaacctcatggaggggtttgcgtaaaaccatttagcccaccttgagcaaagggtagattccgtgttgtttttttaagctcactgtaataaaatagatctaattcagcattattgtgctacctcaaaggtaaaaaatgttttaaggtcttcttttggtcctgagttctatatacagtgtttgaaatgtctttcatttggaattattttttaaattcttggagtgaattttattttaatctgttttaatcttgtattttaatctcagaagaataagtgattgaaacgtgatcaattcttgctctgtggtgttaaacatataatgaacagtcattaagaattaagtcactgtttgccataaacaaggttgatgttctttttgttgttgttaaggaaaccctagggctcggctttactcttgattaataaaggctgacaaatc

SEQ ID NO: 81796 - DNA, 5704 bp, Homo sapiens
atcctcctgcctcagcctcccaaatagctgggactacaggtgtgtgccaccacacccagctaattttttttttttttttttttgaaatgagggtctcactctgtcacccaggctggagtgcagtgacatgatctcggctcactagaggtgtcttttttgatattgaacagtgacagtgagctcataaatgtttaggtgttttctgttttgggttctatttatgacccataggtggcacctattgagtgctagatagcaagcaacagcatgtgggcatctggctggctcaggctataggtcctttacttccagtgatgactcaagattgaagtatcattaaacacttaattaacacagtaacttacatattcctctaatatttgctttggccagttaattaaaccatagatgttcctgtatataggcatttactagaattttcatattctttcttgtaggaccgggtgacttttagaagaatcatagtgaaaaataatgcaaagaagaggaagatgtttgaatcatttattgagtctgtgcccctccttaaatcactagaggtgtcagaacgaatgaagattgtggatgtaataggagagaagatctataaggatggagaacgcataatcactcagggtgaaaaggctgatagcttttacatcatagagtttggctccagcgtggatctgggcaacctcgggcagtaggtgtgccacaccccagagccttcttagtgtgacaccaaaaccttctggtcagccacagaacacatacagaaaacagacatgacagaactgttcctgccgttgccgccactgctgccattgctgtggttatgggcatttagaaaacttgaaagtcagcactaaaggatgggcagaggttcaacccacacctccactttgcttctgaaggcccattcattagaccacttgtaaagattactccaacccagtttttatatctttggttcaaaacggcatgtctctccaacaatttaagtgcctgatacaaagtccaaagtataaacatgctcctttcctctcttgctgctactcttgcttttggaagttaccacagggtctgcagaaacctgttgtataactgtagacactctctaatggttctcaaaggaggaaatgtagccttcagtctcctcatttgtcctttgaggaagtccacatttgttcacagttgcagcctttggttttacagtgggaaatggtggtggatgatatggacatatgtagcccagtggcattgtactttctgctgacagctgcacacattacagctgtctccaaacccacagtgatgcttagggaaagaccctgctcaggacccagcaggtcagcaccccagagcagactgataggtccgtgggacccatgttagagcagaaaatttgggctcagcacattttactgttagtagagagccaggaaacgttttctgggttggggattttgtgggattttttaatttttttagtaggttttgtttaacctctgtgcagtttgtatgaatgaattgctatacatttataaggagccagggtctggagggttgctatcactttgtccagcccaaataccttcctgggcaactcctaccatttgtttgcagttgcctctactagctgatggcagtatgctggaaagaggttgtactataaagagagttctttccttctactccagagttgttgtgtagctttgccattgaaccgatcaatttttaaactctttaaagaagcagcagctatttttttgaaattaaagaaaattctcaggccaggctcaatggctcatgcctataattgtagtgctttgggaggctgagctgggaggatcgcttaagaccagcctaggcaacagagtgagatcctgtctctacaaaaacaaaaattttttttttgttttctttttgagacggagtttcgctcttgttgcccaggctggagtgcaatggtgcggtcttggctcaccgcaacctccgcctcccagattaaagtgattctcctgcctcaacctcctgagtagctgggattgcaggcatgcgccaccatgccgggcgaattttgtatttttaatagagacggggtttctctgtgttggtcaggctggtctcaaactcccaacctcaggtgatccgcccacctcagcctctcagagtgctgggattacagatgtgagccactgcacctggcaaaaaaaaaatttttttttaatttgtcaggtgtggtgatgcatgcatgtagtcccaaatacttaggaggctgaggtggaaggatcacttgagcccaggaggtcaaggcaacagtgagctgtgatcatgccactgcactccagtctgggtgacacagtgagaccctgtctcttaaaaaaaaaaaaagaaagaaaaaaaattattctttaggtaatttcacttggacatattcatgtatatggagtttgtcagctgactcaggcatttaccctaaagatcaaatctgttttcaaaaattggcattggccaggcacggtgacccacacctgtaatcccagcactttgggaggccgaggcgggcggatcacgaggtcaggggttcaagaccagcctggccaacatagtgaaaccccgtctctactaaaaatacaaaaaattagctgggcatggtggtgggcgcctgtaatcccagctacttgagaggctcaggcaggagaatcgcttgaacctgggagtggaggttgcagtgagccgagattgcaccattgtattccaccccgggtgacagtgcaagactccatctcaaaaaaaaaaaaaaaatttggcatcatttacaatttcatagaattactgtgaaggcctttctagttgagatgttggggtatttgggattctaattgttaaccccagaagaaggtaatttagcttgtatttatttaaaacccatttagccttttacttatatctggtagaattccagtgatcatcctaataaggtatatttcagaataatttttttttccttcagaataacttagaatcagatgctataagggctcctaggagcagtgtgaaatttccgtaaagataaatttgaatgttgtaaccaagtttatattaaaccaagaggccatttccaatatgattttttgtttctttttaacttgttaagtccctaagagattacatgctagggcttgagtcatttctattgtagataatgatggcccacacagtcaccttcaactatccacataagctaggctttccgcttttgccacggacagtgtgaccaagatatttccagagtaaataacccaccacaaccttggtaattcctcttttcttcttaagctccaggaagcgaaagcagaaggactcttttcagactgccctctgtagcctacattgcagctttccaaaacaggcagctagcactgggaaagcccatgtggtgaccccatatttttctgaggttcttcttttccatggtgttactttattatcagaaagtaaattcagaaaacaggtcttgcccttagcagacaagaaccacaccagtttcttgtaaaggtaacggatacattgggattcaggagtgacacagaggtccagccccagaacttgtaaggattttgtttgaacactgagcagatgcctcctccctgccacccatcacactagttagggctggccatgaattctatgccagagtcactcctgcagtctgctagggatgggccttcttatcccactctcgcacacatcccagtctagtctttgccttcacagagtcctccttgacacccctgacttaatgatagttgctgttttggagtagaattgatcaggtttaagtcatcctgctcaggttgggcatagtggctcatgcctgtaatctcagcactttgggaagccaaagtgggaggattgcttgagcccaggagttccaaaccatcctgggcaacagagggagaccctgtctctaccaagaaaaaaaaaaaaaaaaaaaagttaaaaaaacaattagctggacctggtggtgcacactcagtaggctgaggtgaaaggattcctttaacctgggagactgaagctgcagtgagccatgatcgtgccactgcactccagtctgggggacaaagtgggaccctatctcaaaaaaaaaaaaaaaaagtcatcctcctccaactactgattgacatatggatcatcagttcagaccctcactgcatacaggatccctagagggttctatttaatagcttgaggaagggagactttaaaaggacgtgtgtgagtgaaataggatatagccattaccacggtgccaggacctgacagcgttccaattctttttgcagcatggggaatcaaaggtggcatgccaagttcaactcagggctgaggtatccacattgtccacatcaggcaagccctgcactgacggttgagcctcatggagaggagcatgtgttggaaagagatccctttgttaactgttttgtggtgttctcttcaatgaattagagctcatgccccttttctggctttgctgttgattttggatggtagagaatattcctgagagccttccttttggcccccagcttatgccacccactctcttctcttggttgaattctctgaaggaaaggttcatgtgctattgtcctgttagtcaatagtcttcatatataattgtgttacatatattgctgtagactctcagaaatcagggtagagcttttcctttgagcagtttaatgagtgaattcagcagcaaagtcgcaagaaatggttctccagccaggagaggttatgtttatcctctgattgcccgttttctctgcacacagtgatatcgtattcagtgagaggtgctgttggcacccagcagcaccctgggcacacagcatttcatgtcatgtcacagtgtacaagctaccctctaattcagaaagaagagcattttgcacagagaaaaataaaaagatccatgaatgtcatcttttatcttttattttcagttggctgatgttggaatttttgttcttgtcatgaacttgtaaaccaatcttgccaagatacaagttgttttggtttttcactacaatgacctcttgttcctcctgtcttgactgctgacgttcctcaatgattctattgtctattttatgggaagcagccttcccataggtttccttttacacactgcagggctatctttatactttaaaaaaaacaacaaaaaaaaaaaaggacaagaactgtcactaacctcatggaggggtttgcgtaaaaccatttagcccaccttgagcaaagggtagattccgtgttgtttttttaagctcactgtaataaaatagatctaattcagcattattgtgctacctcaaaggtaaaaaatgttttaaggtcttcttttggtcctgagttctatatacagtgtttgaaatgtctttcatttggaattattttttaaattcttggagtgaattttattttaatctgttttaatcttgtattttaatctcagaagaataagtgattgaaacgtgatcaattcttgctctgtggtgttaaacatataatgaacagtcattaagaattaagtcactgtttgccataaacaaggttgatgttctttttgttgttgttaaggaaaccctagggctcggctttactcttgattaataaaggctgacaaatc

SEQ ID NO: 81797 - DNA, 4371 bp, Homo sapiens
ggcacgaggtccccgcggcggcggcggctgcccagtgacagcggcggcggtgccaggtcggccgtggtagcgtagggttgcgcggcccggaaacgcagagccggccaaagagcggcgcgacgtgagccggggccgtgcgcgaagagacctcgcgggcgcggagcgaaaggccggcgtgagtgagcgcggagacagtggccgccggcggcccaacccgtctatcccttcggccgccgccggcatgagccacatccagatcccgccggggctcacggagctgctgcagggctacacggtggaggtgctgcgacagcagccgcctgacctcgtcgaattcgcagtggagtacttcacccgcctgcgcgaggcccgcgccccagcctcagtcctgcccgccgccaccccacgccagagcctgggccaccccccgccagaacccggcccggaccgtgtcgccgacgccaaaggggacagcgagtcggaggaggacgaggacttggaagttccagttcctagcagatttaatagacgagtatcagtctgtgctgagacctataaccctgatgaggaagaggaagatacagatccaagggtgattcatcctaaaactgatgaacagagatgcagacttcaggaagcttgcaaagatattctccttttcaaaaatcttgatcaggaacagctttctcaagttctcgatgccatgtttgaaaggatagtcaaagctgatgagcatgtcattgaccaaggagatgatggagacaacttttatgtcatagaacggggaacttatgacattttagtaacaaaagataatcaaacccgctctgttggtcaatatgacaaccgtggcagttttggagaactagctctgatgtacaacaccccgagagctgctaccattgttgctacctcagaaggctccctttggggactggaccgggtgacttttagaagaatcatagtgaaaaataatgcaaagaagaggaagatgtttgaatcatttattgagtctgtgcccctccttaaatcactagaggtgtcagaacgaatgaagattgtggatgtaataggagagaagatctataaggatggagaacgcataatcactcagggtgaaaaggctgatagcttttacatcatagagtctggcgaagtgagcatcttgattagaagcaggactaaatcaaacaaggatggtgggaaccaggaggtcgagattgcccgctgccataaggggcagtactttggagagcttgccctggtcaccaacaaacccagagctgcctcagcttatgcagttggagatgtcaaatgcttagttatggatgtacaagcattcgagaggcttctggggccctgcatggacatcatgaagaggaacatctcacactatgaggaacagctggtgaagatgtttggctccagcgtggatctgggcaacctcgggcagtaggtgtgccacaccccagagccttcttagtgtgacaccaaaaccttctggtcagccacagaacacatacagaaaacagacatgacagaactgttcctgccgttgccgccactgctgccattgctgtggttatgggcatttagaaaacttgaaagtcagcactaaaggatgggcagaggttcaacccacacctccactttgcttctgaaggcccattcattagaccacttgtaaagattactccaacccagtttttatatctttggttcaaaacggcatgtctctccaacaatttaagtgcctgatacaaagtccaaagtataaacatgctcctttcctctcttgctgctactcttgcttttggaagttaccacagggtctgcagaaacctgttgtataactgtagacactctctaatggttctcaaaggaggaaatgtagccttcagtctcctcatttgtcctttgaggaagtccacatttgttcacagttgcagcctttggttttacagtgggaaatggtggtggatgatatggacatatgtagcccagtggcattgtactttctgctgacagctgcacacattacagctgtctccaaacccacagtgatgcttagggaaagaccctgctcaggacccagcaggtcagcaccccagagcagactgataggtccgtgggacccatgttagagcagaaaatttgggctcagcacattttactgttagtagagagccaggaaacgttttctgggttggggattttgtgggattttttaatttttttagtaggttttgtttaacctctgtgcagtttgtatgaatgaattgctatacatttataaggagccagggtctggagggttgctatcactttgtccagcccaaataccttcctgggcaactcctaccatttgtttgcagttgcctctactagctgatggcagtatgctggaaagaggttgtactataaagagagttctttccttctactccagagttgttgtgtagctttgccattgaaccgatcaatttttaaactctttaaagaagcagcagctatttttttgaaattaaagaaaattctcaggccaggctcaatggctcatgcctataattgtagtgctttgggaggctgagctgggaggatcgcttaagaccagcctaggcaacagaggagaccctgtctctaccaagaaaaaaaaaaaaaaaaaaaagttaaaaaaacaattagctggacctggtggtgcacactcagtaggctgaggtgaaaggattcctttaacctgggagactgaagctgcagtgagccatgatcgtgccactgcactccagtctgggggacaaagtgggaccctatctcaaaaaaaaaaaaaaaaagtcatcctcctccaactactgattgacatatggatcatcagttcagaccctcactgcatacaggatccctagagggttctatttaatagcttgaggaagggagactttaaaaggacgtgtgtgagtgaaataggatatagccattaccacggtgccaggacctgacagcgttccaattctttttgcagcatggggaatcaaaggtggcatgccaagttcaactcagggctgaggtatccacattgtccacatcaggcaagccctgcactgacggttgagcctcatggagaggagcatgtgttggaaagagatccctttgttaactgttttgtggtgttctcttcaatgaattagagctcatgccccttttctggctttgctgttgattttggatggtagagaatattcctgagagccttccttttggcccccagcttatgccacccactctcttctcttggttgaattctctgaaggaaaggttcatgtgctattgtcctgttagtcaatagtcttcatatataattgtgttacatatattgctgtagactctcagaaatcagggtagagcttttcctttgagcagtttaatgagtgaattcagcagcaaagtcgcaagaaatggttctccagccaggagaggttatgtttatcctctgattgcccgttttctctgcacacagtgatatcgtattcagtgagaggtgctgttggcacccagcagcaccctgggcacacagcatttcatgtcatgtcacagtgtacaagctaccctctaattcagaaagaagagcattttgcacagagaaaaataaaaagatccatgaatgtcatcttttatcttttattttcagttggctgatgttggaatttttgttcttgtcatgaacttgtaaaccaatcttgccaagatacaagttgttttggtttttcactacaatgacctcttgttcctcctgtcttgactgctgacgttcctcaatgattctattgtctattttatgggaagcagccttcccataggtttccttttacacactgcagggctatctttatactttaaaaaaaacaacaaaaaaaaaaaaggacaagaactgtcactaacctcatggaggggtttgcgtaaaaccatttagcccaccttgagcaaagggtagattccgtgttgtttttttaagctcactgtaataaaatagatctaattcagcattattgtgctacctcaaaggtaaaaaatgttttaaggtcttcttttggtcctgagttctatatacagtgtttgaaatgtctttcatttggaattattttttaaattcttggagtgaattttattttaatctgttttaatcttgtattttaatctcagaagaataagtgattgaaacgtgatcaattcttgctctgtggtgttaaacatataatgaacagtcattaagaattaagtcactgtttgccataaacaaggttgatgttctttttgttgttgttaaggaaaccctagggctcggctttactcttgattaataaaggctgacaaatc

SEQ ID NO: 81798 - DNA, 2829 bp, Homo sapiens
cggacgcgtgggcgacccacgcgtccgaggtaatttagcttgtatttatttaaaacccatttagccttttacttatatctggtagaattccagtgatcatcctaataaggtatatttcagaataatttttttttccttcagaataacttagaatcagatgctataagggctcctaggagcagtgtgaaatttccgtaaagataaatttgaatgttgtaaccaagtttatattaaaccaagaggccatttccaatatgattttttgtttctttttaacttgttaagtccctaagagattacatgctagggcttgagtcatttctattgtagataatgatggcccacacagtcaccttcaactatccacataagctaggctttccgcttttgccacggacagtgtgaccaagatatttccagagtaaataacccaccacaaccttggtaattcctcttttcttcttaagctccaggaagcgaaagcagaaggactcttttcagactgccctctgtagcctacattgcagctttccaaaacaggcagctagcactgggaaagcccatgtggtgaccccatatttttctgaggttcttcttttccatggtgttactttattatcagaaagtaaattcagaaaacaggtcttgcccttagcagacaagaaccacaccagtttcttgtaaaggtaacggatacattgggattcaggagtgacacagaggtccagccccagaacttgtaaggattttgtttgaacactgagcagatgcctcctccctgccacccatcacactagttagggctggccatgaattctatgccagagtcactcctgcagtctgctagggatgggccttcttatcccactctcgcacacatcccagtctagtctttgccttcacagagtcctccttgacacccctgacttaatgatagttgctgttttggagtagaattgatcaggtttaagtcatcctgctcaggttgggcatagtggctcatgcctgtaatctcagcactttgggaagccaaagtgggaggattgcttgagcccaggagttccaaaccatcctgggcaacagagggagaccctgtctctaccaagaaaaaaaaaaaaaaaaaaaagttaaaaaaacaattagctggacctggtggtgcacactcagtaggctgaggtgaaaggattcctttaacctgggagactgaagctgcagtgagccatgatcgtgccactgcactccagtctgggggacaaagtgggaccctatctcaaaaaaaaaaaaaaaaagtcatcctcctccaactactgattgacatatggatcatcagttcagaccctcactgcatacaggatccctagagggttctatttaatagcttgaggaagggagactttaaaaggacgtgtgtgagtgaaataggatatagccattaccacggtgccaggacctgacagcgttccaattctttttgcagcatggggaatcaaaggtggcatgccaagttcaactcagggctgaggtatccacattgtccacatcaggcaagccctgcactgacggttgagcctcatggagaggagcatgtgttggaaagagatccctttgttaactgttttgtggtgttctcttcaatgaattagagctcatgccccttttctggctttgctgttgattttggatggtagagaatattcctgagagccttccttttggcccccagcttatgccacccactctcttctcttggttgaattctctgaaggaaaggttcatgtgctattgtcctgttagtcaatagtcttcatatataattgtgttacatatattgctgtagactctcagaaatcagggtagagcttttcctttgagcagtttaatgagtgaattcagcagcaaagtcgcaagaaatggttctccagccaggagaggttatgtttatcctctgattgcccgttttctctgcacacagtgatatcgtattcagtgagaggtgctgttggcacccagcagcaccctgggcacacagcatttcatgtcatgtcacagtgtacaagctaccctctaattcagaaagaagagcattttgcacagagaaaaataaaaagatccatgaatgtcatcttttatcttttattttcagttggctgatgttggaatttttgttcttgtcatgaacttgtaaaccaatcttgccaagatacaagttgttttggtttttcactacaatgacctcttgttcctcctgtcttgactgctgacgttcctcaatgattctattgtctattttatgggaagcagccttcccataggtttccttttacacactgcagggctatctttatactttaaaaaaaacaacaaaaaaaaaaaaggacaagaactgtcactaacctcatggaggggtttgcgtaaaaccatttagcccaccttgagcaaagggtagattccgtgttgtttttttaagctcactgtaataaaatagatctaattcagcattattgtgctacctcaaaggtaaaaaatgttttaaggtcttcttttggtcctgagttctatatacagtgtttgaaatgtctttcatttggaattattttttaaattcttggagtgaattttattttaatctgttttaatcttgtattttaatctcagaagaataagtgattgaaacgtgatcaattcttgctctgtggtgttaaacatataatgaacagtcattaagaattaagtcactgtttgccataaacaaggttgatgttctttttgttgttgttaaggaaaccctagggctcggctttactcttgattaataaaggctgacaaatc

SEQ ID NO: 81799 - DNA, 1066 bp, Homo sapiens
ggcacgaggtccccgcggcggcggcggctgcccagtgacagcggcggcggtgccaggtcggccgtggtagcgtagggttgcgcggcccggaaacgcagagccggccaaagagcggcgcgacgtgagccggggccgtgcgcgaagagacctcgcgggcgcggagcgaaaggccggcgtgagtgagcgcggagacagtggccgccggcggcccaacccgtctatcccttcggccgccgccggcatgagccacatccagatcccgccggggctcacggagctgctgcagggctacacggtggaggtgctgcgacagcagccgcctgacctcgtcgaattcgcagtggagtacttcacccgcctgcgcgaggcccgcgccccagcctcagtcctgcccgccgccaccccacgccagagcctgggccaccccccgccagaacccggcccggaccgtgtcgccgacgccaaaggggacagcgagtcggaggaggacgaggacttggaagttccagttcctagcagatttaatagacgagtatcagtctgtgctgagacctataaccctgatgaggaagaggaagatacagatccaagggtgattcatcctaaaactgatgaacagagatgcagacttcaggaagcttgcaaagatattctccttttcaaaaatcttgatcaggaacagctttctcaagttctcgatgccatgtttgaaaggatagtcaaagctgatgagcatgtcattgaccaaggagatgatggagacaacttttatgtcatagaacggggaacttatgacattttagtaacaaaagataatcaaacccgctctgttggtcaatatgacaaccgtggcagttttggagaactagctctgatgtacaacaccccgagagctgctaccattgttgctacctcagaaggctccctttggggactggaccgggtgacttttagaagaatcatagtgaaaaataatgcaaagaagaggaagatgtttgaatcatttattgagtctgtgcccctccttaaatcactagaggtaaagtggcttgaataagaatctgtt

SEQ ID NO: 81800 - DNA, 5822 bp, Homo sapiens
cggccgagggcctgctggaggaatgaggaagatacagatccaagggaacagctttctcaagttctcgatgccatgtttgaaaggatagtcaaagctgatgagcatgtcattgaccaaggagatgatggagacaacttttatgtcatagaacggggaacttatgacattttagtaacaaaagataatcaaacccgctctgttggtcaatatgacaaccgtggcagttttggagaactagctctgatgtacaacaccccgagagctgctaccattgttgctacctcagaaggctccctttggggactggaccgggtgacttttagaagaatcatagtgaaaaataatgcaaagaagaggaagatgtttgaatcatttattgagtctgtgcccctccttaaatcactagaggtgtcagaacgaatgaagattgtggatgtaataggagagaagatctataaggatggagaacgcataatcactcagggtgaaaaggctgatagcttttacatcatagagtctggcgaagtgagcatcttgattagaagcaggactaaatcaaacaaggatggtgggaaccaggaggtcgagattgcccgctgccataaggggcagtactttggagagcttgccctggtcaccaacaaacccagagctgcctcagcttatgcagttggagatgtcaaatgcttagttatggatgtacaagcattcgagaggcttctggggccctgcatggacatcatgaagaggaacatctcacactatgaggaacagctggtgaagatgtttggctccagcgtggatctgggcaacctcgggcagtaggtgtgccacaccccagagccttcttagtgtgacaccaaaaccttctggtcagccacagaacacatacagaaaacagacatgacagaactgttcctgccgttgccgccactgctgccattgctgtggttatgggcatttagaaaacttgaaagtcagcactaaaggatgggcagaggttcaacccacacctccactttgcttctgaaggcccattcattagaccacttgtaaagattactccaacccagtttttatatctttggttcaaaacggcatgtctctccaacaatttaagtgcctgatacaaagtccaaagtataaacatgctcctttcctctcttgctgctactcttgcttttggaagttaccacagggtctgcagaaacctgttgtataactgtagacactctctaatggttctcaaaggaggaaatgtagccttcagtctcctcatttgtcctttgaggaagtccacatttgttcacagttgcagcctttggttttacagtgggaaatggtggtggatgatatggacatatgtagcccagtggcattgtactttctgctgacagctgcacacattacagctgtctccaaacccacagtgatgcttagggaaagaccctgctcaggacccagcaggtcagcaccccagagcagactgataggtccgtgggacccatgttagagcagaaaatttgggctcagcacattttactgttagtagagagccaggaaacgttttctgggttggggattttgtgggattttttaatttttttagtaggttttgtttaacctctgtgcagtttgtatgaatgaattgctatacatttataaggagccagggtctggagggttgctatcactttgtccagcccaaataccttcctgggcaactcctaccatttgtttgcagttgcctctactagctgatggcagtatgctggaaagaggttgtactataaagagagttctttccttctactccagagttgttgtgtagctttgccattgaaccgatcaatttttaaactctttaaagaagcagcagctatttttttgaaattaaagaaaattctcaggccaggctcaatggctcatgcctataattgtagtgctttgggaggctgagctgggaggatcgcttaagaccagcctaggcaacagagtgagatcctgtctctacaaaaacaaaaattttttttttgttttctttttgagacggagtttcgctcttgttgcccaggctggagtgcaatggtgcggtcttggctcaccgcaacctccgcctcccagattaaagtgattctcctgcctcaacctcctgagtagctgggattgcaggcatgcgccaccatgccgggcgaattttgtatttttaatagagacggggtttctctgtgttggtcaggctggtctcaaactcccaacctcaggtgatccgcccacctcagcctctcagagtgctgggattacagatgtgagccactgcacctggcaaaaaaaaaatttttttttaatttgtcaggtgtggtgatgcatgcatgtagtcccaaatacttaggaggctgaggtggaaggatcacttgagcccaggaggtcaaggcaacagtgagctgtgatcatgccactgcactccagtctgggtgacacagtgagaccctgtctcttaaaaaaaaaaaaagaaagaaaaaaaattattctttaggtaatttcacttggacatattcatgtatatggagtttgtcagctgactcaggcatttaccctaaagatcaaatctgttttcaaaaattggcattggccaggcacggtgacccacacctgtaatcccagcactttgggaggccgaggcgggcggatcacgaggtcaggggttcaagaccagcctggccaacatagtgaaaccccgtctctactaaaaatacaaaaaattagctgggcatggtggtgggcgcctgtaatcccagctacttgagaggctcaggcaggagaatcgcttgaacctgggagtggaggttgcagtgagccgagattgcaccattgtattccaccccgggtgacagtgcaagactccatctcaaaaaaaaaaaaaaaatttggcatcatttacaatttcatagaattactgtgaaggcctttctagttgagatgttggggtatttgggattctaattgttaaccccagaagaaggtaatttagcttgtatttatttaaaacccatttagccttttacttatatctggtagaattccagtgatcatcctaataaggtatatttcagaataatttttttttccttcagaataacttagaatcagatgctataagggctcctaggagcagtgtgaaatttccgtaaagataaatttgaatgttgtaaccaagtttatattaaaccaagaggccatttccaatatgattttttgtttctttttaacttgttaagtccctaagagattacatgctagggcttgagtcatttctattgtagataatgatggcccacacagtcaccttcaactatccacataagctaggctttccgcttttgccacggacagtgtgaccaagatatttccagagtaaataacccaccacaaccttggtaattcctcttttcttcttaagctccaggaagcgaaagcagaaggactcttttcagactgccctctgtagcctacattgcagctttccaaaacaggcagctagcactgggaaagcccatgtggtgaccccatatttttctgaggttcttcttttccatggtgttactttattatcagaaagtaaattcagaaaacaggtcttgcccttagcagacaagaaccacaccagtttcttgtaaaggtaacggatacattgggattcaggagtgacacagaggtccagccccagaacttgtaaggattttgtttgaacactgagcagatgcctcctccctgccacccatcacactagttagggctggccatgaattctatgccagagtcactcctgcagtctgctagggatgggccttcttatcccactctcgcacacatcccagtctagtctttgccttcacagagtcctccttgacacccctgacttaatgatagttgctgttttggagtagaattgatcaggtttaagtcatcctgctcaggttgggcatagtggctcatgcctgtaatctcagcactttgggaagccaaagtgggaggattgcttgagcccaggagttccaaaccatcctgggcaacagagggagaccctgtctctaccaagaaaaaaaaaaaaaaaaaaaagttaaaaaaacaattagctggacctggtggtgcacactcagtaggctgaggtgaaaggattcctttaacctgggagactgaagctgcagtgagccatgatcgtgccactgcactccagtctgggggacaaagtgggaccctatctcaaaaaaaaaaaaaaaaagtcatcctcctccaactactgattgacatatggatcatcagttcagaccctcactgcatacaggatccctagagggttctatttaatagcttgaggaagggagactttaaaaggacgtgtgtgagtgaaataggatatagccattaccacggtgccaggacctgacagcgttccaattctttttgcagcatggggaatcaaaggtggcatgccaagttcaactcagggctgaggtatccacattgtccacatcaggcaagccctgcactgacggttgagcctcatggagaggagcatgtgttggaaagagatccctttgttaactgttttgtggtgttctcttcaatgaattagagctcatgccccttttctggctttgctgttgattttggatggtagagaatattcctgagagccttccttttggcccccagcttatgccacccactctcttctcttggttgaattctctgaaggaaaggttcatgtgctattgtcctgttagtcaatagtcttcatatataattgtgttacatatattgctgtagactctcagaaatcagggtagagcttttcctttgagcagtttaatgagtgaattcagcagcaaagtcgcaagaaatggttctccagccaggagaggttatgtttatcctctgattgcccgttttctctgcacacagtgatatcgtattcagtgagaggtgctgttggcacccagcagcaccctgggcacacagcatttcatgtcatgtcacagtgtacaagctaccctctaattcagaaagaagagcattttgcacagagaaaaataaaaagatccatgaatgtcatcttttatcttttattttcagttggctgatgttggaatttttgttcttgtcatgaacttgtaaaccaatcttgccaagatacaagttgttttggtttttcactacaatgacctcttgttcctcctgtcttgactgctgacgttcctcaatgattctattgtctattttatgggaagcagccttcccataggtttccttttacacactgcagggctatctttatactttaaaaaaaacaacaaaaaaaaaaaaggacaagaactgtcactaacctcatggaggggtttgcgtaaaaccatttagcccaccttgagcaaagggtagattccgtgttgtttttttaagctcactgtaataaaatagatctaattcagcattattgtgctacctcaaaggtaaaaaatgttttaaggtcttcttttggtcctgagttctatatacagtgtttgaaatgtctttcatttggaattattttttaaattcttggagtgaattttattttaatctgttttaatcttgtattttaatctcagaagaataagtgattgaaacgtgatcaattcttgctctgtggtgttaaacatataatgaacagtcattaagaattaagtcactgtttgccataaacaaggttgatgttctttttgttgttgttaaggaaaccctagggctcggctttactcttgattaataaaggctgacaaatc

SEQ ID NO: 81801 - DNA, 6371 bp, Homo sapiens
ggcacgaggtccccgcggcggcggcggctgcccagtgacagcggcggcggtgccaggtcggccgtggtagcgtagggttgcgcggcccggaaacgcagagccggccaaagagcggcgcgacgtgagccggggccgtgcgcgaagagacctcgcgggcgcggagcgaaaggccggcgtgagtgagcgcggagacagtggccgccggcggcccaacccgtctatcccttcggccgccgccggcatgagccacatccagatcccgccggggctcacggagctgctgcagggctacacggtggaggtgctgcgacagcagccgcctgacctcgtcgaattcgcagtggagtacttcacccgcctgcgcgaggcccgcgccccagcctcagtcctgcccgccgccaccccacgccagagcctgggccaccccccgccagaacccggcccggaccgtgtcgccgacgccaaaggggacagcgagtcggaggaggacgaggacttggaagttccagttcctagcagatttaatagacgagtatcagtctgtgctgagacctataaccctgatgaggaagaggaagatacagatccaagggggaacagctttctcaagttctcgatgccatgtttgaaaggatagtcaaagctgatgagcatgtcattgaccaaggagatgatggagacaacttttatgtcatagaacggggaacttatgacattttagtaacaaaagataatcaaacccgctctgttggtcaatatgacaaccgtggcagttttggagaactagctctgatgtacaacaccccgagagctgctaccattgttgctacctcagaaggctccctttggggactggaccgggtgacttttagaagaatcatagtgaaaaataatgcaaagaagaggaagatgtttgaatcatttattgagtctgtgcccctccttaaatcactagaggtgtcagaacgaatgaagattgtggatgtaataggagagaagatctataaggatggagaacgcataatcactcagggtgaaaaggctgatagcttttacatcatagagtctggcgaagtgagcatcttgattagaagcaggactaaatcaaacaaggatggtgggaaccaggaggtcgagattgcccgctgccataaggggcagtactttggagagcttgccctggtcaccaacaaacccagagctgcctcagcttatgcagttggagatgtcaaatgcttagttatggatgtacaagcattcgagaggcttctggggccctgcatggacatcatgaagaggaacatctcacactatgaggaacagctggtgaagatgtttggctccagcgtggatctgggcaacctcgggcagtaggtgtgccacaccccagagccttcttagtgtgacaccaaaaccttctggtcagccacagaacacatacagaaaacagacatgacagaactgttcctgccgttgccgccactgctgccattgctgtggttatgggcatttagaaaacttgaaagtcagcactaaaggatgggcagaggttcaacccacacctccactttgcttctgaaggcccattcattagaccacttgtaaagattactccaacccagtttttatatctttggttcaaaacggcatgtctctccaacaatttaagtgcctgatacaaagtccaaagtataaacatgctcctttcctctcttgctgctactcttgcttttggaagttaccacagggtctgcagaaacctgttgtataactgtagacactctctaatggttctcaaaggaggaaatgtagccttcagtctcctcatttgtcctttgaggaagtccacatttgttcacagttgcagcctttggttttacagtgggaaatggtggtggatgatatggacatatgtagcccagtggcattgtactttctgctgacagctgcacacattacagctgtctccaaacccacagtgatgcttagggaaagaccctgctcaggacccagcaggtcagcaccccagagcagactgataggtccgtgggacccatgttagagcagaaaatttgggctcagcacattttactgttagtagagagccaggaaacgttttctgggttggggattttgtgggattttttaatttttttagtaggttttgtttaacctctgtgcagtttgtatgaatgaattgctatacatttataaggagccagggtctggagggttgctatcactttgtccagcccaaataccttcctgggcaactcctaccatttgtttgcagttgcctctactagctgatggcagtatgctggaaagaggttgtactataaagagagttctttccttctactccagagttgttgtgtagctttgccattgaaccgatcaatttttaaactctttaaagaagcagcagctatttttttgaaattaaagaaaattctcaggccaggctcaatggctcatgcctataattgtagtgctttgggaggctgagctgggaggatcgcttaagaccagcctaggcaacagagtgagatcctgtctctacaaaaacaaaaattttttttttgttttctttttgagacggagtttcgctcttgttgcccaggctggagtgcaatggtgcggtcttggctcaccgcaacctccgcctcccagattaaagtgattctcctgcctcaacctcctgagtagctgggattgcaggcatgcgccaccatgccgggcgaattttgtatttttaatagagacggggtttctctgtgttggtcaggctggtctcaaactcccaacctcaggtgatccgcccacctcagcctctcagagtgctgggattacagatgtgagccactgcacctggcaaaaaaaaaatttttttttaatttgtcaggtgtggtgatgcatgcatgtagtcccaaatacttaggaggctgaggtggaaggatcacttgagcccaggaggtcaaggcaacagtgagctgtgatcatgccactgcactccagtctgggtgacacagtgagaccctgtctcttaaaaaaaaaaaaagaaagaaaaaaaattattctttaggtaatttcacttggacatattcatgtatatggagtttgtcagctgactcaggcatttaccctaaagatcaaatctgttttcaaaaattggcattggccaggcacggtgacccacacctgtaatcccagcactttgggaggccgaggcgggcggatcacgaggtcaggggttcaagaccagcctggccaacatagtgaaaccccgtctctactaaaaatacaaaaaattagctgggcatggtggtgggcgcctgtaatcccagctacttgagaggctcaggcaggagaatcgcttgaacctgggagtggaggttgcagtgagccgagattgcaccattgtattccaccccgggtgacagtgcaagactccatctcaaaaaaaaaaaaaaaatttggcatcatttacaatttcatagaattactgtgaaggcctttctagttgagatgttggggtatttgggattctaattgttaaccccagaagaaggtaatttagcttgtatttatttaaaacccatttagccttttacttatatctggtagaattccagtgatcatcctaataaggtatatttcagaataatttttttttccttcagaataacttagaatcagatgctataagggctcctaggagcagtgtgaaatttccgtaaagataaatttgaatgttgtaaccaagtttatattaaaccaagaggccatttccaatatgattttttgtttctttttaacttgttaagtccctaagagattacatgctagggcttgagtcatttctattgtagataatgatggcccacacagtcaccttcaactatccacataagctaggctttccgcttttgccacggacagtgtgaccaagatatttccagagtaaataacccaccacaaccttggtaattcctcttttcttcttaagctccaggaagcgaaagcagaaggactcttttcagactgccctctgtagcctacattgcagctttccaaaacaggcagctagcactgggaaagcccatgtggtgaccccatatttttctgaggttcttcttttccatggtgttactttattatcagaaagtaaattcagaaaacaggtcttgcccttagcagacaagaaccacaccagtttcttgtaaaggtaacggatacattgggattcaggagtgacacagaggtccagccccagaacttgtaaggattttgtttgaacactgagcagatgcctcctccctgccacccatcacactagttagggctggccatgaattctatgccagagtcactcctgcagtctgctagggatgggccttcttatcccactctcgcacacatcccagtctagtctttgccttcacagagtcctccttgacacccctgacttaatgatagttgctgttttggagtagaattgatcaggtttaagtcatcctgctcaggttgggcatagtggctcatgcctgtaatctcagcactttgggaagccaaagtgggaggattgcttgagcccaggagttccaaaccatcctgggcaacagagggagaccctgtctctaccaagaaaaaaaaaaaaaaaaaaaagttaaaaaaacaattagctggacctggtggtgcacactcagtaggctgaggtgaaaggattcctttaacctgggagactgaagctgcagtgagccatgatcgtgccactgcactccagtctgggggacaaagtgggaccctatctcaaaaaaaaaaaaaaaaagtcatcctcctccaactactgattgacatatggatcatcagttcagaccctcactgcatacaggatccctagagggttctatttaatagcttgaggaagggagactttaaaaggacgtgtgtgagtgaaataggatatagccattaccacggtgccaggacctgacagcgttccaattctttttgcagcatggggaatcaaaggtggcatgccaagttcaactcagggctgaggtatccacattgtccacatcaggcaagccctgcactgacggttgagcctcatggagaggagcatgtgttggaaagagatccctttgttaactgttttgtggtgttctcttcaatgaattagagctcatgccccttttctggctttgctgttgattttggatggtagagaatattcctgagagccttccttttggcccccagcttatgccacccactctcttctcttggttgaattctctgaaggaaaggttcatgtgctattgtcctgttagtcaatagtcttcatatataattgtgttacatatattgctgtagactctcagaaatcagggtagagcttttcctttgagcagtttaatgagtgaattcagcagcaaagtcgcaagaaatggttctccagccaggagaggttatgtttatcctctgattgcccgttttctctgcacacagtgatatcgtattcagtgagaggtgctgttggcacccagcagcaccctgggcacacagcatttcatgtcatgtcacagtgtacaagctaccctctaattcagaaagaagagcattttgcacagagaaaaataaaaagatccatgaatgtcatcttttatcttttattttcagttggctgatgttggaatttttgttcttgtcatgaacttgtaaaccaatcttgccaagatacaagttgttttggtttttcactacaatgacctcttgttcctcctgtcttgactgctgacgttcctcaatgattctattgtctattttatgggaagcagccttcccataggtttccttttacacactgcagggctatctttatactttaaaaaaaacaacaaaaaaaaaaaaggacaagaactgtcactaacctcatggaggggtttgcgtaaaaccatttagcccaccttgagcaaagggtagattccgtgttgtttttttaagctcactgtaataaaatagatctaattcagcattattgtgctacctcaaaggtaaaaaatgttttaaggtcttcttttggtcctgagttctatatacagtgtttgaaatgtctttcatttggaattattttttaaattcttggagtgaattttattttaatctgttttaatcttgtattttaatctcagaagaataagtgattgaaacgtgatcaattcttgctctgtggtgttaaacatataatgaacagtcattaagaattaagtcactgtttgccataaacaaggttgatgttctttttgttgttgttaaggaaaccctagggctcggctttactcttgattaataaaggctgacaaatc

SEQ ID NO: 81802 - DNA, 5597 bp, Homo sapiens
ggcacgaggtccccgcggcggcggcggctgcccagtgacagcggcggcggtgccaggtcggccgtggtagcgtagggttgcgcggcccggaaacgcagagccggccaaagagcggcgcgacgtgagccggggccgtgcgcgaagagacctcgcgggcgcggagcgaaaggccggcgtgagtgagcgcggagacagtggccgccggcggcccaacccgtctatcccttcggccgccgccggcatgagccacatccagatcccgccggggctcacggagctgctgcagggctacacggtggaggtgctgcgacagcagccgcctgacctcgtcgaattcgcagtggagtacttcacccgcctgcgcgaggcccgcgccccagcctcagtcctgcccgccgccaccccacgccagagcctgggccaccccccgccagaacccggcccggaccgtgtcgccgacgccaaaggggacagcgagtcggaggaggacgaggacttggaagttccagttcctagcagatttaatagacgagtatcagtctgtgctgagacctataaccctgatgaggaagaggaagatacagatccaagggtgattcatcctaaaactgatgaacagagatgcagacttcaggaagcttgcaaagatattctccttttcaaaaatcttgatcaggaacagctttctcaagttctcgatgccatgtttgaaaggatagtcaaagctgatgagcatgtcattgaccaaggagatgatggagacaacttttatgtcatagaacggggaacttatgacattttagtaacaaaagataatcaaacccgctctgttggtcaatatgacaaccgtggcagttttggagaactagctctgatgtacaacaccccgagagctgctaccattgttgctacctcagaaggctccctttggggactggaccgggtgacttttagaagaatcatagtgaaaaataatgcaaagaagaggaagatgtttgaatcatttattgagtctgtgcccctccttaaatcactagaggtgtcagaacgaatgaagattgtggatgtaataggagagaagatctataaggatggagaacgcataatcactcagggtgaaaaggctgatagcttttacatcatagagtctggcgaagtgagcatcttgattagaagcaggactaaatcaaacaaggatggtgggaaccaggaggtcgagattgcccgctgccataaggggcagtactttggagagcttgccctggtcaccaacaaacccagagctgcctcagcttatgcagttggagatgtcaaatgcttagttatggatgtacaagcattcgagaggcttctggggccctgcatggacatcatgaagaggaacatctcacactatgaggaacagctggtgaagatgtttggctccagcgtggatctgggcaacctcgggcagtaggtgtgccacaccccagagccttcttagtgtgacaccaaaaccttctggtcagccacagaacacatacagaaaacagacatgacagaactgttcctgccgttgccgccactgctgccattgctgtggttatgggcatttagaaaacttgaaagtcagcactaaaggatgggcagaggttcaacccacacctccactttgcttctgaaggcccattcattagaccacttgtaaagattactccaacccagtttttatatctttggttcaaaacggcatgtctctccaacaatttaagtgcctgatacaaagtccaaagtataaacatgctcctttcctctcttgctgctactcttgcttttggaagttaccacagggtctgcagaaacctgttgtataactgtagacactctctaatggttctcaaaggaggaaatgtagccttcagtctcctcatttgtcctttgaggaagtccacatttgttcacagttgcagcctttggttttacagtgggaaatggtggtggatgatatggacatatgtagcccagtggcattgtactttctgctgacagctgcacacattacagctgtctccaaacccacagtgatgcttagggaaagaccctgctcaggacccagcaggtcagcaccccagagcagactgataggtccgtgggacccatgttagagcagaaaatttgggctcagcacattttactgttagtagagagccaggaaacgttttctgggttggggattttgtgggattttttaatttttttagtaggttttgtttaacctctgtgcagtttgtatgaatgaattgctatacatttataaggagccagggtctggagggttgctatcactttgtccagcccaaataccttcctgggcaactcctaccatttgtttgcagttgcctctactagctgatggcagtatgctggaaagaggttgtactataaagagagttctttccttctactccagagttgttgtgtagctttgccattgaaccgatcaatttttaaactctttaaagaagcagcagctatttttttgaaattaaagaaaattctcaggccaggctcaatggctcatgcctataattgtagtgctttgggaggctgagcaggagaatcgcttgaacctgggagtggaggttgcagtgagccgagattgcaccattgtattccaccccgggtgacagtgcaagactccatctcaaaaaaaaaaaaaaaatttggcatcatttacaatttcatagaattactgtgaaggcctttctagttgagatgttggggtatttgggattctaattgttaaccccagaagaaggtaatttagcttgtatttatttaaaacccatttagccttttacttatatctggtagaattccagtgatcatcctaataaggtatatttcagaataatttttttttccttcagaataacttagaatcagatgctataagggctcctaggagcagtgtgaaatttccgtaaagataaatttgaatgttgtaaccaagtttatattaaaccaagaggccatttccaatatgattttttgtttctttttaacttgttaagtccctaagagattacatgctagggcttgagtcatttctattgtagataatgatggcccacacagtcaccttcaactatccacataagctaggctttccgcttttgccacggacagtgtgaccaagatatttccagagtaaataacccaccacaaccttggtaattcctcttttcttcttaagctccaggaagcgaaagcagaaggactcttttcagactgccctctgtagcctacattgcagctttccaaaacaggcagctagcactgggaaagcccatgtggtgaccccatatttttctgaggttcttcttttccatggtgttactttattatcagaaagtaaattcagaaaacaggtcttgcccttagcagacaagaaccacaccagtttcttgtaaaggtaacggatacattgggattcaggagtgacacagaggtccagccccagaacttgtaaggattttgtttgaacactgagcagatgcctcctccctgccacccatcacactagttagggctggccatgaattctatgccagagtcactcctgcagtctgctagggatgggccttcttatcccactctcgcacacatcccagtctagtctttgccttcacagagtcctccttgacacccctgacttaatgatagttgctgttttggagtagaattgatcaggtttaagtcatcctgctcaggttgggcatagtggctcatgcctgtaatctcagcactttgggaagccaaagtgggaggattgcttgagcccaggagttccaaaccatcctgggcaacagagggagaccctgtctctaccaagaaaaaaaaaaaaaaaaaaaagttaaaaaaacaattagctggacctggtggtgcacactcagtaggctgaggtgaaaggattcctttaacctgggagactgaagctgcagtgagccatgatcgtgccactgcactccagtctgggggacaaagtgggaccctatctcaaaaaaaaaaaaaaaaagtcatcctcctccaactactgattgacatatggatcatcagttcagaccctcactgcatacaggatccctagagggttctatttaatagcttgaggaagggagactttaaaaggacgtgtgtgagtgaaataggatatagccattaccacggtgccaggacctgacagcgttccaattctttttgcagcatggggaatcaaaggtggcatgccaagttcaactcagggctgaggtatccacattgtccacatcaggcaagccctgcactgacggttgagcctcatggagaggagcatgtgttggaaagagatccctttgttaactgttttgtggtgttctcttcaatgaattagagctcatgccccttttctggctttgctgttgattttggatggtagagaatattcctgagagccttccttttggcccccagcttatgccacccactctcttctcttggttgaattctctgaaggaaaggttcatgtgctattgtcctgttagtcaatagtcttcatatataattgtgttacatatattgctgtagactctcagaaatcagggtagagcttttcctttgagcagtttaatgagtgaattcagcagcaaagtcgcaagaaatggttctccagccaggagaggttatgtttatcctctgattgcccgttttctctgcacacagtgatatcgtattcagtgagaggtgctgttggcacccagcagcaccctgggcacacagcatttcatgtcatgtcacagtgtacaagctaccctctaattcagaaagaagagcattttgcacagagaaaaataaaaagatccatgaatgtcatcttttatcttttattttcagttggctgatgttggaatttttgttcttgtcatgaacttgtaaaccaatcttgccaagatacaagttgttttggtttttcactacaatgacctcttgttcctcctgtcttgactgctgacgttcctcaatgattctattgtctattttatgggaagcagccttcccataggtttccttttacacactgcagggctatctttatactttaaaaaaaacaacaaaaaaaaaaaaggacaagaactgtcactaacctcatggaggggtttgcgtaaaaccatttagcccaccttgagcaaagggtagattccgtgttgtttttttaagctcactgtaataaaatagatctaattcagcattattgtgctacctcaaaggtaaaaaatgttttaaggtcttcttttggtcctgagttctatatacagtgtttgaaatgtctttcatttggaattattttttaaattcttggagtgaattttattttaatctgttttaatcttgtattttaatctcagaagaataagtgattgaaacgtgatcaattcttgctctgtggtgttaaacatataatgaacagtcattaagaattaagtcactgtttgccataaacaaggttgatgttctttttgttgttgttaaggaaaccctagggctcggctttactcttgattaataaaggctgacaaatc

SEQ ID NO: 81803 - DNA, 6399 bp, Homo sapiens
ggcacgaggtccccgcggcggcggcggctgcccagtgacagcggcggcggtgccaggtcggccgtggtagcgtagggttgcgcggcccggaaacgcagagccggccaaagagcggcgcgacgtgagccggggccgtgcgcgaagagacctcgcgggcgcggagcgaaaggccggcgtgagtgagcgcggagacagtggccgccggcggcccaacccgtctatcccttcggccgccgccggcatgagccacatccagatcccgccggggctcacggagctgctgcagggctacacggtggaggtgctgcgacagcagccgcctgacctcgtcgaattcgcagtggagtacttcacccgcctgcgcgaggcccgcgccccagcctcagtcctgcccgccgccaccccacgccagagcctgggccaccccccgccagaacccggcccggaccgtgtcgccgacgccaaaggggacagcgagtcggaggaggacgaggacttggaagttccagttcctagcagatttaatagacgagtatcagtctgtgctgagacctataaccctgatgaggaagaggaagatacagatccaagggtgattcatcctaaaactgatgaacagagatgcagacttcaggaagcttgcaaagatattctccttttcaaaaatcttgatcaggaacagctttctcaagttctcgatgccatgtttgaaaggatagtcaaagctgatgagcatgtcattgaccaaggagatgatggagacaacttttatgtcatagaacggggaacttatgacattttagtaacaaaagataatcaaacccgctctgttggtcaatatgacaaccgtggcagttttggagaactagctctgatgtacaacaccccgagagctgctaccattgttgctacctcagaaggctccctttggggactggaccgggtgacttttagaagaatcatagtgaaaaataatgcaaagaagaggaagatgtttgaatcatttattgagtctgtgcccctccttaaatcactagaggtgtcagaacgaatgaagattgtggatgtaataggagagaagatctataaggatggagaacgcataatcactcagggtgaaaaggctgatagcttttacatcatagagtctggcgaagtgagcatcttgattagaagcaggactaaatcaaacaaggatggtgggaaccaggaggtcgagattgcccgctgccataaggggcagtactttggagagcttgccctggtcaccaacaaacccagagctgcctcagcttatgcagttggagatgtcaaatgcttagttatggatgtacaagcattcgagaggcttctggggccctgcatggacatcatgaagaggaacatctcacactatgaggaacagctggtgaagatgtttggctccagcgtggatctgggcaacctcgggcagtaggtgtgccacaccccagagccttcttagtgtgacaccaaaaccttctggtcagccacagaacacatacagaaaacagacatgacagaactgttcctgccgttgccgccactgctgccattgctgtggttatgggcatttagaaaacttgaaagtcagcactaaaggatgggcagaggttcaacccacacctccactttgcttctgaaggcccattcattagaccacttgtaaagattactccaacccagtttttatatctttggttcaaaacggcatgtctctccaacaatttaagtgcctgatacaaagtccaaagtataaacatgctcctttcctctcttgctgctactcttgcttttggaagttaccacagggtctgcagaaacctgttgtataactgtagacactctctaatggttctcaaaggaggaaatgtagccttcagtctcctcatttgtcctttgaggaagtccacatttgttcacagttgcagcctttggttttacagtgggaaatggtggtggatgatatggacatatgtagcccagtggcattgtactttctgctgacagctgcacacattacagctgtctccaaacccacagtgatgcttagggaaagaccctgctcaggacccagcaggtcagcaccccagagcagactgataggtccgtgggacccatgttagagcagaaaatttgggctcagcacattttactgttagtagagagccaggaaacgttttctgggttggggattttgtgggattttttaatttttttagtaggttttgtttaacctctgtgcagtttgtatgaatgaattgctatacatttataaggagccagggtctggagggttgctatcactttgtccagcccaaataccttcctgggcaactcctaccatttgtttgcagttgcctctactagctgatggcagtatgctggaaagaggttgtactataaagagagttctttccttctactccagagttgttgtgtagctttgccattgaaccgatcaatttttaaactctttaaagaagcagcagctatttttttgaaattaaagaaaattctcaggccaggctcaatggctcatgcctataattgtagtgctttgggaggctgagctgggaggatcgcttaagaccagcctaggcaacagagtgagatcctgtctctacaaaaacaaaaattttttttttgttttctttttgagacggagtttcgctcttgttgcccaggctggagtgcaatggtgcggtcttggctcaccgcaacctccgcctcccagattaaagtgattctcctgcctcaacctcctgagtagctgggattgcaggcatgcgccaccatgccgggcgaattttgtatttttaatagagacggggtttctctgtgttggtcaggctggtctcaaactcccaacctcaggtgatccgcccacctcagcctctcagagtgctgggattacagatgtgagccactgcacctggcaaaaaaaaaatttttttttaatttgtcaggtgtggtgatgcatgcatgtagtcccaaatacttaggaggctgaggtggaaggatcacttgagcccaggaggtcaaggcaacagtgagctgtgatcatgccactgcactccagtctgggtgacacagtgagaccctgtctcttaaaaaaaaaaaaagaaagaaaaaaaattattctttaggtaatttcacttggacatattcatgtatatggagtttgtcagctgactcaggcatttaccctaaagatcaaatctgttttcaaaaattggcattggccaggcacggtgacccacacctgtaatcccagcactttgggaggccgaggcgggcggatcacgaggtcaggggttcaagaccagcctggccaacatagtgaaaccccgtctctactaaaaatacaaaaaattagctgggcatggtggtgggcgcctgtaatcccagctacttgagaggctcaggcaggagaatcgcttgaacctgggagtggaggttgcagtgagccgagattgcaccattgtattccaccccgggtgacagtgcaagactccatctcaaaaaaaaaaaaaaaatttggcatcatttacaatttcatagaattactgtgaaggcctttctagttgagatgttggggtatttgggattctaattgttaaccccagaagaaggtaatttagcttgtatttattttaaggtatatttcagaataatttttttttccttcagaataacttagaatcagatgctataagggctcctaggagcagtgtgaaatttccgtaaagataaatttgaatgttgtaaccaagtttatattaaaccaagaggccatttccaatatgattttttgtttctttttaacttgttaagtccctaagagattacatgctagggcttgagtcatttctattgtagataatgatggcccacacagtcaccttcaactatccacataagctaggctttccgcttttgccacggacagtgtgaccaagatatttccagagtaaataacccaccacaaccttggtaattcctcttttcttcttaagctccaggaagcgaaagcagaaggactcttttcagactgccctctgtagcctacattgcagctttccaaaacaggcagctagcactgggaaagcccatgtggtgaccccatatttttctgaggttcttcttttccatggtgttactttattatcagaaagtaaattcagaaaacaggtcttgcccttagcagacaagaaccacaccagtttcttgtaaaggtaacggatacattgggattcaggagtgacacagaggtccagccccagaacttgtaaggattttgtttgaacactgagcagatgcctcctccctgccacccatcacactagttagggctggccatgaattctatgccagagtcactcctgcagtctgctagggatgggccttcttatcccactctcgcacacatcccagtctagtctttgccttcacagagtcctccttgacacccctgacttaatgatagttgctgttttggagtagaattgatcaggtttaagtcatcctgctcaggttgggcatagtggctcatgcctgtaatctcagcactttgggaagccaaagtgggaggattgcttgagcccaggagttccaaaccatcctgggcaacagagggagaccctgtctctaccaagaaaaaaaaaaaaaaaaaaaagttaaaaaaacaattagctggacctggtggtgcacactcagtaggctgaggtgaaaggattcctttaacctgggagactgaagctgcagtgagccatgatcgtgccactgcactccagtctgggggacaaagtgggaccctatctcaaaaaaaaaaaaaaaaagtcatcctcctccaactactgattgacatatggatcatcagttcagaccctcactgcatacaggatccctagagggttctatttaatagcttgaggaagggagactttaaaaggacgtgtgtgagtgaaataggatatagccattaccacggtgccaggacctgacagcgttccaattctttttgcagcatggggaatcaaaggtggcatgccaagttcaactcagggctgaggtatccacattgtccacatcaggcaagccctgcactgacggttgagcctcatggagaggagcatgtgttggaaagagatccctttgttaactgttttgtggtgttctcttcaatgaattagagctcatgccccttttctggctttgctgttgattttggatggtagagaatattcctgagagccttccttttggcccccagcttatgccacccactctcttctcttggttgaattctctgaaggaaaggttcatgtgctattgtcctgttagtcaatagtcttcatatataattgtgttacatatattgctgtagactctcagaaatcagggtagagcttttcctttgagcagtttaatgagtgaattcagcagcaaagtcgcaagaaatggttctccagccaggagaggttatgtttatcctctgattgcccgttttctctgcacacagtgatatcgtattcagtgagaggtgctgttggcacccagcagcaccctgggcacacagcatttcatgtcatgtcacagtgtacaagctaccctctaattcagaaagaagagcattttgcacagagaaaaataaaaagatccatgaatgtcatcttttatcttttattttcagttggctgatgttggaatttttgttcttgtcatgaacttgtaaaccaatcttgccaagatacaagttgttttggtttttcactacaatgacctcttgttcctcctgtcttgactgctgacgttcctcaatgattctattgtctattttatgggaagcagccttcccataggtttccttttacacactgcagggctatctttatactttaaaaaaaacaacaaaaaaaaaaaaggacaagaactgtcactaacctcatggaggggtttgcgtaaaaccatttagcccaccttgagcaaagggtagattccgtgttgtttttttaagctcactgtaataaaatagatctaattcagcattattgtgctacctcaaaggtaaaaaatgttttaaggtcttcttttggtcctgagttctatatacagtgtttgaaatgtctttcatttggaattattttttaaattcttggagtgaattttattttaatctgttttaatcttgtattttaatctcagaagaataagtgattgaaacgtgatcaattcttgctctgtggtgttaaacatataatgaacagtcattaagaattaagtcactgtttgccataaacaaggttgatgttctttttgttgttgttaaggaaaccctagggctcggctttactcttgattaataaaggctgacaaatc

SEQ ID NO: 81804 - DNA, 4955 bp, Homo sapiens
ggcacgaggtccccgcggcggcggcggctgcccagtgacagcggcggcggtgccaggtcggccgtggtagcgtagggttgcgcggcccggaaacgcagagccggccaaagagcggcgcgacgtgagccggggccgtgcgcgaagagacctcgcgggcgcggagcgaaaggccggcgtgagtgagcgcggagacagtggccgccggcggcccaacccgtctatcccttcggccgccgccggcatgagccacatccagatcccgccggggctcacggagctgctgcagggctacacggtggaggtgctgcgacagcagccgcctgacctcgtcgaattcgcagtggagtacttcacccgcctgcgcgaggcccgcgccccagcctcagtcctgcccgccgccaccccacgccagagcctgggccaccccccgccagaacccggcccggaccgtgtcgccgacgccaaaggggacagcgagtcggaggaggacgaggacttggaagttccagttcctagcagatttaatagacgagtatcagtctgtgctgagacctataaccctgatgaggaagaggaagatacagatccaagggtgattcatcctaaaactgatgaacagagatgcagacttcaggaagcttgcaaagatattctccttttcaaaaatcttgatcaggaacagctttctcaagttctcgatgccatgtttgaaaggatagtcaaagctgatgagcatgtcattgaccaaggagatgatggagacaacttttatgtcatagaacggggaacttatgacattttagtaacaaaagataatcaaacccgctctgttggtcaatatgacaaccgtggcagttttggagaactagctctgatgtacaacaccccgagagctgctaccattgttgctacctcagaaggctccctttggggactggaccgggtgacttttagaagaatcatagtgaaaaataatgcaaagaagaggaagatgtttgaatcatttattgagtctgtgcccctccttaaatcactagaggtgtcagaacgaatgaagattgtggatgtaataggagagaagatctataaggatggagaacgcataatcactcagggtgaaaaggctgatagcttttacatcatagagtctggcgaagtgagcatcttgattagaagcaggactaaatcaaacaaggatggtgggaaccaggaggtcgagattgcccgctgccataaggggcagtactttggagagcttgccctggtcaccaacaaacccagagctgcctcagcttatgcagttggagatgtcaaatgcttagttatggatgtacaagcattcgagaggcttctggggccctgcatggacatcatgaagaggaacatctcacactatgaggaacagctggtgaagatgtttggctccagcgtggatctgggcaacctcgggcagtaggtgtgccacaccccagagccttcttagtgtgacaccaaaaccttctggtcagccacagaacacatacagaaaacagacatgacagaactgttcctgccgttgccgccactgctgccattgctgtggttatgggcatttagaaaacttgaaagtcagcactaaaggatgggcagaggttcaacccacacctccactttgcttctgaaggcccattcattagaccacttgtaaagattactccaacccagtttttatatctttggttcaaaacggcatgtctctccaacaatttaagtgcctgatacaaagtccaaagtataaacatgctcctttcctctcttgctgctactcttgcttttggaagttaccacagggtctgcagaaacctgttgtataactgtagacactctctaatggttctcaaaggaggaaatgtagccttcagtctcctcatttgtcctttgaggaagtccacatttgttcacagttgcagcctttggttttacagtgggaaatggtggtggatgatatggacatatgtagcccagtggcattgtactttctgctgacagctgcacacattacagctgtctccaaacccacagtgatgcttagggaaagaccctgctcaggacccagcaggtcagcaccccagagcagactgataggtccgtgggacccatgttagagcagaaaatttgggctcagcacattttactgttagtagagagccaggaaacgttttctgggttggggattttgtgggattttttaatttttttagtaggttttgtttaacctctgtgcagtttgtatgaatgaattgctatacatttataaggagccagggtctggagggttgctatcactttgtccagcccaaataccttcctgggcaactcctaccatttgtttgcagttgcctctactagctgatggcagtatgctggaaagaggttgtactataaagagagttctttccttctactccagagttgttgtgtagctttgccattgaaccgatcaatttttaaactctttaaagaagcagcagctatttttttgaaattaaagaaaattctcaggccaggctcaatggctcatgcctataattgtagtgctttgggaggctgagctgggaggatcgcttaagaccagcctaggcaacagagtgagatcctgtctctacaaaaacaaaaattttttttttgttttctttttgagacggagtttcgctcttgttgcccaggctggagtgcaatggtgcggtcttggctcaccgcaacctccgcctcccagattaaagtgattctcctgcctcaacctcctgagtagctgggattgcaggcatgcgccaccatgccgggcgaattttgtatttttaatagagacggggtttctctgtgttggtcaggctggtctcaaactcccaacctcaggtgatccgcccacctcagcctctcagagtgctgggattacagatgtgagccactgcacctggcaaaaaaaaaatttttttttaatttgtcaggtgtggtgatgcatgcatgtagtcccaaatacttaggaggctgaggtggaaggatcacttgagcccaggaggtcaaggcaacagtgagctgtgatcatgccactgcactccagtctgggtgacacagtgagaccctgtctcttaaaaaaaaaaaaagaaagaaaaaaaattattctttaggtaatttcacttggacatattcatgtatatggagtttgtcagctgactcaggcatttaccctaaagatcaaatctgttttcaaaaattggcattggccaggcacggtgacccacacctgtaatcccagcactttgggaggccgaggcgggcggatcacgaggtcaggggttcaagaccagcctggccaacatagtgaaaccccgtctctactaaaaatacaaaaaattagctgggcatggtggtgggcgcctgtaatcccagctacttgagaggctcaggcaggagaatcgcttgaacctgggagtggaggttgcagtgagccgagattgcaccattgtattccaccccgggtgacagtgcaagactccatctcaaaaaaaaaaaaaaaatttggcatcatttacaatttcatagaattactgtgaaggcctttctagttgagatgttggggtatttgggattctaattgttaaccccagaagaaggtaatttagcttgtatttatttaaaacccatttagccttttacttatatctggtagaattccagtgatcatcctaataaggtatatttcagaataatttttttttccttcagaataacttagaatcagatgctataagggctcctaggagcagtgtgaaatttccgtaaagataaatttgaatgttgtaaccaagtttatattaaaccaagaggccatttccaatatgattttttgtttctttttaacttgttaagtccctaagagattacatgctagggcttgagtcatttctattgtagataatgatggcccacacagtcaccttcaactatccacataagctaggctttccgcttttgccacggacagtgtgaccaagatatttccagagtaaataacccaccacaaccttggtaattcctcttttcttcttaagctccaggaagcgaaagcagaaggactcttttcagactgccctctgtagcctacattgcagctttccaaaacaggcagctagcactgggaaagcccatgtggtgaccccatatttttctgaggttcttcttttccatggtgttactttattatcagaaagtaaattcagaaaacaggtcttgcccttagcagacaagaaccacaccagtttcttgtaaaggtaacggatacattgggattcaggagtgacacagaggtccagccccagaacttgtaaggattttgtttgaacactgagcagatgcctcctccctgccacccatcacactagttagggctggccatgaattctatgccagagtcactcctgcagtctgctagggatgggccttcttatcccactctcgcacacatcccagtctagtctttgccttcacagagtcctccttgacacccctgacttaatgatagttgctgttttggagtagaattgatcaggtttaagtcatcctgctcaggttgggcatagtggctcatgcctgtaatctcagcactttgggaagccaaagtgggaggattgcttgagcccaggagttccaaaccatcctgggcaacagagggagaccctgtctctaccaagaaaaaaaaaaaaaaaaaaaaggatgtttataaaaaaccatttgagcgcgtggtcccgtggtgtggtgtgccccaccctcgaggtggcggcgtgggggtaaaggggtttcctttttaccctgtggggagaactgtgagagctgtgcgggtggccccagtggtctcggtgcccgtgtggacctccccagttctgtgggggcacaaggggggggcccctttttctctc

SEQ ID NO: 81805 - DNA, 5872 bp, Homo sapiens
ggcacgaggtccccgcggcggcggcggctgcccagtgacagcggcggcggtgccaggtcggccgtggtagcgtagggttgcgcggcccggaaacgcagagccggccaaagagcggcgcgacgtgagccggggccgtgcgcgaagagacctcgcgggcgcggagcgaaaggccggcgtgagtgagcgcggagacagtggccgccggcggcccaacccgtctatcccttcggccgccgccggcatgagccacatccagatcccgccggggctcacggagctgctgcagggctacacggtggaggtgctgcgacagcagccgcctgacctcgtcgaattcgcagtggagtacttcacccgcctgcgcgaggcccgcgccccagcctcagtcctgcccgccgccaccccacgccagagcctgggccaccccccgccagaacccggcccggaccgtgtcgccgacgccaaaggggacagcgagtcggaggaggacgaggacttggaagttccagttcctagcagatttaatagacgagtatcagtctgtgctgagacctataaccctgatgaggaagaggaagatacagatccaagggtgattcatcctaaaactgatgaacagagatgcagacttcaggaagcttgcaaagatattctccttttcaaaaatcttgatcaggaacagctttctcaagttctcgatgccatgtttgaaaggatagtcaaagctgatgagcatgtcattgaccaaggagatgatggagacaacttttatgtcatagaacggggaacttatgacattttagtaacaaaagataatcaaacccgctctgttggtcaatatgacaaccgtggcagttttggagaactagctctgatgtacaacaccccgagagctgctaccattgttgctacctcagaaggctccctttggggactggaccgggtgacttttagaagaatcatagtgaaaaataatgcaaagaagaggaagatgtttgaatcatttattgagtctgtgcccctccttaaatcactagaggatgggcagaggttcaacccacacctccactttgcttctgaaggcccattcattagaccacttgtaaagattactccaacccagtttttatatctttggttcaaaacggcatgtctctccaacaatttaagtgcctgatacaaagtccaaagtataaacatgctcctttcctctcttgctgctactcttgcttttggaagttaccacagggtctgcagaaacctgttgtataactgtagacactctctaatggttctcaaaggaggaaatgtagccttcagtctcctcatttgtcctttgaggaagtccacatttgttcacagttgcagcctttggttttacagtgggaaatggtggtggatgatatggacatatgtagcccagtggcattgtactttctgctgacagctgcacacattacagctgtctccaaacccacagtgatgcttagggaaagaccctgctcaggacccagcaggtcagcaccccagagcagactgataggtccgtgggacccatgttagagcagaaaatttgggctcagcacattttactgttagtagagagccaggaaacgttttctgggttggggattttgtgggattttttaatttttttagtaggttttgtttaacctctgtgcagtttgtatgaatgaattgctatacatttataaggagccagggtctggagggttgctatcactttgtccagcccaaataccttcctgggcaactcctaccatttgtttgcagttgcctctactagctgatggcagtatgctggaaagaggttgtactataaagagagttctttccttctactccagagttgttgtgtagctttgccattgaaccgatcaatttttaaactctttaaagaagcagcagctatttttttgaaattaaagaaaattctcaggccaggctcaatggctcatgcctataattgtagtgctttgggaggctgagctgggaggatcgcttaagaccagcctaggcaacagagtgagatcctgtctctacaaaaacaaaaattttttttttgttttctttttgagacggagtttcgctcttgttgcccaggctggagtgcaatggtgcggtcttggctcaccgcaacctccgcctcccagattaaagtgattctcctgcctcaacctcctgagtagctgggattgcaggcatgcgccaccatgccgggcgaattttgtatttttaatagagacggggtttctctgtgttggtcaggctggtctcaaactcccaacctcaggtgatccgcccacctcagcctctcagagtgctgggattacagatgtgagccactgcacctggcaaaaaaaaaatttttttttaatttgtcaggtgtggtgatgcatgcatgtagtcccaaatacttaggaggctgaggtggaaggatcacttgagcccaggaggtcaaggcaacagtgagctgtgatcatgccactgcactccagtctgggtgacacagtgagaccctgtctcttaaaaaaaaaaaaagaaagaaaaaaaattattctttaggtaatttcacttggacatattcatgtatatggagtttgtcagctgactcaggcatttaccctaaagatcaaatctgttttcaaaaattggcattggccaggcacggtgacccacacctgtaatcccagcactttgggaggccgaggcgggcggatcacgaggtcaggggttcaagaccagcctggccaacatagtgaaaccccgtctctactaaaaatacaaaaaattagctgggcatggtggtgggcgcctgtaatcccagctacttgagaggctcaggcaggagaatcgcttgaacctgggagtggaggttgcagtgagccgagattgcaccattgtattccaccccgggtgacagtgcaagactccatctcaaaaaaaaaaaaaaaatttggcatcatttacaatttcatagaattactgtgaaggcctttctagttgagatgttggggtatttgggattctaattgttaaccccagaagaaggtaatttagcttgtatttatttaaaacccatttagccttttacttatatctggtagaattccagtgatcatcctaataaggtatatttcagaataatttttttttccttcagaataacttagaatcagatgctataagggctcctaggagcagtgtgaaatttccgtaaagataaatttgaatgttgtaaccaagtttatattaaaccaagaggccatttccaatatgattttttgtttctttttaacttgttaagtccctaagagattacatgctagggcttgagtcatttctattgtagataatgatggcccacacagtcaccttcaactatccacataagctaggctttccgcttttgccacggacagtgtgaccaagatatttccagagtaaataacccaccacaaccttggtaattcctcttttcttcttaagctccaggaagcgaaagcagaaggactcttttcagactgccctctgtagcctacattgcagctttccaaaacaggcagctagcactgggaaagcccatgtggtgaccccatatttttctgaggttcttcttttccatggtgttactttattatcagaaagtaaattcagaaaacaggtcttgcccttagcagacaagaaccacaccagtttcttgtaaaggtaacggatacattgggattcaggagtgacacagaggtccagccccagaacttgtaaggattttgtttgaacactgagcagatgcctcctccctgccacccatcacactagttagggctggccatgaattctatgccagagtcactcctgcagtctgctagggatgggccttcttatcccactctcgcacacatcccagtctagtctttgccttcacagagtcctccttgacacccctgacttaatgatagttgctgttttggagtagaattgatcaggtttaagtcatcctgctcaggttgggcatagtggctcatgcctgtaatctcagcactttgggaagccaaagtgggaggattgcttgagcccaggagttccaaaccatcctgggcaacagagggagaccctgtctctaccaagaaaaaaaaaaaaaaaaaaaagttaaaaaaacaattagctggacctggtggtgcacactcagtaggctgaggtgaaaggattcctttaacctgggagactgaagctgcagtgagccatgatcgtgccactgcactccagtctgggggacaaagtgggaccctatctcaaaaaaaaaaaaaaaaagtcatcctcctccaactactgattgacatatggatcatcagttcagaccctcactgcatacaggatccctagagggttctatttaatagcttgaggaagggagactttaaaaggacgtgtgtgagtgaaataggatatagccattaccacggtgccaggacctgacagcgttccaattctttttgcagcatggggaatcaaaggtggcatgccaagttcaactcagggctgaggtatccacattgtccacatcaggcaagccctgcactgacggttgagcctcatggagaggagcatgtgttggaaagagatccctttgttaactgttttgtggtgttctcttcaatgaattagagctcatgccccttttctggctttgctgttgattttggatggtagagaatattcctgagagccttccttttggcccccagcttatgccacccactctcttctcttggttgaattctctgaaggaaaggttcatgtgctattgtcctgttagtcaatagtcttcatatataattgtgttacatatattgctgtagactctcagaaatcagggtagagcttttcctttgagcagtttaatgagtgaattcagcagcaaagtcgcaagaaatggttctccagccaggagaggttatgtttatcctctgattgcccgttttctctgcacacagtgatatcgtattcagtgagaggtgctgttggcacccagcagcaccctgggcacacagcatttcatgtcatgtcacagtgtacaagctaccctctaattcagaaagaagagcattttgcacagagaaaaataaaaagatccatgaatgtcatcttttatcttttattttcagttggctgatgttggaatttttgttcttgtcatgaacttgtaaaccaatcttgccaagatacaagttgttttggtttttcactacaatgacctcttgttcctcctgtcttgactgctgacgttcctcaatgattctattgtctattttatgggaagcagccttcccataggtttccttttacacactgcagggctatctttatactttaaaaaaaacaacaaaaaaaaaaaaggacaagaactgtcactaacctcatggaggggtttgcgtaaaaccatttagcccaccttgagcaaagggtagattccgtgttgtttttttaagctcactgtaataaaatagatctaattcagcattattgtgctacctcaaaggtaaaaaatgttttaaggtcttcttttggtcctgagttctatatacagtgtttgaaatgtctttcatttggaattattttttaaattcttggagtgaattttattttaatctgttttaatcttgtattttaatctcagaagaataagtgattgaaacgtgatcaattcttgctctgtggtgttaaacatataatgaacagtcattaagaattaagtcactgtttgccataaacaaggttgatgttctttttgttgttgttaaggaaaccctagggctcggctttactcttgattaataaaggctgacaaatc

SEQ ID NO: 81806 - DNA, 2808 bp, Homo sapiens
ggcacgaggtccccgcggcggcggcggctgcccagtgacagcggcggcggtgccaggtcggccgtggtagcgtagggttgcgcggcccggaaacgcagagccggccaaagagcggcgcgacgtgagccggggccgtgcgcgaagagacctcgcgggcgcggagcgaaaggccggcgtgagtgagcgcggagacagtggccgccggcggcccaacccgtctatcccttcggccgccgccggcatgagccacatccagatcccgccggggctcacggagctgctgcagggctacacggtggaggtgctgcgacagcagccgcctgacctcgtcgaattcgcagtggagtacttcacccgcctgcgcgaggcccgcgccccagcctcagtcctgcccgccgccaccccacgccagagcctgggccaccccccgccagaacccggcccggaccgtgtcgccgacgccaaaggggacagcgagtcggaggaggacgaggacttggaagttccagttcctagcagatttaatagacgagtatcagtctgtgctgagacctataaccctgatgaggaagaggaagatacagatccaagggtgattcatcctaaaactgatgaacagagatgcagacttcaggaagcttgcaaagatattctccttttcaaaaatcttgatcaggaacagctttctcaagttctcgatgccatgtttgaaaggatagtcaaagctgatgagcatgtcattgaccaaggagatgatggagacaacttttatgtcatagaacggggaacttatgacattttagtaacaaaagataatcaaacccgctctgttggtcaatatgacaaccgtggcagttttggagaactagctctgatgtacaacaccccgagagctgctaccattgttgctacctcagaaggctccctttggggactggaccgggtgacttttagaagaatcatagtgaaaaataatgcaaagaagaggaagatgtttgaatcatttattgagtctgtgcccctccttaaatcactagaggtgtcagaacgaatgaagattgtggatgtaataggagagaagatctataaggatggagaacgcataatcactcagggtgaaaaggctgatagcttttacatcatagagtctggcgaagtgagcatcttgattagaagcaggactaaatcaaacaaggatggtgggaaccaggaggtcgagattgcccgctgccataaggggcagtactttggagagcttgccctggtcaccaacaaacccagagctgcctcagcttatgcagttggagatgtcaaatgcttagttatggatgtacaagcattcgagaggcttctggggccctgcatggacatcatgaagaggaacatctcacactatgaggaacagctggtgaagatgtttggctccagcgtggatctgggcaacctcgggcagtagcatggggaatcaaaggtggcatgccaagttcaactcagggctgaggtatccacattgtccacatcaggcaagccctgcactgacggttgagcctcatggagaggagcatgtgttggaaagagatccctttgttaactgttttgtggtgttctcttcaatgaattagagctcatgccccttttctggctttgctgttgattttggatggtagagaatattcctgagagccttccttttggcccccagcttatgccacccactctcttctcttggttgaattctctgaaggaaaggttcatgtgctattgtcctgttagtcaatagtcttcatatataattgtgttacatatattgctgtagactctcagaaatcagggtagagcttttcctttgagcagtttaatgagtgaattcagcagcaaagtcgcaagaaatggttctccagccaggagaggttatgtttatcctctgattgcccgttttctctgcacacagtgatatcgtattcagtgagaggtgctgttggcacccagcagcaccctgggcacacagcatttcatgtcatgtcacagtgtacaagctaccctctaattcagaaagaagagcattttgcacagagaaaaataaaaagatccatgaatgtcatcttttatcttttattttcagttggctgatgttggaatttttgttcttgtcatgaacttgtaaaccaatcttgccaagatacaagttgttttggtttttcactacaatgacctcttgttcctcctgtcttgactgctgacgttcctcaatgattctattgtctattttatgggaagcagccttcccataggtttccttttacacactgcagggctatctttatactttaaaaaaaacaacaaaaaaaaaaaaggacaagaactgtcactaacctcatggaggggtttgcgtaaaaccatttagcccaccttgagcaaagggtagattccgtgttgtttttttaagctcactgtaataaaatagatctaattcagcattattgtgctacctcaaaggtaaaaaatgttttaaggtcttcttttggtcctgagttctatatacagtgtttgaaatgtctttcatttggaattattttttaaattcttggagtgaattttattttaatctgttttaatcttgtattttaatctcagaagaataagtgattgaaacgtgatcaattcttgctctgtggtgttaaacatataatgaacagtcattaagaattaagtcactgtttgccataaacaaggttgatgttctttttgttgttgttaaggaaaccctagggctcggctttactcttgattaataaaggctgacaaatc

SEQ ID NO: 81807 - DNA, 428 bp, Homo sapiens
aaaaggtcactggaattgaaaaactgaagtaacaaatacagtcatgtgtgactatacagattatgcttgtatggagggatgcagtgtttgagcaggtgaaataaaaaagaagacaaaacagatgtacagaggctccatttcttcatatgctatgatttttaatttaaaaaaattactttaaatttatgtttactaatatttatctttttgggtgtacagttctatgaaatttgacaaatgcacagtcttataacccctacaacaagcaagatatagaacagtttgatcaccttccaaaattttctcatgctgtttttttggagtcagtcctgcccccaaccttcaaactcttgcaaactggtaatcattataattttgctttttccagaatgtcatttaattggtaataaagataattctgccttttg

SEQ ID NO: 81808 - DNA, 387 bp, Homo sapiens
ggccttataggacacttcccatcagaagaacacttttatcaaccccctttcctgctcttctgggaggatatatgtgggactctgtggccacctggtggttagaaacagtggaaccactgagacagtgacacacaactccggtgttatctgtaggagtgacttcataagcaccacactgtgacccaaaacacatcgcaggccttggtcatctgaaaagctcctgaattatgggaaatcaagcttcaaaattcagcacactgtgaagaaacaaccacctttagaaacaccagctgggtttatgtataacacttatgaagcatcctcttgtaaatatccaagaaactggacccacctaaccatttcctggtcatttcctaagtcataagc

SEQ ID NO: 81809 - DNA, 286 bp, Homo sapiens
aaaatttgtaaattagttgaccacactgaaaaacaaaaaaactccagatttcaaacttcttttgagaaattcaaatacctggccctgcattcccaaagagcaacaactggctggagctgagtagcagctgccccttatttacacagaactggcactctagttctgccttaagttatatacgaaggaagcagcaaagccaggtttccactcataagccaatgctactgaactcaccaatttttttcttagtaattaaaaaaaagcacacagaaaatataactacaat

SEQ ID NO: 81810 - DNA, 451 bp, Homo sapiens
atctaaatgaatgcactccagtattgatgcctctgatctgttcttagccatcaggggattctaaagaacaggaaagaatgctggctcagatctgtatggaccattgcttagcctctctgagctgtggtttccttatctgttaatctgcagtggtagtgcctaccctgtatgattcttaagatttaatagctcataaataaaaagcacctgctacagtccccaggacagggtaggtccttgtcatagctacatagcttttattggagtctttagtaccccagtttcaggggctttttagataacagataataagttcccttaagaagaatctaagttattttctaatcccttaattaaaaaaaattttttttcagatgactttaaactatgtgtatggatgcacacatgtgtacacacactaatgtggttgtgggctactttgctgatactt

SEQ ID NO: 81811 - DNA, 783 bp, Homo sapiens
cagggggaggcagaaggggactcagatgagttcagctcacaggaagcatctctgaggaaaactgctcagctctgggatccccatctgtccatctgtgcgggctcagttacaagtggacttctccctgcctggggttcaggagactctgctgggtcccttcacccggatgggagaggcacagcagtacctccgccttctgcaaagatctatttgcttcccttcccctctctgccagtttgcacagcactgttggcccagatctcagtgacattctgagccatggaccacctgcaactcagggaggcagttccagtcattgtgctgtgtttgctgagggggtaggggcggggaacaggaaagagaaaaagagtttagaaattgatggagaaataagaaaaaaataccttagcacaaggcagggcaaaaagagtacgaaggttctatagggaacagaagcaggatcaaggaagagaatatggagaaaggacagcaggaaaattaaaggatgggaaggaggtcatctcttctctctttgcacacttgcagatgagaaggggttttgaacagcagtccattccactgtagatttgctctaattatcagaaagttgcttttcaaatgaagtcaaaacctgctctcttggaatttgccagcattggtcatgattctgtcttgtgaattataagagtccatcttatacagtgtttgtagacagttgtcggactgtctcttgcctctccccccattaaaaaagagaaaatctccaggctaaacatctgagac

SEQ ID NO: 81812 - DNA, 804 bp, Homo sapiens
  misc_feature (716)..(717): n is a, c, g, or t
  misc_feature (720)..(720): n is a, c, g, or t
  misc_feature (725)..(726): n is a, c, g, or t
  misc_feature (728)..(728): n is a, c, g, or t
  misc_feature (748)..(748): n is a, c, g, or t
  misc_feature (763)..(764): n is a, c, g, or t
  misc_feature (766)..(767): n is a, c, g, or t
  misc_feature (780)..(780): n is a, c, g, or t
gtcagtcttactcattgtgagagggcatgaactgggaagcaaggattattgggagccattcagagacaagccatgtagttcaccatgacccccagaaatttgtgttccttcctcatgcagaataccctcaccgccaccaaatccccgacagtttggtcccatgacagcatcagtttgaagtccaggctctcatcattgaggtgagatgaggctcctggggtccagttcttcaagtataggtcctctcagtctgaagatctgagaactagagagagaggctatctgctcccttccacaaacccaatgcacagtgggacagccataggataaccattacagacatgcccatccaaaaagggagaaacagggagcgtacaagagtcgctgatccattccagttccgaaatccgctagggtttatggtggcatttcctcaattgggactcaaagcctgggagtgatttctgtcttggttctgccctctgagttctccttccttttctgtgaaaagtagcctgtattttcagtgtagtcgttttctcagcctgcttcctcctttttattttatattacctttgacttttttgttttttgtttttgagatagaggcttgctccatcacccaggctattgtgcaatggcgtgatctcggctcactgcaacctccgcctcctgggttcaagcaattctgcctcagcctcttgagtagctgaggnnganggatnncntgaggtcaggagtttgagancagcctgggcaacanngnnagaccgtctctancaaaagaaaagaaaaagcctccct

SEQ ID NO: 81813 - DNA, 1681 bp, Homo sapiens
ggcgccgcatgtgtctccgcggcggctgcagccctcgagcgcccgccgcgcgcgcgcgccaaccccggccgccgcccgcgctcccgccccggcctcgcgcccccgtcccggcctcgcgccccggccgccctttgttgacgccggccaggccggtgcggtcggatgcgccgcggcagccccgggccccggctcggaggctcccggcggagaggaggcggcccgcccgggcccgggaccccgcgcgagtcggcgcccggccgaggggctgcgtaggccccgcccggccaggcccagccgggccctggacagagacagggcagggcattgttcatgcactgaccgacctcagcagccccggcatgacctcagggaacggaaactctgcctccagcatcgccggcactgccccccagaatggtgggacgctcgtccctgctggtggggaatctcaagaagaagtatgcacaggggttcctgcctgagaaacttccacagcaggatcacaccaccaccactgactcggagatggaggagccctatctgcaagaatccaaagaggagggtgctcccctcaaactcaagtgtgagctctgtggccgggtggactttgcctataagttcaagcgttccaagcgcttctgttccatggcttgtgcaaagaggtacaacgtgggatgcaccaaacgggtgggacttttccactcagaccggagcaagctgcagaaggcaggagctgcgacccacaaccgccgtcgggccagcaaagccagtctgccaccacttaccaaggataccaagaagcagccaacaggcactgtgcccctttcggttactgctgctttgcagctaacacacagccaggaagactccagccgttgctcagataactcaagctatgaggaacccttgtcacccatctcagccagctcatctacttcccgccggcgacaaggccagcgggacctggagctccccgacatgcatatgcgggacctggtgggcatgggacaccacttcctgccaagtgagcccaccaagtggaatgtagaagacgtctacgaattcatccgctctctgccaggctgccaggagatagcagaggaattccgtgcccaggaaatcgacgggcaagccctgctgctgctcaaggaggaccacctgatgagcgccatgaacatcaagctggggcccgccctgaagatctacgcccgcatcagcatgctcaaggactcctagggctggtggcagccaggattctggcccaaggcgcttctccgatgatagagacaaaagacttctgcagggccagaatggccagttgagagaaaggagactacctaggagcatactggtagagaagcttgggcaccaacaagggcccaaggagcaacaacagagagaggcacaatgatatggtgacaacaatgtggaaaagggacaaaaattagagaagtcatccaaaacacaaatatacacacgatatccaaatggtcccaatcaggagataagagaccacacaaggacaaaagagaatgaagaggaaacgaaaccacattaaagagaggataagtagctaataagacccctggtagtcgtcccctcggtcgtcttgtcgacgattggaccagactcagaatacgaaagtaccactataactcagctaaacaccataacatgtact

SEQ ID NO: 81814 - DNA, 340 bp, Homo sapiens
gggcagctcttggcctcccactcccagtggtgaggctcagagaacttctaaggggaaagaacagctggagtttctgttgatgtgaagaaggcagctcttggcctcccactcccacacttctttgcctataaatcttcctagcagcaatttgagctacctgaggaggaggcagggcagaaagggcgagggcctgcctctgacctgccgtgtcctttgcaggaaggaggtaggcacctttctgagcttattctattccccacccacacccccaggcagggttggaaatgaaggacttttttaacctttgttttgttttttaaaaataaatctgtaaaatctg

SEQ ID NO: 81815 - DNA, 2897 bp, Homo sapiens
gctgggctcagccggacggttcctgctgtggctgcccaccccctcattgcaccagcctatgctcagctgcagccacaccagctcctcccacagccatcctcaaagcacctgcagccccaatttgtgatccagcagcagccacagccacaacagcagcagccgccgccccagcagtcacggcctgtgctccaagctgagccccacccccagctcgcctcagtctctccaagcgtggccctccagcccagctcagaggcccatgccatgccactaggcccggttacacccgccctgccactccagtgtcccactgccaacctgcacaagcctggcggcagtcagcagtgtcaccctcccacacctgatactgggcctcagaatggacatcccgagggcgtgccccacacccctcaacgcaggttccagcacacttcagctgtcatcttacaactgcagcctgcttcaccagtgccccagcagtgtgtccctgatgactggaaagaagtggcaccaggggagaaaagtgtgcctgagacgcggtctggcccatcaccacatcagcaggctattgtcactgccatgcctggtggcctgcctgtacccacgagccctaacatccagccgtccccagctcacgagacagggcagggcattgttcatgcactgaccgacctcagcagccccggcatgacctcagggaacggaaactctgcctccagcatcgccggcactgccccccagaatggtgagaataaaccaccacaggccattgtgaaaccccaaatcctgacgcatgttatcgaagggtttgtgatccaggagggggcggagcctttcccggtgggacgctcgtccctgctggtggggaatctcaagaagaagtatgcacaggggttcctgcctgagaaacttccacagcaggatcacaccaccaccactgactcggagatggaggagccctatctgcaagaatccaaagaggagggtgctcccctcaaactcaagtgtgagctctgtggccgggtggactttgcctataagttcaagcgttccaagcgcttctgttccatggcttgtgcaaagaggtacaacgtgggatgcaccaaacgggtgggacttttccactcagaccggagcaagctgcagaaggcaggagctgcgacccacaaccgccgtcgggccagcaaagccagtctgccaccacttaccaaggataccaagaagcagccaacaggcactgtgcccctttcggttactgctgctttgcagctaacacacagccaggaagactccagccgttgctcagataactcaagctatgaggaacccttgtcacccatctcagccagctcatctacttcccgccggcgacaaggccagcgggacctggagctccccgacatgcatatgcgggacctggtgggcatgggacaccacttcctgccaagtgagcccaccaagtggaatgtagaagacgtctacgaattcatccgctctctgccaggctgccaggagatagcagaggaattccgtgcccaggaaatcgacgggcaagccctgctgctgctcaaggaggaccacctgatgagcgccatgaacatcaagctggggcccgccctgaagatctacgcccgcatcagcatgctcaaggactcctagggctggtggcagccaggattctggcccagggcgcctcctcccgactgagcagagccagacagacattcctgaggggcccagaaatggggccggttggagggcaggggctctccctaggggcatagctggtgaggaggtctgggcacctcctccatggctctcaggggcctttcatttctgtgggaggggcagagaggtaggtggcacagaagatggggctttatgcttgtaaatattgatagcactggcttcctccaaagtcccaatactctagccccgctctcttcccctctttctgtcccccattttccaggggtatatggtcagggctccccaacctgagttgggttacttcaagggcagccagcaggcctggatggaggcctagaaagcccttgccttccttcctcccacttctttctccaggcctggttaactcttccgttgtcagcttctcccccttcagcctgtttctgcagcagccagggttctcccccctacaccctctgcaggtggagagagagaagctgggcccagccgggccgtgcctgctggcacagacgccttaacgctgtgtgtatgactgtgtgactgtgtgggagcctggactgacagataggccaagggctactctctggcatctccaggtgttttgtagcaaacagccacttagtgctttgtcctggactccactcagcctcaggatggggaatagccaagaatggcagcctcagcgcagaggcaaggtcagaaagagacggcgcttcagagtttcctttccagacacccctccccgcactgtgaagttcccctgaccgccctcctggttcacaaagagcattaagaaagctgcggtggtctgagcaacatagcccagagggctgagcctcctggcctgcctgcccgcccaccctgggagtcccagtggtgaggctcagagaacttctaaggggaaagaacagctggagtttctgttgatgtgaagaaggcagctcttggcctcccactcccacacttctttgcctataaatcttcctagcagcaatttgagctacctgaggaggaggcagggcagaaagggcgagggcctgcctctgacctgccgtgtcctttgcaggaaggaggtaggcacctttctgagcttattctattccccacccacacccccaggcagggttggaaatgaaggacttttttaacctttgttttgttttttaaaaataaatctgtaaaatctg

SEQ ID NO: 81816 - DNA, 2474 bp, Homo sapiens
ggcgccgcatgtgtctccgcggcggctgcagccctcgagcgcccgccgcgcgcgcgcgccaaccccggccgccgcccgcgctcccgccccggcctcgcgcccccgtcccggcctcgcgccccggccgccctttgttgacgccggccaggccggtgcggtcggatgcgccgcggcagccccgggccccggctcggaggctcccggcggagaggaggcggcccgcccgggcccgggaccccgcgcgagtcggcgcccggccgaggggctgcgtaggccccgcccggccaggcccagccgggccctggacagagacagggcagggcattgttcatgcactgaccgacctcagcagccccggcatgacctcagggaacggaaactctgcctccagcatcgccggcactgccccccagaatggtgggacgctcgtccctgctggtggggaatctcaagaagaagtatgcacaggggttcctgcctgagaaacttccacagcaggatcacaccaccaccactgactcggagatggaggagccctatctgcaagaatccaaagaggagggtgctcccctcaaactcaagtgtgagctctgtggccgggtggactttgcctataagttcaagcgttccaagcgcttctgttccatggcttgtgcaaagaggtacaacgtgggatgcaccaaacgggtgggacttttccactcagaccggagcaagctgcagaaggcaggagctgcgacccacaaccgccgtcgggccagcaaagccagtctgccaccacttaccaaggataccaagaagcagccaacaggcactgtgcccctttcggttactgctgctttgcagctaacacacagccaggaagactccagccgttgctcagataactcaagctatgaggaacccttgtcacccatctcagccagctcatctacttcccgccggcgacaaggccagcgggacctggagctccccgacatgcatatgcgggacctggtgggcatgggacaccacttcctgccaagtgagcccaccaagtggaatgtagaagacgtctacgaattcatccgctctctgccaggctgccaggagatagcagaggaattccgtgcccaggaaatcgacgggcaagccctgctgctgctcaaggaggaccacctgatgagcgccatgaacatcaagctggggcccgccctgaagatctacgcccgcatcagcatgctcaaggactcctagggctggtggcagccaggattctggcccagggcgcctcctcccgactgagcagagccagacagacattcctgaggggcccagaaatggggccggttggagggcaggggctctccctaggggcatagctggtgaggaggtctgggcacctcctccatggctctcaggggcctttcatttctgtgggaggggcagagaggtaggtggcacagaagatggggctttatgcttgtaaatattgatagcactggcttcctccaaagtcccaatactctagccccgctctcttcccctctttctgtcccccattttccaggggtatatggtcagggctccccaacctgagttgggttacttcaagggcagccagcaggcctggatggaggcctagaaagcccttgccttccttcctcccacttctttctccaggcctggttaactcttccgttgtcagcttctcccccttcagcctgtttctgcagcagccagggttctcccccctacaccctctgcaggtggagagagagaagctgggcccagccgggccgtgcctgctggcacagacgccttaacgctgtgtgtatgactgtgtgactgtgtgggagcctggactgacagataggccaagggctactctctggcatctccaggtgttttgtagcaaacagccacttagtgctttgtcctggactccactcagcctcaggatggggaatagccaagaatggcagcctcagcgcagaggcaaggtcagaaagagacggcgcttcagagtttcctttccagacacccctccccgcactgtgaagttcccctgaccgccctcctggttcacaaagagcattaagaaagctgcggtggtctgagcaacatagcccagagggctgagcctcctggcctgcctgcccgcccaccctgggagtcccagtggtgaggctcagagaacttctaaggggaaagaacagctggagtttctgttgatgtgaagaaggcagctcttggcctcccactcccacacttctttgcctataaatcttcctagcagcaatttgagctacctgaggaggaggcagggcagaaagggcgagggcctgcctctgacctgccgtgtcctttgcaggaaggaggtaggcacctttctgagcttattctattccccacccacacccccaggcagggttggaaatgaaggacttttttaacctttgttttgttttttaaaaataaatctgtaaaatctg

SEQ ID NO: 81817 - DNA, 2955 bp, Homo sapiens
ggcgccgcatgtgtctccgcggcggctgcagccctcgagcgcccgccgcgcgcgcgcgccaaccccggccgccgcccgcgctcccgccccggcctcgcgcccccgtcccggcctcgcgccccggccgccctttgttgacgccggccaggccggtgcggtcggatgcgccgcggcagccccgggccccggctcggaggctcccggcggagaggaggcggcccgcccgggcccgggaccccgcgcgagtcggcgcccggccgaggggctgcgtaggccccgcccggccaggcccagccgggccctggacagagacagggcagggcattgttcatgcactgaccgacctcagcagccccggcatgacctcagggaacggaaactctgcctccagcatcgccggcactgccccccagaatggtgagaataaaccaccacaggccattgtgaaaccccaaatcctgacgcatgttatcgaagggtttgtgatccaggagggggcggagcctttcccggtgggacgctcgtccctgctggtggggaatctcaagaagaagtatgcacaggggttcctgcctgagaaacttccacagcaggatcacaccaccaccactgactcggagatggaggagccctatctgcaagaatccaaagaggagggtgctcccctcaaactcaagtgtgagctctgtggccgggtggactttgcctataagttcaagcgttccaagcgcttctgttccatggcttgtgcaaagaggtacaacgtgggatgcaccaaacgggtgggacttttccactcagaccggagcaagctgcagaaggcaggagctgcgacccacaaccgccgtcgggccagcaaagccagtctgccaccacttaccaaggataccaagaagcagccaacaggcactgtgcccctttcggttactgctgctttgcagctaacacacagccaggaagactccagccgttgctcagataactcaagctatgaggaacccttgtcacccatctcagccagctcatctacttcccgccggcgacaaggccagcgggacctggagctccccgacatgcatatgcgggacctggtgggcatgggacaccacttcctgccaagtgagcccaccaagtggaatgtagaagacgtctacgaattcatccgctctctgccaggctgccaggagatagcagaggaattccgtgcccaggaaatcgacgggcaagccctgctgctgctcaaggaggaccacctgatgagcgccatgaacatcaagctggggcccgccctgaagatctacgcccgcatcagcatgctcaaggactcctagggctggtggcagccaggattctggcccagggcgcctcctcccgactgagcagagccagacagacattcctgaggggcccagaaatggggccggttggagggcaggggctctccctaggggcatagctggtgaggaggtctgggcacctcctccatggctctcaggggcctttcatttctgtgggaggggcagagaggtaggtggcacagaagatggggctttatgcttgtaaatattgatagcactggcttcctccaaagtcccaatactctagccccgctctcttcccctctttctgtcccccattttccaggggtatatggtcagggctccccaacctgagttgggttacttcaagggcagccagcaggcctggatggaggcctagaaagcccttgccttccttcctcccacttctttctccaggcctggttaactcttccgttgtcagcttctcccccttcagcctgtttctgcagcagccagggttctcccccctacaccctctgcaggtggagagagagaagctgggcccagccgggccgtgcctgctggcacagacgccttaacgctgtgtgtatgactgtgtgactgtgtgggagcctggactgacagataggccaagggctactctctggcatctccaggtgttttgtagcaaacagccacttagtgctttgtcctggactccactcagcctcaggatggggaatagccaagaatggcagcctcagcgcagaggcaaggtcagaaagagacggcgcttcagagtttcctttccagacacccctccccgcactgtgaagttcccctgaccgccctcctggttcacaaagagcattaagaaagctgcggtggtctgagcaacatagcccagagggctgagcctcctggcctgcctgcccgcccaccctgggagtcccagtggtgaggctcagagaacttctaaggggaaagaacagctggagtttctgttgatgtgaagaaggcagctcttggcctcccactcccacacttctttgcctataaatcttcctagcagcaatttgagctacctgaggaggaggcagggcagaaagggcgagggcctgcctctgacctgccgtgtcctttgcaggaaggaggtaggcacctttctgagcttattctattccccacccacacccccaggcagggttggaaatgaaggacttttttaacctttgttttgttttttaaaaataaatctgtaaaatctgaaaaaaaaaaaaaaaaaaaaaaaaaaaaaaaaaaaaaaaaaaaaaaaaaaaaacaaaaaaaaaaaaaaaaaaaaaaaagagggggggggggccgaagaaagaccccccgcgaggagggggcgccaccaaaatagtagccgcgccacccgcacgcggtgttttgttgtagagaagcaggggcgcgcccccaatagaggggaggggcggctctaataataaacgacgacgcagccacgcggggcgcggtagtaataacaaccccgcgcgtgcgtcggggcccaatacgccgcgctcgccgcgcgacgagcaccctggagaggagagaggacccccacaaccgcggggggggggcgggacaccaattgtcgggcaccagccaccctccg

SEQ ID NO: 81818 - DNA, 3030 bp, Homo sapiens
  misc_feature (1052)..(1052): n is a, c, g, or t
gctgggctcagccggacggttcctgctgtggctgcccaccccctcattgcaccagcctatgctcagctgcagccacaccagctcctcccacagccatcctcaaagcacctgcagccccaatttgtgatccagcagcagccacagccacaacagcagcagccgccgccccagcagtcacggcctgtgctccaagctgagccccacccccagctcgcctcagtctctccaagcgtggccctccagcccagctcagaggcccatgccatgccactaggcccggttacacccgccctgccactccagtgtcccactgccaacctgcacaagcctggcggcagtcagcagtgtcaccctcccacacctgatactgggcctcagaatggacatcccgagggcgtgccccacacccctcaacgcaggttccagcacacttcagctgtcatcttacaactgcagcctgcttcaccagtgccccagcagtgtgtccctgatgactggaaagaagtggcaccaggggagaaaagtgtgcctgagacgcggtctggcccatcaccacatcagcaggctattgtcactgccatgcctggtggcctgcctgtacccacgagccctaacatccagccgtccccagctcacgagacagggcagggcattgttcatgcactgaccgacctcagcagccccggcatgacctcagggaacggaaactctgcctccagcatcgccggcactgccccccagaatggtgagaataaaccaccacaggccattgtgaaaccccaaatcctgacgcatgttatcgaagggtttgtgatccaggagggggcggagcctttcccggtgggacgctcgtccctgctggtggggaatctcaagaagaagtatgcacaggggttcctgcctgagaaacttccacagcaggatcatatcgaggcacttcagatggaactctgcgagatgtgcatgtgcccgtgatctgcaaggactgcagaccacgtggaaagagaaacaatctgtcattggatctaacaatggggtagtaccccaaagantcctggattgcagttccaggggtagattccaagatgaaggaaggtgtgtcgtccccctcaaatctcaaaggtgttgaagcgtcatggtgggccgcgagtggaacttgtgcctataaagttcagggcgttccaacgcgcttctgtatccatggcttgtgcaaatgaggtacaacgtgggatgcaccaaacgggtgggacttttccactcagaccggagcaagctgcagaaggcaggagctgcgacccacaaccgccgtcgggccagcaaagccagtctgccaccacttaccaaggataccaagaagcagccaacaggcactgtgcccctttcggttactgctgctttgcagctaacacacagccaggaagactccagccgttgctcagataactcaagctatgaggaacccttgtcacccatctcagccagctcatctacttcccgccggcgacaaggccagcgggacctggagctccccgacatgcatatgcgggacctggtgggcatgggacaccacttcctgccaagtgagcccaccaagtggaatgtagaagacgtctacgaattcatccgctctctgccaggctgccaggagatagcagaggaattccgtgcccaggaaatcgacgggcaagccctgctgctgctcaaggaggaccacctgatgagcgccatgaacatcaagctggggcccgccctgaagatctacgcccgcatcagcatgctcaaggactcctagggctggtggcagccaggattctggcccagggcgcctcctcccgactgagcagagccagacagacattcctgaggggcccagaaatggggccggttggagggcaggggctctccctaggggcatagctggtgaggaggtctgggcacctcctccatggctctcaggggcctttcatttctgtgggaggggcagagaggtaggtggcacagaagatggggctttatgcttgtaaatattgatagcactggcttcctccaaagtcccaatactctagccccgctctcttcccctctttctgtcccccattttccaggggtatatggtcagggctccccaacctgagttgggttacttcaagggcagccagcaggcctggatggaggcctagaaagcccttgccttccttcctcccacttctttctccaggcctggttaactcttccgttgtcagcttctcccccttcagcctgtttctgcagcagccagggttctcccccctacaccctctgcaggtggagagagagaagctgggcccagccgggccgtgcctgctggcacagacgccttaacgctgtgtgtatgactgtgtgactgtgtgggagcctggactgacagataggccaagggctactctctggcatctccaggtgttttgtagcaaacagccacttagtgctttgtcctggactccactcagcctcaggatggggaatagccaagaatggcagcctcagcgcagaggcaaggtcagaaagagacggcgcttcagagtttcctttccagacacccctccccgcactgtgaagttcccctgaccgccctcctggttcacaaagagcattaagaaagctgcggtggtctgagcaacatagcccagagggctgagcctcctggcctgcctgcccgcccaccctgggagtcccagtggtgaggctcagagaacttctaaggggaaagaacagctggagtttctgttgatgtgaagaaggcagctcttggcctcccactcccacacttctttgcctataaatcttcctagcagcaatttgagctacctgaggaggaggcagggcagaaagggcgagggcctgcctctgacctgccgtgtcctttgcaggaaggaggtaggcacctttctgagcttattctattccccacccacacccccaggcagggttggaaatgaaggacttttttaacctttgttttgttttttaaaaataaatctgtaaaatctg

SEQ ID NO: 81819 - DNA, 2337 bp, Homo sapiens
  misc_feature (313)..(313): n is a, c, g, or t
gggaacacagagcagggagatggacatcgctgtgctccagcgttcgccgtgctactgccaccccagatactggtggagaagtgaagtcgacctaccaggcacatgtgtgaggaggcgcacaatagtctcatgcacggccatgattccatcagcatactgggtattcggtgcatcgcgacggcaggctgggtcggcagaccgatatgtacccgagtgtgtgatcgctcagttgcgccatgcctgtgtggaggatgtctggaaggaaggaagatatgcgaggagggcgttccttgccgtgtagtagagacattcncagaagagatggtgcagtcagacgcaacgcgaggccacgtgagacgtcaggaaggcaatgggcagggaggccggtatcatgcgaaggaagtcgcaatagcaggatgggtgcatcgcgcgctgaagagtcaagtgtgagctctgtggccgggtggactttgcctataagttcaagcgttccaagcgcttctgttccatggcttgtgcaaagaggtacaacgtgggatgcaccaaacgggtgggacttttccactcagaccggagcaagctgcagaaggcaggagctgcgacccacaaccgccgtcgggccagcaaagccagtctgccaccacttaccaaggataccaagaagcagccaacaggcactgtgcccctttcggttactgctgctttgcagctaacacacagccaggaagactccagccgttgctcagataactcaagctatgaggaacccttgtcacccatctcagccagctcatctacttcccgccggcgacaaggccagcgggacctggagctccccgacatgcatatgcgggacctggtgggcatgggacaccacttcctgccaagtgagcccaccaagtggaatgtagaagacgtctacgaattcatccgctctctgccaggctgccaggagatagcagaggaattccgtgcccaggaaatcgacgggcaagccctgctgctgctcaaggaggaccacctgatgagcgccatgaacatcaagctggggcccgccctgaagatctacgcccgcatcagcatgctcaaggactcctagggctggtggcagccaggattctggcccagggcgcctcctcccgactgagcagagccagacagacattcctgaggggcccagaaatggggccggttggagggcaggggctctccctaggggcatagctggtgaggaggtctgggcacctcctccatggctctcaggggcctttcatttctgtgggaggggcagagaggtaggtggcacagaagatggggctttatgcttgtaaatattgatagcactggcttcctccaaagtcccaatactctagccccgctctcttcccctctttctgtcccccattttccaggggtatatggtcagggctccccaacctgagttgggttacttcaagggcagccagcaggcctggatggaggcctagaaagcccttgccttccttcctcccacttctttctccaggcctggttaactcttccgttgtcagcttctcccccttcagcctgtttctgcagcagccagggttctcccccctacaccctctgcaggtggagagagagaagctgggcccagccgggccgtgcctgctggcacagacgccttaacgctgtgtgtatgactgtgtgactgtgtgggagcctggactgacagataggccaagggctactctctggcatctccaggtgttttgtagcaaacagccacttagtgctttgtcctggactccactcagcctcaggatggggaatagccaagaatggcagcctcagcgcagaggcaaggtcagaaagagacggcgcttcagagtttcctttccagacacccctccccgcactgtgaagttcccctgaccgccctcctggttcacaaagagcattaagaaagctgcggtggtctgagcaacatagcccagagggctgagcctcctggcctgcctgcccgcccaccctgggagtcccagtggtgaggctcagagaacttctaaggggaaagaacagctggagtttctgttgatgtgaagaaggcagctcttggcctcccactcccacacttctttgcctataaatcttcctagcagcaatttgagctacctgaggaggaggcagggcagaaagggcgagggcctgcctctgacctgccgtgtcctttgcaggaaggaggtaggcacctttctgagcttattctattccccacccacacccccaggcagggttggaaatgaaggacttttttaacctttgttttgttttttaaaaataaatctgtaaaatctg

SEQ ID NO: 81820 - DNA, 2649 bp, Homo sapiens
ggcgccgcatgtgtctccgcggcggctgcagccctcgagcgcccgccgcgcgcgcgcgccaaccccggccgccgcccgcgctcccgccccggcctcgcgcccccgtcccggcctcgcgccccggccgccctttgttgacgccggccaggccggtgcggtcggatgcgccgcggcagccccgggccccggctcggaggctcccggcggagaggaggcggcccgcccgggcccgggaccccgcgcgagtcggcgcccggccgaggggctgcgtaggccccgcccggccaggcccagccgggccctggacagagacagggcagggcattgttcatgcactgaccgacctcagcagccccggcatgacctcagggaacggaaactctgcctccagcatcgccggcactgccccccagaatggtgagaataaaccaccacaggccattgtgaaaccccaaatcctgacgcatgttatcgaagggtttgtgatccaggagggggcggagcctttcccggtgggacgctcgtccctgctggtggggaatctcaagaagaagtatgcacaggggttcctgcctgagaaacttccacagcaggatcacaccaccaccactgactcggagatggaggagccctatctgcaagaatccaaagaggagggtgctcccctcaaactcaagtgtgagctctgtggccgggtggactttgcctataagttcaagcgttccaagcgcttctgttccatggcttgtgcaaagaggtacaacgtgggatgcaccaaacgggtgggacttttccactcagaccggagcaagctgcagaaggcaggagctgcgacccacaaccgccgtcgggccagcaaagccagtctgccaccacttaccaaggataccaagaagcagccaacaggcactgtgcccctttcggttactgctgctttgcagctaacacacagccaggaagactccagccgttgctcagataactcaagctatgaggaacccttgtcacccatctcagccagctcatctacttcccgccggcgacaaggccagcgggacctggagctccccgacatgcatatgcgggacctggtgggcatgggacaccacttcctgccaagtgagcccaccaagtggaatgtagaagacgtctacgaattcatccgctctctgccagaataccctcaccgccaccaaatccccgacagtttggtcccatgacagcatcagtttgaagtccaggctctcatcattgaggctgccaggagatagcagaggaattccgtgcccaggaaatcgacgggcaagccctgctgctgctcaaggaggaccacctgatgagcgccatgaacatcaagctggggcccgccctgaagatctacgcccgcatcagcatgctcaaggactcctagggctggtggcagccaggattctggcccagggcgcctcctcccgactgagcagagccagacagacattcctgaggggcccagaaatggggccggttggagggcaggggctctccctaggggcatagctggtgaggaggtctgggcacctcctccatggctctcaggggcctttcatttctgtgggaggggcagagaggtaggtggcacagaagatggggctttatgcttgtaaatattgatagcactggcttcctccaaagtcccaatactctagccccgctctcttcccctctttctgtcccccattttccaggggtatatggtcagggctccccaacctgagttgggttacttcaagggcagccagcaggcctggatggaggcctagaaagcccttgccttccttcctcccacttctttctccaggcctggttaactcttccgttgtcagcttctcccccttcagcctgtttctgcagcagccagggttctcccccctacaccctctgcaggtggagagagagaagctgggcccagccgggccgtgcctgctggcacagacgccttaacgctgtgtgtatgactgtgtgactgtgtgggagcctggactgacagataggccaagggctactctctggcatctccaggtgttttgtagcaaacagccacttagtgctttgtcctggactccactcagcctcaggatggggaatagccaagaatggcagcctcagcgcagaggcaaggtcagaaagagacggcgcttcagagtttcctttccagacacccctccccgcactgtgaagttcccctgaccgccctcctggttcacaaagagcattaagaaagctgcggtggtctgagcaacatagcccagagggctgagcctcctggcctgcctgcccgcccaccctgggagtcccagtggtgaggctcagagaacttctaaggggaaagaacagctggagtttctgttgatgtgaagaaggcagctcttggcctcccactcccacacttctttgcctataaatcttcctagcagcaatttgagctacctgaggaggaggcagggcagaaagggcgagggcctgcctctgacctgccgtgtcctttgcaggaaggaggtaggcacctttctgagcttattctattccccacccacacccccaggcagggttggaaatgaaggacttttttaacctttgttttgttttttaaaaataaatctgtaaaatctg

SEQ ID NO: 81821 - DNA, 1640 bp, Homo sapiens
tttacaaaatgttcttttatttcataacagagaccctgtttcttccaatctccactaagagtttcctcactttcctttaggcctccccagcagcttccctaaaggccatgagacttctatatacagtctctcaaagcaccttagacactcacgctttccacagagtccttctggctcctgcctgtggccagttctgaggccacgcccacatctatagagctgtttgatgtcagcactccttttccaggctgccaggagatagcagaggaattccgtgcccaggaaatcgacgggcaagccctgctgctgctcaaggaggaccacctgatgagcgccatgaacatcaagctggggcccgccctgaagatctacgcccgcatcagcatgctcaaggactcctagggctggtggcagccaggattctggcccagggcgcctcctcccgactgagcagagccagacagacattcctgaggggcccagaaatggggccggttggagggcaggggctctccctaggggcatagctggtgaggaggtctgggcacctcctccatggctctcaggggcctttcatttctgtgggaggggcagagaggtaggtggcacagaagatggggctttatgcttgtaaatattgatagcactggcttcctccaaagtcccaatactctagccccgctctcttcccctctttctgtcccccattttccaggggtatatggtcagggctccccaacctgagttgggttacttcaagggcagccagcaggcctggatggaggcctagaaagcccttgccttccttcctcccacttctttctccaggcctggttaactcttccgttgtcagcttctcccccttcagcctgtttctgcagcagccagggttctcccccctacaccctctgcaggtggagagagagaagctgggcccagccgggccgtgcctgctggcacagacgccttaacgctgtgtgtatgactgtgtgactgtgtgggagcctggactgacagataggccaagggctactctctggcatctccaggtgttttgtagcaaacagccacttagtgctttgtcctggactccactcagcctcaggatggggaatagccaagaatggcagcctcagcgcagaggcaaggtcagaaagagacggcgcttcagagtttcctttccagacacccctccccgcactgtgaagttcccctgaccgccctcctggttcacaaagagcattaagaaagctgcggtggtctgagcaacatagcccagagggctgagcctcctggcctgcctgcccgcccaccctgggagtcccagtggtgaggctcagagaacttctaaggggaaagaacagctggagtttctgttgatgtgaagaaggcagctcttggcctcccactcccacacttctttgcctataaatcttcctagcagcaatttgagctacctgaggaggaggcagggcagaaagggcgagggcctgcctctgacctgccgtgtcctttgcaggaaggaggtaggcacctttctgagcttattctattccccacccacacccccaggcagggttggaaatgaaggacttttttaacctttgttttgttttttaaaaataaatctgtaaaatctg

SEQ ID NO: 81822 - DNA, 1146 bp, Homo sapiens
tctacaggatcccaacgctcgaaaggggcatagctggtgaggaggtctgggcacctcctccatggctctcaggggcctttcatttctgtgggaggggcagagaggtaggtggcacagaagatggggctttatgcttgtaaatattgatagcactggcttcctccaaagtcccaatactctagccccgctctcttcccctctttctgtcccccattttccaggggtatatggtcagggctccccaacctgagttgggttacttcaagggcagccagcaggcctggatggaggcctagaaagcccttgccttccttcctcccacttctttctccaggcctggttaactcttccgttgtcagcttctcccccttcagcctgtttctgcagcagccagggttctcccccctacaccctctgcaggtggagagagagaagctgggcccagccgggccgtgcctgctggcacagacgccttaacgctgtgtgtatgactgtgtgactgtgtgggagcctggactgacagataggccaagggctactctctggcatctccaggtgttttgtagcaaacagccacttagtgctttgtcctggactccactcagcctcaggatggggaatagccaagaatggcagcctcagcgcagaggcaaggtcagaaagagacggcgcttcagagtttcctttccagacacccctccccgcactgtgaagttcccctgaccgccctcctggttcacaaagagcattaagaaagctgcggtggtctgagcaacatagcccagagggctgagcctcctggcctgcctgcccgcccaccctgggagtcccagtggtgaggctcagagaacttctaaggggaaagaacagctggagtttctgttgatgtgaagaaggcagctcttggcctcccactcccacacttctttgcctataaatcttcctagcagcaatttgagctacctgaggaggaggcagggcagaaagggcgagggcctgcctctgacctgccgtgtcctttgcaggaaggaggtaggcacctttctgagcttattctattccccacccacacccccaggcagggttggaaatgaaggacttttttaacctttgttttgttttttaaaaataaatctgtaaaatctg

SEQ ID NO: 81823 - DNA, 2202 bp, Homo sapiens
  misc_feature (2202)..(2202): n is a, c, g, or t
ggcgccgcatgtgtctccgcggcggctgcagccctcgagcgcccgccgcgcgcgcgcgccaaccccggccgccgcccgcgctcccgccccggcctcgcgcccccgtcccggcctcgcgccccggccgccctttgttgacgccggccaggccggtgcggtcggatgcgccgcggcagccccgggccccggctcggaggctcccggcggagaggaggcggcccgcccgggcccgggaccccgcgcgagtcggcgcccggccgaggggctgcgtaggccccgcccggccaggcccagccgggccctggacagagacagggcagggcattgttcatgcactgaccgacctcagcagccccggcatgacctcagggaacggaaactctgcctccagcatcgccggcactgccccccagaatggtgagaataaaccaccacaggccattgtgaaaccccaaatcctgacgcatgttatcgaagggtttgtgatccaggagggggcggagcctttcccggtgggacgctcgtccctgctggtggggaatctcaagaagaagtatgcacaggggttcctgcctgagaaacttccacagcaggatcacaccaccaccactgactcggagatggaggagccctatctgcaagaatccaaagaggagggtgctcccctcaaactcaagtgtgagctctgtggccgggtggactttgcctataagttcaagcgttccaagcgcttctgttccatggcttgtgcaaagaggtacaacgtgggatgcaccaaacgggtgggacttttccactcagaccggagcaagctgcagaaggcaggagctgcgacccacaaccgccgtcgggccagcaaagccagtctgccaccacttaccaaggataccaagaagcagccaacaggcactgtgcccctttcggttactgctgctttgcagctaacacacagccaggaagactccagccgttgctcagataactcaagctatgaggaacccttgtcacccatctcagccagctcatctacttcccgccggcgacaaggccagcgggacctggagctccccgacatgcatatgcgggacctggtgggcatgggacaccacttcctgccaagtgagcccaccaagtggaatgtagaagacgtctacgaattcatccgctctctgccaggctgccaggagatagcagaggaattccgtgcccaggaaatcgacgggcaagccctgctgctgctcaaggaggaccacctgatgagcgccatgaacatcaagctggggcccgccctgaagatctacgcccgcatcagcatgctcaaggactcctagggctggtggcagccaggattctggcccagggcgcctcctcccgactgagcagagccagacagacattcctgaggggcccagaaatggggccggttggagggcaggggctctccctaggggcatagctggtgaggaggtctgggcacctcctccatggctctcaggggcctttcatttctgtgggaggggcagagaggtaggtggcacagaagatggggctttatgcttgtaaatattgatagcactggcttcctccaaagtcccaatactctagccccgctctcttcccctctttctgtcccccattttccaggggtatatggtcagggctccccaacctgagttgggttacttcaagggcagccagcaggcctggatggaggcctagaaagcccttgccttccttcctcccacttctttctccaggcctggttaactcttccgttgtcagcttctcccccttcagcctgtttctgcagcagccagggttctcccccctacaccctctgcaggtggagagagagaagctgggcccagccgggccgtgcctgctggcacagacgccttaacgctgtgtgtatgactgtgtgactgtgtgggagcctggactgacagataggccaagggctactctctggcatctccaggtgttttgtagcaaacagccacttagtgctttgtcctggactccactcagcctcaggatggggaatagccaagaatggcagcctcagcgcagaggcaaggtcagaaagagacggcgcttcagagtttcctttccagacacccctccccgcactgtgaagttcccctgaccgccctccgtcactatatgagcagttagttagaggaggtgtctatagtctctggn

SEQ ID NO: 81824 - DNA, 2307 bp, Homo sapiens
ggcgccgcatgtgtctccgcggcggctgcagccctcgagcgcccgccgcgcgcgcgcgccaaccccggccgccgcccgcgctcccgccccggcctcgcgcccccgtcccggcctcgcgccccggccgccctttgttgacgccggccaggccggtgcggtcggatgcgccgcggcagccccgggccccggctcggaggctcccggcggagaggaggcggcccgcccgggcccgggaccccgcgcgagtcggcgcccggccgaggggctgcgtaggccccgcccggccaggcccagccgggccctggacagagacagggcagggcattgttcatgcactgaccgacctcagcagccccggcatgacctcagggaacggaaactctgcctccagcatcgccggcactgccccccagaatggtgagaataaaccaccacaggccattgtgaaaccccaaatcctgacgcatgttatcgaagggtttgtgatccaggagggggcggagcctttcccggtgggacgctcgtccctgctggtggggaatctcaagaagaagtatgcacaggggttcctgcctgagaaacttccacagcaggatcacaccaccaccactgactcggagatggaggagccctatctgcaagaatccaaagaggagggtgctcccctcaaactcaagtgtgagctctgtggccgggtggactttgcctataagttcaagcgttccaagcgcttctgttccatggcttgtgcaaagaggtacaacgtgggatgcaccaaacgggtgggacttttccactcagaccggagcaagctgcagaaggcaggagctgcgacccacaaccgccgtcgggccagcaaagccagtctgccaccacttaccaaggataccaagaagcagccaacaggcactgtgcccctttcggttactgctgctttgcagctaacacacagccaggaagactccagccgttgctcagataactcaagctatgaggaacccttgtcacccatctcagccagctcatctacttcccgccggcgacaaggccagcgggacctggagctccccgacatgcatatgcgggacctggtgggcatgggacaccacttcctgccaagtgagcccaccaagtggaatgtagaagacgtctacgaattcatccgctctctgccaggctgccaggagatagcagaggaattccgtgcccaggaaatcgacgggcaagccctgctgctgctcaaggaggaccacctgatgagcgccatgaacatcaagctggggcccgccctgaagatctacgcccgcatcagcatgctcaaggactcctagggctggtggcagccaggattctggcccagggcgcctcctcccgactgagcagagccagacagacattcctgaggggcccagaaatggggccggttggagggcaggggctctccctaggggcatagctggtgaggaggtctgggcacctcctccatggctctcaggggcctttcatttctgtgggaggggcagagaggtaggtggcacagaagatggggctttatgcttgtaaatattgatagcactggcttcctccaaagtcccaatactctagccccgctctcttcccctctttctgtcccccattttccaggggtatatggtcagggctccccaacctgagttgggttacttcaagggcagccagcaggcctggatggaggcctagaaagcccttgccttccttcctcccacttctttctccaggcctggttaactcttccgttgtcagcttctcccccttcagcctgtttctgcagcagccagggttctcccccctacaccctctgcaggtggagagagagaagctgggcccagccgggccgtgcctgctggcacagacgccttaacgctgtgtgtatgactgtgtgactgtgtgggagcctggactgacagataggccaagctcctggcctgcctgcccgcccaccctgggagtcccagtggtgaggctcagagaacttctaaggggaaagaacagctggagtttctgttgatgtgaagaaggcagctcttggcctcccactcccacacttctttgcctataaatcttcctagcagcaatttgagctacctgaggaggaggcagggcagaaagggcgagggcctgcctctgacctgccgtgtcctttgcaggaaggaggtaggcacctttctgagcttattctattccccacccacacccccaggcagggttggaaatgaaggacttttttaacctttgttttgttttttaaaaataaatctgtaaaatctg

SEQ ID NO: 81825 - DNA, 2206 bp, Homo sapiens
ggcgccgcatgtgtctccgcggcggctgcagccctcgagcgcccgccgcgcgcgcgcgccaaccccggccgccgcccgcgctcccgccccggcctcgcgcccccgtcccggcctcgcgccccggccgccctttgttgacgccggccaggccggtgcggtcggatgcgccgcggcagccccgggccccggctcggaggctcccggcggagaggaggcggcccgcccgggcccgggaccccgcgcgagtcggcgcccggccgaggggctgcgtaggccccgcccggccaggcccagccgggccctggacagagacagggcagggcattgttcatgcactgaccgacctcagcagccccggcatgacctcagggaacggaaactctgcctccagcatcgccggcactgccccccagaatggtgagaataaaccaccacaggccattgtgaaaccccaaatcctgacgcatgttatcgaagggtttgtgatccaggagggggcggagcctttcccggtgggacgctcgtccctgctggtggggaatctcaagaagaagtatgcacaggggttcctgcctgagaaacttccacagcaggatcacaccaccaccactgactcggagatggaggagccctatctgcaagaatccaaagaggagggtgctcccctcaaactcaagtgtgagctctgtggccgggtggactttgcctataagttcaagcgttccaagcgcttctgttccatggcttgtgcaaagaggtacaacgtgggatgcaccaaacgggtgggacttttccactcagaccggagcaagctgcagaaggcaggagctgcgacccacaaccgccgtcgggccagcaaagccagtctgccaccacttaccaaggataccaagaagcagccaacaggcactgtgcccctttcggttactgctgctttgcagctaacacacagccaggaagactccagccgttgctcagataactcaagctatgaggaacccttgtcacccatctcagccagctcatctacttcccgccggcgacaaggccagcgggacctggagctccccgacatgcatatgcgggacctggtgggcatgggacaccacttcctgccaagtgagcccaccaagtggaatgtagaagacgtctacgaattcatccgctctctgccaggctgccaggagatagcagaggaattccgtgcccaggaaatcgacgggcaagccctgctgctgctcaaggaggaccacctgatgagcgccatgaacatcaagctggggcccgccctgaagatctacgcccgcatcagcatgctcaaggactcctagggctggtggcagccaggattctggcccagggcgcctcctcccgactgagcagagccagacagacattcctgaggggcccagaaatggggccggttggagggcaggggctctccctaggggcatagctggtgaggaggtctgggcacctcctccatggctctcaggggcctttcatttctgtgggaggggcagagaggtaggtggcacagaagatggggctttatgcttgtaaatattgatagcactggcttcctccaaagtcccaatactctagccccgctctcttcccctctttctgtcccccattttccaggggtatatggtcagggctccccaacctgagttgggttacttcaagggcagccagcaggcctggatggaggcctagaaagcccttgccttccttcctcccacttctttctccaggcctggttaactcttccgttgtcagcttctcccccttcagcctgtttctgcagcagccagggttctcccccctacaccctctgcaggtggagagagagaagctgggcccagccgggccgtgcctgctggcacagacgccttaacgctgtgtgtatgactgtgtgactgtgtgggagcctggactgacagataggccaagggctactctctggcatctccaggtgttttgtagcaaacagccacttagtgctttgtcctggactccactcagcctcaggatggggaatagccaagaatggcagcctctgacctgccgtgtcctttgcaggaaggaggtaggcacctttctgagcttattctattccccacccacacccccaggcagggttggaaatgaaggacttttttaacctttgttttgttttttaaaaataaatctgtaaaatctg

SEQ ID NO: 81826 - DNA, 970 bp, Homo sapiens
aaagagggtccgcgttagaggtaatatctgtcccccattttccaggggtatatggtcagggctccccaacctgagttgggttacttcaagggcagccagcaggcctggatggaggcctagaaagcccttgccttccttcctcccacttctttctccaggcctggttaactcttccgttgtcagcttctcccccttcagcctgtttctgcagcagccagggttctcccccctacaccctctgcaggtggagagagagaagctgggcccagccgggccgtgcctgctggcacagacgccttaacgctgtgtgtatgactgtgtgactgtgtgggagcctggactgacagataggccaagggctactctctggcatctccaggtgttttgtagcaaacagccacttagtgctttgtcctggactccactcagcctcaggatggggaatagccaagaatggcagcctcagcgcagaggcaaggtcagaaagagacggcgcttcagagtttcctttccagacacccctccccgcactgtgaagttcccctgaccgccctcctggttcacaaagagcattaagaaagctgcggtggtctgagcaacatagcccagagggctgagcctcctggcctgcctgcccgcccaccctgggagtcccagtggtgaggctcagagaacttctaaggggaaagaacagctggagtttctgttgatgtgaagaaggcagctcttggcctcccactcccacacttctttgcctataaatcttcctagcagcaatttgagctacctgaggaggaggcagggcagaaagggcgagggcctgcctctgacctgccgtgtcctttgcaggaaggaggtaggcacctttctgagcttattctattccccacccacacccccaggcagggttggaaatgaaggacttttttaacctttgttttgttttttaaaaataaatctgtaaaatctg

SEQ ID NO: 81827 - DNA, 1814 bp, Homo sapiens
ggcgccgcatgtgtctccgcggcggctgcagccctcgagcgcccgccgcgcgcgcgcgccaaccccggccgccgcccgcgctcccgccccggcctcgcgcccccgtcccggcctcgcgccccggccgccctttgttgacgccggccaggccggtgcggtcggatgcgccgcggcagccccgggccccggctcggaggctcccggcggagaggaggcggcccgcccgggcccgggaccccgcgcgagtcggcgcccggccgaggggctgcgtaggccccgcccggccaggcccagccgggccctggacagagacagggcagggcattgttcatgcactgaccgacctcagcagccccggcatgacctcagggaacggaaactctgcctccagcatcgccggcactgccccccagaatggtgagaataaaccaccacaggccattgtgaaaccccaaatcctgacgcatgttatcgaagggtttgtgatccaggagggggcggagcctttcccggtgggacgctcgtccctgctggtggggaatctcaagaagaagtatgcacaggggttcctgcctgagaaacttccacagcaggatcacaccaccaccactgactcggagatggaggagccctatctgcaagaatccaaagaggagggtgctcccctcaaactcaagtgtgagctctgtggccgggtggactttgcctataagttcaagcgttccaagcgcttctgttccatggcttgtgcaaagaggtacaacgtgggatgcaccaaacgggtgggacttttccactcagaccggagcaagctgcagaaggcaggagctgcgacccacaaccgccgtcgggccagcaaagccagtctgccaccacttaccaaggataccaagaagcagccaacaggcactgtgcccctttcggttactgctgctttgcagctaacacacagccaggaagactccagccgttgctcagataactcaagctatgaggaacccttgtcacccatctcagccagctcatctacttcccgccggcgacaaggccagcgggacctggagctccccgacatgcatatgcgggacctggtgggcatgggacaccacttcctgccaagtgagcccaccaagtggaatgtagaagacgtctacgaattcatccgctctctgccaggctgccaggagatagcagaggaattccgtgcccaggaaatcgacgggcaagccctgctgctgctcaaggaggaccacctgatgagcgccatgaacatcaagctggggcccgccctgaagatctacgcccgcatcagcatgctcaaggactcctagggctggtggcagccaggattctggcccagggcgcctcctcccgactgagcagagccagacagacattcctggttcacaaagagcattaagaaagctgcggtggtctgagcaacatagcccagagggctgagcctcctggcctgcctgcccgcccaccctgggagtcccagtggtgaggctcagagaacttctaaggggaaagaacagctggagtttctgttgatgtgaagaaggcagctcttggcctcccactcccacacttctttgcctataaatcttcctagcagcaatttgagctacctgaggaggaggcagggcagaaagggcgagggcctgcctctgacctgccgtgtcctttgcaggaaggaggtaggcacctttctgagcttattctattccccacccacacccccaggcagggttggaaatgaaggacttttttaacctttgttttgttttttaaaaataaatctgtaaaatctg

SEQ ID NO: 81828 - DNA, 1710 bp, Homo sapiens
ggcgccgcatgtgtctccgcggcggctgcagccctcgagcgcccgccgcgcgcgcgcgccaaccccggccgccgcccgcgctcccgccccggcctcgcgcccccgtcccggcctcgcgccccggccgccctttgttgacgccggccaggccggtgcggtcggatgcgccgcggcagccccgggccccggctcggaggctcccggcggagaggaggcggcccgcccgggcccgggaccccgcgcgagtcggcgcccggccgaggggctgcgtaggccccgcccggccaggcccagccgggccctggacagagacagggcagggcattgttcatgcactgaccgacctcagcagccccggcatgacctcagggaacggaaactctgcctccagcatcgccggcactgccccccagaatggtgagaataaaccaccacaggccattgtgaaaccccaaatcctgacgcatgttatcgaagggtttgtgatccaggagggggcggagcctttcccggtgggacgctcgtccctgctggtggggaatctcaagaagaagtatgcacaggggttcctgcctgagaaacttccacagcaggatcacaccaccaccactgactcggagatggaggagccctatctgcaagaatccaaagaggagggtgctcccctcaaactcaagtgtgagctctgtggccgggtggactttgcctataagttcaagcgttccaagcgcttctgttccatggcttgtgcaaagaggtacaacgtgggatgcaccaaacgggtgggacttttccactcagaccggagcaagctgcagaaggcaggagctgcgacccacaaccgccgtcgggccagcaaagccagtctgccaccacttaccaaggataccaagaagcagccaacaggcactgtgcccctttcggttactgctgctttgcagctaacacacagccaggaagactccagccgttgctcagataactcaagctatgaggaacccttgtcacccatctcagccagctcatctacttcccgccggcgacaaggccagcgggacctggagctccccgacatgcatatgcgggacctggtgggcatgggacaccacttcctgccaagtgagcccaccaagtggaatgtagaagacgtctacgaattcatccgctctctgccaggctgccaggagatagcagaggaattccgtgcccaggaaatcgacgggcaagccctgctgctgctcaaggaggaccacctgatgagcgccatgaacatcaagctggggcccgccctgaagatctacgcccgcatcagcatgctcaaggactcctagggctggtggcagccaggattctggcccactcctggcctgcctgcccgcccaccctgggagtcccagtggtgaggctcagagaacttctaaggggaaagaacagctggagtttctgttgatgtgaagaaggcagctcttggcctcccactcccacacttctttgcctataaatcttcctagcagcaatttgagctacctgaggaggaggcagggcagaaagggcgagggcctgcctctgacctgccgtgtcctttgcaggaaggaggtaggcacctttctgagcttattctattccccacccacacccccaggcagggttggaaatgaaggacttttttaacctttgttttgttttttaaaaataaatctgtaaaatctg

SEQ ID NO: 81829 - DNA, 1776 bp, Homo sapiens
ggcgccgcatgtgtctccgcggcggctgcagccctcgagcgcccgccgcgcgcgcgcgccaaccccggccgccgcccgcgctcccgccccggcctcgcgcccccgtcccggcctcgcgccccggccgccctttgttgacgccggccaggccggtgcggtcggatgcgccgcggcagccccgggccccggctcggaggctcccggcggagaggaggcggcccgcccgggcccgggaccccgcgcgagtcggcgcccggccgaggggctgcgtaggccccgcccggccaggcccagccgggccctggacagagacagggcagggcattgttcatgcactgaccgacctcagcagccccggcatgacctcagggaacggaaactctgcctccagcatcgccggcactgccccccagaatggtgagaataaaccaccacaggccattgtgaaaccccaaatcctgacgcatgttatcgaagggtttgtgatccaggagggggcggagcctttcccggtgggacgctcgtccctgctggtggggaatctcaagaagaagtatgcacaggggttcctgcctgagaaacttccacagcaggatcacaccaccaccactgactcggagatggaggagccctatctgcaagaatccaaagaggagggtgctcccctcaaactcaagtgtgagctctgtggccgggtggactttgcctataagttcaagcgttccaagcgcttctgttccatggcttgtgcaaagaggtacaacgtgggatgcaccaaacgggtgggacttttccactcagaccggagcaagctgcagaaggcaggagctgcgacccacaaccgccgtcgggccagcaaagccagtctgccaccacttaccaaggataccaagaagcagccaacaggcactgtgcccctttcggttactgctgctttgcagctaacacacagccaggaagactccagccgttgctcagataactcaagctatgaggaacccttgtcacccatctcagccagctcatctacttcccgccggcgacaaggccagcgggacctggagctccccgacatgcatatgcgggacctggtgggcatgggacaccacttcctgccaagtgagcccaccaagtggaatgtagaagacgtctacgaattcatccgctctctgccaggctgccaggagatagcagaggaattccgtgcccaggaaatcgacgggcaagccctgctgctgctcaaggaggaccacctgatgagcgccatgaacatcaagctggggcccgccctgaagatctacgcccgcatcagcatgctcaaggactcctagggctggtggcagccaggattctggcccaaggcgcttctccgatgatagagacaaaagacttctgcagggccagaatggccagttgagagaaaggagactacctaggagcatactggtagagaagcttgggcaccaacaagggcccaaggagcaacaacagagagaggcacaatgatatggtgacaacaatgtggaaaagggacaaaaattagagaagtcatccaaaacacaaatatacacacgatatccaaatggtcccaatcaggagataagagaccacacaaggacaaaagagaatgaagaggaaacgaaaccacattaaagagaggataagtagctaataagacccctggtagtcgtcccctcggtcgtcttgtcgacgattggaccagactcagaatacgaaagtaccactataactcagctaaacaccataacatgtact

SEQ ID NO: 81830 - DNA, 1657 bp, Homo sapiens
ggcgccgcatgtgtctccgcggcggctgcagccctcgagcgcccgccgcgcgcgcgcgccaaccccggccgccgcccgcgctcccgccccggcctcgcgcccccgtcccggcctcgcgccccggccgccctttgttgacgccggccaggccggtgcggtcggatgcgccgcggcagccccgggccccggctcggaggctcccggcggagaggaggcggcccgcccgggcccgggaccccgcgcgagtcggcgcccggccgaggggctgcgtaggccccgcccggccaggcccagccgggccctggacagagacagggcagggcattgttcatgcactgaccgacctcagcagccccggcatgacctcagggaacggaaactctgcctccagcatcgccggcactgccccccagaatggtgagaataaaccaccacaggccattgtgaaaccccaaatcctgacgcatgttatcgaagggtttgtgatccaggagggggcggagcctttcccggtgggacgctcgtccctgctggtggggaatctcaagaagaagtatgcacaggggttcctgcctgagaaacttccacagcaggatcacaccaccaccactgactcggagatggaggagccctatctgcaagaatccaaagaggagggtgctcccctcaaactcaagtgtgagctctgtggccgggtggactttgcctataagttcaagcgttccaagcgcttctgttccatggcttgtgcaaagaggtacaacgtgggatgcaccaaacgggtgggacttttccactcagaccggagcaagctgcagaaggcaggagctgcgacccacaaccgccgtcgggccagcaaagccagtctgccaccacttaccaaggataccaagaagcagccaacaggcactgtgcccctttcggttactgctgctttgcagctaacacacagccaggaagactccagccgttgctcagataactcaagctatgaggaacccttgtcacccatctcagccagctcatctacttcccgccggcgacaaggccagcgggacctggagctccccgacatgcatatgcgggacctggtgggcatgggacaccacttcctgccaagtgagcccaccaagtggaatgtagaagacgtctacgaattcatccgctctctgccaggtaaggcccttggaaattccatgtctccccggaatagcaaggaaagagaaaatgagagaccctcccaccaccaggaggattaggtagtttagttaatgactcaggttcaggaactggggtgcagaaatgagtgagatgagctccctgcctataagagcttgcttatattcagcatagaatgcaaactataaatattccatagctgtaattctgtatattttctggcatgggaagtgatctgtgtgaaatacagagatgataatgtaattaactgtctctctctcctgggagagattaggaggggagtcaggtagagtgtaggatatgtgtcaggaacatcaaaattaagaaaatagccaggtgtggtggctcacacctatagtcccagcactttgggaggctgaggtggaaggattgcgtgaggtcaggagtttgagaacagcctgggcaacatggtgagacctgtctctaccaaaaaaaa

SEQ ID NO: 81831 - DNA, 1230 bp, Homo sapiens
ggcgccgcatgtgtctccgcggcggctgcagccctcgagcgcccgccgcgcgcgcgcgccaaccccggccgccgcccgcgctcccgccccggcctcgcgcccccgtcccggcctcgcgccccggccgccctttgttgacgccggccaggccggtgcggtcggatgcgccgcggcagccccgggccccggctcggaggctcccggcggagaggaggcggcccgcccgggcccgggaccccgcgcgagtcggcgcccggccgaggggctgcgtaggccccgcccggccaggcccagccgggccctggacagagacagggcagggcattgttcatgcactgaccgacctcagcagccccggcatgacctcagggaacggaaactctgcctccagcatcgccggcactgccccccagaatggtgagaataaaccaccacaggccattgtgaaaccccaaatcctgacgcatgttatcgaagggtttgtgatccaggagggggcggagcctttcccggtgggacgctcgtccctgctggtggggaatctcaagaagaagtatgcacaggggttcctgcctgagaaacttccacagcaggatcacaccaccaccactgactcggagatggaggagccctatctgcaagaatccaaagaggagggtgctcccctcaaactcaagtgtgagctctgtggccgggtggactttgcctataagttcaagcgttccaagcgcttctgttccatggcttgtgcaaagaggtacaacgtgggatgcaccaaacgggtgggacttttccactcagaccggagcaagctgcagaaggcaggagctgcgacccacaaccgccgtcgggccagcaaagccagtctgccaccacttaccaaggataccaagaagcagccaacaggcactgtgcccctttcggttactgctgctttgcagctaacacacagccaggaagactccagccgttgctcagataactcaagctatgaggaacccttgtcacccatctcagccagctcatctacttcccgccggcgacaaggccagcgggacctggagctccccgacatgcatatgcgggacctggtgggcatgggacaccacttcctgccaagtgagcccaccaagtggaatgtagaagacgtctacgaattcatccgctctctgccagcagtaagaagccaagcaacaccttccacattctgcctgaaaatctccttagcta

SEQ ID NO: 81832 - DNA, 1047 bp, Homo sapiens
tttacaaaatgttcttttatttcataacagagaccctgtttcttccaatctccactaagagtttcctcactttcctttaggcctccccagcagcttccctaaaggccatgagacttctatatacagtctctcaaagcaccttagacactcacgctttccacagagtccttctggctcctgcctgtggccagttctgaggccacgcccacatctatagagctgtttgatgtcagcactccttttccaggctgccaggagatagcagaggaattccgtgcccaggaaatcgacgggcaagccctgctgctgctcaaggaggaccacctgatgagcgccatgaacatcaagctggggcccgccctgaagatctacgcccgcatcagcatgctcaaggactcctagggctggtggcagccaggattctggcccagggcgcctcctcccgactgagcagagccagacagacattcctgaggggcccagaaatggggccggttggagggcaggggctctccctaggggcatagctggtgaggaggtctgggcacctcctccatggctctcaggggcctttcatttctgtgggaggggcagagaggtaggtggcacagaagatggggctttatgcttgtaaatattgatagcactggcttcctccaaagtcccaatactctagccccgctctcttcccctctttctgtcccccattttccaggggtatatggtcagggctccccaacctgagttgggttacttcaagggcagccagcaggcctggatggaggcctagaaagcccttgccttccttcctcccactcccacacttctttgcctataaatcttcctagcagcaatttgagctacctgaggaggaggcagggcagaaagggcgagggcctgcctctgacctgccgtgtcctttgcaggaaggaggtaggcacctttctgagcttattctattccccacccacacccccaggcagggttggaaatgaaggacttttttaacctttgttttgttttttaaaaataaatctgtaaaatctg

SEQ ID NO: 81833 - DNA, 338 bp, Homo sapiens
caaagatagaattcccgtctgtttatccgggttaactgttcatagcacggttgggaaatgaagaaacactgctagctgattagctgcatgcgttgttgtggaactgactatactcatacttggtgatgtgtccattgaaactgtgccacttttaaatgggtcactgaggggaggggactgcttggtttgcattgtcgcttggccccacggtaaaagccgggcgcagtttgagtccttgctgtccctccctgggcgtggactctggttctgatctcccctgctttgttttcctactctctctcgtgcagagacagggcagggcattgttcatgcactga

SEQ ID NO: 81834 - DNA, 2569 bp, Homo sapiens
ggcgccgcatgtgtctccgcggcggctgcagccctcgagcgcccgccgcgcgcgcgcgccaaccccggccgccgcccgcgctcccgccccggcctcgcgcccccgtcccggcctcgcgccccggccgccctttgttgacgccggccaggccggtgcggtcggatgcgccgcggcagccccgggccccggctcggaggctcccggcggagaggaggcggcccgcccgggcccgggaccccgcgcgagtcggcgcccggccgaggggctgcgtaggccccgcccggccaggcccagccgggccctggacagagacagggcagggcattgttcatgcactgaccgacctcagcagccccggcatgacctcagggaacggaaactctgcctccagcatcgccggcactgccccccagaatggtgagaataaaccaccacaggccattgtgaaaccccaaatcctgacgcatgttatcgaagggtttgtgatccaggagggggcggagcctttcccggtgggacgctcgtccctgctggtggggaatctcaagaagaagtatgcacaggggttcctgcctgagaaacttccacagcaggatcacaccaccaccactgactcggagatggaggagccctatctgcaagaatccaaagaggagggtgctcccctcaaactcaagtgtgagctctgtggccgggtggactttgcctataagttcaagcgttccaagcgcttctgttccatggcttgtgcaaagaggtacaacgtgggatgcaccaaacgggtgggacttttccactcagaccggagcaagctgcagaaggcaggagctgcgacccacaaccgccgtcgggccagcaaagccagtctgccaccacttaccaaggataccaagaagcagccaacaggcactgtgcccctttcggttactgctgctttgcagctaacacacagccaggaagactccagccgttgctcagataactcaagctatgaggaacccttgtcacccatctcagccagctcatctacttcccgccggcgacaaggccagcgggacctggagctccccgacatgcatatgcgggacctggtgggcatgggacaccacttcctgccaagtgagcccaccaagtggaatgtagaagacgtctacgaattcatccgctctctgccaggctgccaggagatagcagaggaattccgtgcccaggaaatcgacgggcaagccctgctgctgctcaaggaggaccacctgatgagcgccatgaacatcaagctggggcccgccctgaagatctacgcccgcatcagcatgctcaaggactcctagggctggtggcagccaggattctggcccagggcgcctcctcccgactgagcagagccagacagacattcctgaggggcccagaaatggggccggttggagggcaggggctctccctaggggcatagctggtgaggaggtctgggcacctcctccatggctctcaggggcctttcatttctgtgggaggggcagagaggtaggtggcacagaagatggggctttatgcttgtaaatattgatagcactggcttcctccaaagtcccaatactctagccccgctctcttcccctctttctgtcccccattttccaggggtatatggtcagggctccccaacctgagttgggttacttcaagggcagccagcaggcctggatggaggcctagaaagcccttgccttccttcctcccacttctttctccaggcctggttaactcttccgttgtcagcttctcccccttcagcctgtttctgcagcagccagggttctcccccctacaccctctgcaggtggagagagagaagctgggcccagccgggccgtgcctgctggcacagacgccttaacgctgtgtgtatgactgtgtgactgtgtgggagcctggactgacagataggccaagggctactctctggcatctccaggtgttttgtagcaaacagccacttagtgctttgtcctggactccactcagcctcaggatggggaatagccaagaatggcagcctcagcgcagaggcaaggtcagaaagagacggcgcttcagagtttcctttccagacacccctccccgcactgtgaagttcccctgaccgccctcctggttcacaaagagcattaagaaagctgcggtggtctgagcaacatagcccagagggctgagcctcctggcctgcctgcccgcccaccctgggagtcccagtggtgaggctcagagaacttctaaggggaaagaacagctggagtttctgttgatgtgaagaaggcagctcttggcctcccactcccacacttctttgcctataaatcttcctagcagcaatttgagctacctgaggaggaggcagggcagaaagggcgagggcctgcctctgacctgccgtgtcctttgcaggaaggaggtaggcacctttctgagcttattctattccccacccacacccccaggcagggttggaaatgaaggacttttttaacctttgttttgttttttaaaaataaatctgtaaaatctg

SEQ ID NO: 81835 - DNA, 2383 bp, Homo sapiens
gctgagaaacacggtctgtaccccacctcaagagctgaaggtctacttgaaacgatgaaaaatgcacaggaaaaaaattacaatagaaagtaaaatgcgataaatgccatagatggatttgagagacagggcagggcattgttcatgcactgaccgacctcagcagccccggcatgacctcagggaacggaaactctgcctccagcatcgccggcactgccccccagaatggtgagaataaaccaccacaggccattgtgaaaccccaaatcctgacgcatgttatcgaagggtttgtgatccaggagggggcggagcctttcccggtgggacgctcgtccctgctggtggggaatctcaagaagaagtatgcacaggggttcctgcctgagaaacttccacagcaggatcacaccaccaccactgactcggagatggaggagccctatctgcaagaatccaaagaggagggtgctcccctcaaactcaagtgtgagctctgtggccgggtggactttgcctataagttcaagcgttccaagcgcttctgttccatggcttgtgcaaagaggtacaacgtgggatgcaccaaacgggtgggacttttccactcagaccggagcaagctgcagaaggcaggagctgcgacccacaaccgccgtcgggccagcaaagccagtctgccaccacttaccaaggataccaagaagcagccaacaggcactgtgcccctttcggttactgctgctttgcagctaacacacagccaggaagactccagccgttgctcagataactcaagctatgaggaacccttgtcacccatctcagccagctcatctacttcccgccggcgacaaggccagcgggacctggagctccccgacatgcatatgcgggacctggtgggcatgggacaccacttcctgccaagtgagcccaccaagtggaatgtagaagacgtctacgaattcatccgctctctgccaggctgccaggagatagcagaggaattccgtgcccaggaaatcgacgggcaagccctgctgctgctcaaggaggaccacctgatgagcgccatgaacatcaagctggggcccgccctgaagatctacgcccgcatcagcatgctcaaggactcctagggctggtggcagccaggattctggcccagggcgcctcctcccgactgagcagagccagacagacattcctgaggggcccagaaatggggccggttggagggcaggggctctccctaggggcatagctggtgaggaggtctgggcacctcctccatggctctcaggggcctttcatttctgtgggaggggcagagaggtaggtggcacagaagatggggctttatgcttgtaaatattgatagcactggcttcctccaaagtcccaatactctagccccgctctcttcccctctttctgtcccccattttccaggggtatatggtcagggctccccaacctgagttgggttacttcaagggcagccagcaggcctggatggaggcctagaaagcccttgccttccttcctcccacttctttctccaggcctggttaactcttccgttgtcagcttctcccccttcagcctgtttctgcagcagccagggttctcccccctacaccctctgcaggtggagagagagaagctgggcccagccgggccgtgcctgctggcacagacgccttaacgctgtgtgtatgactgtgtgactgtgtgggagcctggactgacagataggccaagggctactctctggcatctccaggtgttttgtagcaaacagccacttagtgctttgtcctggactccactcagcctcaggatggggaatagccaagaatggcagcctcagcgcagaggcaaggtcagaaagagacggcgcttcagagtttcctttccagacacccctccccgcactgtgaagttcccctgaccgccctcctggttcacaaagagcattaagaaagctgcggtggtctgagcaacatagcccagagggctgagcctcctggcctgcctgcccgcccaccctgggagtcccagtggtgaggctcagagaacttctaaggggaaagaacagctggagtttctgttgatgtgaagaaggcagctcttggcctcccactcccacacttctttgcctataaatcttcctagcagcaatttgagctacctgaggaggaggcagggcagaaagggcgagggcctgcctctgacctgccgtgtcctttgcaggaaggaggtaggcacctttctgagcttattctattccccacccacacccccaggcagggttggaaatgaaggacttttttaacctttgttttgttttttaaaaataaatctgtaaaatctg

SEQ ID NO: 81836 - DNA, 2422 bp, Homo sapiens
ggggcagttgatggtggtagagaacagccctgggaagggggcgggagagagttacagaagtgaggagatgaagtcttgcacgtctaagacaatgagacagctcatgagagatgctgtttgaagtggaagagaggaagttcactgtcgtgtggttgtgtatagagacagggcagggcattgttcatgcactgaccgacctcagcagccccggcatgacctcagggaacggaaactctgcctccagcatcgccggcactgccccccagaatggtgagaataaaccaccacaggccattgtgaaaccccaaatcctgacgcatgttatcgaagggtttgtgatccaggagggggcggagcctttcccggtgggacgctcgtccctgctggtggggaatctcaagaagaagtatgcacaggggttcctgcctgagaaacttccacagcaggatcacaccaccaccactgactcggagatggaggagccctatctgcaagaatccaaagaggagggtgctcccctcaaactcaagtgtgagctctgtggccgggtggactttgcctataagttcaagcgttccaagcgcttctgttccatggcttgtgcaaagaggtacaacgtgggatgcaccaaacgggtgggacttttccactcagaccggagcaagctgcagaaggcaggagctgcgacccacaaccgccgtcgggccagcaaagccagtctgccaccacttaccaaggataccaagaagcagccaacaggcactgtgcccctttcggttactgctgctttgcagctaacacacagccaggaagactccagccgttgctcagataactcaagctatgaggaacccttgtcacccatctcagccagctcatctacttcccgccggcgacaaggccagcgggacctggagctccccgacatgcatatgcgggacctggtgggcatgggacaccacttcctgccaagtgagcccaccaagtggaatgtagaagacgtctacgaattcatccgctctctgccaggctgccaggagatagcagaggaattccgtgcccaggaaatcgacgggcaagccctgctgctgctcaaggaggaccacctgatgagcgccatgaacatcaagctggggcccgccctgaagatctacgcccgcatcagcatgctcaaggactcctagggctggtggcagccaggattctggcccagggcgcctcctcccgactgagcagagccagacagacattcctgaggggcccagaaatggggccggttggagggcaggggctctccctaggggcatagctggtgaggaggtctgggcacctcctccatggctctcaggggcctttcatttctgtgggaggggcagagaggtaggtggcacagaagatggggctttatgcttgtaaatattgatagcactggcttcctccaaagtcccaatactctagccccgctctcttcccctctttctgtcccccattttccaggggtatatggtcagggctccccaacctgagttgggttacttcaagggcagccagcaggcctggatggaggcctagaaagcccttgccttccttcctcccacttctttctccaggcctggttaactcttccgttgtcagcttctcccccttcagcctgtttctgcagcagccagggttctcccccctacaccctctgcaggtggagagagagaagctgggcccagccgggccgtgcctgctggcacagacgccttaacgctgtgtgtatgactgtgtgactgtgtgggagcctggactgacagataggccaagggctactctctggcatctccaggtgttttgtagcaaacagccacttagtgctttgtcctggactccactcagcctcaggatggggaatagccaagaatggcagcctcagcgcagaggcaaggtcagaaagagacggcgcttcagagtttcctttccagacacccctccccgcactgtgaagttcccctgaccgccctcctggttcacaaagagcattaagaaagctgcggtggtctgagcaacatagcccagagggctgagcctcctggcctgcctgcccgcccaccctgggagtcccagtggtgaggctcagagaacttctaaggggaaagaacagctggagtttctgttgatgtgaagaaggcagctcttggcctcccactcccacacttctttgcctataaatcttcctagcagcaatttgagctacctgaggaggaggcagggcagaaagggcgagggcctgcctctgacctgccgtgtcctttgcaggaaggaggtaggcacctttctgagcttattctattccccacccacacccccaggcagggttggaaatgaaggacttttttaacctttgttttgttttttaaaaataaatctgtaaaatctg

SEQ ID NO: 81837 - DNA, 2563 bp, Homo sapiens
ggcgccgcatgtgtctccgcggcggctgcagccctcgagcgcccgccgcgcgcgcgcgccaaccccggccgccgcccgcgctcccgccccggcctcgcgcccccgtcccggcctcgcgccccggccgccctttgttgacgccggccaggccggtgcggtcggatgcgccgcggcagccccgggccccggctcggaggctcccggcggagaggaggcggcccgcccgggcccgggaccccgcgcgagtcggcgcccggccgaggggctgcgtaggccccgcccggccaggcccagccgggccctggacagagacagggcagggcattgttcatgcactgaccgacctcagcagccccggcatgacctcagggaacggaaactctgcctccagcatcgccggcactgccccccagaatggattatctttccaaggtccagaagaggggggtcagtgatcaggaataattgacaagacccttggttagaagtttcccacacaaactcaggtgggacgctcgtccctgctggtggggaatctcaagaagaagtatgcacaggggttcctgcctgagaaacttccacagcaggatcacaccaccaccactgactcggagatggaggagccctatctgcaagaatccaaagaggagggtgctcccctcaaactcaagtgtgagctctgtggccgggtggactttgcctataagttcaagcgttccaagcgcttctgttccatggcttgtgcaaagaggtacaacgtgggatgcaccaaacgggtgggacttttccactcagaccggagcaagctgcagaaggcaggagctgcgacccacaaccgccgtcgggccagcaaagccagtctgccaccacttaccaaggataccaagaagcagccaacaggcactgtgcccctttcggttactgctgctttgcagctaacacacagccaggaagactccagccgttgctcagataactcaagctatgaggaacccttgtcacccatctcagccagctcatctacttcccgccggcgacaaggccagcgggacctggagctccccgacatgcatatgcgggacctggtgggcatgggacaccacttcctgccaagtgagcccaccaagtggaatgtagaagacgtctacgaattcatccgctctctgccaggctgccaggagatagcagaggaattccgtgcccaggaaatcgacgggcaagccctgctgctgctcaaggaggaccacctgatgagcgccatgaacatcaagctggggcccgccctgaagatctacgcccgcatcagcatgctcaaggactcctagggctggtggcagccaggattctggcccagggcgcctcctcccgactgagcagagccagacagacattcctgaggggcccagaaatggggccggttggagggcaggggctctccctaggggcatagctggtgaggaggtctgggcacctcctccatggctctcaggggcctttcatttctgtgggaggggcagagaggtaggtggcacagaagatggggctttatgcttgtaaatattgatagcactggcttcctccaaagtcccaatactctagccccgctctcttcccctctttctgtcccccattttccaggggtatatggtcagggctccccaacctgagttgggttacttcaagggcagccagcaggcctggatggaggcctagaaagcccttgccttccttcctcccacttctttctccaggcctggttaactcttccgttgtcagcttctcccccttcagcctgtttctgcagcagccagggttctcccccctacaccctctgcaggtggagagagagaagctgggcccagccgggccgtgcctgctggcacagacgccttaacgctgtgtgtatgactgtgtgactgtgtgggagcctggactgacagataggccaagggctactctctggcatctccaggtgttttgtagcaaacagccacttagtgctttgtcctggactccactcagcctcaggatggggaatagccaagaatggcagcctcagcgcagaggcaaggtcagaaagagacggcgcttcagagtttcctttccagacacccctccccgcactgtgaagttcccctgaccgccctcctggttcacaaagagcattaagaaagctgcggtggtctgagcaacatagcccagagggctgagcctcctggcctgcctgcccgcccaccctgggagtcccagtggtgaggctcagagaacttctaaggggaaagaacagctggagtttctgttgatgtgaagaaggcagctcttggcctcccactcccacacttctttgcctataaatcttcctagcagcaatttgagctacctgaggaggaggcagggcagaaagggcgagggcctgcctctgacctgccgtgtcctttgcaggaaggaggtaggcacctttctgagcttattctattccccacccacacccccaggcagggttggaaatgaaggacttttttaacctttgttttgttttttaaaaataaatctgtaaaatctg

SEQ ID NO: 81838 - DNA, 2266 bp, Homo sapiens
tcccagacagaggtgttctgcatgccaagctagagttcagctatcttcagccctcattcccctcaggctgttggagcagccaggccactccccagcaggacagtggacagtagtttcccgtcacagggtaacatttatagtggaataagtcaggtgtgagctttcgccctggtccaagtccaggtgtctcaaacattttacagacattatctcatgttgtaagaccagacctagaaagtgagtggtattacccccaactccagataaggaaacggaggatcagggcttaagtgacttaaacccaaagtcacacagctagtagttagtgatggagttaggatctgaaccaatagatggactcaaaatttgtcagacagcttggctgtgctcattctgcctacggcccataagcacaatgactactgtgacatcccctgttcccctgtccctgaaggtacaacgtgggatgcaccaaacgggtgggacttttccactcagaccggagcaagctgcagaaggcaggagctgcgacccacaaccgccgtcgggccagcaaagccagtctgccaccacttaccaaggataccaagaagcagccaacaggcactgtgcccctttcggttactgctgctttgcagctaacacacagccaggaagactccagccgttgctcagataactcaagctatgaggaacccttgtcacccatctcagccagctcatctacttcccgccggcgacaaggccagcgggacctggagctccccgacatgcatatgcgggacctggtgggcatgggacaccacttcctgccaagtgagcccaccaagtggaatgtagaagacgtctacgaattcatccgctctctgccaggctgccaggagatagcagaggaattccgtgcccaggaaatcgacgggcaagccctgctgctgctcaaggaggaccacctgatgagcgccatgaacatcaagctggggcccgccctgaagatctacgcccgcatcagcatgctcaaggactcctagggctggtggcagccaggattctggcccagggcgcctcctcccgactgagcagagccagacagacattcctgaggggcccagaaatggggccggttggagggcaggggctctccctaggggcatagctggtgaggaggtctgggcacctcctccatggctctcaggggcctttcatttctgtgggaggggcagagaggtaggtggcacagaagatggggctttatgcttgtaaatattgatagcactggcttcctccaaagtcccaatactctagccccgctctcttcccctctttctgtcccccattttccaggggtatatggtcagggctccccaacctgagttgggttacttcaagggcagccagcaggcctggatggaggcctagaaagcccttgccttccttcctcccacttctttctccaggcctggttaactcttccgttgtcagcttctcccccttcagcctgtttctgcagcagccagggttctcccccctacaccctctgcaggtggagagagagaagctgggcccagccgggccgtgcctgctggcacagacgccttaacgctgtgtgtatgactgtgtgactgtgtgggagcctggactgacagataggccaagggctactctctggcatctccaggtgttttgtagcaaacagccacttagtgctttgtcctggactccactcagcctcaggatggggaatagccaagaatggcagcctcagcgcagaggcaaggtcagaaagagacggcgcttcagagtttcctttccagacacccctccccgcactgtgaagttcccctgaccgccctcctggttcacaaagagcattaagaaagctgcggtggtctgagcaacatagcccagagggctgagcctcctggcctgcctgcccgcccaccctgggagtcccagtggtgaggctcagagaacttctaaggggaaagaacagctggagtttctgttgatgtgaagaaggcagctcttggcctcccactcccacacttctttgcctataaatcttcctagcagcaatttgagctacctgaggaggaggcagggcagaaagggcgagggcctgcctctgacctgccgtgtcctttgcaggaaggaggtaggcacctttctgagcttattctattccccacccacacccccaggcagggttggaaatgaaggacttttttaacctttgttttgttttttaaaaataaatctgtaaaatctg

SEQ ID NO: 81839 - DNA, 1716 bp, Homo sapiens
agagatggtttgttcccccatcctgaagaaaactctctgctcccagccaacaggcactgtgcccctttcggttactgctgctttgcagctaacacacagccaggaagactccagccgttgctcagataactcaagctatgaggaacccttgtcacccatctcagccagctcatctacttcccgccggcgacaaggccagcgggacctggagctccccgacatgcatatgcgggacctggtgggcatgggacaccacttcctgccaagtgagcccaccaagtggaatgtagaagacgtctacgaattcatccgctctctgccaggctgccaggagatagcagaggaattccgtgcccaggaaatcgacgggcaagccctgctgctgctcaaggaggaccacctgatgagcgccatgaacatcaagctggggcccgccctgaagatctacgcccgcatcagcatgctcaaggactcctagggctggtggcagccaggattctggcccagggcgcctcctcccgactgagcagagccagacagacattcctgaggggcccagaaatggggccggttggagggcaggggctctccctaggggcatagctggtgaggaggtctgggcacctcctccatggctctcaggggcctttcatttctgtgggaggggcagagaggtaggtggcacagaagatggggctttatgcttgtaaatattgatagcactggcttcctccaaagtcccaatactctagccccgctctcttcccctctttctgtcccccattttccaggggtatatggtcagggctccccaacctgagttgggttacttcaagggcagccagcaggcctggatggaggcctagaaagcccttgccttccttcctcccacttctttctccaggcctggttaactcttccgttgtcagcttctcccccttcagcctgtttctgcagcagccagggttctcccccctacaccctctgcaggtggagagagagaagctgggcccagccgggccgtgcctgctggcacagacgccttaacgctgtgtgtatgactgtgtgactgtgtgggagcctggactgacagataggccaagggctactctctggcatctccaggtgttttgtagcaaacagccacttagtgctttgtcctggactccactcagcctcaggatggggaatagccaagaatggcagcctcagcgcagaggcaaggtcagaaagagacggcgcttcagagtttcctttccagacacccctccccgcactgtgaagttcccctgaccgccctcctggttcacaaagagcattaagaaagctgcggtggtctgagcaacatagcccagagggctgagcctcctggcctgcctgcccgcccaccctgggagtcccagtggtgaggctcagagaacttctaaggggaaagaacagctggagtttctgttgatgtgaagaaggcagctcttggcctcccactcccacacttctttgcctataaatcttcctagcagcaatttgagctacctgaggaggaggcagggcagaaagggcgagggcctgcctctgacctgccgtgtcctttgcaggaaggaggtaggcacctttctgagcttattctattccccacccacacccccaggcagggttggaaatgaaggacttttttaacctttgttttgttttttaaaaataaatctgtaaaatctg

SEQ ID NO: 81840 - DNA, 1396 bp, Homo sapiens
ctccactcagcctcaggatggggaatagccaagaatggcagcctcagcgcagaggcaaggtcagaaagagacggcgcttcagagtttcctttccagacacccctccctgcactgtgaagttcccctgaccgccctcctggttcacaaagagcattaagaaagctgcggtggtctgagcaacatagcgggcgcctcctcccgactgagcagagccagacagacattcctgaggggcccagaaatggggccggttggagggcaggggctctccctaggggcatagctggtgaggaggtctgggcacctcctccatggctctcaggggcctttcatttctgtgggaggggcagagaggtaggtggcacagaagatggggctttatgcttgtaaatattgatagcactggcttcctccaaagtcccaatactctagccccgctctcttcccctctttctgtcccccattttccaggggtatatggtcagggctccccaacctgagttgggttacttcaagggcagccagcaggcctggatggaggcctagaaagcccttgccttccttcctcccacttctttctccaggcctggttaactcttccgttgtcagcttctcccccttcagcctgtttctgcagcagccagggttctcccccctacaccctctgcaggtggagagagagaagctgggcccagccgggccgtgcctgctggcacagacgccttaacgctgtgtgtatgactgtgtgactgtgtgggagcctggactgacagataggccaagggctactctctggcatctccaggtgttttgtagcaaacagccacttagtgctttgtcctggactccactcagcctcaggatggggaatagccaagaatggcagcctcagcgcagaggcaaggtcagaaagagacggcgcttcagagtttcctttccagacacccctccccgcactgtgaagttcccctgaccgccctcctggttcacaaagagcattaagaaagctgcggtggtctgagcaacatagcccagagggctgagcctcctggcctgcctgcccgcccaccctgggagtcccagtggtgaggctcagagaacttctaaggggaaagaacagctggagtttctgttgatgtgaagaaggcagctcttggcctcccactcccacacttctttgcctataaatcttcctagcagcaatttgagctacctgaggaggaggcagggcagaaagggcgagggcctgcctctgacctgccgtgtcctttgcaggaaggaggtaggcacctttctgagcttattctattccccacccacacccccaggcagggttggaaatgaaggacttttttaacctttgttttgttttttaaaaataaatctgtaaaatctg

SEQ ID NO: 81841 - DNA, 1080 bp, Homo sapiens
aacaaacttacggctaggtacgaggccgcgtgttaagggtaggtggcacagaagatggggctttatgcttgtaaatattgatagcactggcttcctccaaagtcccaatactctagccccgctctcttcccctctttctgtcccccattttccaggggtatatggtcagggctccccaacctgagttgggttacttcaagggcagccagcaggcctggatggaggcctagaaagcccttgccttccttcctcccacttctttctccaggcctggttaactcttccgttgtcagcttctcccccttcagcctgtttctgcagcagccagggttctcccccctacaccctctgcaggtggagagagagaagctgggcccagccgggccgtgcctgctggcacagacgccttaacgctgtgtgtatgactgtgtgactgtgtgggagcctggactgacagataggccaagggctactctctggcatctccaggtgttttgtagcaaacagccacttagtgctttgtcctggactccactcagcctcaggatggggaatagccaagaatggcagcctcagcgcagaggcaaggtcagaaagagacggcgcttcagagtttcctttccagacacccctccccgcactgtgaagttcccctgaccgccctcctggttcacaaagagcattaagaaagctgcggtggtctgagcaacatagcccagagggctgagcctcctggcctgcctgcccgcccaccctgggagtcccagtggtgaggctcagagaacttctaaggggaaagaacagctggagtttctgttgatgtgaagaaggcagctcttggcctcccactcccacacttctttgcctataaatcttcctagcagcaatttgagctacctgaggaggaggcagggcagaaagggcgagggcctgcctctgacctgccgtgtcctttgcaggaaggaggtaggcacctttctgagcttattctattccccacccacacccccaggcagggttggaaatgaaggacttttttaacctttgttttgttttttaaaaataaatctgtaaaatctg

SEQ ID NO: 81842 - DNA, 2367 bp, Homo sapiens
ggcgccgcatgtgtctccgcggcggctgcagccctcgagcgcccgccgcgcgcgcgcgccaaccccggccgccgcccgcgctcccgccccggcctcgcgcccccgtcccggcctcgcgccccggccgccctttgttgacgccggccaggccggtgcggtcggatgcgccgcggcagccccgggccccggctcggaggctcccggcggagaggaggcggcccgcccgggcccgggaccccgcgcgagtcggcgcccggccgaggggctgcgtaggccccgcccggccaggcccagccgggccctggacagagacagggcagggcattgttcatgcactgaccgacctcagcagccccggcatgacctcagggaacggaaactctgcctccagcatcgccggcactgccccccagaatggtgagaataaaccaccacaggccattgtgaaaccccaaatcctgacgcatgttatcgaagggtttgtgatccaggagggggcggagcctttcccggtgggacgctcgtccctgctggtggggaatctcaagaagaagtatgcacaggggttcctgcctgagaaacttccacagcaggatcacaccaccaccactgactcggagatggaggagccctatctgcaagaatccaaagaggagggtgctcccctcaaactcaagtgtgagctctgtggccgggtggactttgcctataagttcaagcgttccaagcgcttctgttccatggcttgtgcaaagaggtacaacgtgggatgcaccaaacgggtgggacttttccactcagaccggagcaagctgcagaaggcaggagctgcgacccacaaccgccgtcgggccagcaaagccagtctgccaccacttaccaaggataccaagaagcagccaacaggcactgtgcccctttcggttactgctgctttgcagctaacacacagccaggaagactccagccgttgctcagataactcaagctatgaggaacccttgtcacccatctcagccagctcatctacttcccgccggcgacaaggccagcgggacctggagctccccgacatgcatatgcgggacctggtgggcatgggacaccacttcctgccaagtgagcccaccaagtggaatgtagaagacgtctacgaattcatccgctctctgccaggctgccaggagatagcagaggaattccgtgcccaggaaatcgacgggcaagccctgctgctgctcaaggaggaccacctgatgagcgccatgaacatcaagctggggcccgccctgaagatctacgcccgcatcagcatgctcaaggactcctagggctggtggcagccaggattctggcccagggcgcctcctcccgactgagcagagccagacagacattcctgaggggcccagaaatggggccggttggagggcaggggctctccctaggggcatagctggtgaggaggtctgggcacctcctccatggctctcaggggcctttcatttctgtgggaggggcagagaggtaggtggcacagaagatggggctttatgcttgtaaatattgatagcactggcttcctccaaagtcccaatactctagccccgctctcttcccctctttctgtcccccattttccaggggtatatggtcagggctccccaacctgagttgggttacttcaagggcagccagcaggcctggatggaggcctagaaagcccttgccttccttcctcccacttctttctccaggcctggttaactcttccgttgtcagcttctcccccttcagcctgtttctgcagcagccagggttctcccccctacaccctctgcaggtggagagagagaagctgggcccagccgggccgtgcctgctggcacagacgccttaacgctgtgtgtatgactgtgtgactgtgtgggagcctggactgacagataggccaagggctactctctggcatctccaggtgttttgtagcaaacagccacttagtgctttgtcctggactccactcagcctcaggatggggaatagccaagaatggcagcctcagcgcagaggcaaggtcagaaagaacagctggagtttctgttgatgtgaagaaggcagctcttggcctcccactcccacacttctttgcctataaatcttcctagcagcaatttgagctacctgaggaggaggcagggcagaaagggcgagggcctgcctctgacctgccgtgtcctttgcaggaaggaggtaggcacctttctgagcttattctattccccacccacacccccaggcagggttggaaatgaaggacttttttaacctttgttttgttttttaaaaataaatctgtaaaatctg

SEQ ID NO: 81843 - DNA, 1976 bp, Homo sapiens
ggcgccgcatgtgtctccgcggcggctgcagccctcgagcgcccgccgcgcgcgcgcgccaaccccggccgccgcccgcgctcccgccccggcctcgcgcccccgtcccggcctcgcgccccggccgccctttgttgacgccggccaggccggtgcggtcggatgcgccgcggcagccccgggccccggctcggaggctcccggcggagaggaggcggcccgcccgggcccgggaccccgcgcgagtcggcgcccggccgaggggctgcgtaggccccgcccggccaggcccagccgggccctggacagagacagggcagggcattgttcatgcactgaccgacctcagcagccccggcatgacctcagggaacggaaactctgcctccagcatcgccggcactgccccccagaatggtgagaataaaccaccacaggccattgtgaaaccccaaatcctgacgcatgttatcgaagggtttgtgatccaggagggggcggagcctttcccggtgggacgctcgtccctgctggtggggaatctcaagaagaagtatgcacaggggttcctgcctgagaaacttccacagcaggatcacaccaccaccactgactcggagatggaggagccctatctgcaagaatccaaagaggagggtgctcccctcaaactcaagtgtgagctctgtggccgggtggactttgcctataagttcaagcgttccaagcgcttctgttccatggcttgtgcaaagaggtacaacgtgggatgcaccaaacgggtgggacttttccactcagaccggagcaagctgcagaaggcaggagctgcgacccacaaccgccgtcgggccagcaaagccagtctgccaccacttaccaaggataccaagaagcagccaacaggcactgtgcccctttcggttactgctgctttgcagctaacacacagccaggaagactccagccgttgctcagataactcaagctatgaggaacccttgtcacccatctcagccagctcatctacttcccgccggcgacaaggccagcgggacctggagctccccgacatgcatatgcgggacctggtgggcatgggacaccacttcctgccaagtgagcccaccaagtggaatgtagaagacgtctacgaattcatccgctctctgccaggctgccaggagatagcagaggaattccgtgcccaggaaatcgacgggcaagccctgctgctgctcaaggaggaccacctgatgagcgccatgaacatcaagctggggcccgccctgaagatctacgcccgcatcagcatgctcaaggactcctagggctggtggcagccaggattctggcccagggcgcctcctcccgactgagcagagccagacagacattcctgaggggcccagaaatggggccggttggagggcaggggctctccctaggggcatagctggtgaggaggtctgggcacctcctccatggctctcaggggcctttcatttctgtgggaggggcagagaggtaggtggcacagaagatggggctttatgcttgtaaatattgatagcactggcttcctccaaagtcccaatactctagccccgctctcttcccctctttctgtcccccattttccaggggtatatggtcagggctccccaacctgagttgggttacttcaagggcagccagcaggcctggatggaggcctagaaagcccttgccttccttcctcccactcccacacttctttgcctataaatcttcctagcagcaatttgagctacctgaggaggaggcagggcagaaagggcgagggcctgcctctgacctgccgtgtcctttgcaggaaggaggtaggcacctttctgagcttattctattccccacccacacccccaggcagggttggaaatgaaggacttttttaacctttgttttgttttttaaaaataaatctgtaaaatctg

SEQ ID NO: 81844 - DNA, 1736 bp, Homo sapiens
  misc_feature (1648)..(1649): n is a, c, g, or t
  misc_feature (1652)..(1652): n is a, c, g, or t
  misc_feature (1657)..(1658): n is a, c, g, or t
  misc_feature (1660)..(1660): n is a, c, g, or t
  misc_feature (1680)..(1680): n is a, c, g, or t
  misc_feature (1695)..(1696): n is a, c, g, or t
  misc_feature (1698)..(1699): n is a, c, g, or t
  misc_feature (1712)..(1712): n is a, c, g, or t
ggcgccgcatgtgtctccgcggcggctgcagccctcgagcgcccgccgcgcgcgcgcgccaaccccggccgccgcccgcgctcccgccccggcctcgcgcccccgtcccggcctcgcgccccggccgccctttgttgacgccggccaggccggtgcggtcggatgcgccgcggcagccccgggccccggctcggaggctcccggcggagaggaggcggcccgcccgggcccgggaccccgcgcgagtcggcgcccggccgaggggctgcgtaggccccgcccggccaggcccagccgggccctggacagagacagggcagggcattgttcatgcactgaccgacctcagcagccccggcatgacctcagggaacggaaactctgcctccagcatcgccggcactgccccccagaatggtgagaataaaccaccacaggccattgtgaaaccccaaatcctgacgcatgttatcgaagggtttgtgatccaggagggggcggagcctttcccggtgggacgctcgtccctgctggtggggaatctcaagaagaagtatgcacaggggttcctgcctgagaaacttccacagcaggatcacaccaccaccactgactcggagatggaggagccctatctgcaagaatccaaagaggagggtgctcccctcaaactcaagtgtgagctctgtggccgggtggactttgcctataagttcaagcgttccaagcgcttctgttccatggcttgtgcaaagaggtacaacgtgggatgcaccaaacgggtgggacttttccactcagaccggagcaagctgcagaaggcaggagctgcgacccacaaccgccgtcgggccagcaaagccagtctgccaccacttaccaaggataccaagaagcagccaacaggcactgtgcccctttcggttactgctgctttgcagctaacacacagccaggaagactccagccgttgctcagataactcaagctatgaggaacccttgtcacccatctcagccagctcatctacttcccgccggcgacaaggccagcgggacctggagctccccgacatgcatatgcgggacctggtgggcatgggacaccacttcctgccaagtgagcccaccaagtggaatgtagaagacgtctacgaattcatccgctctctgccaggctgccaggagatagcagaggaattccgtgcccaggaaatcgacgggcaagccctgctgctgctcaaggaggaccacctgatgagcgccatgaacatcaagctggggcccgccctgaagatctacgcccgcatcagcatgctcaaggactcctagggctggtggcagccaggattctggcccagggcgcctcctcccgactgagcagagccagacagacattcctgaggggcccagaaatggggccggttggagggcaggggctctccctaggggcatagctggtgaggaggtctgggcacctcctccatggctctcaggggcctttcatttctgtgggaggggcagagatcatgaagaagatgtcacgacaccactaacgcatacctgaaaactcgcgtgaactaaacaatgaatgctgaccgacagcgggggctcatgcctgtaatcccagcactttgggaggccaaggnnganggatnncntgaggtcaggagtttgagancagcctgggcaacanngnnagaccgtctctancaaaagaaaagaaaaagcctccct

SEQ ID NO: 81845 - DNA, 1980 bp, Homo sapiens
ggcgccgcatgtgtctccgcggcggctgcagccctcgagcgcccgccgcgcgcgcgcgccaaccccggccgccgcccgcgctcccgccccggcctcgcgcccccgtcccggcctcgcgccccggccgccctttgttgacgccggccaggccggtgcggtcggatgcgccgcggcagccccgggccccggctcggaggctcccggcggagaggaggcggcccgcccgggcccgggaccccgcgcgagtcggcgcccggccgaggggctgcgtaggccccgcccggccaggcccagccgggccctggacagagacagggcagggcattgttcatgcactgaccgacctcagcagccccggcatgacctcagggaacggaaactctgcctccagcatcgccggcactgccccccagaatggtgagaataaaccaccacaggccattgtgaaaccccaaatcctgacgcatgttatcgaagggtttgtgatccaggagggggcggagcctttcccggtgggacgctcgtccctgctggtggggaatctcaagaagaagtatgcacaggggttcctgcctgagaaacttccacagcaggatcacaccaccaccactgactcggagatggaggagccctatctgcaagaatccaaagaggagggtgctcccctcaaactcaagtgtgagctctgtggccgggtggactttgcctataagttcaagcgttccaagcgcttctgttccatggcttgtgcaaagaggtacaacgtgggatgcaccaaacgggtgggacttttccactcagaccggagcaagctgcagaaggcaggagctgcgacccacaaccgccgtcgggccagcaaagccagtctgccaccacttaccaaggataccaagaagcagccaacaggcactgtgcccctttcggttactgctgctttgcagctaacacacagccaggaagactccagccgttgctcagataactcaagctatgaggaacccttgtcacccatctcagccagctcatctacttcccgccggcgacaaggccagcgggacctggagctccccgacatgcatatgcgggacctggtgggcatgggacaccacttcctgccaagtgagcccaccaagtggaatgtagaagacgtctacgaattcatccgctctctgccagaataccctcaccgccaccaaatccccgacagtttggtcccatgacagcatcagtttgaagtccaggctctcatcattgaggtgagatgaggctcctggggtccagttcttcaagtataggtcctctcagtctgaagatctgagaactagagagagaggctatctgctcccttccacaaacccaatgcacagtgggacagccataggataaccattacagacatgcccatccaaaaagggagaaacagggagcgtacaagagtcgctgatccattccagttccgaaatccgctagggtttatggtggcatttcctcaattgggactcaaagcctgggagtgatttctgtcttggttctgccctctgagttctccttccttttctgtgaaaagtagcctgtattttcagtgtagtcgttttctcagcctgcttcctcctttttattttatattacctttgacttttttgttttttgtttttgagatagaggcttgctccatcacccaggctattgtgcaatggcgtgatctcggctcactgcaacctccgcctcctgggttcaagcaattctgcctcagcctcttgagtagctgggattacagacattcgccaccacacacagctaatttttgtattttagtagagatggggttcaccatgttggcaggctggtctcaaactccttacctcaggcgatccacccacctcagcctcctaaagtgctgggattataggcgtgagccactgcgcccggcctacctttgactcttaaaatcagtaattcagtatttcttaaaataattgt

SEQ ID NO: 81846 - DNA, 874 bp, Homo sapiens
gctgggctcagccggacggttcctgctgtggctgcccaccccctcattgcaccagcctatgctcagctgcagccacaccagctcctcccacagccatcctcaaagcacctgcagccccaatttgtgatccagcagcagccacagccacaacagcagcagccgccgccccagcagtcacggcctgtgctccaagctgagccccacccccagctcgcctcagtctctccaagcgtggccctccagcccagctcagaggcccatgccatgccactaggcccggttacacccgccctgccactccagtgtcccactgccaacctgcacaagcctggcggcagtcagcagtgtcaccctcccacacctgatactgggcctcagaatggacatcccgagggcgtgccccacacccctcaacgcaggttccagcacacttcagctgtcatcttacaactgcagcctgcttcaccagtgccccagcagtgtgtccctgatgactggaaagaagtggcaccaggggagaaaagtgtgcctgagacgcggtctggcccatcaccacatcagcaggctattgtcactgccatgcctggtggcctgcctgtacccacgagccctaacatccagccgtccccagctcacgatgagaaggggttttgaacagcagtccattccactgtagatttgctctaattatcagaaagttgcttttcaaatgaagtcaaaacctgctctcttggaatttgccagcattggtcatgattctgtcttgtgaattataagagtccatcttatacagtgtttgtagacagttgtcggactgtctcttgcctctccccccattaaaaaagagaaaatctccaggctaaacatctgagac

SEQ ID NO: 81847 - DNA, 1041 bp, Homo sapiens
gtctcttctgccagctctggtgcagtggtgtaaaggtactactcataggagaggcaggccataagaatagagggctatgtatctttcccttagaagactgatgatacataagctggaattttatttgtaagacagcatagggtatttcaagcatagggacactgttgaaaacaatgaagattcttctggtggacaattaagagtaggcttgttgcttcatgatagcaacaagatagtggcagaccagctagaagttaagcaaagacaggcagaaaaagaggtaaaaaatgccctcttggatttggcactagccacaaaatttggcctcaaatattacccctataaagaagcctgttatagattgaatgtttatgtcccccacaattatatgttgaagcacaaatgccagtgtggctgtatttggagatagggcctctaaggaagtaattaaggttaattggggttataagagtggggtcctgatctgacagaattaatgttcttataagaagagactccagatagctcactctctctctctttttgggtgcacacactaaggaaagaccacgcgaggaagtaacgaaaaggcaagcatctattagccagaaagagaaccctcaccagtgaatttgctagcagcttgattatggacttccatcctctggagctgtgagaaaatacatttttgttgtttaagccacacagtctgtggtatgttgttatagtagctgaagcagacaaatttaattggatcagattgttggtcaattcatacctcagggtattattgaaaaccatagagcaacaattcagcaaacaattaagaaggccaaaatctgggtgtgataccaacacaggcagaacaatcacttaacagtgagatagtggaaagaaacagtcaaagtgaacactactaaaatgattattatcccttggaaatgggagaggataagaaagactgcatctacccaatgatgcaccttctgaggaatggcaacagaggctgcgcatgcagggaaagtcagacaacatctggta

SEQ ID NO: 81848 - DNA, 593 bp, Homo sapiens
aggagtgaggagcctttttttaagggtaagcagtctcaggactgctaatataaactcttttgcatagtaggtggtaggacttcgttatgacaggttctacaggtccactgtatgagcagacattagctgggactcaggcagcacgtattactccttgcaaccaccaccaagaaagatgatcagacactgctattgttctacccgatagttccattctagtatgagagttgctgtgtggaaggaagtgagtatgatgaccaaacagtggagtaaatgtttgcagacccctgaaacatgtgaacttcttatgaattgagtacagctccccagccctgtctgtctcacccattctcctctccacatatgtgggatgtttcaggactcggtggcttttgaggatgtagatgtgaacttcacccaggaggagtgggctttgctagatccttcccagaagaatctctacagagatgtgatgtgggaaaccatgaggaatctggcctctataggatttttctgggtctctgttttagggatctccctcggaaggaccacgacattcgagatcactacttaccgcggtgagcatctccccg

SEQ ID NO: 81849 - DNA, 3196 bp, Homo sapiens
acttggtttcgcttcgctagtcccagaggcccagagtggctcgcctggagtctctgtggcgcggtttcctgtacctgccttgggatccggagggaggaagctgggacacccgggagtcaggaaatggactcggtggcttttgaggatgtagatgtgaacttcacccaggaggagtgggctttgctagatccttcccagaagaatctctacagagatgtgatgtgggaaaccatgaggaatctggcctctataggtaaggattgtatacttccatcacttagcaattaaagaagaagtgcttcttgtgcagtgatgctgttccatggtttgcatcatggagggagagtacttggggggctaaaacaggcatagtcacagggtatcatgaacctagaatctaataatttttctataattttgcactaattcagaatttttctgggtctctgttttagggaaaaaatggaaggaccagaacattaaagatcactacaaacaccgagggagaaatctaagaagtcatatgttagaaagactctatcaaactaaggatggtagtcagcgtggaggaatttttagccagtttgcaaatcagaatctgagcaagaaaatccctggagtgaaactctgtgaaagcattgtatatggagaagtcagcatgggtcagtcatcccttaatagacacatcaaagatcacagtggacatgaaccaaaggaatatcaggaatatggagagaagccagatacacgtaaccagtgttggaaacccttcagttctcaccactcctttcgaacacatgagataattcacactggagagaaactctatgattgtaaggaatgtggaaaaaccttcttttctctcaaaagaattagaagacacatcatcacacacagtggatatacaccatataaatgtaaggtgtgtgggaaagcttttgattatcccagtagatttcgaacacatgaaagaagtcacactggagagaaaccctatgaatgtcaggaatgtggaaaagccttcacttgtatcacaagtgttcgaagacacatgataaagcacactggagatggaccttataaatgtaaggtatgtgggaaaccctttcattctctgagttcatttcaagtgcatgaaagaattcacactggagaaaaaccctttaaatgtaagcaatgtggtaaagccttcagttgttccccaaccttacgaatacatgaaagaacccatactggagagaaaccttatgaatgcaagcagtgtgggaaggccttcagttatctcccctcccttcgactacatgaaagaattcacactggtgagaaacccttcgtatgtaaacaatgtggtaaagcctttagatctgccagtacctttcaaatacatgaaaggactcacactggagaaaaaccttatgaatgtaaggaatgtggggaagcattcagttgtatcccaagtatgcgaagacacatgataaaacatactggagaaggaccttataaatgtaaggtatgtgggaaaccctttcattctctgagtccatttcgaatacatgaaagaactcacactggagagaaaccttatgtatgtaaacattgtggtaaagctttcgtttcttcaacatcaattcgaatacatgaaagaactcatactggagagaaaccctatgagtgtaagcaatgtgggaaagccttcagttatctcaactcctttcgaacacatgaaatgattcacactggtgagaaaccctttgaatgtaagcgatgtggtaaagcctttagatcttctagttcctttcgactacatgaaaggactcacactggacagaaaccctatcattgcaaggaatgtgggaaagcctattcttgccgtgccagctttcagagacacatgttaacacatgctgaagatggaccaccttataaatgcatgtgggaaagcctttaatgctctgggttcatgtcagatacattaaaatactcactgaagagaagccctatgaatgtaagtaacgtgggaaagcatgaaattctgtcagtgccttttttaatacatgaaagaattctagagagaagccatatacatgtaagtaacatgggaaagctttcaatcattttagttcctttcaaatacatgaaagaactcatcatggagaaaaccaaacaaatgctttttggaaaggaacccatatttgagagaaaccctgggtaaagggtgtaggaaaggttttgtcatcacacaaccctgtcacacatgaatgtgtagtggagagaaccttggtaaatgtaaagagtgtgggagagcctttagtcattttagttccacttgaagccatgaaagaacacacaaaagagaaagctcttgaatataagcaatgtccacacgtttttagccagcccacatgctttcaacaacatgtaagaatgtaccctggatcaaaacactataaatgtgaaaactacaaggaaggttttccattatacttttaaagtcatttgagggctctggctctgtggctttgtgggttaaagtacttgtctggcaaacaggagatgctggatttcaatcccagcagggcctcactagttgaggtattgaatttgaacagatgttttggctctggctgggtgtggtggctcacacctgtaatcccagcactttgggaggctgaggcaggaggatcacttgaggtcaggagtttgagaccagtgtgcaaaacatagcaagacctcatctcagaaaaaaaaaaaaagtcatttgaaaacttctaatacagcaaaatcctataaatgtaagtacttcaaaaagcctcatgcatagcgggtcatgtagtctctagaaaatacataacctgatggaaatgtagaagctatatgtatattttgttaattagtggctcatatttaaaatagttctctgactatggatttcaaatgcttaatctcacaaagaaatgttaaattgatataatcctgtaagtaatctgaaagcaatagtgcatgaatttcataggtagtgttgttttaggtcagtaaataaaatatttgtctttccattttgaaatgtgtttaatccaacaatgaatttaaatgtgtttctcatattcaggtatgttaaattgtatatggttgcttaattgttctgtgattgaggaccactgaaaaataagtcttaataaatgttggtatgaaccta

SEQ ID NO: 81850 - DNA, 2994 bp, Homo sapiens
acttggtttcgcttcgctagtcccagaggcccagagtggctcgcctggagtctctgtggcgcggtttcctgtacctgccttgggatccggagggaggaagctgggacacccgggagtcaggaaatggactcggtggcttttgaggatgtagatgtgaacttcacccaggaggagtgggctttgctagatccttcccagaagaatctctacagagatgtgatgtgggaaaccatgaggaatctggcctctatagggaaaaaatggaaggaccagaacattaaagatcactacaaacaccgagggagaaatctaagaagtcatatgttagaaagactctatcaaactaaggatggtagtcagcgtggaggaatttttagccagtttgcaaatcagaatctgagcaagaaaatccctggagtgaaactctgtgaaagcattgtatatggagaagtcagcatgggtcagtcatcccttaatagacacatcaaagatcacagtggacatgaaccaaaggaatatcaggaatatggagagaagccagatacacgtaaccagtgttggaaacccttcagttctcaccactcctttcgaacacatgagataattcacactggagagaaactctatgattgtaaggaatgtggaaaaaccttcttttctctcaaaagaattagaagacacatcatcacacacagtggatatacaccatataaatgtaaggtgtgtgggaaagcttttgattatcccagtagatttcgaacacatgaaagaagtcacactggagagaaaccctatgaatgtcaggaatgtggaaaagccttcacttgtatcacaagtgttcgaagacacatgataaagcacactggagatggaccttataaatgtaaggtatgtgggaaaccctttcattctctgagttcatttcaagtgcatgaaagaattcacactggagaaaaaccctttaaatgtaagcaatgtggtaaagccttcagttgttccccaaccttacgaatacatgaaagaacccatactggagagaaaccttatgaatgcaagcagtgtgggaaggccttcagttatctcccctcccttcgactacatgaaagaattcacactggtgagaaacccttcgtatgtaaacaatgtggtaaagcctttagatctgccagtacctttcaaatacatgaaaggactcacactggagaaaaaccttatgaatgtaaggaatgtggggaagcattcagttgtatcccaagtatgcgaagacacatgataaaacatactggagaaggaccttataaatgtaaggtatgtgggaaaccctttcattctctgagtccatttcgaatacatgaaagaactcacactggagagaaaccttatgtatgtaaacattgtggtaaagctttcgtttcttcaacatcaattcgaatacatgaaagaactcatactggagagaaaccctatgagtgtaagcaatgtgggaaagccttcagttatctcaactcctttcgaacacatgaaatgattcacactggtgagaaaccctttgaatgtaagcgatgtggtaaagcctttagatcttctagttcctttcgactacatgaaaggactcacactggacagaaaccctatcattgcaaggaatgtgggaaagcctattcttgccgtgccagctttcagagacacatgttaacacatgctgaagatggaccaccttataaatgcatgtgggaaagcctttaatgctctgggttcatgtcagatacattaaaatactcactgaagagaagccctatgaatgtaagtaacgtgggaaagcatgaaattctgtcagtgccttttttaatacatgaaagaattctagagagaagccatatacatgtaagtaacatgggaaagctttcaatcattttagttcctttcaaatacatgaaagaactcatcatggagaaaaccaaacaaatgctttttggaaaggaacccatatttgagagaaaccctgggtaaagggtgtaggaaaggttttgtcatcacacaaccctgtcacacatgaatgtgtagtggagagaaccttggtaaatgtaaagagtgtgggagagcctttagtcattttagttccacttgaagccatgaaagaacacacaaaagagaaagctcttgaatataagcaatgtccacacgtttttagccagcccacatgctttcaacaacatgtaagaatgtaccctggatcaaaacactataaatgtgaaaactacaaggaaggttttccattatacttttaaagtcatttgagggctctggctctgtggctttgtgggttaaagtacttgtctggcaaacaggagatgctggatttcaatcccagcagggcctcactagttgaggtattgaatttgaacagatgttttggctctggctgggtgtggtggctcacacctgtaatcccagcactttgggaggctgaggcaggaggatcacttgaggtcaggagtttgagaccagtgtgcaaaacatagcaagacctcatctcagaaaaaaaaaaaaagtcatttgaaaacttctaatacagcaaaatcctataaatgtaagtacttcaaaaagcctcatgcatagcgggtcatgtagtctctagaaaatacataacctgatggaaatgtagaagctatatgtatattttgttaattagtggctcatatttaaaatagttctctgactatggatttcaaatgcttaatctcacaaagaaatgttaaattgatataatcctgtaagtaatctgaaagcaatagtgcatgaatttcataggtagtgttgttttaggtcagtaaataaaatatttgtctttccattttgaaatgtgtttaatccaacaatgaatttaaatgtgtttctcatattcaggtatgttaaattgtatatggttgcttaattgttctgtgattgaggaccactgaaaaataagtcttaataaatgttggtatgaaccta

SEQ ID NO: 81851 - DNA, 495 bp, Homo sapiens
gcacttgggagactcctgaacaccctcggagaagccagaaagccccgggagatggctccgtctgctgctgtaccagaccgggtcctgcaaaggatgcatcctccgagcctcctccctgcacgtccagtggggcctgccccgattctacctgagggacccactggaggagaggcacggggatgctgcctgagcagcggacccttctggcgcggagcaggctgtccccaggcagagtccgacgggtccttccttctgggtgcccccggcttcccggactccagcaggcctgggaaggccccgggcccccttagccgatgcccagagagtctccatttctcaagctttgccaccgaactcatcggtcggtgcgcctctgatcgcagggcaagggcctgcgcacccccaaagacaagcggggtccccggaaggcccccaggcagaaatgagcaccacggggaacggcccgcctccaagacaacctcggggacatggaca

SEQ ID NO: 81852 - DNA, 474 bp, Homo sapiens
aattggcagaggatgaggtctgacacggatggtcaaggaacacccaagtgaagaatcagaagcaaacaaggttgtcagtctgtagataggtgggggaagagggctcctggaagagggggtgcaaaggtcctcagaagagagcacttccagcctgttaggggaaggaccagcaatgggtgtggctggagccaggtgggtggggcagtcagagatgggggcaggagacacacagtgtcactctgggtcagatgcagagccactgcaggcagctgagcagaggagtggtgcccgatggatgtcttcaaatccgctcttggctgccgagttgagattaggcaaaggcagaagacagaagaccaagtagaagctattagcataatctaagtgacagatgatgaccagagtggtccccacaggtgtcatgagaagtggacagcttctgggtatagaacctatttatttttttaaaaagtg

SEQ ID NO: 81853 - DNA, 862 bp, Homo sapiens
ggaggaaactgtgagccctacagataaagtctgtgcttccagcgtcggtaaatcccagcaagcgccactacctggaggctgacactttcccatcttggcagtcagctccctacagaggtgcttctcccactgcccaagatccctgcctcctccttaaaccccaactgatagaacagaaaccaccacctaaggaacgtgaaggggaagcatctgaaacaccagaagatcttggattgttcctgaggacttcagaatctacagggacaaaaggcagaagcaggaagtccgaagtaaagatgactaagaaaaggcgggtggaaaagatttctgtgaaagtgtcagaggcaaagctctgaaagacctgaaactcatgccgaaagcaaagaacagcaaaaagacagtagggatgtgtctggagcaacaaggatcgggctgttcctggggcagccgaattcacagctctgttttactcctaatggaggatcttcctgctgcagcggcgagtagaccttactgtaaaggtgcaggcaaggggaggggaagggcaggcagctgcccattggagttcacatctccaagcctgagaaaatgtgttcctggatgccccaagccaatggaaaagcagaatcattgactatgtttgactccttctggtacctagcacagtatctgggacacagcaggtgctatgtaaatgtgttgagtgaatgaatgaatgaatgccattgaggagaatgaataaccccagaaaactagacatgggtagatgttgtcctaatttcaaaagaggggaaaatgagagtgagagtttcataaatgacaatctctaaacgatgttgctctctagcaaaattctagaatg

SEQ ID NO: 81854 - DNA, 808 bp, Homo sapiens
agttttatgtaattgaaagtgagaaaaatgggagaaaccacttaaaaaacaaacccgaaactctagaaagaacaagaaggtattagaataactattggaattaagttatagtaattgcttgtgaaataagtggaatattatgtcacatttatgcctaaatataagcagtgttagattcttaatatcctatacgtgagtatacttttatgaatatacttttattattgatgcaaagtgtactgaatgtgtaaaacttcaaaaaaaataacattttccagttccttatggactcattttaaggtactgtgttataaataagtaccctttcagcagagaaattggtagaaaattgtttgaaggaatggttttcttttgaaaataaagcgagtatttaatctgaaccttagttactgacataaaggagactaacgaagaactgaagtgcagacttgaattttaagcagtgtgacatggggctttgggcagacccgcttggatttgattattggctttgtcagtctgtaagctggacagtctgcaaaatggggacagtaatgccaatctcacatagtccttagtgaggactaaatgaaacaatatatgtaagtaccttgtaagtactgtagtgcttctggagagatgcaggtccaggctgagcatccctaaaaaatattagccaggcatggtggcgcacatctgtagttccaggctgaggtaggaggattgcttgagcccagggggctgaggctgctgtgagccatgatcacaccactgtactccagcctgggcaacagagcaagactgtctc

SEQ ID NO: 81855 - DNA, 636 bp, Homo sapiens
gctcggtacccttccgcacctttagtatacttttatgaatatacttttattattgatgcaaagtgtactgaatgtgtaaaacttcaaaaaaaataacattttccagttccttatggactcattttaaggtactgtgttataaataagtaccctttcagcagagaaattggtagaaaattgtttgaaggaatggttttcttttgaaaataaagcgagtatttaatctgaaccttagttactgacataaaggagactaacgaagaactgaagtgcagacttgaattttaagcagtgtgacatggggctttgggcagacccgcttggatttgattattggctttgtcagtctgtaagctggacagtctgcaaaatggggacagtaatgccaatctcacatagtccttagtgaggactaaatgaaacaatatatgtaagtaccttgtaagtactgtagtgcttctggagagatgcaggtccaggctgagcatccctaaaaaatattagccaggcatggtggcgcacatctgtagttccaggctgaggtaggaggattgcttgagcccagggggctgaggctgctgtgagccatgatcacaccactgtactccagcctgggcaacagagcaagactgtctc

SEQ ID NO: 81856 - DNA, 757 bp, Homo sapiens
cttcctcatcttggggctaggaccactgcaaatcctgcctgaagatcttactgcctaggaagcacattccagaaccctttctgagacgggccgtccagtgtccttgtggccttttccattgggaagtgcttcctggtgtctaaccatgatccctactgcttcatttccccctttgtttagcctttcacagaggaggaaagtggttggatatcaattgcctggtggttctcaaggcagcaccattaccttgctgcgtaccctcttcccacctacaatctcccttttctccacttcctgagagactgtgccttgactcagatacaagttgagacacaatcttcatgcagaaaagatctggctggtccctgtagtatcccacccttcccagcagctggaggtggggcttgctcactaggaggagcaaaataatgttaggcactggtgtttatgatcttatggggtcttcaccatccagggaggtgtaggtactattgttattcccattttacagatgaggaaactgaggctcagagaggtaaagtcgctttagcagatcaccagctgcggagcggctgagttggacgcccatcccagctctgcctgacgtcaaagtgttttgggataagggacagggggtggctgcaagtggcctcccactttgccccaagccggcttcttctcgccatgctggcctggaccatctcctttttggctttttgctgagtccgggctgggaatcctgtggctggaggcccaa

SEQ ID NO: 81857 - DNA, 504 bp, Homo sapiens
cagagatagtgaaatatgaataagaccaagagggacttgttctctgctcaatgattcagcagcttgggcacagaagcaccactgaagatgtaagccatgtctcagggcacttgtagatcatgcttgttttccacttgtggaatctagagggcaaaatactgcatcaggcaagtgacagctcagctctgtactcctttaagaggtcagataaaaatggcatatcccaaagaacagttcttatttcaactgaagggagaaccagcaataaccctgaaaaaaataacccataaccaaagatgatagccttttttcagtgcctactgcttctctggaatgagtttctgtgttctctgtgaagggacaggaggaacaggtcaccctttccccacccttcagtgacataggacatggctgtcactgacacagcacttgacatattctctggcattggcaggtggttgttacatgtttattaaataaacaaatcttaacagaaagaaaaaa

SEQ ID NO: 81858 - DNA, 542 bp, Homo sapiens
tgctatagtagagaccttaatctcatacaaaaagcacacaaagtaattattttccagtttccacattttccagttcacatttaaagactctgaagacttaaaatgttaaaacttcctttgaagagagttcgtagatcaagggcagtattttctatttttgaacacgtcttctacacttgatgtgttttttccagcaactcttctcttgaagcatctgcaacagatgaccattggcaaagtaagccagaactttatataccaggtataggtttacaagcctattggtttaaaaatactctgccctaattttcagtgtcttccttagaatagtgccagaatgctgacattttacacctgagtctttacactttttaaatgataagaccttagagtaatttttgtataaggactgcagtatcactttatgtgagattatctttgaacaaagataaattctggtcagattgctagtgaggactggcaagaatgaaagatctttagttgaaatttgcatagtattcatgaattgttggtatacttac

SEQ ID NO: 81859 - DNA, 102 bp, Homo sapiens
tttttgtttttaagcattctgttgagattgtttttatgtttagattgtttctatgacaacgtgtgtacactgtatgtgaattccttggatcctgatggttat

SEQ ID NO: 81860 - DNA, 391 bp, Homo sapiens
gtttaggatagtgatagaacaggtagtgactagcgggggaggactttttacacagaatgtgggactttccctctctggctgtctccaggattccactgcattttccagtggctgtggttgccatattgcatttatttgtcatgtcttcatagtcttctctggtatatgacagttcctcgttctttctttgtcttttatggacttgacacttttgatgagcctatattgcatgtcaactatttgtggaatattcctcaatttggatttgtttttttctcatgattggattgaatttgtgcagatttggtaataatgttgtaggaatgatattgcagttaacttgtatgaaatcaaggctgcatgatactgatgcaaactttgattggttagt

SEQ ID NO: 81861 - DNA, 806 bp, Homo sapiens
cagaatcttgctctgttacccaggctggagtgcaatggcatgatcttggctcacagcaacctctgcctcccgggttcaagcgattctcctgtctcagcctcccgagtagctgggattacaggcacctgccaccacgcccagctaatttttgtatttttagtagagacgaggtttcaccatgttggcgaggccggtctcgagctgacctcaaatgatccaccctcctcggcctcccaaagtgctgggattacaggcgtgagccaacgcacacggacgagatcgagattattaacctggacttatgaaccatcagagaatgaaagcacaattgccagaatgtgaattttccaggggaagggggtccccgaattcatcagcccttccaaagcactcttctcccaaatgaagttaagagctgtgatctagagagaggtgtctgtcaggaggtctagggcctacgccattgcccttgggcctctgagaaaagagatctgtggatgggcctggggggtggtaatttgggagccactgaaatgaacttgcaaaaggttttgggactattcatttatctgcagaaggctcagaaatttcattagattctcaaaggctcaaggactctaaaaaggttaaaaatcccttacctggagtttcaaggatcatcttttttgcctcacaatattgtattttctgatattagattttattttattttttgagatggagtctccccctgtcgccaggctggagtgcagtggcaccatctcagctcactgcaacctctgcctcctggcttcaagcgattctcc

SEQ ID NO: 81862 - DNA, 99 bp, Homo sapiens
aataaataaagtgtataaaggtgagccatattgggaagaaggggctgatagaggagttagaacaaccaggtaaccagatttttttttcctattcttttg

SEQ ID NO: 81863 - DNA, 377 bp, Homo sapiens
attgctactgagaaacaaggcattccacccactagaatgcaaagacaccagagagaattccagctctgtgcaggaacccctggggagagggtcagtatccaatcaccaaagaggaggatgtaagacttacatgcagcatggggtactagcctctcaggccacgaggtccactctgaccttctacccattttacagatgagggccacaagtcccagagggttaaagtgacttgcacaaggtcacccagcttcaatcagggcaaaatgactcaatttttcaaaactgctatcacaaagcatttttcagtgcatggcaagcattccacacaaaaagcatttgcacacacaaagaacttacaatgaaaattatgtcttaca

SEQ ID NO: 81864 - DNA, 513 bp, Homo sapiens
gttgaagaggttgggttaagttattgttaaaggtgacttccagttctgaatttctgcggttatacttcgtaaatgtcttacaaaagcagattgtcaagtacaacgtataatctttttagattgtgtaagaaatcaggaagtaggatgttctgtgttttgtaatttaaatatattctttctgtattttattgctatggttagtaagtttcttgataacttagataaaaataaaataagtattttaacaggctgaaagcggaggagagaaaagatgttttgtgagataggctaacacagattttgttgtttcctagagtgtgacaatttcctactttcacctttggacagctactgtattatgaacacactttttacctttttttttttttttttttgccataatctcatacataggacagtttccattgcatacctttgtctttctgcacataaaatttaaatttttgttattctaaaacacttctgtcttatgctgaagtatatagcgtaaga

SEQ ID NO: 81865 - DNA, 478 bp, Homo sapiens
  misc_feature (28)..(28): n is a, c, g, or t
gccactgtcacctccccctcctctgggnagccctgcctggactcccactggggtccagtgcctcttctgggacccaaggctgacgtctctttccctcctgccagaatgtgagaccctggggtcatctgtatctcctacaccccctccttaccgtgcatacggcccaccggattattcactccctcgaccattcatgtagtctattctctatggtgggctccctgctaggccctaaggaatttagtggtggaccagacccagaagtggaccctgccctactggagccccccatctgattgggaagaaagaaagttaaccataatggtgagtgctatcaggcccttttttttttttttttttgccataatctcatacataggacagtttccattgcatacctttgtctttctgcacataaaatttaaatttttgttattctaaaacacttctgtcttatgctgaagtatatagcgtaaga

SEQ ID NO: 81866 - DNA, 454 bp, Homo sapiens
atctgcatacgagctgatcttattgcttcctactagtccctctggagctcacaaagtaaaggtcccacaaaaaaccattcatgcttttattctagcagagaccaattctgttcaaaacccactgcatacggtgactagatttccaagagttaaggtagcttaaacaatgtgacctttattatcacaaaaccaaccagggtatgtgtgtgcattaggggtgagaaggagttcacagtgtgggtgactggcaggttggaaaattccatcccaagtgtcatgatgacacaagatactttcagtgccacttcaccaggcagaaacctccatggctgaagcacttctgcccagacatcacttggcctgctggactcactcaactaactcagtccgacaggctgtgcttggctcatgttaccagccggatcctgtgcccaccatggctctgtgcttggcc

SEQ ID NO: 81867 - DNA, 944 bp, Homo sapiens
agcggaaaagtttaggggcctatttttagccttctaaaaaggaagccagtaattttatataccatgaaatgatgtttcataaacaaaggagaaataaaatctttcccagacaagcaagcactaagggaattaccagaccagacctacaagaaatgctcaaaggagttctaaacatagaaatgaaagaatgatacttgccaccagctcacaggccctataaagcaattacacaattgaggctataaaacaactagctaacaacactatgagtgaaacaaaaccacacataacaatgttaaccttgaacataaatcacctaagtgctctacttcaaacacatagagtggcaaattgaataagaaaacaagacccaagctttttctgctttcaagagaaccatctcacatgtaatgacaccaataggcttaaagaaatggagtgcctctccatctcttcatcatggaaaacaaaaaaagcagcagttgctattcttgtatcagataaaacagactttaaatcagtaacagttttgaaaaaagataaagcatcatataatgatcagttatttgatacaataagaaaatttaactatcctaaatatgtacacacccaacatcagagcacccagatttataaaatgaatactactagacttaagagatatacagccataccataataagtggaggacttcaataccccactaatagcactataaagatcatcagggtagaaaactaacaaagagactctggacttaaatctgactctggaccaaatggaccaagtagacatttatagaatactccaccccaaacccacagaatatacattattcttatctgtgcatgaaccattctttaaaattgacccatgctcagtcataaagcaaatgtcaacaaatttttaaaaattgaaatcacatcaagcaccaacttggacca

SEQ ID NO: 81868 - DNA, 364 bp, Homo sapiens
cgtattcaatattgttcagtattgaacattccttttcataaatgtaaatgagcatacttttatggtaaagcattaagttgcctatatttgaatttaaaaagcaaattttacataactctgacctgtaatcctagctctttgggatgccatgtcaggaggatctcttaaggccacaagtttgagaccagcctgggcagatcccacctctacaaaaaaaatccaaaatgagcccagcatggtggcatgtgcctgtagtcctagctactcaggaggctgagacgggaggatccctcctggctgcagtgagctacgatcataccactgcactccagcctgggcaacacagcaagcccctgtctcaaaa

SEQ ID NO: 81869 - DNA, 407 bp, Homo sapiens
taggttttcaactcctgttatacacattgttagtcttatgtttagttaggcaccataattacaaagtaatacaagtcatttgtcttactgtagttaaataaacaaaaaatacctgctagaaactaagtgaatgagtttctcatgaagctaaatgaatgaatttgatatctggaaatgtttcagagtggaagaatattagaatcttctctgatctgctccatctgtctctagtacagtggcctctacatgtgtgcacagcagctctggtcttagtgtctagctattactatttggtagatccatagatgggggggaaataaggagtcaggccagcaggttcaacttcttatttctcagtagcttcctataatgattccacctctaatgaggtgaattactactgcatg

SEQ ID NO: 81870 - DNA, 567 bp, Homo sapiens
cgaagtagaatagaaatgagggcagggaacttggctgtctagttcaccattatatcccctgtacacaaaacaatggttgggctgggcacggtggctcacacctgtagtcccagcattttgggaggctgaggcaggtggatcacttgaggtcaggagttcaagaccagcctggttaatatggtaaaacccctctctactaaaagtacaaaaattagctgggcgttgtggtgtgcacctgtagtcccagctacgtggggggttgaggcaggagaatcgcttgaacccaggaagctgagttgcagtgagccgagacggcgccactgcactccagcctgggtggcagagcgggaccctgtctcaaaacaaaacaaaacaaaaaggatgggccgggcgctgtggctcacgcctgtaatcccagcactttgggaggctgatgcgggcggatcacgtggtcaggagatcgagaccatcctggctagcacggtgaaaccccgtctctactaaaaaatacaaaaaattagccgggcgtcgtggcgggcgcctgtagtcccagctactcgggaggct

SEQ ID NO: 81871 - DNA, 415 bp, Homo sapiens
gtgctgatatgtagttttaggactgctgcattattgttcctctatctttccgtttgtattagtaaagaactattagcaattttgcctcagtcttctaagcacgctttttgattggagaaaaccaaggtaccagaaaacttagataccatgtggaaagtcacagtttactgggtgtgtactatgtgttactagtgctttaataaatttcctcattaattttattctcccagcaagcctggcaggtagctgatagtatctttgctttacacatacagaaactagggcttagagatggtaagtaattgggtcaaggccacagaactggctggtagcagagccagaatttgaactcatgtctgcctgctccaaagcctgtgttctttatcccctcagtgcacccctactgttttgactg

SEQ ID NO: 81872 - DNA, 1549 bp, Homo sapiens
gacactctgaggagctctcagtagccccctcgcctcttactacagtgattgattaccctgcctgccagtagttaacacctctgccattgctgaggaggagaaagtgacagagctggccttgctcacagtgactatggactgcttgggggccacgaaggcactgtgtgtggggtgtgagttgtccctcgacactgggacttggcgctggatagtgaggtgctttcaaggttcacagaggacacagtcctagcccgtgagttggtagttaggcttttctgtctcagctcagcctcagatttgctactgtcctccctccccaggagtccctgtagggcccactgtttgtacagcattgcacaacatgcaggcgcaccacaaaagatcaaagggggtgacttccgacctgaacttgctacttatccattgacttgggaagaccacgcacttgtctataaatgccacagagatgtcactgcaaagcagtaggtaagcagattcgtaatcaccaccaccacactaatggcagcagctgaatttcctgtgtacagcaaaatgcccttgcagcctgtgaggtgggtatcttcacacctagtgctcactagccacagtggcagagccaggctgtgaacgtggctgctgcccccaaagccaggctggtgcactcacgtccagtttgtgccagggatggagaaagaacgttgatgctgggccccctcgcctggcctggggaagactgctgctctgtggggcagcatcatgtgagcattcattgacacaggagtgaaaggctcctgtgaaaaagctgctgtttcaccaaactgttgatacccctgctctaggactacagtcatgtttgccatttgctggttcccagtcccagggagtttctttttttcaaatttttaaatagctttattgagatgtaattcacaaaccataaaatttactttttatgattttaatatgtaaacttaaaaattttttttttatttttttagagatggggtctcactgtgttgcctaggctgatctcaaactcctggcctcaagtaatcttcccaccttggcctcccaaaatgtagggattacaggtgtgagccaccacgcccagcccaatatgtaaactttaacatgatttttatgagagtcacagatttgtgcaaccatcaccactgtctagttccaggacatatcatcaccccaaagagaaacccggtacccattcgcagccacccctcattccctcattcctcccactccttggcaaccactcaactgtttttcatctccatggatttacctattccggacatctcatattaatagaatcatacagtatgtggtcttttgtaactgactcttttcactagcatagtgttttcaaggttcatccatgctgtagctggtaccagtacttcatccctttttagtgccaaataatagtacatgctgaggaccgttttatttacccattcactagttgatggatatttggattgttttccactttcaggctattaaataatgctaaacattcaaatacaaattt

SEQ ID NO: 81873 - DNA, 477 bp, Homo sapiens
gacccgttttagtcggaatgaattcctgaccttcttgtcaggaggagacagaaacctgatcatctgtagtgtacggtggtatcgtgattacttaaatcatcaaatgtggttattgggaatgatgtgttttttcaagtggtatatgagaggtaaaattgctattgtagttgactgttgcagttataattttgtcaacatggtctgtaagagtgcaatggagtcggcccggcgtggtggctcacgcctgtaatcccagtactttgggaggccaaggcgggccgatcatgaggtcaggagatcgagaccatcctggctaacacagtgagaccccgtctctactaaaaatacaaaaaattagccgcgcgtggcggcacacgcctgtaatcccagctacttgggaggctgaggcaggagaatggcgtgaacctaggaggcagagcttgcagtgagccgagactgcaccactgcactccagcc

SEQ ID NO: 81874 - DNA, 121 bp, Homo sapiens
acggactagaggagtgcaaatagctggtaaaatctccttgaagagcaactgacaacatttaacctacaggacccaaaagtttcaaatgataaaaggatgttgtaaaacacaagctctcttt

SEQ ID NO: 81875 - DNA, 376 bp, Homo sapiens
gtaattttatatatattggtaacctaagattataaggctattaaaaaaggaaagcccaaacacattgagcattaaaaaatattattaataacaaaatggggaaaatttccttggcttgtgttactttacatacttttacttgttcctttatctgcttgagtgtctactatgtgccagactttgtttttggtgctggggatgtaatggaaagcaagacacacttccttttctcaagaagcttgagagggctgggtgtgatggctcaagcctgtaatcccagcactttgagaggccgaggcgggaggatcatttgaggctaggagttcgagatcagcctggtcaatatattaataaaaagaccatgtctccaccaaaa

SEQ ID NO: 81876 - DNA, 1039 bp, Homo sapiens
  misc_feature (40)..(40): n is a, c, g, or t
  misc_feature (986)..(987): n is a, c, g, or t
caggatccggagacggaaatgtccgaaggccgcagtactngaccctgtatttgggagtcgaacggagaatggaaactgaaagtggaaatcaggaaaaggtaatggaagaagaaagcactgaaaagaaaaaagaagttgaaaaaaagaaacggtcacgagttaaacaggtgcttgcagatattgctaagcaagtggacttctggtttggggatgcaaatcttcacaaggatagatttcttcgagaacagatagaaaaatctagagatggatatgttgatatatcactacttgtgtcttttaacaaaatgaaaaaattgactactgatgggaagttaattgccagagcattgagaagttcagctgttgtagagcttgatttggaaggcaccagaatccggaggaaaaaacctctgggggaaagaccaaaggatgaggatgaacgcacagtgtatgtggagttacttcccaaaaatgttaatcacagctggattgaaagagtatttgggaaatgtggcaatgttgtttatataagtataccacattataagtctactggagatccaaagggatttgcgtttgtggaatttgaaacaaaagaacaagcagcaaaagcaattgagtttcttaacaacccaccagaagaagcaccaagaaaacctggcatatttcctaaaacagtgaaaaataagcccattccagccttaagagttgtggaagagaagaaaaagaaaaagaagaagaaaggccgaatgaaaaaggaagacaatatccaagccaaagaagaaaacatggacacaagcaacaccagcatcagtaaaatgaaaagatccagacccacatctgagggctctgacattgagtccactgaaccccaaagcagtgctcaaagaaaaggaaaaaacgggacagagttgaagcatctagccttacctgaagtcagaacagggaagaggaagagaagcagctctgaagatgcagaatccctnnctccccgatcaaaagtaaagaaatggagatctaaaagatagctctctcttcc

SEQ ID NO: 81877 - DNA, 1052 bp, Homo sapiens
  misc_feature (999)..(1000): n is a, c, g, or t
ggagagaagcagtagtcaataaagagagtgccgtatttcgcagatggagctgagctgtggctgccagaagatagcgaacgaatggaaactgaaagtggaaatcaggaaaaggtaatggaagaagaaagcactgaaaagaaaaaagaagttgaaaaaaagaaacggtcacgagttaaacaggtgcttgcagatattgctaagcaagtggacttctggtttggggatgcaaatcttcacaaggatagatttcttcgagaacagatagaaaaatctagagatggatatgttgatatatcactacttgtgtcttttaacaaaatgaaaaaattgactactgatgggaagttaattgccagagcattgagaagttcagctgttgtagagcttgatttggaaggcaccagaatccggaggaaaaaacctctgggggaaagaccaaaggatgaggatgaacgcacagtgtatgtggagttacttcccaaaaatgttaatcacagctggattgaaagagtatttgggaaatgtggcaatgttgtttatataagtataccacattataagtctactggagatccaaagggatttgcgtttgtggaatttgaaacaaaagaacaagcagcaaaagcaattgagtttcttaacaacccaccagaagaagcaccaagaaaacctggcatatttcctaaaacagtgaaaaataagcccattccagccttaagagttgtggaagagaagaaaaagaaaaagaagaagaaaggccgaatgaaaaaggaagacaatatccaagccaaagaagaaaacatggacacaagcaacaccagcatcagtaaaatgaaaagatccagacccacatctgagggctctgacattgagtccactgaaccccaaagcagtgctcaaagaaaaggaaaaaacgggacagagttgaagcatctagccttacctgaagtcagaacagggaagaggaagagaagcagctctgaagatgcagaatccctnnctccccgatcaaaagtaaagaaatggagatctaaaagatagctctctcttcc

SEQ ID NO: 81878 - DNA, 1045 bp, Homo sapiens
  misc_feature (60)..(60): n is a, c, g, or t
atggtttttaagcacttaacggggtcccttatttacagtcaagccccacataccgacagnccggcatgtatgacagtggtccccataagattataggaatggaaactgaaagtggaaatcaggaaaaggtaatggaagaagaaagcactgaaaagaaaaaagaagttgaaaaaaagaaacggtcacgagttaaacaggtgcttgcagatattgctaagcaagtggacttctggtttggggatgcaaatcttcacaaggatagatttcttcgagaacagatagaaaaatctagagatggatatgttgatatatcactacttgtgtcttttaacaaaatgaaaaaattgactactgatgggaagttaattgccagagcattgagaagttcagctgttgtagaggtaagaatcaagaataactactgtttatattaatagtttataatataaaagaatgttagcgtaatgattattatatgattatagcttacaattataaataatattagttttattaatgtaatatactattttaaagcttgatttggaaggcaccagaatccggaggaaaaaacctctgggggaaagaccaaaggatgaggatgaacgcacagtgtatgtggtaagcttaagaacccgggtccccagtcagaaactggcacagaaacaatataattaagttaaaaatttattgacattctgattgtgaaaaactctaatattgcttttaatttataataggagttacttcccaaaaatgttaatcacagctggattgaaagagtatttgggaaatgtggcaatgttgtttatataagtataccacattataagtctactggagatccaaagggatttgcgtttgtggaatttgaaacaaaagaacaagcagcaaaagcaattgagtcacagaaagcacttccatgttaaagttgaagggagcccacccaacatacaacttctttggacttcagagtatttagagctgttaatttcattctgtagtatgcaccacaagcagaaacaagttaaagcgtaattcctag

SEQ ID NO: 81879 - DNA, 552 bp, Homo sapiens
  misc_feature (499)..(500): n is a, c, g, or t
cggcacgagggatgttggagcggccgcaaatgttgtttatataagtataccacattataagtctactggagatccaaagggatttgcgtttgtggaatttgaaacaaaagaacaagcagcaaaagcaattgagtttcttaacaacccaccagaagaagcaccaagaaaacctggcatatttcctaaaacagtgaaaaataagcccattccagccttaagagttgtggaagagaagaaaaagaaaaagaagaagaaaggccgaatgaaaaaggaagacaatatccaagccaaagaagaaaacatggacacaagcaacaccagcatcagtaaaatgaaaagatccagacccacatctgagggctctgacattgagtccactgaaccccaaagcagtgctcaaagaaaaggaaaaaacgggacagagttgaagcatctagccttacctgaagtcagaacagggaagaggaagagaagcagctctgaagatgcagaatccctnnctccccgatcaaaagtaaagaaatggagatctaaaagatagctctctcttcc

SEQ ID NO: 81880 - DNA, 1069 bp, Homo sapiens
  misc_feature (60)..(60): n is a, c, g, or t
  misc_feature (1016)..(1017): n is a, c, g, or t
atggtttttaagcacttaacggggtcccttatttacagtcaagccccacataccgacagnccggcatgtatgacagtggtccccataagattataggaatggaaactgaaagtggaaatcaggaaaaggtaatggaagaagaaagcactgaaaagaaaaaagaagttgaaaaaaagaaacggtcacgagttaaacaggtgcttgcagatattgctaagcaagtggacttctggtttggggatgcaaatcttcacaaggatagatttcttcgagaacagatagaaaaatctagagatggatatgttgatatatcactacttgtgtcttttaacaaaatgaaaaaattgactactgatgggaagttaattgccagagcattgagaagttcagctgttgtagagcttgatttggaaggcaccagaatccggaggaaaaaacctctgggggaaagaccaaaggatgaggatgaacgcacagtgtatgtggagttacttcccaaaaatgttaatcacagctggattgaaagagtatttgggaaatgtggcaatgttgtttatataagtataccacattataagtctactggagatccaaagggatttgcgtttgtggaatttgaaacaaaagaacaagcagcaaaagcaattgagtttcttaacaacccaccagaagaagcaccaagaaaacctggcatatttcctaaaacagtgaaaaataagcccattccagccttaagagttgtggaagagaagaaaaagaaaaagaagaagaaaggccgaatgaaaaaggaagacaatatccaagccaaagaagaaaacatggacacaagcaacaccagcatcagtaaaatgaaaagatccagacccacatctgagggctctgacattgagtccactgaaccccaaagcagtgctcaaagaaaaggaaaaaacgggacagagttgaagcatctagccttacctgaagtcagaacagggaagaggaagagaagcagctctgaagatgcagaatccctnnctccccgatcaaaagtaaagaaatggagatctaaaagatagctctctcttcc

SEQ ID NO: 81881 - DNA, 1147 bp, Homo sapiens
  misc_feature (60)..(60): n is a, c, g, or t
atggtttttaagcacttaacggggtcccttatttacagtcaagccccacataccgacagnccggcatgtatgacagtggtccccataagattataggaatggaaactgaaagtggaaatcaggaaaaggtaatggaagaagaaagcactgaaaagaaaaaagaagttgaaaaaaagaaacggtcacgagttaaacaggtgcttgcagatattgctaagcaagtggacttctggtttggggatgcaaatcttcacaaggatagatttcttcgagaacagatagaaaaatctagagatggatatgttgatatatcactacttgtgtcttttaacaaaatgaaaaaattgactactgatgggaagttaattgccagagcattgagaagttcagctgttgtagaggtaagaatcaagaataactactgtttatattaatagtttataatataaaagaatgttagcgtaatgattattatatgattatagcttacaattataaataatattagttttattaatgtaatatactattttaaagcttgatttggaaggcaccagaatccggaggaaaaaacctctgggggaaagaccaaaggatgaggatgaacgcacagtgtatgtggtaagcttaagaacccgggtccccagtcagaaactggcacagaaacaatataattaagttaaaaatttattgacattctgattgtgaaaaactctaatattgcttttaatttataataggagttacttcccaaaaatgttaatcacagctggattgaaagagtatttgggaaatgtggcaatgttgtttatataagtataccacattataagtctactggagatccaaagggatttgcgtttgtggaatttgaaacaaaagaacaagcagcaaaagcaattgagaaaaaaaaaaaagaaagaaaagaaaacaagtattaaaatagtaacttttgcaatcatttcagtttcttaacaacccaccagaagaagcaccaagaaaacctggcatatttcctaaaacagtgaaaaataagcccattccagccttaagagttgtgggtgagtatttttcaatatttaaataggtgtagttgaagtaagatgaactaataatgatggcacttttacagaagagaagagaaaga

SEQ ID NO: 81882 - DNA, 1012 bp, Homo sapiens
  misc_feature (60)..(60): n is a, c, g, or t
  misc_feature (959)..(960): n is a, c, g, or t
atggtttttaagcacttaacggggtcccttatttacagtcaagccccacataccgacagnccggcatgtatgacagtggtccccataagattataggaatggaaactgaaagtggaaatcaggaaaaggtaatggaagaagaaagcactgaaaagaaaaaagaagttgaaaaaaagaaacggtcacgagttaaacaggtgcttgcagatattgctaagcaagtggacttctggtttggggatgcaaatcttcacaaggatagatttcttcgagaacagatagaaaaatctagagatggatatgttgatatatcactacttgtgtcttttaacaaaatgaaaaaattgactactgatgggaagttaattgccagagcattgagaagttcagctgttgtagaggtaagaatcaagaataactactgtttatattaatagtttataatataaaagaatgttagcgtaatgattattatatgattatagcttacaattataaataatattagttttattaatgtaatatactattttaaagcttgatttggaaggcaccagaatccggaggaaaaaacctctgggggaaagaccaaaggatgaggatgaacgcacagtgtatgtggtaagcttaagaacccgggtccccagtcagaaactggcacagaaacaatataattaagttaaaaatttattgacattctgattgtgaaaaactctaatattgcttttaatttataataggagttacttcccaaaaatgttaatcacagctggattgaaagagtatttgggaaatgtggcaatgttgtttatataagtataccacattataagtctactggagatccaaagggatttgcgtttgtggaatttgaaacaaaagaacaagcagcaaaagcaattgaggaagtcagaacagggaagaggaagagaagcagctctgaagatgcagaatccctnnctccccgatcaaaagtaaagaaatggagatctaaaagatagctctctcttcc

SEQ ID NO: 81883 - DNA, 1029 bp, Homo sapiens
gaaaaatgtgatctaagttatgtgatcaaagattttttaacagtgaacaaatcaggcccactagatgatggcctttctttgaacaacatgcctagggttgctctatcatgtctacagttggtctgacttcctgacgggcatcacagacttgtgattaaacacagaggttatgggggaagttccaaaagcttaggactttccagatggttggaataagatcacacactctggctgcccttatggagatcaccgaacttttcaactcaaagtaaaatctgtggagtaaatggtcgatcaaaaggaaccaactatattgagcaccatgcgtgatcatctgatcgttactgctaccttgtgagttaaaggctactcttctcattttagaaatgagaaaagagatgcccagagaggacgagtaacttgccttaggtcacacagcttatattaatcacaataacatttgccgcaccttctgtattttttttaagttgctaagcttttggtgcatgtctggcaccgttttagttgtatattatttcatttaattgttaaaatgaccttctgatgcaggtatttgtagctttgccattccacagatgaagaaacagatgaaaggactgaattgttcaataggaaggagcagaatcaggatatgaacttgggttggcctgattcttggggctgcattctttccataacataattgcttgctgtgatgtcctgggctactctgccaggggtggttagtggagtgaatggagaataatttagacaaggtcagtaactcccatgccatctagaaattaaaagtttaaaaggcagagtctgcaactctccttgatttctacagaaataaagatgatccctcctgtgacagtgctaagtgacaattctgagtgtaaatgcgctttttggcacaaattgtcctgtcctaatagtcttgattataattataaaataatgggtttctgaaaggctgcaagcagttctgggaatggcaataaaggtttagaaatgaaaaaaaaatta

SEQ ID NO: 81884 - DNA, 3296 bp, Homo sapiens
cgcaatttccactcgcggggagcaggaaacccggcgcagccgggcgcattgggccgcgatgcaacagcagcagcaggagtcgccccggggcagcagcggcagcagcagcagaggcagcagcgggcggcgctgagccgccgccgccgccactgaggaagaagccggcccagccgccgccgcgtccggaccctcgcgcctggatcccagcgccccgatcccggcgccccaacccccacgcccgcctccgccaactttcacgctgcctcggcggcccggcccggctcgacgccaatggtggaggccatagtggagtttgactaccaggcccagcacgatgatgagctgacgatcagcgtgggtgaaatcatcaccaacatcaggaaggaggatggaggctggtgggagggacagatcaacggcaggagaggtttgttccctgacaactttgtaagagaaataaagaaagagatgaagaaagaccctctcaccaacaaagctccagaaaagcccctgcacgaagtgcccagtggaaactctttgctgtcttctgaaacgattttaagaaccaataagagaggcgagcgacggaggcgccggtgccaggtggcattcagctacctgccccagaatgacgatgaacttgagctgaaagttggcgacatcatagaggtggtaggagaggtagaggaaggatggtgggaaggtgttctcaacgggaagactggaatgtttccttccaacttcatcaaggagctgtcaggggagtcggatgagcttggcatttcccaggatgagcagctatccaagtcaagtttaagggaaaccacaggctccgagagtgatgggggtgactcaagcagcaccaagtctgaaggtgccaacgggacagtggcaactgcagcaatccagcccaagaaagttaagggagtgggctttggagacattttcaaagacaagccaatcaaactaagaccaaggtcaattgaagtagaaaatgactttctgccggtagaaaagactattgggaagaagttacctgcaactacagcaactccagactcatcaaaaacagaaatggacagcaggacaaagagcaaggattactgcaaagtaatatttccatatgaggcacagaatgatgatgaattgacaatcaaagaaggagatatagtcactctcatcaataaggactgcatcgacgtaggctggtgggaaggagagctgaacggcagacgaggcgtgttccccgataacttcgtgaagttacttccaccggactttgaaaaggaagggaatagacccaagaagccaccgcctccatccgctcctgtcatcaaacaaggggcaggcaccactgagagaaaacatgaaattaaaaagatacctcctgaaagaccagaaatgcttccaaacagaacagaagaaaaagaaagaccagagagagagccaaaactggatttacagaagccctccgttcctgccataccgccaaaaaagcctcggccacctaagaccaattctctcagcagacctggcgcactgcccccgagaaggccggagagaccggtgggtccgctgacacacaccaggggtgacagtccaaagattgacttggccggcagttcgctatctggcatcctggacaaagatctctcggaccgcagcaatgacattgacttagaaggttttgactccgtggtatcatctactgagaaactcagtcatccgaccacaagcagaccaaaagctacagggaggcggcctccgtcccagtccctcacatcttcatccctttcaagccctgatatcttcgactccccaagtcccgaagaggataaggaggaacacatttcacttgcgcacagaggagtggacgcgtcaaagaaaacttccaagactgttaccatatcccaagtgtctgacaacaaagcatccctgccgcccaagccggggaccatggcagcaggtggcggtgggccagcccctctgtcctcagcggcgccctcccccctgtcatcctctttgggaacagctggacacagagccaactccccgtctctgttcggcacggaaggaaaaccaaagatggagcctgcggccagcagccaggcggccgtggaggagctaaggacacaggtccgcgagctgaggagcatcatcgagaccatgaaggaccagcagaaacgagagattaaacagttattgtctgagttggatgaagagaagaaaatccggcttcggttgcagatggaagtgaacgacataaagaaagctctacaatcaaaatgaatacttgatcaatgaaatgtcacattattcatcctgagtccgagactcaaattttctgccccagccaaaataatcttgtgccaaaagattaaaggtttgcctcaaaatgtccctgtttgaaagattagcacaaaagtcttgatagcacaacacaaattccatccaagaggagaatcttccccagggtttagtcctggggctggcactcgttgtgacttacacagagcaaaattgtgctaaaggcttttctactctgagatctcaatgcgaaatgaaaactcaggcagtttagtccatagtggtactattttgatgatattttccattaataaaatgtaatttcagattattcgtttacaagctttataattttatgattttttaatcgtgttttgtcacagacttccctagtgtttgtactacacgtagtcagaagcgagtgtccttttcttttgcttcaggctaagagctgcctcgctctttgtccccccattaggattctattacatatgcaattgtaggttcaacctgtccctttccctgccagcaaaccccaccaccctaagagaaattttagcttatatatgacggtatatttacaaaaagagaaagagaaaatctggtatttgcaatgatctgtgccttctttttaccaccctcttgattggagcttttgtgatgcagctaccatgattcaaaaaaattaaaaattaaaaaaaaaaaatctgccacttatccaagtccactagaggccactgtcttcaaagcttctctcaccctagccaaaggtcctaagaggagacagctgtgaagttgggcgtgctctgtggtaccagctgtgacttttctatttctcctagttttaggttgttcatgaaactagaaatgtcatcctgcttgatttttcatcagccaagttaaacccctgctttctgtcctttgcaccttttgcgtgaacagaatatgcattattaaagcaaaaataaataaaagtaaaatgcaaatga

SEQ ID NO: 81885 - DNA, 3358 bp, Homo sapiens
cgcaatttccactcgcggggagcaggaaacccggcgcagccgggcgcattgggccgcgatgcaacagcagcagcaggagtcgccccggggcagcagcggcagcagcagcagaggcagcagcgggcggcgctgagccgccgccgccgccactgaggaagaagccggcccagccgccgccgcgtccggaccctcgcgcctggatcccagcgccccgatcccggcgccccaacccccacgcccgcctccgccaactttcacgctgcctcggcggcccggcccggctcgacgccaatggtggaggccatagtggagtttgactaccaggcccagcacgatgatgagctgacgatcagcgtgggtgaaatcatcaccaacatcaggaaggaggatggaggctggtgggagggacagatcaacggcaggagaggtttgttccctgacaactttgtaagagaaataaagaaagagatgaagaaagaccctctcaccaacaaagctccagaaaagcccctgcacgaagtgcccagtggaaactctttgctgtcttctgaaacgattttaagaaccaataagagaggcgagcgacggaggcgccggtgccaggtggcattcagctacctgccccagaatgacgatgaacttgagctgaaagttggcgacatcatagaggtggtaggagaggtagaggaaggatggtgggaaggtgttctcaacgggaagactggaatgtttccttccaacttcatcaaggagctgtcaggggagtcggatgagcttggcatttcccaggatgagcagctatccaagtcaagtttaagggaaaccacaggctccgagagtgatgggggtgactcaagcagcaccaagtctgaaggtgccaacgggacagtggcaactgcagcaatccagcccaagaaagttaagggagtgggctttggagacattttcaaagacaagccaatcaaactaagaccaaggtcaattgaagtagaaaatgactttctgccggtagaaaagactattgggaagaagttacctgcaactacagcaactccagactcatcaaaaacagaaatggacagcaggacaaagagcaaggattactgcaaagtaatatttccatatgaggcacagaatgatgatgaattgacaatcaaagaaggagatatagtcactctcatcaataaggactgcatcgacgtaggctggtgggaaggagagctgaacggcagacgaggcgtgttccccgataacttcgtgaagttacttccaccggactttgaaaaggaagggaatagacccaagaagccaccgcctccatccgctcctgtcatcaaacaaggggcaggcaccactgagagaaaacatgaaattaaaaagatacctcctgaaagaccagaaatgcttccaaacagaacagaagaaaaagaaagaccagagagagagccaaaactggatttacagaagccctccgttcctgccataccgccaaaaaagcctcggccacctaagaccaattctctcagcagacctggcgcactgcccccgagaaggccggagagaccggtgggtccgctgacacacaccaggggtgacagtccaaagattgacttggccggcagttcgctatctggcatcctggacaaagatctctcggaccgcagcaatgacattgacttagaaggttttgactccgtggtatcatctactgagaaactcagtcatccgaccacaagcagaccaaaagctacagggaggcggcctccgtcccagtccctcacatcttcatccctttcaagccctgatatcttcgactccccaagtcccgaagaggataaggaggaacacatttcacttgcgcacagaggagtggacgcgtcaaagaaaacttccaagactgttaccatatcccaagtgtctgacaacaaagcatccctgccgcccaagccggggaccatggcagcaggtggcggtgggccagcccctctgtcctcagcggcgccctcccccctgtcatcctctttgggaacagctggacacagagccaactccccgtctctgttcggcacggaaggaaaaccaaagatggagcctgcggccagcagccaggcggccgtggaggagctaaggacacaggtccgcgagctgaggagcatcatcgagaccatgaaggaccagcagaaacgagagattaaacagttattgtctgagttggatgaagagaagaaaatccggcttcggttgcagatggaagtgaacgacataaagaaagctctacaatcaaaatgaatacttgatcaatgaaatgtcacattattcatcctgagtccgagactcaaattttctgccccagccaaaataatcttgtgccaaaagattaaaggtttgcctcaaaatgtccctgtttgaaagattagcacaaaagtcttgatagcacaacacaaattccatccaagaggagaatcttccccagggtttagtcctggggctggcactcgttgtgacttacacagagcaaaattgtgctaaaggcttttctactctgagatctcaatgcgaaatgaaaactcaggcagtttagtccatagtggtactattttgatgatattttccattaataaaatgtaatttcagattattcgtttacaagctttataattttatgattttttaatcgtgttttgtcacagacttccctagtgtttgtactacacgtagtcagaagcgagtgtccttttcttttgcttcaggctaagagctgcctcgctctttgtccccccattaggattctattacatatgcaattgtaggttcaacctgtccctttccctgccagcaaaccccaccaccctaagagaaattttagcttatatatgacggtatatttacaaaaagagaaagagaaaatctggtatttgcaatgatctgtgccttctttttaccaccctcttgattggagcttttgtgatgcagctaccatgattcaaaaaaattaaaaattaaaaaaaaaaaatctgccacttatccaagtccactagaggccactgtcttcaaagcttctctcaccctagccaaaggtcctaagaggagacagctgtgaagttgggcgtgctctgtggtaccagctgtgacttttctatttctcctagttttaggttgttcatgaaactagaaatgtcatcctgcttgatttttcatcagccaagttaaacccctgctttctgtcctttgcaccttttgcgtgaacagaatatgcattattaaagcaaaaataaataaaagtaaaatgcaaatgacattatgtgatacagtttaaacgataacacgtaacccagtgcaggaaataatacacttcctt

SEQ ID NO: 81886 - DNA, 3100 bp, Homo sapiens
gacttgaaagtgctgtgggctccgcatagagagttttacttcattaacagtcgcttatccgtcaggtccaaaagacgcagcggtggtactggtaaccagtggaggccatagtggagtttgactaccaggcccagcacgatgatgagctgacgatcagcgtgggtgaaatcatcaccaacatcaggaaggaggatggaggctggtgggagggacagatcaacggcaggagaggtttgttccctgacaactttgtaagagaaataaagaaagagatgaagaaagaccctctcaccaacaaagctccagaaaagcccctgcacgaagtgcccagtggaaactctttgctgtcttctgaaacgattttaagaaccaataagagaggcgagcgacggaggcgccggtgccaggtggcattcagctacctgccccagaatgacgatgaacttgagctgaaagttggcgacatcatagaggtggtaggagaggtagaggaaggatggtgggaaggtgttctcaacgggaagactggaatgtttccttccaacttcatcaaggagctgtcaggggagtcggatgagcttggcatttcccaggatgagcagctatccaagtcaagtttaagggaaaccacaggctccgagagtgatgggggtgactcaagcagcaccaagtctgaaggtgccaacgggacagtggcaactgcagcaatccagcccaagaaagttaagggagtgggctttggagacattttcaaagacaagccaatcaaactaagaccaaggtcaattgaagtagaaaatgactttctgccggtagaaaagactattgggaagaagttacctgcaactacagcaactccagactcatcaaaaacagaaatggacagcaggacaaagagcaaggattactgcaaagtaatatttccatatgaggcacagaatgatgatgaattgacaatcaaagaaggagatatagtcactctcatcaataaggactgcatcgacgtaggctggtgggaaggagagctgaacggcagacgaggcgtgttccccgataacttcgtgaagttacttccaccggactttgaaaaggaagggaatagacccaagaagccaccgcctccatccgctcctgtcatcaaacaaggggcaggcaccactgagagaaaacatgaaattaaaaagatacctcctgaaagaccagaaatgcttccaaacagaacagaagaaaaagaaagaccagagagagagccaaaactggatttacagaagccctccgttcctgccataccgccaaaaaagcctcggccacctaagaccaattctctcagcagacctggcgcactgcccccgagaaggccggagagaccggtgggtccgctgacacacaccaggggtgacagtccaaagattgacttggccggcagttcgctatctggcatcctggacaaagatctctcggaccgcagcaatgacattgacttagaaggttttgactccgtggtatcatctactgagaaactcagtcatccgaccacaagcagaccaaaagctacagggaggcggcctccgtcccagtccctcacatcttcatccctttcaagccctgatatcttcgactccccaagtcccgaagaggataaggaggaacacatttcacttgcgcacagaggagtggacgcgtcaaagaaaacttccaagactgttaccatatcccaagtgtctgacaacaaagcatccctgccgcccaagccggggaccatggcagcaggtggcggtgggccagcccctctgtcctcagcggcgccctcccccctgtcatcctctttgggaacagctggacacagagccaactccccgtctctgttcggcacggaaggaaaaccaaagatggagcctgcggccagcagccaggcggccgtggaggagctaaggacacaggtccgcgagctgaggagcatcatcgagaccatgaaggaccagcagaaacgagagattaaacagttattgtctgagttggatgaagagaagaaaatccggcttcggttgcagatggaagtgaacgacataaagaaagctctacaatcaaaatgaatacttgatcaatgaaatgtcacattattcatcctgagtccgagactcaaattttctgccccagccaaaataatcttgtgccaaaagattaaaggtttgcctcaaaatgtccctgtttgaaagattagcacaaaagtcttgatagcacaacacaaattccatccaagaggagaatcttccccagggtttagtcctggggctggcactcgttgtgacttacacagagcaaaattgtgctaaaggcttttctactctgagatctcaatgcgaaatgaaaactcaggcagtttagtccatagtggtactattttgatgatattttccattaataaaatgtaatttcagattattcgtttacaagctttataattttatgattttttaatcgtgttttgtcacagacttccctagtgtttgtactacacgtagtcagaagcgagtgtccttttcttttgcttcaggctaagagctgcctcgctctttgtccccccattaggattctattacatatgcaattgtaggttcaacctgtccctttccctgccagcaaaccccaccaccctaagagaaattttagcttatatatgacggtatatttacaaaaagagaaagagaaaatctggtatttgcaatgatctgtgccttctttttaccaccctcttgattggagcttttgtgatgcagctaccatgattcaaaaaaattaaaaattaaaaaaaaaaaatctgccacttatccaagtccactagaggccactgtcttcaaagcttctctcaccctagccaaaggtcctaagaggagacagctgtgaagttgggcgtgctctgtggtaccagctgtgacttttctatttctcctagttttaggttgttcatgaaactagaaatgtcatcctgcttgatttttcatcagccaagttaaacccctgctttctgtcctttgcaccttttgcgtgaacagaatatgcattattaaagcaaaaataaataaaagtaaaatgcaaatga

SEQ ID NO: 81887 - DNA, 2996 bp, Homo sapiens
tgccaagtgaatcagagagacttgcagttctcggagagcacggaacttattcctgcccagagttcagacacagccagaaattaccatttcatacttcacagaatggaggtttcagcagccaaagccccaagtgccgcagacttgtctgagattgaaataaagaaagagatgaagaaagaccctctcaccaacaaagctccagaaaagcccctgcacgaagtgcccagtggaaactctttgctgtcttctgaaacgattttaagaaccaataagagaggcgagcgacggaggcgccggtgccaggtggcattcagctacctgccccagaatgacgatgaacttgagctgaaagttggcgacatcatagaggtggtaggagaggtagaggaaggatggtgggaaggtgttctcaacgggaagactggaatgtttccttccaacttcatcaaggagctgtcaggggagtcggatgagcttggcatttcccaggatgagcagctatccaagtcaagtttaagggaaaccacaggctccgagagtgatgggggtgactcaagcagcaccaagtctgaaggtgccaacgggacagtggcaactgcagcaatccagcccaagaaagttaagggagtgggctttggagacattttcaaagacaagccaatcaaactaagaccaaggtcaattgaagtagaaaatgactttctgccggtagaaaagactattgggaagaagttacctgcaactacagcaactccagactcatcaaaaacagaaatggacagcaggacaaagagcaaggattactgcaaagtaatatttccatatgaggcacagaatgatgatgaattgacaatcaaagaaggagatatagtcactctcatcaataaggactgcatcgacgtaggctggtgggaaggagagctgaacggcagacgaggcgtgttccccgataacttcgtgaagttacttccaccggactttgaaaaggaagggaatagacccaagaagccaccgcctccatccgctcctgtcatcaaacaaggggcaggcaccactgagagaaaacatgaaattaaaaagatacctcctgaaagaccagaaatgcttccaaacagaacagaagaaaaagaaagaccagagagagagccaaaactggatttacagaagccctccgttcctgccataccgccaaaaaagcctcggccacctaagaccaattctctcagcagacctggcgcactgcccccgagaaggccggagagaccggtgggtccgctgacacacaccaggggtgacagtccaaagattgacttggccggcagttcgctatctggcatcctggacaaagatctctcggaccgcagcaatgacattgacttagaaggttttgactccgtggtatcatctactgagaaactcagtcatccgaccacaagcagaccaaaagctacagggaggcggcctccgtcccagtccctcacatcttcatccctttcaagccctgatatcttcgactccccaagtcccgaagaggataaggaggaacacatttcacttgcgcacagaggagtggacgcgtcaaagaaaacttccaagactgttaccatatcccaagtgtctgacaacaaagcatccctgccgcccaagccggggaccatggcagcaggtggcggtgggccagcccctctgtcctcagcggcgccctcccccctgtcatcctctttgggaacagctggacacagagccaactccccgtctctgttcggcacggaaggaaaaccaaagatggagcctgcggccagcagccaggcggccgtggaggagctaaggacacaggtccgcgagctgaggagcatcatcgagaccatgaaggaccagcagaaacgagagattaaacagttattgtctgagttggatgaagagaagaaaatccggcttcggttgcagatggaagtgaacgacataaagaaagctctacaatcaaaatgaatacttgatcaatgaaatgtcacattattcatcctgagtccgagactcaaattttctgccccagccaaaataatcttgtgccaaaagattaaaggtttgcctcaaaatgtccctgtttgaaagattagcacaaaagtcttgatagcacaacacaaattccatccaagaggagaatcttccccagggtttagtcctggggctggcactcgttgtgacttacacagagcaaaattgtgctaaaggcttttctactctgagatctcaatgcgaaatgaaaactcaggcagtttagtccatagtggtactattttgatgatattttccattaataaaatgtaatttcagattattcgtttacaagctttataattttatgattttttaatcgtgttttgtcacagacttccctagtgtttgtactacacgtagtcagaagcgagtgtccttttcttttgcttcaggctaagagctgcctcgctctttgtccccccattaggattctattacatatgcaattgtaggttcaacctgtccctttccctgccagcaaaccccaccaccctaagagaaattttagcttatatatgacggtatatttacaaaaagagaaagagaaaatctggtatttgcaatgatctgtgccttctttttaccaccctcttgattggagcttttgtgatgcagctaccatgattcaaaaaaattaaaaattaaaaaaaaaaaatctgccacttatccaagtccactagaggccactgtcttcaaagcttctctcaccctagccaaaggtcctaagaggagacagctgtgaagttgggcgtgctctgtggtaccagctgtgacttttctatttctcctagttttaggttgttcatgaaactagaaatgtcatcctgcttgatttttcatcagccaagttaaacccctgctttctgtcctttgcaccttttgcgtgaacagaatatgcattattaaagcaaaaataaataaaagtaaaatgcaaatga

SEQ ID NO: 81888 - DNA, 2914 bp, Homo sapiens
  misc_feature (6)..(7): n is a, c, g, or t
  misc_feature (17)..(17): n is a, c, g, or t
  misc_feature (19)..(19): n is a, c, g, or t
  misc_feature (54)..(54): n is a, c, g, or t
gctttnnatttcccttngntttgacctccccttcttcatctatttctttatttncctgcaactttgtaagagaaataaagaaagagatgaagaaagaccctctcaccaacaaagctccagaaaagcccctgcacgaagtgcccagtggaaactctttgctgtcttctgaaacgattttaagaaccaataagagaggcgagcgacggaggcgccggtgccaggtggcattcagctacctgccccagaatgacgatgaacttgagctgaaagttggcgacatcatagaggtggtaggagaggtagaggaaggatggtgggaaggtgttctcaacgggaagactggaatgtttccttccaacttcatcaaggagctgtcaggggagtcggatgagcttggcatttcccaggatgagcagctatccaagtcaagtttaagggaaaccacaggctccgagagtgatgggggtgactcaagcagcaccaagtctgaaggtgccaacgggacagtggcaactgcagcaatccagcccaagaaagttaagggagtgggctttggagacattttcaaagacaagccaatcaaactaagaccaaggtcaattgaagtagaaaatgactttctgccggtagaaaagactattgggaagaagttacctgcaactacagcaactccagactcatcaaaaacagaaatggacagcaggacaaagagcaaggattactgcaaagtaatatttccatatgaggcacagaatgatgatgaattgacaatcaaagaaggagatatagtcactctcatcaataaggactgcatcgacgtaggctggtgggaaggagagctgaacggcagacgaggcgtgttccccgataacttcgtgaagttacttccaccggactttgaaaaggaagggaatagacccaagaagccaccgcctccatccgctcctgtcatcaaacaaggggcaggcaccactgagagaaaacatgaaattaaaaagatacctcctgaaagaccagaaatgcttccaaacagaacagaagaaaaagaaagaccagagagagagccaaaactggatttacagaagccctccgttcctgccataccgccaaaaaagcctcggccacctaagaccaattctctcagcagacctggcgcactgcccccgagaaggccggagagaccggtgggtccgctgacacacaccaggggtgacagtccaaagattgacttggccggcagttcgctatctggcatcctggacaaagatctctcggaccgcagcaatgacattgacttagaaggttttgactccgtggtatcatctactgagaaactcagtcatccgaccacaagcagaccaaaagctacagggaggcggcctccgtcccagtccctcacatcttcatccctttcaagccctgatatcttcgactccccaagtcccgaagaggataaggaggaacacatttcacttgcgcacagaggagtggacgcgtcaaagaaaacttccaagactgttaccatatcccaagtgtctgacaacaaagcatccctgccgcccaagccggggaccatggcagcaggtggcggtgggccagcccctctgtcctcagcggcgccctcccccctgtcatcctctttgggaacagctggacacagagccaactccccgtctctgttcggcacggaaggaaaaccaaagatggagcctgcggccagcagccaggcggccgtggaggagctaaggacacaggtccgcgagctgaggagcatcatcgagaccatgaaggaccagcagaaacgagagattaaacagttattgtctgagttggatgaagagaagaaaatccggcttcggttgcagatggaagtgaacgacataaagaaagctctacaatcaaaatgaatacttgatcaatgaaatgtcacattattcatcctgagtccgagactcaaattttctgccccagccaaaataatcttgtgccaaaagattaaaggtttgcctcaaaatgtccctgtttgaaagattagcacaaaagtcttgatagcacaacacaaattccatccaagaggagaatcttccccagggtttagtcctggggctggcactcgttgtgacttacacagagcaaaattgtgctaaaggcttttctactctgagatctcaatgcgaaatgaaaactcaggcagtttagtccatagtggtactattttgatgatattttccattaataaaatgtaatttcagattattcgtttacaagctttataattttatgattttttaatcgtgttttgtcacagacttccctagtgtttgtactacacgtagtcagaagcgagtgtccttttcttttgcttcaggctaagagctgcctcgctctttgtccccccattaggattctattacatatgcaattgtaggttcaacctgtccctttccctgccagcaaaccccaccaccctaagagaaattttagcttatatatgacggtatatttacaaaaagagaaagagaaaatctggtatttgcaatgatctgtgccttctttttaccaccctcttgattggagcttttgtgatgcagctaccatgattcaaaaaaattaaaaattaaaaaaaaaaaatctgccacttatccaagtccactagaggccactgtcttcaaagcttctctcaccctagccaaaggtcctaagaggagacagctgtgaagttgggcgtgctctgtggtaccagctgtgacttttctatttctcctagttttaggttgttcatgaaactagaaatgtcatcctgcttgatttttcatcagccaagttaaacccctgctttctgtcctttgcaccttttgcgtgaacagaatatgcattattaaagcaaaaataaataaaagtaaaatgcaaatga

SEQ ID NO: 81889 - DNA, 2506 bp, Homo sapiens
ggggccacagacgctattacagtttaagggaaaccacaggctccgagagtgatgggggtgactcaagcagcaccaagtctgaaggtgccaacgggacagtggcaactgcagcaatccagcccaagaaagttaagggagtgggctttggagacattttcaaagacaagccaatcaaactaagaccaaggtcaattgaagtagaaaatgactttctgccggtagaaaagactattgggaagaagttacctgcaactacagcaactccagactcatcaaaaacagaaatggacagcaggacaaagagcaaggattactgcaaagtaatatttccatatgaggcacagaatgatgatgaattgacaatcaaagaaggagatatagtcactctcatcaataaggactgcatcgacgtaggctggtgggaaggagagctgaacggcagacgaggcgtgttccccgataacttcgtgaagttacttccaccggactttgaaaaggaagggaatagacccaagaagccaccgcctccatccgctcctgtcatcaaacaaggggcaggcaccactgagagaaaacatgaaattaaaaagatacctcctgaaagaccagaaatgcttccaaacagaacagaagaaaaagaaagaccagagagagagccaaaactggatttacagaagccctccgttcctgccataccgccaaaaaagcctcggccacctaagaccaattctctcagcagacctggcgcactgcccccgagaaggccggagagaccggtgggtccgctgacacacaccaggggtgacagtccaaagattgacttggccggcagttcgctatctggcatcctggacaaagatctctcggaccgcagcaatgacattgacttagaaggttttgactccgtggtatcatctactgagaaactcagtcatccgaccacaagcagaccaaaagctacagggaggcggcctccgtcccagtccctcacatcttcatccctttcaagccctgatatcttcgactccccaagtcccgaagaggataaggaggaacacatttcacttgcgcacagaggagtggacgcgtcaaagaaaacttccaagactgttaccatatcccaagtgtctgacaacaaagcatccctgccgcccaagccggggaccatggcagcaggtggcggtgggccagcccctctgtcctcagcggcgccctcccccctgtcatcctctttgggaacagctggacacagagccaactccccgtctctgttcggcacggaaggaaaaccaaagatggagcctgcggccagcagccaggcggccgtggaggagctaaggacacaggtccgcgagctgaggagcatcatcgagaccatgaaggaccagcagaaacgagagattaaacagttattgtctgagttggatgaagagaagaaaatccggcttcggttgcagatggaagtgaacgacataaagaaagctctacaatcaaaatgaatacttgatcaatgaaatgtcacattattcatcctgagtccgagactcaaattttctgccccagccaaaataatcttgtgccaaaagattaaaggtttgcctcaaaatgtccctgtttgaaagattagcacaaaagtcttgatagcacaacacaaattccatccaagaggagaatcttccccagggtttagtcctggggctggcactcgttgtgacttacacagagcaaaattgtgctaaaggcttttctactctgagatctcaatgcgaaatgaaaactcaggcagtttagtccatagtggtactattttgatgatattttccattaataaaatgtaatttcagattattcgtttacaagctttataattttatgattttttaatcgtgttttgtcacagacttccctagtgtttgtactacacgtagtcagaagcgagtgtccttttcttttgcttcaggctaagagctgcctcgctctttgtccccccattaggattctattacatatgcaattgtaggttcaacctgtccctttccctgccagcaaaccccaccaccctaagagaaattttagcttatatatgacggtatatttacaaaaagagaaagagaaaatctggtatttgcaatgatctgtgccttctttttaccaccctcttgattggagcttttgtgatgcagctaccatgattcaaaaaaattaaaaattaaaaaaaaaaaatctgccacttatccaagtccactagaggccactgtcttcaaagcttctctcaccctagccaaaggtcctaagaggagacagctgtgaagttgggcgtgctctgtggtaccagctgtgacttttctatttctcctagttttaggttgttcatgaaactagaaatgtcatcctgcttgatttttcatcagccaagttaaacccctgctttctgtcctttgcaccttttgcgtgaacagaatatgcattattaaagcaaaaataaataaaagtaaaatgcaaatga

SEQ ID NO: 81890 - DNA, 3447 bp, Homo sapiens
cgcaatttccactcgcggggagcaggaaacccggcgcagccgggcgcattgggccgcgatgcaacagcagcagcaggagtcgccccggggcagcagcggcagcagcagcagaggcagcagcgggcggcgctgagccgccgccgccgccactgaggaagaagccggcccagccgccgccgcgtccggaccctcgcgcctggatcccagcgccccgatcccggcgccccaacccccacgcccgcctccgccaactttcacgctgcctcggcggcccggcccggctcgacgccaatggtggaggccatagtggagtttgactaccaggcccagcacgatgatgagctgacgatcagcgtgggtgaaatcatcaccaacatcaggaaggaggatggaggctggtgggagggacagatcaacggcaggagaggtttgttccctgacaactttgtaagagaaataaagaaagagatgaagaaagaccctctcaccaacaaagctccagaaaagcccctgcacgaagtgcccagtggaaactctttgctgtcttctgaaacgattttaagaaccaataagagaggcgagcgacggaggcgccggtgccaggtggcattcagctacctgccccagaatgacgatgaacttgagctgaaagttggcgacatcatagaggtggtaggagaggtagaggaaggatggtgggaaggtgttctcaacgggaagactggaatgtttccttccaacttcatcaaggagctgtcaggggagtcggatgagcttggcatttcccaggatgagcagctatccaagtcaagtttaagggaaaccacaggctccgagagtgatgggggtgactcaagcagcaccaagtctgaaggtgccaacgggacagtggcaactgcagcaatccagcccaagaaagttaagggagtgggctttggagacattttcaaagacaagccaatcaaactaagaccaaggtcaattgaagtagaaaatgactttctgccggtagaaaagactattgggaagaagttacctgcaactacagcaactccagactcatcaaaaacagaaatggacagcaggacaaagagcaaggattactgcaaagtaatatttccatatgaggcacagaatgatgatgaattgacaatcaaagaaggagatatagtcactctcatcaataaggactgcatcgacgtaggctggtgggaaggagagctgaacggcagacgaggcgtgttccccgataacttcgtgaagttacttccaccggactttgaaaaggaagggaatcctcacccacagacaccgccagagaacttagtgggatgtgtggaggaggtctcccaaagtccagaattgctgaaaatcaagctgagacttacttccagaacctcaccatattcctctaacgaagccctttaaaggttacccagccatcaggagacccaagaagccaccgcctccatccgctcctgtcatcaaacaaggggcaggcaccactgagagaaaacatgaaattaaaaagatacctcctgaaagaccagaaatgcttccaaacagaacagaagaaaaagaaagaccagagagagagccaaaactggatttacagaagccctccgttcctgccataccgccaaaaaagcctcggccacctaagaccaattctctcagcagacctggcgcactgcccccgagaaggccggagagaccggtgggtccgctgacacacaccaggggtgacagtccaaagattgacttggccggcagttcgctatctggcatcctggacaaagatctctcggaccgcagcaatgacattgacttagaaggttttgactccgtggtatcatctactgagaaactcagtcatccgaccacaagcagaccaaaagctacagggaggcggcctccgtcccagtccctcacatcttcatccctttcaagccctgatatcttcgactccccaagtcccgaagaggataaggaggaacacatttcacttgcgcacagaggagtggacgcgtcaaagaaaacttccaagactgttaccatatcccaagtgtctgacaacaaagcatccctgccgcccaagccggggaccatggcagcaggtggcggtgggccagcccctctgtcctcagcggcgccctcccccctgtcatcctctttgggaacagctggacacagagccaactccccgtctctgttcggcacggaaggaaaaccaaagatggagcctgcggccagcagccaggcggccgtggaggagctaaggacacaggtccgcgagctgaggagcatcatcgagaccatgaaggaccagcagaaacgagagattaaacagttattgtctgagttggatgaagagaagaaaatccggcttcggttgcagatggaagtgaacgacataaagaaagctctacaatcaaaatgaatacttgatcaatgaaatgtcacattattcatcctgagtccgagactcaaattttctgccccagccaaaataatcttgtgccaaaagattaaaggtttgcctcaaaatgtccctgtttgaaagattagcacaaaagtcttgatagcacaacacaaattccatccaagaggagaatcttccccagggtttagtcctggggctggcactcgttgtgacttacacagagcaaaattgtgctaaaggcttttctactctgagatctcaatgcgaaatgaaaactcaggcagtttagtccatagtggtactattttgatgatattttccattaataaaatgtaatttcagattattcgtttacaagctttataattttatgattttttaatcgtgttttgtcacagacttccctagtgtttgtactacacgtagtcagaagcgagtgtccttttcttttgcttcaggctaagagctgcctcgctctttgtccccccattaggattctattacatatgcaattgtaggttcaacctgtccctttccctgccagcaaaccccaccaccctaagagaaattttagcttatatatgacggtatatttacaaaaagagaaagagaaaatctggtatttgcaatgatctgtgccttctttttaccaccctcttgattggagcttttgtgatgcagctaccatgattcaaaaaaattaaaaattaaaaaaaaaaaatctgccacttatccaagtccactagaggccactgtcttcaaagcttctctcaccctagccaaaggtcctaagaggagacagctgtgaagttgggcgtgctctgtggtaccagctgtgacttttctatttctcctagttttaggttgttcatgaaactagaaatgtcatcctgcttgatttttcatcagccaagttaaacccctgctttctgtcctttgcaccttttgcgtgaacagaatatgcattattaaagcaaaaataaataaaagtaaaatgcaaatga

SEQ ID NO: 81891 - DNA, 3167 bp, Homo sapiens
cgcaatttccactcgcggggagcaggaaacccggcgcagccgggcgcattgggccgcgatgcaacagcagcagcaggagtcgccccggggcagcagcggcagcagcagcagaggcagcagcgggcggcgctgagccgccgccgccgccactgaggaagaagccggcccagccgccgccgcgtccggaccctcgcgcctggatcccagcgccccgatcccggcgccccaacccccacgcccgcctccgccaactttcacgctgcctcggcggcccggcccggctcgacgccaatggtggaggccatagtggagtttgactaccaggcccagcacgatgatgagctgacgatcagcgtgggtgaaatcatcaccaacatcaggaaggaggatggaggctggtgggagggacagatcaacggcaggagaggtttgttccctgacaactttgtaagagaaataaagaaagagatgaagaaagaccctctcaccaacaaagctccagaaaagcccctgcacgaagtgcccagtggaaactctttgctgtcttctgaaacgattttaagaaccaataagagaggcgagcgacggaggcgccggtgccaggtggcattcagctacctgccccagaatgacgatgaacttgagctgaaagttggcgacatcatagaggtggtaggagaggtagaggaaggatggtgggaaggtgttctcaacgggaagactggaatgtttccttccaacttcatcaaggagctgtcaggggagtcggatgagcttggcatttcccaggatgagcagctatccaagtcaagtttaagggaaaccacaggctccgagagtgatgggggtgactcaagcagcaccaagtctgaaggtgccaacgggacagtggcaactgcagcaatccagcccaagaaagttaagggagtgggctttggagacattttcaaagacaagccaatcaaactaagaccaaggtcaattgaagtagaaaatgactttctgccggtagaaaagactattgggaagaagttacctgcaactacagcaactccagactcatcaaaaacagaaatggacagcaggacaaagagcaaggattactgcaaagtaatatttccatatgaggcacagaatgatgatgaattgacaatcaaagaaggagatatagtcactctcatcaataaggactgcatcgacgtaggctggtgggaaggagagctgaacggcagacgaggcgtgttccccgataacttcgtgaagttacttccaccggactttgaaaaggaagggaatagacccaagaagccaccgcctccatccgctcctgtcatcaaacaaggggcaggcaccactgagagaaaacatgaaattaaaaagatacctcctgaaagaccagaaatgcttccaaacagaacagaagaaaaagaaagaccagagagagagccaaaactggatttacagaagccctccgttcctgccataccgccaaaaaagcctcggccacctaagaccaattctctcagcagacctggcgcactgcccccgagaaggccggagagaccggtgggtccgctgacacacaccaggggtgacagtccaaagattgacttggccggcagttcgctatctggcatcctggacaaagatctctcggaccgcagcaatgacattgacttagaaggttttgactccgtggtatcatctactgagaaactcagtcatccgaccacaagcagaccaaaagctacagggaggcggcctccgtcccagtccctcacatctgtgtctgacaacaaagcatccctgccgcccaagccggggaccatggcagcaggtggcggtgggccagcccctctgtcctcagcggcgccctcccccctgtcatcctctttgggaacagctggacacagagccaactccccgtctctgttcggcacggaaggaaaaccaaagatggagcctgcggccagcagccaggcggccgtggaggagctaaggacacaggtccgcgagctgaggagcatcatcgagaccatgaaggaccagcagaaacgagagattaaacagttattgtctgagttggatgaagagaagaaaatccggcttcggttgcagatggaagtgaacgacataaagaaagctctacaatcaaaatgaatacttgatcaatgaaatgtcacattattcatcctgagtccgagactcaaattttctgccccagccaaaataatcttgtgccaaaagattaaaggtttgcctcaaaatgtccctgtttgaaagattagcacaaaagtcttgatagcacaacacaaattccatccaagaggagaatcttccccagggtttagtcctggggctggcactcgttgtgacttacacagagcaaaattgtgctaaaggcttttctactctgagatctcaatgcgaaatgaaaactcaggcagtttagtccatagtggtactattttgatgatattttccattaataaaatgtaatttcagattattcgtttacaagctttataattttatgattttttaatcgtgttttgtcacagacttccctagtgtttgtactacacgtagtcagaagcgagtgtccttttcttttgcttcaggctaagagctgcctcgctctttgtccccccattaggattctattacatatgcaattgtaggttcaacctgtccctttccctgccagcaaaccccaccaccctaagagaaattttagcttatatatgacggtatatttacaaaaagagaaagagaaaatctggtatttgcaatgatctgtgccttctttttaccaccctcttgattggagcttttgtgatgcagctaccatgattcaaaaaaattaaaaattaaaaaaaaaaaatctgccacttatccaagtccactagaggccactgtcttcaaagcttctctcaccctagccaaaggtcctaagaggagacagctgtgaagttgggcgtgctctgtggtaccagctgtgacttttctatttctcctagttttaggttgttcatgaaactagaaatgtcatcctgcttgatttttcatcagccaagttaaacccctgctttctgtcctttgcaccttttgcgtgaacagaatatgcattattaaagcaaaaataaataaaagtaaaatgcaaatga

SEQ ID NO: 81892 - DNA, 3406 bp, Homo sapiens
cgcaatttccactcgcggggagcaggaaacccggcgcagccgggcgcattgggccgcgatgcaacagcagcagcaggagtcgccccggggcagcagcggcagcagcagcagaggcagcagcgggcggcgctgagccgccgccgccgccactgaggaagaagccggcccagccgccgccgcgtccggaccctcgcgcctggatcccagcgccccgatcccggcgccccaacccccacgcccgcctccgccaactttcacgctgcctcggcggcccggcccggctcgacgccaatggtggaggccatagtggagtttgactaccaggcccagcacgatgatgagctgacgatcagcgtgggtgaaatcatcaccaacatcaggaaggaggatggaggctggtgggagggacagatcaacggcaggagaggtttgttccctgacaactttgtaagagaaataaagaaagagatgaagaaagaccctctcaccaacaaagctccagaaaagcccctgcacgaagtgcccagtggaaactctttgctgtcttctgaaacgattttaagaaccaataagagaggcgagcgacggaggcgccggtgccaggtggcattcagctacctgccccagaatgacgatgaacttgagctgaaagttggcgacatcatagaggtggtaggagaggtagaggaaggatggtgggaaggtgttctcaacgggaagactggaatgtttccttccaacttcatcaaggagctgtcaggggagtcggatgagcttggcatttcccaggatgagcagctatccaagtcaagtttaagggaaaccacaggctccgagagtgatgggggtgactcaagcagcaccaagtctgaaggtgccaacgggacagtggcaactgcagcaatccagcccaagaaagttaagggagtgggctttggagacattttcaaagacaagccaatcaaactaagaccaaggtcaattgaagtagaaaatgactttctgccggtagaaaagactattgggaagaagttacctgcaactacagcaactccagactcatcaaaaacagaaatggacagcaggacaaagagcaaggattactgcaaagtaatatttccatatgaggcacagaatgatgatgaattgacaatcaaagaaggagatatagtcactctcatcaataaggactgcatcgacgtaggctggtgggaaggagagctgaacggcagacgaggcgtgttccccgataacttcgtgaagttacttccaccggactttgaaaaggaagggaatagacccaagaagccaccgcctccatccgctcctgtcatcaaacaaggggcaggcaccactgagagaaaacatgaaattaaaaagatacctcctgaaagaccagaaatgcttccaaacagaacagaagaaaaagaaagaccagagagagagccaaaactggatttacagaagccctccgttcctgccataccgccaaaaaagcctcggccacctaagaccaattctctcagcagacctggcgcactgcccccgagaaggccggagagaccggtgggtccgctgacacacaccaggggtgacagtccaaagattgacttggccggcagttcgctatctggcatcctggacaaagatctctcggaccgcagcaatgacattgacttagaaggttttgactccgtggtatcatctactgagaaactcagtcatccgaccacaagcagaccaaaagctacagggaggcggcctccgtcccagtccctcacatcttcatccctttcaagccctgatatcttcgactccccaagtcccgaagaggataaggaggaacacatttcacttgcgcacagaggagtggacgcgtcaaagaaaacttccaagactgttaccatatcccaagtgtctgacaacaaagcatccctgccgcccaagccggggaccatggcagcaggtggcggtgggccagcccctctgtcctcagcggcgccctcccccctgtcatcctctttgggaacagctggacacagagccaactccccgtctctgttcggcacggaaggaaaaccaaagatggagcctgcggccagcagccaggcggccgtggaggagctaaggacacaggtccgcgagctgaggagcatcatcgagaccatgaaggaccagcagaaacgagagattaaacagttattgtctgagttggatgaagagaagaaaatccggcttcggttgcagatggaagtgaacgacataaagaaagctctacaatcaaaatgaatacttgatcaatgaaatgtcacattattcatcctgagtccgagactcaaattttctgccccagccaaaataatcttgtgccaaaagattaaaggtttgcctcaaaatgtccctgtttgaaagattagcacaaaagtcttgatagcacaacacaaattccatccaagaggagaatcttccccagggtttagtcctggggctggcactcgttgtgacttacacagagcaaaattgtgctaaaggcttttctactctgagatctcaatgcgaaatgaaaactcaggcagtttagtccatagtggtactattttgatgatattttccattaataaaatgtaatttcagattattcgtttacaagctttataattttatgattttttaatcgtgttttgtcacagacttccctagtgtttgtactacacgtagtcagaagcgagtgtccttttcttttgcttcaggctaagagctgcctcgctctttgtccccccattaggattctattacatatgcaattgtaggttcaacctgtccctttccctgccagcaaaccccaccaccctaagagaaattttagcttatatatgacggtatatttacaaaaagagaaagagaaaatctggtatttgcaatgatctgtgccttctttttaccaccctcttgattggagcttttgtgatgcagctaccattctgatgttggagcctgcgccagcaccaggcggccgtggaggagctaaggacacaggtccgcgagctgaggagcatcatcgagaccatgaaggaccagcagaaacgagagattaaacagttattgtctgagttggatgaagagaagaaaatccggcttcggttgcagatggaagtgaacgacataaagaaagctctacaatcaaaatgaatacttgatcaatgaaatgtcacattattcatcctgagtccgagactcaaattttctgccccagccaaaataatcttgtgccaaaagattaaaggtttgcctcaaaatgtccctgtttgaaagattagcacaaaagtcttgatagcacaacacaaattccatccaagaggagaatcttccccagggtttagtcctggggctggcactcgttgtgact

SEQ ID NO: 81893 - DNA, 2153 bp, Homo sapiens
cgcaatttccactcgcggggagcaggaaacccggcgcagccgggcgcattgggccgcgatgcaacagcagcagcaggagtcgccccggggcagcagcggcagcagcagcagaggcagcagcgggcggcgctgagccgccgccgccgccactgaggaagaagccggcccagccgccgccgcgtccggaccctcgcgcctggatcccagcgccccgatcccggcgccccaacccccacgcccgcctccgccaactttcacgctgcctcggcggcccggcccggctcgacgccaatggtggaggccatagtggagtttgactaccaggcccagcacgatgatgagctgacgatcagcgtgggtgaaatcatcaccaacatcaggaaggaggatggaggctggtgggagggacagatcaacggcaggagaggtttgttccctgacaactttgtaagagaaataaagaaagagatgaagaaagaccctctcaccaacaaagctccagaaaagcccctgcacgaagtgcccagtggaaactctttgctgtcttctgaaacgattttaagaaccaataagagaggcgagcgacggaggcgccggtgccaggtggcattcagctacctgccccagaatgacgatgaacttgagctgaaagttggcgacatcatagaggtggtaggagaggtagaggaaggatggtgggaaggtgttctcaacgggaagactggaatgtttccttccaacttcatcaaggagctgtcaggggagtcggatgagcttggcatttcccaggatgagcagctatccaagtcaagtttaagggaaaccacaggctccgagagtgatgggggtgactcaagcagcaccaagtctgaaggtgccaacgggacagtggcaactgcagcaatccagcccaagaaagttaagggagtgggctttggagacattttcaaagacaagccaatcaaactaagaccaaggtcaattgaagtagaaaatgactttctgccggtagaaaagactattgggaagaagttacctgcaactacagcaactccagactcatcaaaaacagaaatggacagcaggacaaagagcaaggattactgcaaagtaatatttccatatgaggcacagaatgatgatgaattgacaatcaaagaaggagatatagtcactctcatcaataaggactgcatcgacgtaggctggtgggaaggagagctgaacggcagacgaggcgtgttccccgataacttcgtgaagttacttccaccggactttgaaaaggaagggaatagacccaagaagccaccgcctccatccgctcctgtcatcaaacaaggggcaggcaccactgagagaaaacatgaaattaaaaagatacctcctgaaagaccagaaatgcttccaaacagaacagaagaaaaagaaagaccagagagagagccaaaactggatttacagaagccctccgttcctgccataccgccaaaaaagcctcggccacctaagaccaattctctcagcagacctggcgcactgcccccgagaaggccggagagaccggtgggtccgctgacacacaccaggggtgacagtccaaagattgacttggccggcagttcgctatctggcatcctggacaaagatctctcggaccgcagcaatgacattgacttagaaggttttgactccgtggtatcatctactgagaaactcagtcatccgaccacaagcagaccaaaagctacagggaggcggcctccgtcccagtccctcacatcttcatccctttcaagccctgatatcttcgactccccaagtcccgaagaggataaggaggaacacatttcacttgcgcacagaggagtggacgcgtcaaagaaaacttccaagactgttaccatatcccaagtgtctgacaacaaagcatccctgccgcccaagccggggaccatggcagcaggtggcggtggtaccagctgtgacttttctatttctcctagttttaggttgttcatgaaactagaaatgtcatcctgcttgatttttcatcagccaagttaaacccctgctttctgtcctttgcaccttttgcgtgaacagaatatgcattattaaagcaaaaataaataaaagtaaaatgcaaatga

SEQ ID NO: 81894 - DNA, 457 bp, Homo sapiens
gaaagggacaggttgaacctacaattgcttatatatgacggtatatttacaaaaagagaaagagaaaatctggtatttgcaatgatctgtgccttctttttaccaccctcttgattggagcttttgtgatgcagctaccatgattcaaaaaaattaaaaattaaaaaaaaaaaatctgccacttatccaagtccactagaggccactgtcttcaaagcttctctcaccctagccaaaggtcctaagaggagacagctgtgaagttgggcgtgctctgtggtaccagctgtgacttttctatttctcctagttttaggttgttcatgaaactagaaatgtcatcctgcttgatttttcatcagccaagttaaacccctgctttctgtcctttgcaccttttgcgtgaacagaatatgcattattaaagcaaaaataaataaaagtaaaatgcaaatga

SEQ ID NO: 81895 - DNA, 4069 bp, Homo sapiens
cgcaatttccactcgcggggagcaggaaacccggcgcagccgggcgcattgggccgcgatgcaacagcagcagcaggagtcgccccggggcagcagcggcagcagcagcagaggcagcagcgggcggcgctgagccgccgccgccgccactgaggaagaagccggcccagccgccgccgcgtccggaccctcgcgcctggatcccagcgccccgatcccggcgccccaacccccacgcccgcctccgccaactttcacgctgcctcggcggcccggcccggctcgacgccaatggtggaggccatagtggagtttgactaccaggcccagcacgatgatgagctgacgatcagcgtgggtgaaatcatcaccaacatcaggaaggaggatggaggctggtgggagggacagatcaacggcaggagaggtttgttccctgacaactttgtaagagaaataaagaaagagatgaagaaagaccctctcaccaacaaagctccagaaaagcccctgcacgaagtgcccagtggaaactctttgctgtcttctgaaacgattttaagaaccaataagagaggcgagcgacggaggcgccggtgccaggtggcattcagctacctgccccagaatgacgatgaacttgagctgaaagttggcgacatcatagaggtggtaggagaggtagaggaaggatggtgggaaggtgttctcaacgggaagactggaatgtttccttccaacttcatcaaggagctgtcaggggagtcggatgagcttggcatttcccaggatgagcagctatccaagtcaagtttaagggaaaccacaggctccgagagtgatgggggtgactcaagcagcaccaagtctgaaggtgccaacgggacagtggcaactgcagcaatccagcccaagaaagttaagggagtgggctttggagacattttcaaagacaagccaatcaaactaagaccaaggtcaattgaagtagaaaatgactttctgccggtagaaaagactattgggaagaagttacctgcaactacagcaactccagactcatcaaaaacagaaatggacagcaggacaaagagcaaggattactgcaaagtaatatttccatatgaggcacagaatgatgatgaattgacaatcaaagaaggagatatagtcactctcatcaataaggactgcatcgacgtaggctggtgggaaggagagctgaacggcagacgaggcgtgttccccgataacttcgtgaagttacttccaccggactttgaaaaggaagggaatagacccaagaagccaccgcctccatccgctcctgtcatcaaacaaggggcaggcaccactgagagaaaacatgaaattaaaaagatacctcctgaaagaccagaaatgcttccaaacagaacagaagaaaaagaaagaccagagagagagccaaaactggatttacagaagccctccgttcctgccataccgccaaaaaagcctcggccacctaagaccaattctctcagcagacctggcgcactgcccccgagaaggccggagagaccggtgggtccgctgacacacaccaggggtgacagtccaaagattgacttggccggcagttcgctatctggcatcctggacaaagatctctcggaccgcagcaatgacattgacttagaaggttttgactccgtggtatcatctactgagaaactcagtcatccgaccacaagcagaccaaaagctacagggaggcggcctccgtcccagtccctcacatcttcatccctttcaagccctgatatcttcgactccccaagtcccgaagaggataaggaggaacacatttcacttgcgcacagaggagtggacgcgtcaaagaaaacttccaagactgttaccatatcccaagtgtctgacaacaaagcatccctgccgcccaagccggggaccatggcagcaggtggcggtgggccagcccctctgtcctcagcggcgccctcccccctgtcatcctctttgggaacagctggacacagagccaactccccgtctctgttcggcacggaaggaaaaccaaagatggagcctgcggccagcagccaggcggccgtggaggagctaaggacacaggtccgcgagctgaggagcatcatcgagaccatgaaggaccagcagaaacgagagattaaacagttattgtctgagttggatgaagagaagaaaatccggcttcggttgcagatggaagtgaacgacataaagaaagctctacaatcaaaatgaatacttgatcaatgaaatgtcacattattcatcctgagtccgagactcaaattttctgccccagccaaaataatcttgtgccaaaagattaaaggtttgcctcaaaatgtccctgtttgaaagattagcacaaaagtcttgatagcacaacacaaattccatccaagaggagaatcttccccagggtttagtcctggggctggcactcgttgtgacttacacagagcaaaattgtgctaaaggcttttctactctgagatctcaatgcgaaatgaaaactcaggcagtttagtccatagtggtactattttgatgatattttccattaataaaatgtaatttcagattattcgtttacaagctttataattttatgattttttaatcgtgttttgtcacagacttccctagtgtttgtactacacgtagtcagaagcgagtgtccttttcttttgcttcaggctaagagctgcctcgctctttgtccccccattaggattctattacatatgcaattgtaggttcaacctgtccctttccctgccagcaaaccccaccaccctaagagaaattttagcttatatatgacggtatatttacaaaaagagaaagagaaaatctggtatttgcaatgatctgtgccttctttttaccaccctcttgattggagcttttgtgatgcagctaccatgattcaaaaaaattaaaaattaaaaaaaaaaaatctgccacttatccaagtccactagaggccactgtcttcaaagcttctctcaccctagccaaaggtcctaagaggagacagctgtgaagttgggcgtgctctgtggtaccagctgtgacttttctatttctcctagttttaggttgttcatgaaactagaaatgtcatcctgcttgatttttcatcagccaagttaaacccctgctttctgtcctttgcaccttttgcgtgaacagaatatgcattattaaagcaaaaataaataaaagtaaaatgcaaatgaaaacaagggagggaaagttgtattatttcctgcactgggttacccgtgtgtgttatcgtttaaactgtattcacataatgtcatttgccttgctcacttgtaaccccttcctcaggtccaagagaatgggaggagggtcatgttgaagtgtagccactggaactttcttgcatttatggagttgctttttctttcccaaggaaactgatgtttgcctgtccgctttatctttgtagtacatgaacagttcagccttagactatgtaactgttttctcatccttagctgaaaatgaggggcctactgtattgcgagactgttcaggggtaggggtggagggggtggtcccttaatggcccctgaagatgttggatgtgtttctcaaaagctgctttgtctctttcctgagtttaatagtgaaactactaaacattaatagatttgcacagccacaaagaatgagagttgataataccgaagaagtgatgcaaaaacaaaaaatcacattactgatcattgatagtattacaaataaatgtctcttcctttctcttcctcccttcctccccctgccttcctcttaacctatgtgctcatccttgctacttgaggctgttatttccctccgagtatttaaggagcccaaacaccttggtcttcctgggtgggggcataattaagggaagggagtgtataaggaaggaaacctcataccctccattcccatccctggatatattgccttttcagcagcctcgggttcagtgtgcttg

SEQ ID NO: 81896 - DNA, 3208 bp, Homo sapiens
cgcaatttccactcgcggggagcaggaaacccggcgcagccgggcgcattgggccgcgatgcaacagcagcagcaggagtcgccccggggcagcagcggcagcagcagcagaggcagcagcgggcggcgctgagccgccgccgccgccactgaggaagaagccggcccagccgccgccgcgtccggaccctcgcgcctggatcccagcgccccgatcccggcgccccaacccccacgcccgcctccgccaactttcacgctgcctcggcggcccggcccggctcgacgccaatggtggaggccatagtggagtttgactaccaggcccagcacgatgatgagctgacgatcagcgtgggtgaaatcatcaccaacatcaggaaggaggatggaggctggtgggagggacagatcaacggcaggagaggtttgttccctgacaactttgtaagagaaataaagaaagagatgaagaaagaccctctcaccaacaaagctccagaaaagcccctgcacgaagtgcccagtggaaactctttgctgtcttctgaaacgattttaagaaccaataagagaggcgagcgacggaggcgccggtgccaggtggcattcagctacctgccccagaatgacgatgaacttgagctgaaagttggcgacatcatagaggtggtaggagaggtagaggaaggatggtgggaaggtgttctcaacgggaagactggaatgtttccttccaacttcatcaaggagctgtcaggggagtcggatgagcttggcatttcccaggatgagcagctatccaagtcaagtttaagggaaaccacaggctccgagagtgatgggggtgactcaagcagcaccaagtctgaaggtgccaacgggacagtggcaactgcagcaatccagcccaagaaagttaagggagtgggctttggagacattttcaaagacaagccaatcaaactaagaccaaggtcaattgaagtagaaaatgactttctgccggtagaaaagactattgggaagaagttacctgcaactacagcaactccagactcatcaaaaacagaaatggacagcaggacaaagagcaaggattactgcaaagtaatatttccatatgaggcacagaatgatgatgaattgacaatcaaagaaggagatatagtcactctcatcaataaggactgcatcgacgtaggctggtgggaaggagagctgaacggcagacgaggcgtgttccccgataacttcgtgaagttacttccaccggactttgaaaaggaagggaatagacccaagaagccaccgcctccatccgctcctgtcatcaaacaaggggcaggcaccactgagagaaaacatgaaattaaaaagatacctcctgaaagaccagaaatgcttccaaacagaacagaagaaaaagaaagaccagagagagagccaaaactggatttacagaagccctccgttcctgccataccgccaaaaaagcctcggccacctaagaccaattctctcagcagacctggcgcactgcccccgagaaggccggagagaccggtgggtccgctgacacacaccaggggtgacagtccaaagattgacttggccggcagttcgctatctggcatcctggacaaagatctctcggaccgcagcaatgacattgacttagaaggttttgactccgtggtatcatctactgagaaactcagtcatccgaccacaagcagaccaaaagctacagggaggcggcctccgtcccagtccctcacatcttcatccctttcaagccctgatatcttcgactccccaagtcccgaagaggataaggaggaacacatttcacttgcgcacagaggagtggacgcgtcaaagaaaacttccaagactgttaccatatcccaagtgtctgacaacaaagcatccctgccgcccaagccggggaccatggcagcaggtggcggtgggccagcccctctgtcctcagcggcgccctcccccctgtcatcctctttgggaacagctggacacagagccaactccccgtctctgttcggcacggaaggaaaaccaaagatggagcctgcggccagcagccaggcggccgtggaggagctaaggacacaggtccgcgagctgaggagcatcatcgagaccatgaaggaccagcagaaacgagagattaaacagttattgtctgagttggatgaagagaagaaaatccggcttcggttgcagatggaagtgaacgacataaagaaagctctacaatcaaaatgaatacttgatcaatgaaatgtcacattattcatcctgagtccgagactcaaattttctgccccagccaaaataatcttgtgccaaaagattaaaggtttgcctcaaaatgtccctgtttgaaagattagcacaaaagtcttgatagcacaacacaaattccatccaagaggagaatcttccccagggtttagtcctggggctggcactcgttgtgacttacacagagcaaaattgtgctaaaggcttttctactctgagatctcaatgcgaaatgaaaactcaggcagtttagtccatagtggtactattttgatgatattttccattaataaaatgtaatttcagattattcgtttacaagctttataattttatgattttttaatcgtgttttgtcacagacttccctagtgtttgtactacacgtagtcagaagcgagtgtccttttcttttgcttcaggctaagagctgcctcgctctttgtccccccattaggattctattacatatgcaattgtaggttcaacctgtccctttccctgccagcaaaccccaccaccctaagagaaattttagcttatatatgacggtatatttacaaaaagagaaagagaaaatctggtatttgcaatgatctgtgccttctttttaccaccctcttgattggagcttttgtgatgcagctaccatgattcaaaaaaattaaaaattaaaaaaaaaaaatctggccaaaaaccttgaaacaaaaatctggtaataaaatgtctataaggagcttttaaaagctacaagatattcctggggatctagaaggctacacacataggcagggccgggcacattcccaggaaatacctgagaagaccctaaccttccacctttggctgagtgggaggctctgagcaagccagcagtgaa

SEQ ID NO: 81897 - DNA, 2554 bp, Homo sapiens
gggccccaggagggagcccagattgcagcagcaatcataggcgagggaggaggacttctctcgaagccacccaagccatgaattgggcctggcttcctgaaccataaacaaatgcgagcttgttctccccgattcctcatttggtcccaagtatgactcagggttaggctgggtcctcaggctccgtgctgttggaaggaagtgggaggattccagggagttctgggaccttttcaaactgaagagaggaggctggctgcatcatgggagaagagactattgggaagaagttacctgcaactacagcaactccagactcatcaaaaacagaaatggacagcaggacaaagagcaaggattactgcaaagtaatatttccatatgaggcacagaatgatgatgaattgacaatcaaagaaggagatatagtcactctcatcaataaggactgcatcgacgtaggctggtgggaaggagagctgaacggcagacgaggcgtgttccccgataacttcgtgaagttacttccaccggactttgaaaaggaagggaatagacccaagaagccaccgcctccatccgctcctgtcatcaaacaaggggcaggcaccactgagagaaaacatgaaattaaaaagatacctcctgaaagaccagaaatgcttccaaacagaacagaagaaaaagaaagaccagagagagagccaaaactggatttacagaagccctccgttcctgccataccgccaaaaaagcctcggccacctaagaccaattctctcagcagacctggcgcactgcccccgagaaggccggagagaccggtgggtccgctgacacacaccaggggtgacagtccaaagattgacttggccggcagttcgctatctggcatcctggacaaagatctctcggaccgcagcaatgacattgacttagaaggttttgactccgtggtatcatctactgagaaactcagtcatccgaccacaagcagaccaaaagctacagggaggcggcctccgtcccagtccctcacatcttcatccctttcaagccctgatatcttcgactccccaagtcccgaagaggataaggaggaacacatttcacttgcgcacagaggagtggacgcgtcaaagaaaacttccaagactgttaccatatcccaagtgtctgacaacaaagcatccctgccgcccaagccggggaccatggcagcaggtggcggtgggccagcccctctgtcctcagcggcgccctcccccctgtcatcctctttgggaacagctggacacagagccaactccccgtctctgttcggcacggaaggaaaaccaaagatggagcctgcggccagcagccaggcggccgtggaggagctaaggacacaggtccgcgagctgaggagcatcatcgagaccatgaaggaccagcagaaacgagagattaaacagttattgtctgagttggatgaagagaagaaaatccggcttcggttgcagatggaagtgaacgacataaagaaagctctacaatcaaaatgaatacttgatcaatgaaatgtcacattattcatcctgagtccgagactcaaattttctgccccagccaaaataatcttgtgccaaaagattaaaggtttgcctcaaaatgtccctgtttgaaagattagcacaaaagtcttgatagcacaacacaaattccatccaagaggagaatcttccccagggtttagtcctggggctggcactcgttgtgacttacacagagcaaaattgtgctaaaggcttttctactctgagatctcaatgcgaaatgaaaactcaggcagtttagtccatagtggtactattttgatgatattttccattaataaaatgtaatttcagattattcgtttacaagctttataattttatgattttttaatcgtgttttgtcacagacttccctagtgtttgtactacacgtagtcagaagcgagtgtccttttcttttgcttcaggctaagagctgcctcgctctttgtccccccattaggattctattacatatgcaattgtaggttcaacctgtccctttccctgccagcaaaccccaccaccctaagagaaattttagcttatatatgacggtatatttacaaaaagagaaagagaaaatctggtatttgcaatgatctgtgccttctttttaccaccctcttgattggagcttttgtgatgcagctaccatgattcaaaaaaattaaaaattaaaaaaaaaaaatctgccacttatccaagtccactagaggccactgtcttcaaagcttctctcaccctagccaaaggtcctaagaggagacagctgtgaagttgggcgtgctctgtggtaccagctgtgacttttctatttctcctagttttaggttgttcatgaaactagaaatgtcatcctgcttgatttttcatcagccaagttaaacccctgctttctgtcctttgcaccttttgcgtgaacagaatatgcattattaaagcaaaaataaataaaagtaaaatgcaaatga

SEQ ID NO: 81898 - DNA, 2543 bp, Homo sapiens
atctcctcacgccacacatctcctcactccacgcatctcctcactccacgcatctccccacagagagagcgtcgacgctctctctgtggggggggtgactcaagcagcaccaagtctgaaggtgccaacgggacagtggcaactgcagcaatccagcccaagaaagttaagggagtgggctttggagacattttcaaagacaagccaatcaaactaagaccaaggtcaattgaagtagaaaatgactttctgccggtagaaaagactattgggaagaagttacctgcaactacagcaactccagactcatcaaaaacagaaatggacagcaggacaaagagcaaggattactgcaaagtaatatttccatatgaggcacagaatgatgatgaattgacaatcaaagaaggagatatagtcactctcatcaataaggactgcatcgacgtaggctggtgggaaggagagctgaacggcagacgaggcgtgttccccgataacttcgtgaagttacttccaccggactttgaaaaggaagggaatagacccaagaagccaccgcctccatccgctcctgtcatcaaacaaggggcaggcaccactgagagaaaacatgaaattaaaaagatacctcctgaaagaccagaaatgcttccaaacagaacagaagaaaaagaaagaccagagagagagccaaaactggatttacagaagccctccgttcctgccataccgccaaaaaagcctcggccacctaagaccaattctctcagcagacctggcgcactgcccccgagaaggccggagagaccggtgggtccgctgacacacaccaggggtgacagtccaaagattgacttggccggcagttcgctatctggcatcctggacaaagatctctcggaccgcagcaatgacattgacttagaaggttttgactccgtggtatcatctactgagaaactcagtcatccgaccacaagcagaccaaaagctacagggaggcggcctccgtcccagtccctcacatcttcatccctttcaagccctgatatcttcgactccccaagtcccgaagaggataaggaggaacacatttcacttgcgcacagaggagtggacgcgtcaaagaaaacttccaagactgttaccatatcccaagtgtctgacaacaaagcatccctgccgcccaagccggggaccatggcagcaggtggcggtgggccagcccctctgtcctcagcggcgccctcccccctgtcatcctctttgggaacagctggacacagagccaactccccgtctctgttcggcacggaaggaaaaccaaagatggagcctgcggccagcagccaggcggccgtggaggagctaaggacacaggtccgcgagctgaggagcatcatcgagaccatgaaggaccagcagaaacgagagattaaacagttattgtctgagttggatgaagagaagaaaatccggcttcggttgcagatggaagtgaacgacataaagaaagctctacaatcaaaatgaatacttgatcaatgaaatgtcacattattcatcctgagtccgagactcaaattttctgccccagccaaaataatcttgtgccaaaagattaaaggtttgcctcaaaatgtccctgtttgaaagattagcacaaaagtcttgatagcacaacacaaattccatccaagaggagaatcttccccagggtttagtcctggggctggcactcgttgtgacttacacagagcaaaattgtgctaaaggcttttctactctgagatctcaatgcgaaatgaaaactcaggcagtttagtccatagtggtactattttgatgatattttccattaataaaatgtaatttcagattattcgtttacaagctttataattttatgattttttaatcgtgttttgtcacagacttccctagtgtttgtactacacgtagtcagaagcgagtgtccttttcttttgcttcaggctaagagctgcctcgctctttgtccccccattaggattctattacatatgcaattgtaggttcaacctgtccctttccctgccagcaaaccccaccaccctaagagaaattttagcttatatatgacggtatatttacaaaaagagaaagagaaaatctggtatttgcaatgatctgtgccttctttttaccaccctcttgattggagcttttgtgatgcagctaccatgattcaaaaaaattaaaaattaaaaaaaaaaaatctgccacttatccaagtccactagaggccactgtcttcaaagcttctctcaccctagccaaaggtcctaagaggagacagctgtgaagttgggcgtgctctgtggtaccagctgtgacttttctatttctcctagttttaggttgttcatgaaactagaaatgtcatcctgcttgatttttcatcagccaagttaaacccctgctttctgtcctttgcaccttttgcgtgaacagaatatgcattattaaagcaaaaataaataaaagtaaaatgcaaatga

SEQ ID NO: 81899 - DNA, 2306 bp, Homo sapiens
ctgtcacaatatcaacatgcagtagagactattgggaagaagttacctgcaactacagcaactccagactcatcaaaaacagaaatggacagcaggacaaagagcaaggattactgcaaagtaatatttccatatgaggcacagaatgatgatgaattgacaatcaaagaaggagatatagtcactctcatcaataaggactgcatcgacgtaggctggtgggaaggagagctgaacggcagacgaggcgtgttccccgataacttcgtgaagttacttccaccggactttgaaaaggaagggaatagacccaagaagccaccgcctccatccgctcctgtcatcaaacaaggggcaggcaccactgagagaaaacatgaaattaaaaagatacctcctgaaagaccagaaatgcttccaaacagaacagaagaaaaagaaagaccagagagagagccaaaactggatttacagaagccctccgttcctgccataccgccaaaaaagcctcggccacctaagaccaattctctcagcagacctggcgcactgcccccgagaaggccggagagaccggtgggtccgctgacacacaccaggggtgacagtccaaagattgacttggccggcagttcgctatctggcatcctggacaaagatctctcggaccgcagcaatgacattgacttagaaggttttgactccgtggtatcatctactgagaaactcagtcatccgaccacaagcagaccaaaagctacagggaggcggcctccgtcccagtccctcacatcttcatccctttcaagccctgatatcttcgactccccaagtcccgaagaggataaggaggaacacatttcacttgcgcacagaggagtggacgcgtcaaagaaaacttccaagactgttaccatatcccaagtgtctgacaacaaagcatccctgccgcccaagccggggaccatggcagcaggtggcggtgggccagcccctctgtcctcagcggcgccctcccccctgtcatcctctttgggaacagctggacacagagccaactccccgtctctgttcggcacggaaggaaaaccaaagatggagcctgcggccagcagccaggcggccgtggaggagctaaggacacaggtccgcgagctgaggagcatcatcgagaccatgaaggaccagcagaaacgagagattaaacagttattgtctgagttggatgaagagaagaaaatccggcttcggttgcagatggaagtgaacgacataaagaaagctctacaatcaaaatgaatacttgatcaatgaaatgtcacattattcatcctgagtccgagactcaaattttctgccccagccaaaataatcttgtgccaaaagattaaaggtttgcctcaaaatgtccctgtttgaaagattagcacaaaagtcttgatagcacaacacaaattccatccaagaggagaatcttccccagggtttagtcctggggctggcactcgttgtgacttacacagagcaaaattgtgctaaaggcttttctactctgagatctcaatgcgaaatgaaaactcaggcagtttagtccatagtggtactattttgatgatattttccattaataaaatgtaatttcagattattcgtttacaagctttataattttatgattttttaatcgtgttttgtcacagacttccctagtgtttgtactacacgtagtcagaagcgagtgtccttttcttttgcttcaggctaagagctgcctcgctctttgtccccccattaggattctattacatatgcaattgtaggttcaacctgtccctttccctgccagcaaaccccaccaccctaagagaaattttagcttatatatgacggtatatttacaaaaagagaaagagaaaatctggtatttgcaatgatctgtgccttctttttaccaccctcttgattggagcttttgtgatgcagctaccatgattcaaaaaaattaaaaattaaaaaaaaaaaatctgccacttatccaagtccactagaggccactgtcttcaaagcttctctcaccctagccaaaggtcctaagaggagacagctgtgaagttgggcgtgctctgtggtaccagctgtgacttttctatttctcctagttttaggttgttcatgaaactagaaatgtcatcctgcttgatttttcatcagccaagttaaacccctgctttctgtcctttgcaccttttgcgtgaacagaatatgcattattaaagcaaaaataaataaaagtaaaatgcaaatga

SEQ ID NO: 81900 - DNA, 3014 bp, Homo sapiens
cgcaatttccactcgcggggagcaggaaacccggcgcagccgggcgcattgggccgcgatgcaacagcagcagcaggagtcgccccggggcagcagcggcagcagcagcagaggcagcagcgggcggcgctgagccgccgccgccgccactgaggaagaagccggcccagccgccgccgcgtccggaccctcgcgcctggatcccagcgccccgatcccggcgccccaacccccacgcccgcctccgccaactttcacgctgcctcggcggcccggcccggctcgacgccaatggtggaggccatagtggagtttgactaccaggcccagcacgatgatgagctgacgatcagcgtgggtgaaatcatcaccaacatcaggaaggaggatggaggctggtgggagggacagatcaacggcaggagaggtttgttccctgacaactttgtaagagaaataaagaaagagatgaagaaagaccctctcaccaacaaagctccagaaaagcccctgcacgaagtgcccagtggaaactctttgctgtcttctgaaacgattttaagaaccaataagagaggcgagcgacggaggcgccggtgccaggtggcattcagctacctgccccagaatgacgatgaacttgagctgaaagttggcgacatcatagaggtggtaggagaggtagaggaaggatggtgggaaggtgttctcaacgggaagactggaatgtttccttccaacttcatcaaggagctgtcaggggagtcggatgagcttggcatttcccaggatgagcagctatccaagtcaagcaaggattactgcaaagtaatatttccatatgaggcacagaatgatgatgaattgacaatcaaagaaggagatatagtcactctcatcaataaggactgcatcgacgtaggctggtgggaaggagagctgaacggcagacgaggcgtgttccccgataacttcgtgaagttacttccaccggactttgaaaaggaagggaatagacccaagaagccaccgcctccatccgctcctgtcatcaaacaaggggcaggcaccactgagagaaaacatgaaattaaaaagatacctcctgaaagaccagaaatgcttccaaacagaacagaagaaaaagaaagaccagagagagagccaaaactggatttacagaagccctccgttcctgccataccgccaaaaaagcctcggccacctaagaccaattctctcagcagacctggcgcactgcccccgagaaggccggagagaccggtgggtccgctgacacacaccaggggtgacagtccaaagattgacttggccggcagttcgctatctggcatcctggacaaagatctctcggaccgcagcaatgacattgacttagaaggttttgactccgtggtatcatctactgagaaactcagtcatccgaccacaagcagaccaaaagctacagggaggcggcctccgtcccagtccctcacatcttcatccctttcaagccctgatatcttcgactccccaagtcccgaagaggataaggaggaacacatttcacttgcgcacagaggagtggacgcgtcaaagaaaacttccaagactgttaccatatcccaagtgtctgacaacaaagcatccctgccgcccaagccggggaccatggcagcaggtggcggtgggccagcccctctgtcctcagcggcgccctcccccctgtcatcctctttgggaacagctggacacagagccaactccccgtctctgttcggcacggaaggaaaaccaaagatggagcctgcggccagcagccaggcggccgtggaggagctaaggacacaggtccgcgagctgaggagcatcatcgagaccatgaaggaccagcagaaacgagagattaaacagttattgtctgagttggatgaagagaagaaaatccggcttcggttgcagatggaagtgaacgacataaagaaagctctacaatcaaaatgaatacttgatcaatgaaatgtcacattattcatcctgagtccgagactcaaattttctgccccagccaaaataatcttgtgccaaaagattaaaggtttgcctcaaaatgtccctgtttgaaagattagcacaaaagtcttgatagcacaacacaaattccatccaagaggagaatcttccccagggtttagtcctggggctggcactcgttgtgacttacacagagcaaaattgtgctaaaggcttttctactctgagatctcaatgcgaaatgaaaactcaggcagtttagtccatagtggtactattttgatgatattttccattaataaaatgtaatttcagattattcgtttacaagctttataattttatgattttttaatcgtgttttgtcacagacttccctagtgtttgtactacacgtagtcagaagcgagtgtccttttcttttgcttcaggctaagagctgcctcgctctttgtccccccattaggattctattacatatgcaattgtaggttcaacctgtccctttccctgccagcaaaccccaccaccctaagagaaattttagcttatatatgacggtatatttacaaaaagagaaagagaaaatctggtatttgcaatgatctgtgccttctttttaccaccctcttgattggagcttttgtgatgcagctaccatgattcaaaaaaattaaaaattaaaaaaaaaaaatctgccacttatccaagtccactagaggccactgtcttcaaagcttctctcaccctagccaaaggtcctaagaggagacagctgtgaagttgggcgtgctctgtggtaccagctgtgacttttctatttctcctagttttaggttgttcatgaaactagaaatgtcatcctgcttgatttttcatcagccaagttaaacccctgctttctgtcctttgcaccttttgcgtgaacagaatatgcattattaaagcaaaaataaataaaagtaaaatgcaaatga

SEQ ID NO: 81901 - DNA, 1120 bp, Homo sapiens
cgcaatttccactcgcggggagcaggaaacccggcgcagccgggcgcattgggccgcgatgcaacagcagcagcaggagtcgccccggggcagcagcggcagcagcagcagaggcagcagcgggcggcgctgagccgccgccgccgccactgaggaagaagccggcccagccgccgccgcgtccggaccctcgcgcctggatcccagcgccccgatcccggcgccccaacccccacgcccgcctccgccaactttcacgctgcctcggcggcccggcccggctcgacgccaatggtggaggccatagtggagtttgactaccaggcccagcacgatgatgagctgacgatcagcgtgggtgaaatcatcaccaacatcaggaaggaggatggaggctggtgggagggacagatcaacggcaggagaggtttgttccctgacaactttgtaagagaaataaagaaagagatgaagaaagaccctctcaccaacaaagctccagaaaagcccctgcacgaagtgcccagtggaaactctttgctgtcttctgaaacgattttaagaaccaataagagaggcgagcgacggaggcgccggtgccaggtggcattcagctacctgccccagaatgacgatgaacttgagctgaaagttggcgacatcatagaggtggtaggagaggtagaggaaggatggtgggaaggtgttctcaacgggaagactggaatgtttccttccaacttcatcaaggagctgtcaggggagtcggatgagcttggcatttcccaggatgagcagctatccaagtcaaactattgggaagaagttacctgcaactacagcaactccagactcatcaaaaacagaaatggacagcaggacaaagagcaaggattactgcaaagtaatatttccatatgaggcacagaatgatgatgaattgacaatcaaagaaggagatatagtcactctcatcaataaggactgcatcgacgtaggctggtgggaaggagagctgaacggcagacgaggcgtgttccccgataacttcgtgaagttacttccaccggactttgaaaaggaagggaatagacccagaagcaacgcttcatcggtctgt

SEQ ID NO: 81902 - DNA, 583 bp, Homo sapiens
tctgttgcccaggctggagtacagtggcacaatcatagttcactgcagccttgagctcttgggcacaagcgaacctcccacctcagcctctcaagtagctgggactacaggtacacactgccatgcccaactaattttgatttttcattttttgtaaagatggggtctcgctttgttgctgttataactccgtgttcacactgctatgaaggaataccccagactgggtaatttataaagaaaagaggtttaattgactcacagttccacatggctggggaaacttacaatcatggtggaaggcacctcttcacagggtggcaggagagacagtgagtgctgagcaatgggggaaaagccccttgtaaaaccatcagaactagtgagaactcactcactatcacaagaagagcatgggggttactgcccccatgattcaattactcccaccaggtccctcacacaacacctggggattatgggaactacaattcaagatgagatttgggtggggacgcagtcaaaccatctcagttgcccaggctggtctcaagttcctggcctcaaacgatcctctcgcctc

SEQ ID NO: 81903 - DNA, 441 bp, Homo sapiens
tcttactatattgtccaggcttgtgttaaaactgttactgaaacaccagaggtttggtccaggtcctgctgttttccactcagaaaaccaatcactgaggtgacacgtattgccagggaagaaggctttaatcaggtgctgcagccaaggaggtgggagctcagtctcaaatccaatctccctgactgactaaaattaggggttcatataacaggaaagaaacgtagcaatgtgtgggaaaacagacctctggaggtgaaaggaagcagtcatgatgaatgaggggcctggcgcttcgtgtctggatgtggtgatctggtgaggttcagatctttgatactttttgagaggcttgggggtcctttcctgaggaaggagctcaaataaaacaggtgtaagtttcaagctttaagactagaagtgtcaatttctatgtttatt

SEQ ID NO: 81904 - DNA, 422 bp, Homo sapiens
gcctaattaaaaatatacctaaagtatcaaggactaaattgtgtctttctaggtattatgtaactcagtatttactgaattacaattaacattactctctttatagaacccttgccaaaagtaacagttgaatgacattatctgaagcttataaacccatagctagagttattctctgctatgtcactcattctgtatattgtgtaggaaattccagttcgagtttagttgttagaaaagttttgcactgggctgggcgcagtggctcacacctataatcccaggactttgggaggccaaggcgggtggatcatttgaggtcagcagtttgagaccagcctgaccaacatggtgaaaccccatctctaccaaaaattagcctggcatcatggtgcacacctgtaatcatttccagctactgg

SEQ ID NO: 81905 - DNA, 798 bp, Homo sapiens
ggaaagtagagggtttaaaggagttgcatcggcagcggatgaagaggagaaggagactaagagcttgttgctttttgctataaaatttagcatttttgattttgcaaatcaagtgcatgtatttatttacacccaatgaagatgctatctgaatttttcatatttaaaagcatccttcaacatggttctatggagaaaaactgaaaattaaatttcaagttgaaaaattatttagagaacacattttagaatattgtctcaaaaaacaaagaagcatacaaatcccatttttcctcctcacttttaacatttgtgtataataatctattattctcctattttgtgagacaccattgtacatattgtgactattttgtgcagtacttgttttattttgacttgtgtttactactcccacgtagggcatcagcagtccccactctattatcttatcctcattcccttcctcatttatttttatcttacacttcgcctccattggtatttagcattctacatattatttattcagcatctgtttatttaatgcctactgcatagtaggtactgggaatgtagcaatgaacaagatagatatagccctcacctgcacaatctactgtctgtctggagctaatgtctgtattagctagggaatagcccacaaaaattttatttctaactgaaaattttatttcacctctggttgataagaccccacccatggctgggcgcagtggctcacacctgtaatcccagcactttgggaggctgaggcgggcggatcacaaggtcagg

SEQ ID NO: 81906 - DNA, 300 bp, Homo sapiens
taattttagcacatattttgaaggtgaaataacaggacttggttgcaagttgtgatggtaggggggtggcaggaagaagaaagcatcaaggatgatgatgctttctggaagaagcaaatgggtaaatggagataatttttacgaagaatggtaaggctgaagaagaaataaactaacaaaagggaaatgattgaggaagtggcatagatttgggggcagaactcaagagttttgaattctgattttaggaatgcctatgaaaatcccagtggagatttcaagatggcaggtgcacataat

SEQ ID NO: 81907 - DNA, 381 bp, Homo sapiens
gcggccgcctactactactactactactactaaattcgcggccgcgtcgaccaaatcattttggaaataaagattttttactacaaaaatgaaatttgtttggacttccacttgagacagtaaagagagtattagacacccagtaaaaactgccatataaagaagttgtaattgtttgttgtgtatgtatttttttcaatgccaaaccagctgtgatccaatttacatccacattttaggtccaacagcaagaagttcagagagagatttcccaaccagacattgggtcactcactggtcaccttgccagtgcattttattagaagggaatctgttgtagcaaatgggaataaacctgggtttctatagacccagaactga

SEQ ID NO: 81908 - DNA, 4896 bp, Homo sapiens
ggcacaaagttgggggccgcgaagatgaggctgtccccggcgcccctgaagctgagccggactccggcactgctggccctggcgctgcccctggccgcggcgctggccttctccgacgagaccctggacaaagtgcccaagtcagagggctactgtagccgtatcctgcgcgcccagggcacgcggcgcgagggctacaccgagttcagcctccgcgtggagggcgaccccgacttctacaagccgggaaccagctaccgcgtaacactttcagctgctcctccctcctacttcagaggattcacattaattgccctcagagagaacagagagggtgataaggaagaagaccatgctgggaccttccagatcatagacgaagaagaaactcagtttatgagcaattgccctgttgcagtcactgaaagcactccacggaggaggacccggatccaggtgttttggatagcaccaccagcgggaacaggctgcgtgattctgaaggccagcatcgtacaaaaacgcattatttattttcaagatgagggctctctgaccaagaaactttgtgaacaagattccacatttgatggggtgactgacaaacccatcttagactgctgtgcctgcggaactgccaagtacagactcacattttatgggaattggtccgagaagacacacccaaaggattaccctcgtcgggccaaccactggtctgcgatcatcggaggatcccactccaagaattatgtactgtgggaatatggaggatatgccagcgaaggcgtcaaacaagttgcagaattgggctcacccgtgaaaatggaggaagaaattcgacaacagagtgatgaggtcctcaccgtcatcaaagccaaagcccaatggccagcctggcagcctctcaacgtgagagcagcaccttcagctgaattttccgtggacagaacgcgccatttaatgtccttcctgaccatgatgggccctagtcccgactggaacgtaggcttatctgcagaagatctgtgcaccaaggaatgtggctgggtccagaaggtggtgcaagacctgattccctgggacgctggcaccgacagcggggtgacctatgagtcacccaacaaacccaccattccccaggagaaaatccggcccctgaccagcctggaccatcctcagagtcctttctatgacccagagggtgggtccatcactcaagtagccagagttgtcatcgagagaatcgcacggaagggtgaacaatgcaatattgtacctgacaatgtcgatgatattgtagctgacctggctccagaagagaaagatgaagatgacacccctgaaacctgcatctactccaactggtccccatggtccgcctgcagctcctccacctgtgacaaaggcaagaggatgcgacagcgcatgctgaaagcacagctggacctcagcgtcccctgccctgacacccaggacttccagccctgcatgggccctggctgcagtgacgaagacggctccacctgcaccatgtccgagtggatcacctggtcgccctgcagcatctcctgcggcatgggcatgaggtcccgggagaggtatgtgaagcagttcccggaggacggctccgtgtgcacgctgcccactgaggaaacggagaagtgcacggtcaacgaggagtgctctcccagcagctgcctgatgaccgagtggggcgagtgggacgagtgcagcgccacctgcggcatgggcatgaagaagcggcaccgcatgatcaagatgaaccccgcagatggctccatgtgcaaagccgagacatcacaggcagagaagtgcatgatgccagagtgccacaccatcccatgcttgctgtccccatggtccgagtggagtgactgcagcgtgacctgcgggaagggcatgcgaacccgacagcggatgctcaagtctctggcagaacttggagactgcaatgaggatctggagcaggtggagaagtgcatgctccctgaatgccccattgactgtgagctcaccgagtggtcccagtggtcggaatgtaacaagtcatgtgggaaaggccacgtgattcgaacccggatgatccaaatggagcctcagtttggaggtgcaccctgcccagagactgtgcagcgaaaaaagtgccgcatccgaaaatgccttcgaaatccatccatccaaaagctacgctggagggaggcccgagagagccggcggagtgagcagctgaaggaagagtctgaaggggagcagttcccaggttgtaggatgcgcccatggacggcctggtcagaatgcaccaaactgtgcggaggtggaattcaggaacgttacatgactgtaaagaagagattcaaaagctcccagtttaccagctgcaaagacaagaaggagatcagagcatgcaatgttcatccttgttagcaagggtacgagttccccagggctgcactctagattccagagtcaccaatggctggattatttgcttgtttaagacaatttaaattgtgtacgctagttttcatttttgcagtgtggttcgcccagtagtcttgtggatgccagagacatcctttctgaatacttcttgatgggtacaggctgagtggggcgccctcacctccagccagcctcttcctgcagaggagtagtgtcagccaccttgtactaagctgaaacatgtccctctggagcttccacctggccagggaggacggagactttgacctactccacatggagaggcaaccatgtctggaagtgactatgcctgagtcccagggtgcggcaggtaggaaacattcacagatgaagacagcagattccccacattctcatctttggcctgttcaatgaaaccattgtttgcccatctcttcttagtggaactttaggtctcttttcaagtctcctcagtcatcaatagttcctggggaaaaacagagctggtagacttgaagaggagcattgatgttgggtggcttttgttctttcactgagaaattcggaatacatttgtctcacccctgatattggttcctgatgcccccccaacaaaaataaataaataaattatggctgctttatttaaatataaggtagctagtttttacacctgagataaataataagcttagagtgtatttttcccttgcttttgggggttcagaggagtatgtacaattcttctgggaagccagccttctgaactttttggtactaaatccttattggaaccaagacaaaggaagcaaaattggtctctttagagaccaatttgcctaaattttaaaatcttcctacacacatctagacgttcaagtttgcaaatcagtttttagcaagaaaacatttttgctatacaaacattttgctaagtctgcccaaagcccccccaatgcattccttcaacaaaatacaatctctgtactttaaagttattttagtcatgaaattttatatgcagagagaaaaagttaccgagacagaaaacaaatctaagggaaaggaatattatgggattaagctgagcaagcaattctggtggaaagtcaaacctgtcagtgctccacaccagggctgtggtcctcccagacatgcataggaatggccacaggtttacactgccttcccagcaattataagcacaccagattcagggagactgaccaccaagggatagtgtaaaaggacattttctcagttgggtccatcagcagtttttcttcctgcatttattgttgaaaactattgtttcatttcttcttttataggccttattactgcttaatccaaatgtgtaccattggtgagacacatacaatgctctgaatacactacgaatttgtattaaacacatcagaatatttccaaatacaacatagtatagtcctgaatatgtacttttaacacaagagagactattcaataaaaactcactgggtctttcatgtctttaagctaagtaagtgttcagaaggttcttttttatattgtcctccacctccatcattttcaataaaagatagggcttttgctcccttgttcttggagggaccattattacatctctgaactacctttgtatccaacatgttttaaatccttaaatgaattgctttctcccaaaaaaagcacaatataaagaaacacaagatttaattatttttctacttggggggaaaaaaagtcctcatgtagaagcacccacttttgcaatgttgttctaagctatctatctatctctcagcccatgataaagttccttaagctggtgattcctaatcaaggacaagccaccctagtgtctcatgtttgtatttggtcccagttgggtacattttaaaatcctgattttggagacttaaaaccaggttaatggctaagaatgggtaacatgactcttgttggattgttattttttgtttgcaatggggaatttataagaagcatcaagtctctttcttaccaaagtcttgttaggtggtttatagttcttttggctaacaaatcattttggaaataaagattttttactacaaaaatgaaatttgtttggacttccacttgagacagtaaagagagtattagacacccagtaaaaactgccatataaagaagttgtaattgtttgttgtgtatgtatttttttcaatgccaaaccagctgtgatccaatttacatccacattttaggtccaacagcaagaagttcagagagagatttcccaaccagacattgggtcactcactggtcaccttgccagtgcattttattagaagggaatctgttgtagcaaatgggaataaacctgggtttctatagacccagaactgaaaaaataaacatcgtgctgtttttaatttgaac

SEQ ID NO: 81909 - DNA, 4863 bp, Homo sapiens
ggcacaaagttgggggccgcgaagatgaggctgtccccggcgcccctgaagctgagccggactccggcactgctggccctggcgctgcccctggccgcggcgctggccttctccgacgagaccctggacaaagtgcccaagtcagagggctactgtagccgtatcctgcgcgcccagggcacgcggcgcgagggctacaccgagttcagcctccgcgtggagggcgaccccgacttctacaagccgggaaccagctaccgcgtaacactttcagctgctcctccctcctacttcagaggattcacattaattgccctcagagagaacagagagggtgataaggaagaagaccatgctgggaccttccagatcatagacgaagaagaaactcagtttatgagcaattgccctgttgcagtcactgaaagcactccacggaggaggacccggatccaggtgttttggatagcaccaccagcgggaacaggctgcgtgattctgaaggccagcatcgtacaaaaacgcattatttattttcaagatgagggctctctgaccaagaaactttgtgaacaagattccacatttgatggggtgactgacaaacccatcttagactgctgtgcctgcggaactgccaagtacagactcacattttatgggaattggtccgagaagacacacccaaaggattaccctcgtcgggccaaccactggtctgcgatcatcggaggatcccactccaagaattatgtactgtgggaatatggaggatatgccagcgaaggcgtcaaacaagttgcagaattgggctcacccgtgaaaatggaggaagaaattcgacaacagagtgatgaggtcctcaccgtcatcaaagccaaagcccaatggccagcctggcagcctctcaacgtgagagcagcaccttcagctgaattttccgtggacagaacgcgccatttaatgtccttcctgaccatgatgggccctagtcccgactggaacgtaggcttatctgcagaagatctgtgcaccaaggaatgtggctgggtccagaaggtggtgcaagacctgattccctgggacgctggcaccgacagcggggtgacctatgagtcacccaacaaacccaccattccccaggagaaaatccggcccctgaccagcctggaccatcctcagagtcctttctatgacccagagggtgggtccatcactcaagtagccagagttgtcatcgagagaatcgcacggaagggtgaacaatgcaatattgtacctgacaatgtcgatgatattgtagctgacctggctccagaagagaaagatgaagatgacacccctgaaacctgcatctactccaactggtccccatggtccgcctgcagctcctccacctgtgacaaaggcaagaggatgcgacagcgcatgctgaaagcacagctggacctcagcgtcccctgccctgacacccaggacttccagccctgcatgggccctggctgcagtgacgaagacggctccacctgcaccatgtccgagtggatcacctggtcgccctgcagcatctcctgcggcatgggcatgaggtcccgggagaggtatgtgaagcagttcccggaggacggctccgtgtgcacgctgcccactgaggaaacggagaagtgcacggtcaacgaggagtgctctcccagcagctgcctgatgaccgagtggggcgagtgggacgagtgcagcgccacctgcggcatgggcatgaagaagcggcaccgcatgatcaagatgaaccccgcagatggctccatgtgcaaagccgagacatcacaggcagagaagtgcatgatgccagagtgccacaccatcccatgcttgctgtccccatggtccgagtggagtgactgcagcgtgacctgcgggaagggcatgcgaacccgacagcggatgctcaagtctctggcagaacttggagactgcaatgaggatctggagcaggtggagaagtgcatgctccctgaatgccccattgactgtgagctcaccgagtggtcccagtggtcggaatgtaacaagtcatgtgggaaaggccacgtgattcgaacccggatgatccaaatggagcctcagtttggaggtgcaccctgcccagagactgtgcagcgaaaaaagtgccgcatccgaaaatgccttcgaaatccatccatccaaaagctacgctggagggaggcccgagagagccggcggagtgagcagctgaaggaagagtctgaaggggagcagttcccaggttgtaggatgcgcccatggacggcctggtcagaatgcaccaaactgtgcggaggtggaattcaggaacgttacatgactgtaaagaagagattcaaaagctcccagtttaccagctgcaaagacaagaaggagatcagagcatgcaatgttcatccttgttagcaagggtacgagttccccagggctgcactctagattccagagtcaccaatggctggattatttgcttgtttaagacaatttaaattgtgtacgctagttttcatttttgcagtgtggttcgcccagtagtcttgtggatgccagagacatcctttctgaatacttcttgatgggtacaggctgagtggggcgccctcacctccagccagcctcttcctgcagaggagtagtgtcagccaccttgtactaagctgaaacatgtccctctggagcttccacctggccagggaggacggagactttgacctactccacatggagaggcaaccatgtctggaagtgactatgcctgagtcccagggtgcggcaggtaggaaacattcacagatgaagacagcagattccccacattctcatctttggcctgttcaatgaaaccattgtttgcccatctcttcttagtggaactttaggtctcttttcaagtctcctcagtcatcaatagttcctggggaaaaacagagctggtagacttgaagaggagcattgatgttgggtggcttttgttctttcactgagaaattcggaatacatttgtctcacccctgatattggttcctgatgcccccccaacaaaaataaataaataaattatggctgctttatttaaatataaggtagctagtttttacacctgagataaataataagcttagagtgtatttttcccttgcttttgggggttcagaggagtatgtacaattcttctgggaagccagccttctgaactttttggtactaaatccttattggaaccaagacaaaggaagcaaaattggtctctttagagaccaatttgcctaaattttaaaatcttcctacacacatctagacgttcaagtttgcaaatcagtttttagcaagaaaacatttttgctatacaaacattttgctaagtctgcccaaagcccccccaatgcattccttcaacaaaatacaatctctgtactttaaagttattttagtcatgaaattttatatgcagagagaaaaagttaccgagacagaaaacaaatctaagggaaaggaatattatgggattaagctgagcaagcaattctggtggaaagtcaaacctgtcagtgctccacaccagggctgtggtcctcccagacatgcataggaatggccacaggtttacactgccttcccagcaattataagcacaccagattcagggagactgaccaccaagggatagtgtaaaaggacattttctcagttgggtccatcagcagtttttcttcctgcatttattgttgaaaactattgtttcatttcttcttttataggccttattactgcttaatccaaatgtgtaccattggtgagacacatacaatgctctgaatacactacgaatttgtattaaacacatcagaatatttccaaatacaacatagtatagtcctgaatatgtacttttaacacaagagagactattcaataaaaactcactgggtctttcatgtctttaagctaagtaagtgttcagaaggttcttttttatattgtcctccacctccatcattttcaataaaagatagggcttttgctcccttgttcttggagggaccattattacatctctgaactacctttgtatccaacatgttttaaatccttaaatgaattgctttctcccaaaaaaagcacaatataaagaaacacaagatttaattatttttctacttggggggaaaaaaagtcctcatgtagaagcacccacttttgcaatgttgttctaagctatctatctatctctcagcccatgataaagttccttaagctggtgattcctaatcaaggacaagccaccctagtgtctcatgtttgtatttggtcccagttgggtacattttaaaatcctgattttggagacttaaaaccaggttaatggctaagaatgggtaacatgactcttgttggattgttattttttgtttgcaatggggaatttataagaagcatcaagtctctttcttaccaaagtcttgttaggtggtttatagttcttttggctaacaaatcattttggaaataaagattttttactacaaaaatgaaatttgtttggacttccacttgagacagtaaagagagtattagacacccagtaaaaactgccatataaagaagttgtaattgtttgttgtgtatgtatttttttcaatgccaaaccagctgtgatccaatttacatccacattttaggtccaacagcaagaagttcagagagagatttcccaaccagacattgggtcactcactggtcaccttgccagtgcattttattagaagggaatctgttgtagcaaatgggaataaacctgggtttctatagacccagaactga

SEQ ID NO: 81910 - DNA, 4772 bp, Homo sapiens
  misc_feature (4772)..(4772): n is a, c, g, or t
ggcacaaagttgggggccgcgaagatgaggctgtccccggcgcccctgaagctgagccggactccggcactgctggccctggcgctgcccctggccgcggcgctggccttctccgacgagaccctggacaaagtgcccaagtcagagggctactgtagccgtatcctgcgcgcccagggcacgcggcgcgagggctacaccgagttcagcctccgcgtggagggcgaccccgacttctacaagccgggaaccagctaccgcgtaacactttcagctgctcctccctcctacttcagaggattcacattaattgccctcagagagaacagagagggtgataaggaagaagaccatgctgggaccttccagatcatagacgaagaagaaactcagtttatgagcaattgccctgttgcagtcactgaaagcactccacggaggaggacccggatccaggtgttttggatagcaccaccagcgggaacaggctgcgtgattctgaaggccagcatcgtacaaaaacgcattatttattttcaagatgagggctctctgaccaagaaactttgtgaacaagattccacatttgatggggtgactgacaaacccatcttagactgctgtgcctgcggaactgccaagtacagactcacattttatgggaattggtccgagaagacacacccaaaggattaccctcgtcgggccaaccactggtctgcgatcatcggaggatcccactccaagaattatgtactgtgggaatatggaggatatgccagcgaaggcgtcaaacaagttgcagaattgggctcacccgtgaaaatggaggaagaaattcgacaacagagtgatgaggtcctcaccgtcatcaaagccaaagcccaatggccagcctggcagcctctcaacgtgagagcagcaccttcagctgaattttccgtggacagaacgcgccatttaatgtccttcctgaccatgatgggccctagtcccgactggaacgtaggcttatctgcagaagatctgtgcaccaaggaatgtggctgggtccagaaggtggtgcaagacctgattccctgggacgctggcaccgacagcggggtgacctatgagtcacccaacaaacccaccattccccaggagaaaatccggcccctgaccagcctggaccatcctcagagtcctttctatgacccagagggtgggtccatcactcaagtagccagagttgtcatcgagagaatcgcacggaagggtgaacaatgcaatattgtacctgacaatgtcgatgatattgtagctgacctggctccagaagagaaagatgaagatgacacccctgaaacctgcatctactccaactggtccccatggtccgcctgcagctcctccacctgtgacaaaggcaagaggatgcgacagcgcatgctgaaagcacagctggacctcagcgtcccctgccctgacacccaggacttccagccctgcatgggccctggctgcagtgacgaagacggctccacctgcaccatgtccgagtggatcacctggtcgccctgcagcatctcctgcggcatgggcatgaggtcccgggagaggtatgtgaagcagttcccggaggacggctccgtgtgcacgctgcccactgaggaaacggagaagtgcacggtcaacgaggagtgctctcccagcagctgcctgatgaccgagtggggcgagtgggacgagtgcagcgccacctgcggcatgggcatgaagaagcggcaccgcatgatcaagatgaaccccgcagatggctccatgtgcaaagccgagacatcacaggcagagaagtgcatgatgccagagtgccacaccatcccatgcttgctgtccccatggtccgagtggagtgactgcagcgtgacctgcgggaagggcatgcgaacccgacagcggatgctcaagtctctggcagaacttggagactgcaatgaggatctggagcaggtggagaagtgcatgctccctgaatgccccattgactgtgagctcaccgagtggtcccagtggtcggaatgtaacaagtcatgtgggaaaggccacgtgattcgaacccggatgatccaaatggagcctcagtttggaggtgcaccctgcccagagactgtgcagcgaaaaaagtgccgcatccgaaaatgccttcgaaatccatccatccaaaagctacgctggagggaggcccgagagagccggcggagtgagcagctgaaggaagagtctgaaggggagcagttcccaggttgtaggatgcgcccatggacggcctggtcagaatgcaccaaactgtgcggaggtggaattcaggaacgttacatgactgtaaagaagagattcaaaagctcccagtttaccagctgcaaagacaagaaggagatcagagcatgcaatgttcatccttgttagcaagggtacgagttccccagggctgcactctagattccagagtcaccaatggctggattatttgcttgtttaagacaatttaaattgtgtacgctagttttcatttttgcagtgtggttcgcccagtagtcttgtggatgccagagacatcctttctgaatacttcttgatgggtacaggctgagtggggcgccctcacctccagccagcctcttcctgcagaggagtagtgtcagccaccttgtactaagctgaaacatgtccctctggagcttccacctggccagggaggacggagactttgacctactccacatggagaggcaaccatgtctggaagtgactatgcctgagtcccagggtgcggcaggtaggaaacattcacagatgaagacagcagattccccacattctcatctttggcctgttcaatgaaaccattgtttgcccatctcttcttagtggaactttaggtctcttttcaagtctcctcagtcatcaatagttcctggggaaaaacagagctggtagacttgaagaggagcattgatgttgggtggcttttgttctttcactgagaaattcggaatacatttgtctcacccctgatattggttcctgatgcccccccaacaaaaataaataaataaattatggctgctttatttaaatataaggtagctagtttttacacctgagataaataataagcttagagtgtatttttcccttgcttttgggggttcagaggagtatgtacaattcttctgggaagccagccttctgaactttttggtactaaatccttattggaaccaagacaaaggaagcaaaattggtctctttagagaccaatttgcctaaattttaaaatcttcctacacacatctagacgttcaagtttgcaaatcagtttttagcaagaaaacatttttgctatacaaacattttgctaagtctgcccaaagcccccccaatgcattccttcaacaaaatacaatctctgtactttaaagttattttagtcatgaaattttatatgcagagagaaaaagttaccgagacagaaaacaaatctaagggaaaggaatattatgggattaagctgagcaagcaattctggtggaaagtcaaacctgtcagtgctccacaccagggctgtggtcctcccagacatgcataggaatggccacaggtttacactgccttcccagcaattataagcacaccagattcagggagactgaccaccaagggatagtgtaaaaggacattttctcagttgggtccatcagcagtttttcttcctgcatttattgttgaaaactattgtttcatttcttcttttataggccttattactgcttaatccaaatgtgtaccattggtgagacacatacaatgctctgaatacactacgaatttgtattaaacacatcagaatatttccaaatacaacatagtatagtcctgaatatgtacttttaacacaagagagactattcaataaaaactcactgggtctttcatgtctttaagctaagtaagtgttcagaaggttcttttttatattgtcctccacctccatcattttcaataaaagatagggcttttgctcccttgttcttggagggaccattattacatctctgaactacctttgtatccaacatgttttaaatccttaaatgaattgctttctcccaaaaaaagcacaatataaagaaacacaagatttaattatttttctacttggggggaaaaaaagtcctcatgtagaagcacccacttttgcaatgttgttctaagctatctatctatctctcagcccatgataaagttccttaagctggtgattcctaatcaaggacaagccaccctagtgtctcatgtttgtatttggtcccagttgggtacattttaaaatcctgattttggagacttaaaaccaggttaatggctaagaatgggtaacatgactcttgttggattgttattttttgtttgcaatggggaatttataagaagcatcaagtctctttcttaccaaagtcttgttaggtggtttatagttcttttggctaacaaatcattttggaaataaagattttttactacaaaaaaaaaacaacagaaaacaaacaaaacagcagggggcgtagccggcgctctatagagaaagatatctctcgctctcaaagggggggggcgccccacaaagcgctataagcgcagcagaatcacccgcaagagctttatctccgtggtggcgacacacaaagggggggggcccccctatattagagggagacgacctcgagaan

SEQ ID NO: 81911 - DNA, 2925 bp, Homo sapiens
tatatgtggaccgagcctcgggacggtcaacgaggagtgctctcccagcagctgcctgatgaccgagtggggcgagtgggacgagtgcagcgccacctgcggcatgggcatgaagaagcggcaccgcatgatcaagatgaaccccgcagatggctccatgtgcaaagccgagacatcacaggcagagaagtgcatgatgccagagtgccacaccatcccatgcttgctgtccccatggtccgagtggagtgactgcagcgtgacctgcgggaagggcatgcgaacccgacagcggatgctcaagtctctggcagaacttggagactgcaatgaggatctggagcaggtggagaagtgcatgctccctgaatgccccattgactgtgagctcaccgagtggtcccagtggtcggaatgtaacaagtcatgtgggaaaggccacgtgattcgaacccggatgatccaaatggagcctcagtttggaggtgcaccctgcccagagactgtgcagcgaaaaaagtgccgcatccgaaaatgccttcgaaatccatccatccaaaagctacgctggagggaggcccgagagagccggcggagtgagcagctgaaggaagagtctgaaggggagcagttcccaggttgtaggatgcgcccatggacggcctggtcagaatgcaccaaactgtgcggaggtggaattcaggaacgttacatgactgtaaagaagagattcaaaagctcccagtttaccagctgcaaagacaagaaggagatcagagcatgcaatgttcatccttgttagcaagggtacgagttccccagggctgcactctagattccagagtcaccaatggctggattatttgcttgtttaagacaatttaaattgtgtacgctagttttcatttttgcagtgtggttcgcccagtagtcttgtggatgccagagacatcctttctgaatacttcttgatgggtacaggctgagtggggcgccctcacctccagccagcctcttcctgcagaggagtagtgtcagccaccttgtactaagctgaaacatgtccctctggagcttccacctggccagggaggacggagactttgacctactccacatggagaggcaaccatgtctggaagtgactatgcctgagtcccagggtgcggcaggtaggaaacattcacagatgaagacagcagattccccacattctcatctttggcctgttcaatgaaaccattgtttgcccatctcttcttagtggaactttaggtctcttttcaagtctcctcagtcatcaatagttcctggggaaaaacagagctggtagacttgaagaggagcattgatgttgggtggcttttgttctttcactgagaaattcggaatacatttgtctcacccctgatattggttcctgatgcccccccaacaaaaataaataaataaattatggctgctttatttaaatataaggtagctagtttttacacctgagataaataataagcttagagtgtatttttcccttgcttttgggggttcagaggagtatgtacaattcttctgggaagccagccttctgaactttttggtactaaatccttattggaaccaagacaaaggaagcaaaattggtctctttagagaccaatttgcctaaattttaaaatcttcctacacacatctagacgttcaagtttgcaaatcagtttttagcaagaaaacatttttgctatacaaacattttgctaagtctgcccaaagcccccccaatgcattccttcaacaaaatacaatctctgtactttaaagttattttagtcatgaaattttatatgcagagagaaaaagttaccgagacagaaaacaaatctaagggaaaggaatattatgggattaagctgagcaagcaattctggtggaaagtcaaacctgtcagtgctccacaccagggctgtggtcctcccagacatgcataggaatggccacaggtttacactgccttcccagcaattataagcacaccagattcagggagactgaccaccaagggatagtgtaaaaggacattttctcagttgggtccatcagcagtttttcttcctgcatttattgttgaaaactattgtttcatttcttcttttataggccttattactgcttaatccaaatgtgtaccattggtgagacacatacaatgctctgaatacactacgaatttgtattaaacacatcagaatatttccaaatacaacatagtatagtcctgaatatgtacttttaacacaagagagactattcaataaaaactcactgggtctttcatgtctttaagctaagtaagtgttcagaaggttcttttttatattgtcctccacctccatcattttcaataaaagatagggcttttgctcccttgttcttggagggaccattattacatctctgaactacctttgtatccaacatgttttaaatccttaaatgaattgctttctcccaaaaaaagcacaatataaagaaacacaagatttaattatttttctacttggggggaaaaaaagtcctcatgtagaagcacccacttttgcaatgttgttctaagctatctatctatctctcagcccatgataaagttccttaagctggtgattcctaatcaaggacaagccaccctagtgtctcatgtttgtatttggtcccagttgggtacattttaaaatcctgattttggagacttaaaaccaggttaatggctaagaatgggtaacatgactcttgttggattgttattttttgtttgcaatggggaatttataagaagcatcaagtctctttcttaccaaagtcttgttaggtggtttatagttcttttggctaacaaatcattttggaaataaagattttttactacaaaaa

SEQ ID NO: 81912 - DNA, 4393 bp, Homo sapiens
ggcacaaagttgggggccgcgaagatgaggctgtccccggcgcccctgaagctgagccggactccggcactgctggccctggcgctgcccctggccgcggcgctggccttctccgacgagaccctggacaaagtgcccaagtcagagggctactgtagccgtatcctgcgcgcccagggcacgcggcgcgagggctacaccgagttcagcctccgcgtggagggcgaccccgacttctacaagccgggaaccagctaccgcgtaacactttcagctgctcctccctcctacttcagaggattcacattaattgccctcagagagaacagagagggtgataaggaagaagaccatgctgggaccttccagatcatagacgaagaagaaactcagtttatgagcaattgccctgttgcagtcactgaaagcactccacggaggaggacccggatccaggtgttttggatagcaccaccagcgggaacaggctgcgtgattctgaaggccagcatcgtacaaaaacgcattatttattttcaagatgagggctctctgaccaagaaactttgtgaacaagattccacatttgatggggtgactgacaaacccatcttagactgctgtgcctgcggaactgccaagtacagactcacattttatgggaattggtccgagaagacacacccaaaggattaccctcgtcgggccaaccactggtctgcgatcatcggaggatcccactccaagaattatgtactgtgggaatatggaggatatgccagcgaaggcgtcaaacaagttgcagaattgggctcacccgtgaaaatggaggaagaaattcgacaacagagtgatgaggtcctcaccgtcatcaaagccaaagcccaatggccagcctggcagcctctcaacgtgagagcagcaccttcagctgaattttccgtggacagaacgcgccatttaatgtccttcctgaccatgatgggccctagtcccgactggaacgtaggcttatctgcagaagatctgtgcaccaaggaatgtggctgggtccagaaggtggtgcaagacctgattccctgggacgctggcaccgacagcggggtgacctatgagtcacccaacaaacccaccattccccaggagaaaatccggcccctgaccagcctggaccatcctcagagtcctttctatgacccagagggtgggtccatcactcaagtagccagagttgtcatcgagagaatcgcacggaagggtgaacaatgcaatattgtacctgacaatgtcgatgatattgtagctgacctggctccagaagagaaagatgaagatgacacccctgaaacctgcatctactccaactggtccccatggtccgcctgcagctcctccacctgtgacaaaggcaagaggatgcgacagcgcatgctgaaagcacagctggacctcagcgtcccctgccctgacacccaggacttccagccctgcatgggccctggctgcagtgacgaagacggctccacctgcaccatgtccgagtggatcacctggtcgccctgcagcatctcctgcggcatgggcatgaggtcccgggagaggtatgtgaagcagttcccggaggacggctccgtgtgcacgctgcccactgaggaaacggagaagtgcacggtcaacgaggagtgctctcccagcagctgcctgatgaccgagtggggcgagtgggacgagtgcagcgccacctgcggcatgggcatgaagaagcggcaccgcatgatcaagatgaaccccgcagatggctccatgtgcaaagccgagacatcacaggcagagaagtgcatgatgccagagtgccacaccatcccatgcttgctgtccccatggtccgagtggagtgactgcagcgtgacctgcgggaagggcatgcgaacccgacagcggatgctcaagtctctggcagaacttggagactgcaatgaggatctggagcaggtggagaagtgcatgctccctgaatgccccattgactgtgagctcaccgagtggtcccagtggtcggaatgtaacaagtcatgtgggaaaggccacgtgattcgaacccggatgatccaaatggagcctcagtttggaggtgcaccctgcccagagactgtgcagcgaaaaaagtgccgcatccgaaaatgccttcgaaatccatccatccaaaagctacgctggagggaggcccgagagagccggcggagtgagcagctgaaggaagagtctgaaggggagcagttcccaggttgtaggatgcgcccatggacggcctggtcagaatgcaccaaactgtgcggaggtggaattcaggaacgttacatgactgtaaagaagagattcaaaagctcccagtttaccagctgcaaagacaagaaggagatcagagcatgcaatgttcatccttgttagcaagggtacgagttccccagggctgcactctagattccagagtcaccaatggctggattatttgcttgtttaagacaatttaaattgtgtacgctagttttcatttttgcagtgtggttcgcccagtagtcttgtggatgccagagacatcctttctgaatacttcttgatgggtacaggctgagtggggcgccctcacctccagccagcctcttcctgcagaggagtagtgtcagccaccttgtactaagctgaaacatgtccctctggagcttccacctggccagggaggacggagactttgacctactccacatggagaggcaaccatgtctggaagtgactatgcctgagtcccagggtgcggcaggtaggaaacattcacagatgaagacagcagattccccacattctcatctttggcctgttcaatgaaaccattgtttgcccatctcttcttagtggaactttaggtctcttttcaagtctcctcagtcatcaatagttcctggggaaaaacagagctggtagacttgaagaggagcattgatgttgggtggcttttgttctttcactgagaaattcggaatacatttgtctcacccctgatattggttcctgatgcccccccaacaaaaataaataaataaattatggctgctttatttaaatataaggtagctagtttttacacctgagataaataataagcttagagtgtatttttcccttgcttttgggggttcagaggagtatgtacaattcttctgggaagccagccttctgaactttttggtactaaatccttattggaaccaagacaaaggaagcaaaattggtctctttagagaccaatttgcctaaattttaaaatcttcctacacacatctagacgttcaagtttgcaaatcagtttttagcaagaaaacatttttgctatacaaacattttgctaagtctgcccaaagcccccccaatgcattccttcaacaaaatacaatctctgtactttaaagttattttagtcatgaaattttatatgcagagagaaaaagttaccgagacagaaaacaaatctaagggaaaggaatattatgggattaagctgagcaagcaattctggtggaaagtcaaacctgtcagtgctccacaccagggctgtggtcctcccagacatgcataggaatggccacaggtttacactgccttcccagcaattataagcacaccagattcagggagactgaccaccaagggatagtgtaaaaggacattttctcagttgggtccatcagcagtttttcttcctgcatttattgttgaaaactattgtttcatttcttcttttataggccttattactgcttaatccaaatgtgtaccattggtgagacacatacaatgctctgaatacactacgaatttgtatttggtcccagttgggtacattttaaaatcctgattttggagacttaaaaccaggttaatggctaagaatgggtaacatgactcttgttggattgttattttttgtttgcaatggggaatttataagaagcatcaagtctctttcttaccaaagtcttgttaggtggtttatagttcttttggctaacaaatcattttggaaataaagattttttactacaaaaatgaaatttgtttggacttccacttgagacagtaaagagagtattagacacccagtaaaaactgccatataaagaagttgtaattgtttgttgtgtatgtatttttttcaatgccaaaccagctgtgatccaatttacatccacattttaggtccaacagcaagaagttcagagagagatttcccaaccagacattgggtcactcactggtcaccttgccagtgcattttattagaagggaatctgttgtagcaaatgggaataaacctgggtttctatagacccagaactga

SEQ ID NO: 81913 - DNA, 3884 bp, Homo sapiens
ggcacaaagttgggggccgcgaagatgaggctgtccccggcgcccctgaagctgagccggactccggcactgctggccctggcgctgcccctggccgcggcgctggccttctccgacgagaccctggacaaagtgcccaagtcagagggctactgtagccgtatcctgcgcgcccagggcacgcggcgcgagggctacaccgagttcagcctccgcgtggagggcgaccccgacttctacaagccgggaaccagctaccgcgtaacactttcagctgctcctccctcctacttcagaggattcacattaattgccctcagagagaacagagagggtgataaggaagaagaccatgctgggaccttccagatcatagacgaagaagaaactcagtttatgagcaattgccctgttgcagtcactgaaagcactccacggaggaggacccggatccaggtgttttggatagcaccaccagcgggaacaggctgcgtgattctgaaggccagcatcgtacaaaaacgcattatttattttcaagatgagggctctctgaccaagaaactttgtgaacaagattccacatttgatggggtgactgacaaacccatcttagactgctgtgcctgcggaactgccaagtacagactcacattttatgggaattggtccgagaagacacacccaaaggattaccctcgtcgggccaaccactggtctgcgatcatcggaggatcccactccaagaattatgtactgtgggaatatggaggatatgccagcgaaggcgtcaaacaagttgcagaattgggctcacccgtgaaaatggaggaagaaattcgacaacagagtgatgaggtcctcaccgtcatcaaagccaaagcccaatggccagcctggcagcctctcaacgtgagagcagcaccttcagctgaattttccgtggacagaacgcgccatttaatgtccttcctgaccatgatgggccctagtcccgactggaacgtaggcttatctgcagaagatctgtgcaccaaggaatgtggctgggtccagaaggtggtgcaagacctgattccctgggacgctggcaccgacagcggggtgacctatgagtcacccaacaaacccaccattccccaggagaaaatccggcccctgaccagcctggaccatcctcagagtcctttctatgacccagagggtgggtccatcactcaagtagccagagttgtcatcgagagaatcgcacggaagggtgaacaatgcaatattgtacctgacaatgtcgatgatattgtagctgacctggctccagaagagaaagatgaagatgacacccctgaaacctgcatctactccaactggtccccatggtccgcctgcagctcctccacctgtgacaaaggcaagaggatgcgacagcgcatgctgaaagcacagctggacctcagcgtcccctgccctgacacccaggacttccagccctgcatgggccctggctgcagtgacgaagacggctccacctgcaccatgtccgagtggatcacctggtcgccctgcagcatctcctgcggcatgggcatgaggtcccgggagaggtatgtgaagcagttcccggaggacggctccgtgtgcacgctgcccactgaggaaacggagaagtgcacggtcaacgaggagtgctctcccagcagctgcctgatgaccgagtggggcgagtgggacgagtgcagcgccacctgcggcatgggcatgaagaagcggcaccgcatgatcaagatgaaccccgcagatggctccatgtgcaaagccgagacatcacaggcagagaagtgcatgatgccagagtgccacaccatcccatgcttgctgtccccatggtccgagtggagtgactgcagcgtgacctgcgggaagggcatgcgaacccgacagcggatgctcaagtctctggcagaacttggagactgcaatgaggatctggagcaggtggagaagtgcatgctccctgaatgccccattgactgtgagctcaccgagtggtcccagtggtcggaatgtaacaagtcatgtgggaaaggccacgtgattcgaacccggatgatccaaatggagcctcagtttggaggtgcaccctgcccagagactgtgcagcgaaaaaagtgccgcatccgaaaatgccttcgaaatccatccatccaaaagctacgctggagggaggcccgagagagccggcggagtgagcagctgaaggaagagtctgaaggggagcagttcccaggttgtaggatgcgcccatggacggcctggtcagaatgcaccaaactgtgcggaggtggaattcaggaacgttacatgactgtaaagaagagattcaaaagctcccagtttaccagctgcaaagacaagaaggagatcagagcatgcaatgttcatccttgttagcaagggtacgagttccccagggctgcactctagattccagagtcaccaatggctggattatttgcttgtttaagacaatttaaattgtgtacgctagttttcatttttgcagtgtggttcgcccagtagtcttgtggatgccagagacatcctttctgaatacttcttgatgggtacaggctgagtggggcgccctcacctccagccagcctcttcctgcagaggagtagtgtcagccaccttgtactaagctgaaacatgtccctctggagcttccacctggccagggaggacggagactttgacctactccacatggagaggcaaccatgtctggaagtgactatgcctgagtcccagggtgcggcaggtaggaaacattcacagatgaagacagcagattccccacattctcatctttggcctgttcaatgaaaccattgtttgcccatctcttcttagtggaactttaggtctcttttcaagtctcctcagtcatcaatagttcctggggaaaaacagagctggtagacttgaagaggagcattgatgttgggtggcttttgttctttcactgagaaattcggaatacatttgtctcacccctgatattggttcctgatgcccccccaacaaaaataaataaataaattatggctgctttatttaaatataaggtagctagtttttacacctgagataaataataagcttagagtgtatttttcccttgcttttgggggttcagaggagtatgtacaattcttctgggaagccagccttctgaactttttggtactaaatccttattggaaccaagacaaaggaagcaaaattggtctctttagagaccaatttgcctaaattttaaaatcttcctacacacatctagacgttcaagtttgcaaatcagtttttagcaagaaaacatttttgctatacaaacattttgctaagtctgcccaaagcccccccaatgcattccttcaacaaaatacaatctctgtactttaaagttattttagtcatgaaattttatatgcagagagaaaaagttaccgagacagaaaacaaatctaagggaaaggaatattatgggattaagctgagcaagcaattctggtggaaagtcaaacctgtcagtgctccacaccagggctgtggtcctcccagacatgcataggaatggccacaggtttacactgccttcccagcaattataagcacaccagattcagggagactgaccaccaagggatgggaaagggcatgcccgtgggccctagagatgtctcggatatgccgaacatggccctccattaaggcgatagggaacagatgcccgggggacacaggcggaatcacatgtttgccacaatcccgaaagaggggggtgtcccgcaagggcgagcagagagagaggtccgcagtggatc

SEQ ID NO: 81914 - DNA, 1317 bp, Homo sapiens
  misc_feature (33)..(33): n is a, c, g, or t
gagggctgccgcggcgttctagaggatcccatnggtccttagagaccaatttgcctaaattttaaaatcttcctacacacatctagacgttcaagtttgcaaatcagtttttagcaagaaaacatttttgctatacaaacattttgctaagtctgcccaaagcccccccaatgcattccttcaacaaaatacaatctctgtactttaaagttattttagtcatgaaattttatatgcagagagaaaaagttaccgagacagaaaacaaatctaagggaaaggaatattatgggattaagctgagcaagcaattctggtggaaagtcaaacctgtcagtgctccacaccagggctgtggtcctcccagacatgcataggaatggccacaggtttacactgccttcccagcaattataagcacaccagattcagggagactgaccaccaagggatagtgtaaaaggacattttctcagttgggtccatcagcagtttttcttcctgcatttattgttgaaaactattgtttcatttcttcttttataggccttattactgcttaatccaaatgtgtaccattggtgagacacatacaatgctctgaatacactacgaatttgtattaaacacatcagaatatttccaaatacaacatagtatagtcctgaatatgtacttttaacacaagagagactattcaataaaaactcactgggtctttcatgtctttaagctaagtaagtgttcagaaggttcttttttatattgtcctccacctccatcattttcaataaaagatagggcttttgctcccttgttcttggagggaccattattacatctctgaactacctttgtatccaacatgttttaaatccttaaatgaattgctttctcccaaaaaaagcacaatataaagaaacacaagatttaattatttttctacttggggggaaaaaaagtcctcatgtagaagcacccacttttgcaatgttgttctaagctatctatctatctctcagcccatgataaagttccttaagctggtgattcctaatcaaggacaagccaccctagtgtctcatgtttgtatttggtcccagttgggtacattttaaaatcctgattttggagacttaaaaccaggttaatggctaagaatgggtaacatgactcttgttggattgttattttttgtttgcaatggggaatttataagaagcatcaagtctctttcttaccaaagtcttgttaggtggtttatagttcttttggctaacaaatcattttggaaataaagattttttactacaaaaa

SEQ ID NO: 81915 - DNA, 1171 bp, Homo sapiens
tgttgaaggaatgcatgggggggcttgggcagacttagcaaaatacaatctctgtactttaaagttattttagtcatgaaattttatatgcagagagaaaaagttaccgagacagaaaacaaatctaagggaaaggaatattatgggattaagctgagcaagcaattctggtggaaagtcaaacctgtcagtgctccacaccagggctgtggtcctcccagacatgcataggaatggccacaggtttacactgccttcccagcaattataagcacaccagattcagggagactgaccaccaagggatagtgtaaaaggacattttctcagttgggtccatcagcagtttttcttcctgcatttattgttgaaaactattgtttcatttcttcttttataggccttattactgcttaatccaaatgtgtaccattggtgagacacatacaatgctctgaatacactacgaatttgtattaaacacatcagaatatttccaaatacaacatagtatagtcctgaatatgtacttttaacacaagagagactattcaataaaaactcactgggtctttcatgtctttaagctaagtaagtgttcagaaggttcttttttatattgtcctccacctccatcattttcaataaaagatagggcttttgctcccttgttcttggagggaccattattacatctctgaactacctttgtatccaacatgttttaaatccttaaatgaattgctttctcccaaaaaaagcacaatataaagaaacacaagatttaattatttttctacttggggggaaaaaaagtcctcatgtagaagcacccacttttgcaatgttgttctaagctatctatctatctctcagcccatgataaagttccttaagctggtgattcctaatcaaggacaagccaccctagtgtctcatgtttgtatttggtcccagttgggtacattttaaaatcctgattttggagacttaaaaccaggttaatggctaagaatgggtaacatgactcttgttggattgttattttttgtttgcaatggggaatttataagaagcatcaagtctctttcttaccaaagtcttgttaggtggtttatagttcttttggctaacaaatcattttggaaataaagattttttactacaaaaa

SEQ ID NO: 81916 - DNA, 498 bp, Homo sapiens
gtccctccaagaacaagggagcaaaagccctatctttgtatccaacatgttttaaatccttaaatgaattgctttctcccaaaaaaagcacaatataaagaaacacaagatttaattatttttctacttggggggaaaaaaagtcctcatgtagaagcacccacttttgcaatgttgttctaagctatctatctatctctcagcccatgataaagttccttaagctggtgattcctaatcaaggacaagccaccctagtgtctcatgtttgtatttggtcccagttgggtacattttaaaatcctgattttggagacttaaaaccaggttaatggctaagaatgggtaacatgactcttgttggattgttattttttgtttgcaatggggaatttataagaagcatcaagtctctttcttaccaaagtcttgttaggtggtttatagttcttttggctaacaaatcattttggaaataaagattttttactacaaaaa

SEQ ID NO: 81917 - DNA, 4571 bp, Homo sapiens
ggcacaaagttgggggccgcgaagatgaggctgtccccggcgcccctgaagctgagccggactccggcactgctggccctggcgctgcccctggccgcggcgctggccttctccgacgagaccctggacaaagtgcccaagtcagagggctactgtagccgtatcctgcgcgcccagggcacgcggcgcgagggctacaccgagttcagcctccgcgtggagggcgaccccgacttctacaagccgggaaccagctaccgcgtaacactttcagctgctcctccctcctacttcagaggattcacattaattgccctcagagagaacagagagggtgataaggaagaagaccatgctgggaccttccagatcatagacgaagaagaaactcagtttatgagcaattgccctgttgcagtcactgaaagcactccacggaggaggacccggatccaggtgttttggatagcaccaccagcgggaacaggctgcgtgattctgaaggccagcatcgtacaaaaacgcattatttattttcaagatgagggctctctgaccaagaaactttgtgaacaagattccacatttgatggggtgactgacaaacccatcttagactgctgtgcctgcggaactgccaagtacagactcacattttatgggaattggtccgagaagacacacccaaaggattaccctcgtcgggccaaccactggtctgcgatcatcggaggatcccactccaagaattatgtactgtgggaatatggaggatatgccagcgaaggcgtcaaacaagttgcagaattgggctcacccgtgaaaatggaggaagaaattcgacaacagagtgatgaggtcctcaccgtcatcaaagccaaagcccaatggccagcctggcagcctctcaacgtgagagcagcaccttcagctgaattttccgtggacagaacgcgccatttaatgtccttcctgaccatgatgggccctagtcccgactggaacgtaggcttatctgcagaagatctgtgcaccaaggaatgtggctgggtccagaaggtggtgcaagacctgattccctgggacgctggcaccgacagcggggtgacctatgagtcacccaacaaacccaccattccccaggagaaaatccggcccctgaccagcctggaccatcctcagagtcctttctatgacccagagggtgggtccatcactcaagtagccagagttgtcatcgagagaatcgcacggaagggtgaacaatgcaatattgtacctgacaatgtcgatgatattgtagctgacctggctccagaagagaaagatgaagatgacacccctgaaacctgcatctactccaactggtccccatggtccgcctgcagctcctccacctgtgacaaaggcaagaggatgcgacagcgcatgctgaaagcacagctggacctcagcgtcccctgccctgacacccaggacttccagccctgcatgggccctggctgcagtgacgaagacggctccacctgcaccatgtccgagtggatcacctggtcgccctgcagcatctcctgcggcatgggcatgaggtcccgggagaggtatgtgaagcagttcccggaggacggctccgtgtgcacgctgcccactgaggaaacggagaagtgcacggtcaacgaggagtgctctcccagcagctgcctgatgaccgagtggggcgagtgggacgagtgcagcgccacctgcggcatgggcatgaagaagcggcaccgcatgatcaagatgaaccccgcagatggctccatgtgcaaagccgagacatcacaggcagagaagtgcatgatgccagagtgccacaccatcccatgcttgctgtccccatggtccgagtggagtgactgcagcgtgacctgcgggaagggcatgcgaacccgacagcggatgctcaagtctctggcagaacttggagactgcaatgaggatctggagcaggtggagaagtgcatgctccctgaatgccccattgactgtgagctcaccgagtggtcccagtggtcggaatgtaacaagtcatgtgggaaaggccacgtgattcgaacccggatgatccaaatggagcctcagtttggaggtgcaccctgcccagagactgtgcagcgaaaaaagtgccgcatccgaaaatgccttcgaaatccatccatccaaaagctacgctggagggaggcccgagagagccggcggagtgagcagctgaaggaagagtctgaaggggagcagttcccaggttgtaggatgcgcccatggacggcctggtcagaatgcaccaaactgtgcggaggtggaattcaggaacgttacatgactgtaaagaagagattcaaaagctcccagtttaccagctgcaaagacaagaaggagatcagagcatgcaatgttcatccttgttagcaagggtacgagttccccagggctgcactctagattccagagtcaccaatggctggattatttgcttgtttaagacaatttaaattgtgtacgctagttttcatttttgcagtgtggttcgcccagtagtcttgtggatgccagagacatcctttctgaatacttcttgatgggtacaggctgagtggggcgccctcacctccagccagcctcttcctgcagaggagtagtgtcagccaccttgtactaagctgaaacatgtccctctggagcttccacctggccagggaggacggagactttgacctactccacatggagaggcaaccatgtctggaagtgactatgcctgagtcccagggtgcggcaggtaggaaacattcacagatgaagacagcagattccccacattctcatctttggcctgttcaatgaaaccattgtttgcccatctcttcttagtggaactttaggtctcttttcaagtctcctcagtcatcaatagttcctggggaaaaacagagctggtagacttgaagaggagcattgatgttgggtggcttttgttctttcactgagaaattcggaatacatttgtctcacccctgatattggttcctgatgcccccccaacaaaaataaataaataaattatggctgctttatttaaatataaggtagctagtttttacacctgagataaataataagcttagagtgtatttttcccttgcttttgggggttcagaggagtatgtacaattcttctgggaagccagccttctgaactttttggtactaaatccttattggaaccaagacaaaggaagcaaaattggtctctttagagaccaatttgcctaaattttaaaatcttcctacacacatctagacgttcaagtttgcaaatcagtttttagcaagaaaacatttttgctatacaaacattttgctaagtctgcccaaagcccccccaatgcattccttcaacaaaatacaatctctgtactttaaagttattttagtcatgaaattttatatgcagagagaaaaagttaccgagacagaaaacaaatctaagggaaaggaatattatgggattaagctgagcaagcaattctggtggaaagtcaaacctgtcagtgctccacaccagggctgtggtcctcccagacatgcataggaatggccacaggtttacactgccttcccagcaattataagcacaccagattcagggagactgaccaccaagggatagtgtaaaaggacattttctcagttgggtccatcagcagtttttcttcctgcatttattgttgaaaactattgtttcatttcttcttttataggccttattactgcttaatccaaatgtgtaccattggtgagacacatacaatgctctgaatacactacgaatttgtattaaacacatcagaatatttccaaatacaacatagtatagtcctgaatatgtacttttaacacaagagagactattcaataaaaactcactgggtctttcatgtctttaagctaagtaagtgttcagaaggttcttttttatattgtcctccacctccatcattttcaataaaagatagggcttttgctcccttgttcttggagggaccattattacatctctgaactacctttgtatccaacatgttttaaatccttaaatgaattgctttctcccaaaaaaagcacaatataaagaaacacaagatttaattatttttctacttggggggaaaaaaagtcctcatgtagaagcacccacttttgcaatgttgttctaagctatctatctatctctcagcccatgataaagttccttaagctggtgattcctaatcaaggacaagccaccctagtgtctcatgtttgtatttggtcccagttgggtacattttaaaatcctgattttggagacttaaaaccaggttaatggctaagaatgggtaacatgactcttgttggattgttattttttgtttgcaatggggaatttataagaagcatcaagtctctttcttaccaaagtcttgttaggtggtttatagttcttttggctaacaaatcattttggaaataaagattttttactacaaaaa

SEQ ID NO: 81918 - DNA, 4786 bp, Homo sapiens
ggcacaaagttgggggccgcgaagatgaggctgtccccggcgcccctgaagctgagccggactccggcactgctggccctggcgctgcccctggccgcggcgctggccttctccgacgagaccctggacaaagtgcccaagtcagagggctactgtagccgtatcctgcgcgcccagggcacgcggcgcgagggctacaccgagttcagcctccgcgtggagggcgaccccgacttctacaagccgggaaccagctaccgcgtaacactttcagctgctcctccctcctacttcagaggattcacattaattgccctcagagagaacagagagggtgataaggaagaagaccatgctgggaccttccagatcatagacgaagaagaaactcagtttatgagcaattgccctgttgcagtcactgaaagcactccacggaggaggacccggatccaggtgttttggatagcaccaccagcgggaacaggctgcgtgattctgaaggccagcatcgtacaaaaacgcattatttattttcaagatgagggctctctgaccaagaaactttgtgaacaagattccacatttgatggggtgactgacaaacccatcttagactgctgtgcctgcggaactgccaagtacagactcacattttatgggaattggtccgagaagacacacccaaaggattaccctcgtcgggccaaccactggtctgcgatcatcggaggatcccactccaagaattatgtactgtgggaatatggaggatatgccagcgaaggcgtcaaacaagttgcagaattgggctcacccgtgaaaatggaggaagaaattcgacaacagagtgatgaggtcctcaccgtcatcaaagccaaagcccaatggccagcctggcagcctctcaacgtgagagcagcaccttcagctgaattttccgtggacagaacgcgccatttaatgtccttcctgaccatgatgggccctagtcccgactggaacgtaggcttatctgcagaagatctgtgcaccaaggaatgtggctgggtccagaaggtggtgcaagacctgattccctgggacgctggcaccgacagcggggtgacctatgagtcacccaacaaacccaccattccccaggagaaaatccggcccctgaccagcctggaccatcctcagagtcctttctatgacccagagggtgggtccatcactcaagtagccagagttgtcatcgagagaatcgcacggaagggtgaacaatgcaatattgtacctgacaatgtcgatgatattgtagctgacctggctccagaagagaaagatgaagatgacacccctgaaacctgcatctactccaactggtccccatggtccgcctgcagctcctccacctgtgacaaaggcaagaggatgcgacagcgcatgctgaaagcacagctggacctcagcgtcccctgccctgacacccaggacttccagccctgcatgggccctggctgcagtgacgaagacggctccacctgcaccatgtccgagtggatcacctggtcgccctgcagcatctcctgcggcatgggcatgaggtcccgggagaggtatgtgaagcagttcccggaggacggctccgtgtgcacgctgcccactgaggaaacggagaagtgcacggtcaacgaggagtgctctcccagcagctgcctgatgaccgagtggggcgagtgggacgagtgcagcgccacctgcggcatgggcatgaagaagcggcaccgcatgatcaagatgaaccccgcagatggctccatgtgcaaagccgagacatcacaggcagagaagtgcatgatgccagagtgccacaccatcccatgcttgctgtccccatggtccgagtggagtgactgcagcgtgacctgcgggaagggcatgcgaacccgacagcggatgctcaagtctctggcagaacttggagactgcaatgaggatctggagcaggtggagaagtgcatgctccctgaatgccccattgactgtgagctcaccgagtggtcccagtggtcggaatgtaacaagtcatgtgggaaaggccacgtgattcgaacccggatgatccaaatggagcctcagtttggaggtgcaccctgcccagagactgtgcagcgaaaaaagtgccgcatccgaaaatgccttcgaaatccatccatccaaaagctacgctggagggaggcccgagagagccggcggagtgagcagctgaaggaagagtctgaaggggagcagttcccaggttgtaggatgcgcccatggacggcctggtcagaatgcaccaaactgtgcggaggtggaattcaggaacgttacatgactgtaaagaagagattcaaaagctcccagtttaccagctgcaaagacaagaaggagatcagagcatgcaatgttcatccttgttagcaagggtacgagttccccagggctgcactctagattccagagtcaccaatggctggattatttgcttgtttaagacaatttaaattgtgtacgctagttttcatttttgcagtgtggttcgcccagtagtcttgtggatgccagagacatcctttctgaatacttcttgatgggtacaggctgagtggggcgccctcacctccagccagcctcttcctgcagaggagtagtgtcagccaccttgtactaagctgaaacatgtccctctggagcttccacctggccagggaggacggagactttgacctactccacatggagaggcaaccatgtctggaagtgactatgcctgagtcccagggtgcggcaggtaggaaacattcacagatgaagacagcagattccccacattctcatctttggcctgttcaatgaaaccattgtttgcccatctcttcttagtggaactttaggtctcttttcaagtctcctcagtcatcaatagttcctggggaaaaacagagctggtagacttgaagaggagcattgatgttgggtggcttttgttctttcactgagaaattcggaatacatttgtctcacccctgatattggttcctgatgcccccccaacaaaaataaataaataaattatggctgctttatttaaatataaggtagctagtttttacacctgagataaataataagcttagagtgtatttttcccttgcttttgggggttcagaggagtatgtacaattcttctgggaagccagccttctgaactttttggtactaaatccttattggaaccaagacaaaggaagcaaaattggtctctttagagaccaatttgcctaaattttaaaatcttcctacacacatctagacgttcaagtttgcaaatcagtttttagcaagaaaacatttttgctatacaaacattttgctaagtctgcccaaagcccccccaatgcattccttcaacaaaatacaatctctgtactttaaagttattttagtcatgaaattttatatgcagagagaaaaagttaccgagacagaaaacaaatctaagggaaaggaatattatgggattaagctgagcaagcaattctggtggaaagtcaaacctgtcagtgctccacaccagggctgtggtcctcccagacatgcataggaatggccacaggtttacactgccttcccagcaattataagcacaccagattcagggagactgaccaccaagggatagtgtaaaaggacattttctcagttgggtccatcagcagtttttcttcctgcatttattgttgaaaactattgtttcatttcttcttttataggccttattactgcttaatccaaatgtgtaccattggtgagacacatacaatgctctgaatacactacgaatttgtattaaacacatcagaatatttccaaatacaacatagtatagtcctgaatatgtacttttaacacaagagagactattcaataaaaactcactgggtctttcatgtctttaagctaagtaagtgttcagaaggttcttttttatattgtcctccacctccatcattttcaataaaagatagggcttttgctcccttgttcttggagggaccattattacatctctgaactacctttgtatccaacatgttttaaatccttaaatgaattgctttctcccaaaaaaagcacaatataaagaaacacaagatttaattatttttctacttggggggaaaaaaagtcctcatgtagaagcacccacttttgcaatgttgttctaagctatctatctatctctcagcccatgataaagttccttaagctggtgattcctaatcaaggacaagccaccctagtgtctcatgtttgtatttggtcccagttgggtacattttaaaatcctgattttggagacttaaaaccaggttaatggctaagaatgggtaacatgactcttgttggattgttattttttgtttgcaatggggaatttataagaagcatcaagtctctttcttaccaaagtcttgttaggtggtttatagttcttttggctaacaaatcattttggaaataaagattttttactacaaaaatgaaatttgtttggacttccacttgagacagtaaagagagtattagacacccagtaaaaactgccatataaaaaaaaaaaaaaaaaactcgagactagttctctctctctcctggtgctcatctgctggcaccgggcatccacccatcagcccccgccctgtccctccgaaggacacccagcaggcaccccccggggaggcaggggcagaggtca

SEQ ID NO: 81919 - DNA, 4842 bp, Homo sapiens
ggcacaaagttgggggccgcgaagatgaggctgtccccggcgcccctgaagctgagccggactccggcactgctggccctggcgctgcccctggccgcggcgctggccttctccgacgagaccctggacaaagtgcccaagtcagagggctactgtagccgtatcctgcgcgcccagggcacgcggcgcgagggctacaccgagttcagcctccgcgtggagggcgaccccgacttctacaagccgggaaccagctaccgcgtaacactttcagctgctcctccctcctacttcagaggattcacattaattgccctcagagagaacagagagggtgataaggaagaagaccatgctgggaccttccagatcatagacgaagaagaaactcagtttatgagcaattgccctgttgcagtcactgaaagcactccacggaggaggacccggatccaggtgttttggatagcaccaccagcgggaacaggctgcgtgattctgaaggccagcatcgtacaaaaacgcattatttattttcaagatgagggctctctgaccaagaaactttgtgaacaagattccacatttgatggggtgactgacaaacccatcttagactgctgtgcctgcggaactgccaagtacagactcacattttatgggaattggtccgagaagacacacccaaaggattaccctcgtcgggccaaccactggtctgcgatcatcggaggatcccactccaagaattatgtactgtgggaatatggaggatatgccagcgaaggcgtcaaacaagttgcagaattgggctcacccgtgaaaatggaggaagaaattcgacaacagagtgatgaggtcctcaccgtcatcaaagccaaagcccaatggccagcctggcagcctctcaacgtgagagcagcaccttcagctgaattttccgtggacagaacgcgccatttaatgtccttcctgaccatgatgggccctagtcccgactggaacgtaggcttatctgcagaagatctgtgcaccaaggaatgtggctgggtccagaaggtggtgcaagacctgattccctgggacgctggcaccgacagcggggtgacctatgagtcacccaacaaacccaccattccccaggagaaaatccggcccctgaccagcctggaccatcctcagagtcctttctatgacccagagggtgggtccatcactcaagtagccagagttgtcatcgagagaatcgcacggaagggtgaacaatgcaatattgtacctgacaatgtcgatgatattgtagctgacctggctccagaagagaaagatgaagatgacacccctgaaacctgcatctactccaactggtccccatggtccgcctgcagctcctccacctgtgacaaaggcaagaggatgcgacagcgcatgctgaaagcacagctggacctcagcgtcccctgccctgacacccaggacttccagccctgcatgggccctggctgcagtgacgaagacggctccacctgcaccatgtccgagtggatcacctggtcgccctgcagcatctcctgcggcatgggcatgaggtcccgggagaggtatgtgaagcagttcccggaggacggctccgtgtgcacgctgcccactgaggaaacggagaagtgcacggtcaacgaggagtgctctcccagcagctgcctgatgaccgagtggggcgagtgggacgagtgcagcgccacctgcggcatgggcatgaagaagcggcaccgcatgatcaagatgaaccccgcagatggctccatgtgcaaagccgagacatcacaggcagagaagtgcatgatgccagagtgccacaccatcccatgcttgctgtccccatggtccgagtggagtgactgcagcgtgacctgcgggaagggcatgcgaacccgacagcggatgctcaagtctctggcagaacttggagactgcaatgaggatctggagcaggtggagaagtgcatgctccctgaatgccccattgactgtgagctcaccgagtggtcccagtggtcggaatgtaacaagtcatgtgggaaaggccacgtgattcgaacccggatgatccaaatggagcctcagtttggaggtgcaccctgcccagagactgtgcagcgaaaaaagtgccgcatccgaaaatgccttcgaaatccatccatccaaaagctacgctggagggaggcccgagagagccggcggagtgagcagctgaaggaagagtctgaaggggagcagttcccaggttgtaggatgcgcccatggacggcctggtcagaatgcaccaaactgtgcggaggtggaattcaggaacgttacatgactgtaaagaagagattcaaaagctcccagtttaccagctgcaaagacaagaaggagatcagagcatgcaatgttcatccttgttagcaagggtacgagttccccagggctgcactctagattccagagtcaccaatggctggattatttgcttgtttaagacaatttaaattgtgtacgctagttttcatttttgcagtgtggttcgcccagtagtcttgtggatgccagagacatcctttctgaatacttcttgatgggtacaggctgagtggggcgccctcacctccagccagcctcttcctgcagaggagtagtgtcagccaccttgtactaagctgaaacatgtccctctggagcttccacctggccagggaggacggagactttgacctactccacatggagaggcaaccatgtctggaagtgactatgcctgagtcccagggtgcggcaggtaggaaacattcacagatgaagacagcagattccccacattctcatctttggcctgttcaatgaaaccattgtttgcccatctcttcttagtggaactttaggtctcttttcaagtctcctcagtcatcaatagttcctggggaaaaacagagctggtagacttgaagaggagcattgatgttgggtggcttttgttctttcactgagaaattcggaatacatttgtctcacccctgatattggttcctgatgcccccccaacaaaaataaataaataaattatggctgctttatttaaatataaggtagctagtttttacacctgagataaataataagcttagagtgtatttttcccttgcttttgggggttcagaggagtatgtacaattcttctgggaagccagccttctgaactttttggtactaaatccttattggaaccaagacaaaggaagcaaaattggtctctttagagaccaatttgcctaaattttaaaatcttcctacacacatctagacgttcaagtttgcaaatcagtttttagcaagaaaacatttttgctatacaaacattttgctaagtctgcccaaagcccccccaatgcattccttcaacaaaatacaatctctgtactttaaagttattttagtcatgaaattttatatgcagagagaaaaagttaccgagacagaaaacaaatctaagggaaaggaatattatgggattaagctgagcaagcaattctggtggaaagtcaaacctgtcagtgctccacaccagggctgtggtcctcccagacatgcataggaatggccacaggtttacactgccttcccagcaattataagcacaccagattcagggagactgaccaccaagggatagtgtaaaaggacattttctcagttgggtccatcagcagtttttcttcctgcatttattgttgaaaactattgtttcatttcttcttttataggccttattactgcttaatccaaatgtgtaccattggtgagacacatacaatgctctgaatacactacgaatttgtattaaacacatcagaatatttccaaatacaacatagtatagtcctgaatatgtacttttaacacaagagagactattcaataaaaactcactgggtctttcatgtctttaagctaagtaagtgttcagaaggttcttttttatattgtcctccacctccatcattttcaataaaagatagggcttttgctcccttgttcttggagggaccattattacatctctgaactacctttgtatccaacatgttttaaatccttaaatgaattgctttctcccaaaaaaagcacaatataaagaaacacaagatttaattatttttctacttggggggaaactatctctcagcccatgataaagttccttaagctggtgattcctaatcaaggacaagccaccctagtgtctcatgtttgtatttggtcccagttgggtacattttaaaatcctgattttggagacttaaaaccaggttaatggctaagaatgggtaacatgactcttgttggattgttattttttgtttgcaatggggaatttataagaagcatcaagtctctttcttaccaaagtcttgttaggtggtttatagttcttttggctaacaaatcattttggaaataaagattttttactacaaaaatgaaatttgtttggacttccacttgagacagtaaagagagtattagacacccagtaaaaactgccatataaagaagttgtaattgtttgttgtgtatgtatttttttcaatgccaaaccagctgtgatccaatttacatccacattttaggtccaacagcaagaagttcagagagagatttcccaaccagacattgggtcactcactggtcaccttgccagtgcattttattagaagggaatctgttgtagcaaatgggaataaacctgggtttctatagacccagaactgaaaaaataaacatcgtgctgtttttaatttgaac

SEQ ID NO: 81920 - DNA, 2808 bp, Homo sapiens
cctccaaagccttcttgagtcatagagggagcatagaatgggtgatgacctggcaccaatcctgcctctgctgcttaccaaccacacgggctgaagtcagcctgcctctttggagcctcagtttcttcttctgtaaaatagcatgacacagcacctgctttgcatccctcataggcttgttgagatgttcaaaggagagcgtgaccatatcttgtttcagacatgtgatacactcatgcccatctgtgtcttgccagccattgactgtgagctcaccgagtggtcccagtggtcggaatgtaacaagtcatgtgggaaaggccacgtgattcgaacccggatgatccaaatggagcctcagtttggaggtgcaccctgcccagagactgtgcagcgaaaaaagtgccgcatccgaaaatgccttcgaaatccatccatccaaaagctacgctggagggaggcccgagagagccggcggagtgagcagctgaaggaagagtctgaaggggagcagttcccaggttgtaggatgcgcccatggacggcctggtcagaatgcaccaaactgtgcggaggtggaattcaggaacgttacatgactgtaaagaagagattcaaaagctcccagtttaccagctgcaaagacaagaaggagatcagagcatgcaatgttcatccttgttagcaagggtacgagttccccagggctgcactctagattccagagtcaccaatggctggattatttgcttgtttaagacaatttaaattgtgtacgctagttttcatttttgcagtgtggttcgcccagtagtcttgtggatgccagagacatcctttctgaatacttcttgatgggtacaggctgagtggggcgccctcacctccagccagcctcttcctgcagaggagtagtgtcagccaccttgtactaagctgaaacatgtccctctggagcttccacctggccagggaggacggagactttgacctactccacatggagaggcaaccatgtctggaagtgactatgcctgagtcccagggtgcggcaggtaggaaacattcacagatgaagacagcagattccccacattctcatctttggcctgttcaatgaaaccattgtttgcccatctcttcttagtggaactttaggtctcttttcaagtctcctcagtcatcaatagttcctggggaaaaacagagctggtagacttgaagaggagcattgatgttgggtggcttttgttctttcactgagaaattcggaatacatttgtctcacccctgatattggttcctgatgcccccccaacaaaaataaataaataaattatggctgctttatttaaatataaggtagctagtttttacacctgagataaataataagcttagagtgtatttttcccttgcttttgggggttcagaggagtatgtacaattcttctgggaagccagccttctgaactttttggtactaaatccttattggaaccaagacaaaggaagcaaaattggtctctttagagaccaatttgcctaaattttaaaatcttcctacacacatctagacgttcaagtttgcaaatcagtttttagcaagaaaacatttttgctatacaaacattttgctaagtctgcccaaagcccccccaatgcattccttcaacaaaatacaatctctgtactttaaagttattttagtcatgaaattttatatgcagagagaaaaagttaccgagacagaaaacaaatctaagggaaaggaatattatgggattaagctgagcaagcaattctggtggaaagtcaaacctgtcagtgctccacaccagggctgtggtcctcccagacatgcataggaatggccacaggtttacactgccttcccagcaattataagcacaccagattcagggagactgaccaccaagggatagtgtaaaaggacattttctcagttgggtccatcagcagtttttcttcctgcatttattgttgaaaactattgtttcatttcttcttttataggccttattactgcttaatccaaatgtgtaccattggtgagacacatacaatgctctgaatacactacgaatttgtattaaacacatcagaatatttccaaatacaacatagtatagtcctgaatatgtacttttaacacaagagagactattcaataaaaactcactgggtctttcatgtctttaagctaagtaagtgttcagaaggttcttttttatattgtcctccacctccatcattttcaataaaagatagggcttttgctcccttgttcttggagggaccattattacatctctgaactacctttgtatccaacatgttttaaatccttaaatgaattgctttctcccaaaaaaagcacaatataaagaaacacaagatttaattatttttctacttggggggaaaaaaagtcctcatgtagaagcacccacttttgcaatgttgttctaagctatctatctatctctcagcccatgataaagttccttaagctggtgattcctaatcaaggacaagccaccctagtgtctcatgtttgtatttggtcccagttgggtacattttaaaatcctgattttggagacttaaaaccaggttaatggctaagaatgggtaacatgactcttgttggattgttattttttgtttgcaatggggaatttataagaagcatcaagtctctttcttaccaaagtcttgttaggtggtttatagttcttttggctaacaaatcattttggaaataaagattttttactacaaaaa

SEQ ID NO: 81921 - DNA, 2636 bp, Homo sapiens
ggcacaaagttgggggccgcgaagatgaggctgtccccggcgcccctgaagctgagccggactccggcactgctggccctggcgctgcccctggccgcggcgctggccttctccgacgagaccctggacaaagtgcccaagtcagagggctactgtagccgtatcctgcgcgcccagggcacgcggcgcgagggctacaccgagttcagcctccgcgtggagggcgaccccgacttctacaagccgggaaccagctaccgcgtaacactttcagctgctcctccctcctacttcagaggattcacattaattgccctcagagagaacagagagggtgataaggaagaagaccatgctgggaccttccagatcatagacgaagaagaaactcagtttatgagcaattgccctgttgcagtcactgaaagcactccacggaggaggacccggatccaggtgttttggatagcaccaccagcgggaacaggctgcgtgattctgaaggccagcatcgtacaaaaacgcattatttattttcaagatgagggctctctgaccaagaaactttgtgaacaagattccacatttgatggggtgactgacaaacccatcttagactgctgtgcctgcggaactgccaagtacagactcacattttatgggaattggtccgagaagacacacccaaaggattaccctcgtcgggccaaccactggtctgcgatcatcggaggatcccactccaagaattatgtactgtgggaatatggaggatatgccagcgaaggcgtcaaacaagttgcagaattgggctcacccgtgaaaatggaggaagaaattcgacaacagagtgatgaggtcctcaccgtcatcaaagccaaagcccaatggccagcctggcagcctctcaacgtgagagcagcaccttcagctgaattttccgtggacagaacgcgccatttaatgtccttcctgaccatgatgggccctagtcccgactggaacgtaggcttatctgcagaagatctgtgcaccaaggaatgtggctgggtccagaaggtggtgcaagacctgattccctgggacgctggcaccgacagcggggtgacctatgagtcacccaacaaacccaccattccccaggagaaaatccggcccctgaccagcctggaccatcctcagagtcctttctatgacccagagggtgggtccatcactcaagtagccagagttgtcatcgagagaatcgcacggaagggtgaacaatgcaatattgtacctgacaatgtcgatgatattgtagctgacctggctccagaagagaaagatgaagatgacacccctgaaacctgcatctactccaactggtccccatggtccgcctgcagctcctccacctgtgacaaaggcaagaggatgcgacagcgcatgctgaaagcacagctggacctcagcgtcccctgccctgacacccaggacttccagccctgcatgggccctggctgcagtgacgaagacggctccacctgcaccatgtccgagtggatcacctggtcgccctgcagcatctcctgcggcatgggcatgaggtcccgggagaggtatgtgaagcagttcccggaggacggctccgtgtgcacgctgcccactgaggaaacggagaagtgcacggtcaacgaggagtgctctcccagcagctgcctgatgaccgagtggggcgagtgggacgagtgcagcgccacctgcggcatgggcatgaagaagcggcaccgcatgatcaagatgaaccccgcagatggctccatgtgcaaagccgagacatcacaggcagagaagtgcatgatgccagagtgccacaccatcccatgcttgctgtccccatggtccgagtggagtgactgcagcgtgacctgcgggaagggcatgcgaacccgacagcggatgctcaagtctctggcagaacttggagactgcaatgaggatctggagcaggtggagaagtgcatgctccctgaatgccccattgactgtgagctcaccgagtggtcccagtggtcggaatgtaacaagtcatgtgggaaaggccacgtgattcgaacccggatgatccaaatggagcctcagtttggaggtgcaccctgcccagagactgtgcagcgaaaaaagtgccgcatccgaaaatgccttcgaaatccatccatccaaaagctacgctggagggaggcccgagagagccggcggagtgagcagctgaaggaagagtctgaaggggagcagttcccaggtatggctcccaagtgtcagcctgggtggtctccaggacaggcagggttctgcactgggctaagtcttggacctgttaagtgggatcattacgtatagcgtacagctgtgcagaagcagcggcagaagtagcaggtgagagctcagagggtctccaggtaacaggatgcaacgcttacgtcgacggcgtgcctcagagcacgggactcgggggccagccaccagcttgcaagccgtggtcactcaaagtgcttgagaaggtgttcgtcgggcgcaagacggctgccctaccagttccatctgtccagcaacacatagcaaaggcggcccaagcaaaatccctttagtgaggg

SEQ ID NO: 81922 - DNA, 695 bp, Homo sapiens
aacatttctctggataatgagaaatcagacatggactacggggacaagacacaaatctaagaaccagcaggcccaggaccttctctggccatcaccttggaagatttgctgatctctgctttggcaagggatggcaggcagcctttaagggaggctgatttcaaacctctgtgcccatctaactagtttgagaagcttaccaagaaagcaagaatgtgtgagaacattcctacatacagagtttctcaactatagcgtttatcctgcccagcctcctcccttaacagaaccaggactccatttgcaattctgaaagagagttagctctggactgctaaactccagaaattgcctatgcctacaatatgcttttctatacctcctgtgctatacttagagacagaagaatttattactactattagaaggccttcttctgacaagggaagatagcttcaagtcaaaatataccttttatccccatcactttacagtcactagtcaatgactgttgttacactaaaatcaaaaggcctttggtgagctcagtgacagtgacctctgggacaatcacagaaatgacttcactgctgttctgaatgacaattcttaagtggctaggacaaagcaaaagcgagtataccttttgaaaagctgtctaagtggtatttccttttccattctgagaacgtaaa

SEQ ID NO: 81923 - DNA, 129 bp, Homo sapiens
gggaaatggataactgaggtttttccatttttatatggatatgctatatgtttaaacttgggagggaaattgataactgagatgcatggatattgactttatatctaatgctttagaatcttaaccaaa

SEQ ID NO: 81924 - DNA, 437 bp, Homo sapiens
tgtgaactctggattattttgcaatggactgcttacttagcaaacacattttgctgttggtttacagtgtacctgcactgtggcaggaaacagtttctgcaggacaggcttgaatatttttgagacttgctttacggtccagcacatgtaatgcccaggttcatcagcttttgttaatgttccaagggcttaggaagaatgcacttactgagtgtggcatcacatgaaagtccatttgggagagagagtcatcaacacacccagtatgattaagtaccaactaaagacaaaatgtgaaaggcaggtgtgtacctggcagaatctaataaagccctaatcccctacagccagaaggcagacatggcagagccccactcaggacttgtaaaggtgagcagagcctccaataagtggaattctcagctccaccaggcttc

SEQ ID NO: 81925 - DNA, 507 bp, Homo sapiens
acgcccatacacacatacacacacacatgcacacacacacacacatgtgcacacatgattactgggtcccactcccagagtttctgattcagtaggtctgggatgaggcccagtgatttgcctttcttacaagttgcccagtgatgctgatattgctagtgtgagatcacattttaagagccattgctctaggaagcctggagaaatacactcagaaaataggcaaaataaaggggcctaaacaataatcaggatcacaacctaagccctgccactggcctattttatcgaacctgcagtcactgctaacattgaacactgaatgctacagctcctgtgacagctgccacttaaggcagtctggaacactgcctgctggtgcccctgacactcctgccccagaactaattttaaaattattaaatctatttatatactatcttggtgcaacattacagtattgtaaacttttcgtctgtgttttgcattaaagttacattatctaaa

SEQ ID NO: 81926 - DNA, 504 bp, Homo sapiens
ggtgtctaccctggatactattttaccttcttaactggaattcttgtcacattagcagctagagcggtcaggaacaactacagacattacttcctttcttcaagagctctcaaggctgtgtatgatgcaggcacctgggccgtcactcagctggctgtctcttacacggtagcaccctttgtgatgttggcagttgaaccgaccatcagcttatacaagtccatgtacttttatttgcacatcataagtctcctgataatactatttctgccaatgaaaccacaagctcatacgcaaaggcggcctcagactctgaactctattaataagagaaaaacagattgatacctccaagagaagcggaacaagcaaaactgcagaacgttcgaaagatgagatgacaaggcttcaagggctcctccggtggcttagaggcgatgtttacatgcatctttattttgttcttttttaaagtgcagggagtattttttttttttttttttt

SEQ ID NO: 81927 - DNA, 337 bp, Homo sapiens
tagtagagacggggtttcaccatgttggccaggctggtctccaactcctggcctcaggtgatccacccatctcggcctcccaaagtgctgggattccaggcgtgagccaccgcgcccagcccctgcaatacgtcaacagtccctagattcaggcaacatggagttgcagccaaggaactttgaggtagtgaccaatgcagggaggtctgacagagaatcagcaggatccatttcatggccaccacacatctgactgactccttcttgggctaagcaaatacttttgtgggcagtgacactggcagctgctggggtcttggcaggaggttggatggag

SEQ ID NO: 81928 - DNA, 744 bp, Homo sapiens
actttgcaggtgagaacagtgaggttctgatagccccggacactagcacgcccttaggtggtgccagagctgggatctgaatctggctcatccatccaactctatggcctcagcaccttcacccccttggaagggactttagggagacacggggagtggaggggtatcctggggacacgacgggatgtggctgcagcagacctgccggtgaatccttctgactcaccgtgtgaccgtatgtgaggccttccccggtgagcctcagttcctgggctggacgctggggagagccgtctccaccctgtctgcctcccgaacagcttgctctggaaactcccataggaggcatttgtgcgtaggtggctgtggggtgagaggagcattgctgatcattatttaagcaaagatgacactgggcagaagggggcagcgagcccattcctggggaaacaggatgcatcccagcctgcgctctcccccctcagtcagctaatctccccaggccgacgctgctcctcctcccgattccatctgcctcttaaacgcgggacttctcactgaaacgtattcaaacccgaacatgcactaagggaacttcagacaggaggagaggcagcaggttgagctcttggggtccctggcgaggcagacgctgcgggtggagacagtccttagtttgtcctcggtgccaccacccctgtggtacaagagacactgaagcagctgtatggggtggcagctcca

SEQ ID NO: 81929 - DNA, 565 bp, Homo sapiens
tgtggagacagggtttcactatgttgcccaggctgttctcaaactcctggcctcaagcaatcttcccaacttagcctcccaaagtgttgagattacgggcgtgggccaccgcacccagcgcaagatttcatttttaaacaacaggaaaatcctagggcaaaaatagcttacaaaaaatagtttgtatagtgagtagggagccatgcatagtttttaagtgggaggaatgacatgctcagatttggattttagaaagatgttctggtagctgtggcaaatggactacactgggcaattcttttcttttcttttcttttctttttttttttttttagtcagagtctcaccaggtgggccaggcgggtctccggacctcaggtgattggcccgcttgggtctcccaaagtgctaggatcacgggtgtgagccacaatgcccattatgaattagggatatacacgggtcatgaagactatgcatgggaccaattccagtgaaaatttcacaagctgacaatacagaaaattatgccagtgttccccactccatatttctcctacagggg

SEQ ID NO: 81930 - DNA, 351 bp, Homo sapiens
ctccccactaacagtgttttagtgaacaatttacaatcttattttaaaattctatcctgatgattgtagtggtcaggtgatcagcctcctcagagtttggaattgacacaggtttggctgttgatttttaatggcccataacaatgacttgttagctgctttaacatcgagatgtccttggtgtttatttcttacatgtgtgtacctcagtcacaaaatgcactctcctgtttttatgataattaaccgagaaaccatcccatagatctggcagtttcaacagagttggagtgtgctgttagggtaaacaatgttccatattctcccaagcaggcagaagataaaggtggg

SEQ ID NO: 81931 - DNA, 555 bp, Homo sapiens
ggggaggcggcggcgcggcggcggggggcgcccgcaagcccgcggctctgagcggccacccgcgcacaatgttgggcgagttggcagccgcctgcacctgcctcctggccccggcccctgattccgcctccggccccaagcgcccgggttgcgccctcggctgcctcgcgaggtagccccaggaggcctaggggcccgcctgcgcccccggcgccagaccatggtgggcagctccggccaggagcctcagccgccgcgagccaacatcgcctgcagccagcccccgccccacccgagcggacgcgcgggtattcgcagcgcgcgggtcacttccttcctcggccgggatgggcggcgcgggactgagtgatcggccttgcgtccggcgggtaatccccatctgatctgctgcctgtgagctgctgactgccggggcgcgcgacctagggggcacgggcagcagcgcggcgatgacctgatcccgagcccgccaggggccccttccttccctcccttccctcgctccctctgagcctgtgcggagaccagctcggt

SEQ ID NO: 81932 - DNA, 2713 bp, Homo sapiens
  misc_feature (122)..(122): n is a, c, g, or t
  misc_feature (2711)..(2711): n is a, c, g, or t
ggagccgcgccgcatctcaggcgcagtctctaggggctgtgcgcatcctagggggggacatgtgcatctcaggggggctgctcgcatctggggggtgctgtgtgcatctcgggggggctgtngcatctagcggggtggctgtgtccgcatctggagggggctgtgcgcaacccggggggggtgttgcgcgcatctagcaggggcggctgtgcgcatttcgggggggggctgtgcatatctggggggaccgtgcttatctctgggggcggctgtgcgcatcttgaggggtgtgtacatctcggggggcctgtgcgcatcttggggggctgtgtgcatccgcgggggctgtgcgcatctcggggtgctgtgcgctgctcctctgagctctgctctttcttgcagcgtttgcctcagcatggagggcggggccgcggcagccacccccacagcactgccttactacgtggccttctcccagctgctgggcctgaccttggtggccatgaccggcgcgtggctcgggctgtaccgaggcggcattgcctgggagagcgacctgcagttcaacgcgcaccccctctgcatggtcataggcctgatcttcctgcagggaaatgccctgctggtttaccgtgtcttcaggaacgaagctaaacgcaccaccaaggtcctgcacgggctgctgcacatctttgcgctcgtcatcgccctggttggcttggtggcggtgttcgactaccacaggaagaagggctacgctgacctgtacagcctacacagctggtgcgggatccttgtctttgtcctgtactttgtgcagtggctggtgggcttcagcttcttcctgttccccggagcttcattctccctgcggagccgctaccgcccacagcacatcttctttggtgctaccatcttcctcctttccgtgggcaccgccctgctgggcctgaaggaggcactgctgttcaacctcgggggcaagtatagcgcatttgagcccgagggtgtcctggccaacgtgctgggcctgctgctggcctgcttcggtggggcggtgctctacatcttgacccgggccgactggaagcggccttcccaggcggaagagcaggccctctccatggacttcaagacgctgacggagggagatagccccggctcccagtgatgcgcccggccggccctgggggttcgcggggtgtcttcttgcctgcccctgctgaggcgtcttcaggactgcaggctccggagagtggctctggcagcaggcgggcgcgtgggtgcagctgcatctgtttgagtgctgctttctggggtcaggtctccgcctcctctgcttctcctttctccgctgctatagaccagttcattgtgtgtggctcccgtgtctctgttgcccccttcagtgcagaaggctttgggtaggacttcgggtgttcggtcctggtcgcagagcacagatctttaaagaagcgagagaggaggccccaccctcctggcagcagatgcctggggcaaggccagggaaactgggggggcctcagggacaggcctggaaaggccacgatggctgctgaattcaaacaaggagtccctccagcctgaataacacgtggcacaaatgggcccggcctttggcagaggagcaagtgatatgatgtgtaaagtatgttggtggtgaaagcaaggttccccaggagaggggagggactggcccctgggaagctctgagatgaggctgtggcccagctgtagtcctgaccttcctcttctttaaccctttagccctaggatggctttggtgggagaggggatagaagcccatgacttcagacagactttctcttggcagatgcaggcgggcctcctcccaggctgctccagacatgggggttggggatggggggcaccttgcagccccttcctgctggggctccctccttgtagcaccccccttgcggctcagctctggtttcctctcccaggctcacccaggctctgctcaggctgggaggcagagggcacaaaccttataattttttaaatgaaaaaccgctgctgctggctgtggctagagccccctggggctgctggagctgctgcctctgttctggaggacgagccttctccttatctgctgcccatctttccaggaagtcaggatggagtcagaacaactacagtcatcccccgtggtgtctgcacatcactccagccccataaagagtgtcatgttagctgagtcaccatttggcttcggcctggaaatagtgtgattagaacactgatcgtgtgcgaggccaggagatcaagaccatcctgactaacaaacacagtgaaaccccgtctctactaaaaatacaaaaaaattagccaggcgtggtggtgggcgcctgtagtcccagctacttgggagggaattccctgtattagtctatatggttctccaagaaactgaatgaatccattggagaagcggtggataactagccagacaaaatttgagaatacataaacaacgcattccgcaggaaacatacagaggatgccttttctgtgattgggtgggattttttccctttttatgtggatatagtagttacttgtgacaagaataattttggaataatttctattaatatcaactctgaagctaattgtacataatctcgagattgtgtttgttcataataaaagtgaagtgaatntg

SEQ ID NO: 81933 - DNA, 347 bp, Homo sapiens
aaaaaaaaaaaaaaaaaaaaaaaattcaattgttattattatgtaaaaaaaaaaaaaaaaaatgaaatgtttacatgtgggaaaactccgccttagacaaactaccaaagtacaatcgtgtctctctctagccggaatgctacagagagaaatggaaccttagatttgcaacaaaagtctgtaaactggtctgtttgccaaagtgaacactggatgactaaggagctgaagagaagacgacagaaggggatttgtggtgggttattttattttgcctgtggccaatcttctgtgaaatacaatgtgctgttggtgcaacagatgattcaataaatgtctacagcaga

SEQ ID NO: 81934 - DNA, 267 bp, Homo sapiens
gcggccgctactactactaaatgggcggcgcgcaatcgtgtctctctctagccggaatgctacagagagaaatggaaccttagatttgcaacaaaagtctgtaaactggtctgtttgccaaagtgaacactggatgactaaggagctgaagagaagacgacagaaggggatttgtggtgggttattttattttgcctgtggccaatcttctgtgaaatacaatgtgctgttggtgcaacagatgattcaataaatgtctacagcaga

SEQ ID NO: 81935 - DNA, 456 bp, Homo sapiens
tagggaatttgcctcggaggccaagaattcggcgacgtaggtgatccacccaccttggcctcccaaagtgctgggattacaagcgtgagccactgcacccggcctatttgcctgtttcttaattgaattactggcttcagggtggaccccagggccaggaaagcatgtagtttttatggcctaataagcaaacacagttggaaggcaaaatagctcccccaaaattaagggtcccagttttatatcagattctggatcctaaaaagagggaatcagcccatccccaaaaggacatttcctacctagttattacacaccagaactgtctcataatctgaagagaagacgacagaaggggatttgtggtgggttattttattttgcctgtggccaatcttctgtgaaatacaatgtgctgttggtgcaacagatgattcaataaatgtctacagcaga

SEQ ID NO: 81936 - DNA, 2993 bp, Homo sapiens
gaccaggggggacagcacttctttcagtacattttcctgttagactcggggtattagagacccaaagatacccaaggaggagtgagagcgtccctgccttcgaggagcagacagggcaccgcgaggcgtttgcctcagcatggagggcggggccgcggcagccacccccacagcactgccttactacgtggccttctcccagctgctgggcctgaccttggtggccatgaccggcgcgtggctcgggctgtaccgaggcggcattgcctgggagagcgacctgcagttcaacgcgcaccccctctgcatggtcataggcctgatcttcctgcagggaaatgccctgctggtttaccgtgtcttcaggaacgaagctaaacgcaccaccaaggtcctgcacgggctgctgcacatctttgcgctcgtcatcgccctggttggcttggtggcggtgttcgactaccacaggaagaagggctacgctgacctgtacagcctacacagctggtgcgggatccttgtctttgtcctgtactttgtgcagtggctggtgggcttcagcttcttcctgttccccggagcttcattctccctgcggagccgctaccgcccacagcacatcttctttggtgctaccatcttcctcctttccgtgggcaccgccctgctgggcctgaaggaggcactgctgttcaacctcgggggcaagtatagcgcatttgagcccgagggtgtcctggccaacgtgctgggcctgctgctggcctgcttcggtggggcggtgctctacatcttgacccgggccgactggaagcggccttcccaggcggaagagcaggccctctccatggacttcaagacgctgacggagggagatagccccggctcccagtgatgcgcccggccggccctgggggttcgcggggtgtcttcttgcctgcccctgctgaggcgtcttcaggactgcaggctccggagagtggctctggcagcaggcgggcgcgtgggtgcagctgcatctgtttgagtgctgctttctggggtcaggtctccgcctcctctgcttctcctttctccgctgctatagaccagttcattgtgtgtggctcccgtgtctctgttgcccccttcagtgcagaaggctttgggtaggacttcgggtgttcggtcctggtcgcagagcacagatctttaaagaagcgagagaggaggccccaccctcctggcagcagatgcctggggcaaggccagggaaactgggggggcctcagggacaggcctggaaaggccacgatggctgctgaattcaaacaaggagtccctccagcctgaataacacgtggcacaaatgggcccggcctttggcagaggagcaagtgatatgatgtgtaaagtatgttggtggtgaaagcaaggttccccaggagaggggagggactggcccctgggaagctctgagatgaggctgtggcccagctgtagtcctgaccttcctcttctttaaccctttagccctaggatggctttggtgggagaggggatagaagcccatgacttcagacagactttctcttggcagatgcaggcgggcctcctcccaggctgctccagacatgggggttggggatggggggcaccttgcagccccttcctgctggggctccctccttgtagcaccccccttgcggctcagctctggtttcctctcccaggctcacccaggctctgctcaggctgggaggcagagggcacaaaccttataattttttaaatgaaaaaccgctgctgctggctgtggctagagccccctggggctgctggagctgctgcctctgttctggaggacgagccttctccttatctgctgcccatctttccaggaagtcaggatggagtcagaacaactacagtcatcccccgtggtgtctgcacatcactccagccccataaagagtgtcatgttagctgagtcaccatttggcttcggcctggaaatagtgtgattagaacactgatcgtgtgcgaggccaggagatcaagaccatcctgactaacaaacacagtgaaaccccgtctctactaaaaatacaaaaaaattagccaggcgtggtggtgggcgcctgtagtcccagctacttgggaggctgaggcaggagaatggtgtgaacccgggagatggcgcttgcagtgagctgagattgcactccagcctgggcgacaggctcaaaaaagaaaaaaaaaagaacaccgatcatgtgcttcttggatctggtgactgttctctccctgttttcctttctttttgggtgtttgaggagcatggcttagcttgagacacacacagacactgtgtacttcagtgaagggcttaatatacagtttccaaacctgacgactcttcttcttgtaatggctgcccttttcctacctgaggccgtcttagagaaaggggccagtctcctctaatgctcagatttcccatagttggcttttgctgtgtctcctgcctcaggcagtgtcatttctgggagcaggtggttgtagtccaggcccctccccagcagggtctgcccaggctccttcgagcccctttccccgcctcctctcagcctgtccggatgacagtgttcgcctcctgtttagactgtacactcttcaggggtaggggtgccgtcagttcttcaatcagctggcacacacttgtatagtgaaatgtttacatgtgggaaaactccgccttagacaaactaccaaagtacaatcgtgtctctctctagccggaatgctacagagagaaatggaaccttagatttgcaacaaaagtctgtaaactggtctgtttgccaaagtgaacactggatgactaaggagctgaagagaagacgacagaaggggatttgtggtgggttattttattttgcctgtggccaatcttctgtgaaatacaatgtgctgttggtgcaacagatgattcaataaatgtctacagcaga

SEQ ID NO: 81937 - DNA, 3049 bp, Homo sapiens
  misc_feature (23)..(24): n is a, c, g, or t
aaacctataggctaggtacgagnnccgggtggttctttccttgcaccctcaccgcatatggaactcctggcgtcgtgtcccaggtcacgcctgtccccgtggggaggctgggcccctccccccagccactcccgagacttgagacctctgcctcaggacgatgggtgggaaggggcttgcggcgtttgcctcagcatggagggcggggccgcggcagccacccccacagcactgccttactacgtggccttctcccagctgctgggcctgaccttggtggccatgaccggcgcgtggctcgggctgtaccgaggcggcattgcctgggagagcgacctgcagttcaacgcgcaccccctctgcatggtcataggcctgatcttcctgcagggaaatgccctgctggtttaccgtgtcttcaggaacgaagctaaacgcaccaccaaggtcctgcacgggctgctgcacatctttgcgctcgtcatcgccctggttggcttggtggcggtgttcgactaccacaggaagaagggctacgctgacctgtacagcctacacagctggtgcgggatccttgtctttgtcctgtactttgtgcagtggctggtgggcttcagcttcttcctgttccccggagcttcattctccctgcggagccgctaccgcccacagcacatcttctttggtgctaccatcttcctcctttccgtgggcaccgccctgctgggcctgaaggaggcactgctgttcaacctcgggggcaagtatagcgcatttgagcccgagggtgtcctggccaacgtgctgggcctgctgctggcctgcttcggtggggcggtgctctacatcttgacccgggccgactggaagcggccttcccaggcggaagagcaggccctctccatggacttcaagacgctgacggagggagatagccccggctcccagtgatgcgcccggccggccctgggggttcgcggggtgtcttcttgcctgcccctgctgaggcgtcttcaggactgcaggctccggagagtggctctggcagcaggcgggcgcgtgggtgcagctgcatctgtttgagtgctgctttctggggtcaggtctccgcctcctctgcttctcctttctccgctgctatagaccagttcattgtgtgtggctcccgtgtctctgttgcccccttcagtgcagaaggctttgggtaggacttcgggtgttcggtcctggtcgcagagcacagatctttaaagaagcgagagaggaggccccaccctcctggcagcagatgcctggggcaaggccagggaaactgggggggcctcagggacaggcctggaaaggccacgatggctgctgaattcaaacaaggagtccctccagcctgaataacacgtggcacaaatgggcccggcctttggcagaggagcaagtgatatgatgtgtaaagtatgttggtggtgaaagcaaggttccccaggagaggggagggactggcccctgggaagctctgagatgaggctgtggcccagctgtagtcctgaccttcctcttctttaaccctttagccctaggatggctttggtgggagaggggatagaagcccatgacttcagacagactttctcttggcagatgcaggcgggcctcctcccaggctgctccagacatgggggttggggatggggggcaccttgcagccccttcctgctggggctccctccttgtagcaccccccttgcggctcagctctggtttcctctcccaggctcacccaggctctgctcaggctgggaggcagagggcacaaaccttataattttttaaatgaaaaaccgctgctgctggctgtggctagagccccctggggctgctggagctgctgcctctgttctggaggacgagccttctccttatctgctgcccatctttccaggaagtcaggatggagtcagaacaactacagtcatcccccgtggtgtctgcacatcactccagccccataaagagtgtcatgttagctgagtcaccatttggcttcggcctggaaatagtgtgattagaacactgatcgtgtgcgaggccaggagatcaagaccatcctgactaacaaacacagtgaaaccccgtctctactaaaaatacaaaaaaattagccaggcgtggtggtgggcgcctgtagtcccagctacttgggaggctgaggcaggagaatggtgtgaacccgggagatggcgcttgcagtgagctgagattgcactccagcctgggcgacaggctcaaaaaagaaaaaaaaaagaacaccgatcatgtgcttcttggatctggtgactgttctctccctgttttcctttctttttgggtgtttgaggagcatggcttagcttgagacacacacagacactgtgtacttcagtgaagggcttaatatacagtttccaaacctgacgactcttcttcttgtaatggctgcccttttcctacctgaggccgtcttagagaaaggggccagtctcctctaatgctcagatttcccatagttggcttttgctgtgtctcctgcctcaggcagtgtcatttctgggagcaggtggttgtagtccaggcccctccccagcagggtctgcccaggctccttcgagcccctttccccgcctcctctcagcctgtccggatgacagtgttcgcctcctgtttagactgtacactcttcaggggtaggggtgccgtcagttcttcaatcagctggcacacacttgtatagtgaaatgtttacatgtgggaaaactccgccttagacaaactaccaaagtacaatcgtgtctctctctagccggaatgctacagagagaaatggaaccttagatttgcaacaaaagtctgtaaactggtctgtttgccaaagtgaacactggatgactaaggagctgaagagaagacgacagaaggggatttgtggtgggttattttattttgcctgtggccaatcttctgtgaaatacaatgtgctgttggtgcaacagatgattcaataaatgtctacagcaga

SEQ ID NO: 81938 - DNA, 2931 bp, Homo sapiens
gtgaagatctgcgggtcatgctgtccctaatgcgctgattgcattaagtggattctggctgcagcgtttgcctcagcatggagggcggggccgcggcagccacccccacagcactgccttactacgtggccttctcccagctgctgggcctgaccttggtggccatgaccggcgcgtggctcgggctgtaccgaggcggcattgcctgggagagcgacctgcagttcaacgcgcaccccctctgcatggtcataggcctgatcttcctgcagggaaatgccctgctggtttaccgtgtcttcaggaacgaagctaaacgcaccaccaaggtcctgcacgggctgctgcacatctttgcgctcgtcatcgccctggttggcttggtggcggtgttcgactaccacaggaagaagggctacgctgacctgtacagcctacacagctggtgcgggatccttgtctttgtcctgtactttgtgcagtggctggtgggcttcagcttcttcctgttccccggagcttcattctccctgcggagccgctaccgcccacagcacatcttctttggtgctaccatcttcctcctttccgtgggcaccgccctgctgggcctgaaggaggcactgctgttcaacctcgggggcaagtatagcgcatttgagcccgagggtgtcctggccaacgtgctgggcctgctgctggcctgcttcggtggggcggtgctctacatcttgacccgggccgactggaagcggccttcccaggcggaagagcaggccctctccatggacttcaagacgctgacggagggagatagccccggctcccagtgatgcgcccggccggccctgggggttcgcggggtgtcttcttgcctgcccctgctgaggcgtcttcaggactgcaggctccggagagtggctctggcagcaggcgggcgcgtgggtgcagctgcatctgtttgagtgctgctttctggggtcaggtctccgcctcctctgcttctcctttctccgctgctatagaccagttcattgtgtgtggctcccgtgtctctgttgcccccttcagtgcagaaggctttgggtaggacttcgggtgttcggtcctggtcgcagagcacagatctttaaagaagcgagagaggaggccccaccctcctggcagcagatgcctggggcaaggccagggaaactgggggggcctcagggacaggcctggaaaggccacgatggctgctgaattcaaacaaggagtccctccagcctgaataacacgtggcacaaatgggcccggcctttggcagaggagcaagtgatatgatgtgtaaagtatgttggtggtgaaagcaaggttccccaggagaggggagggactggcccctgggaagctctgagatgaggctgtggcccagctgtagtcctgaccttcctcttctttaaccctttagccctaggatggctttggtgggagaggggatagaagcccatgacttcagacagactttctcttggcagatgcaggcgggcctcctcccaggctgctccagacatgggggttggggatggggggcaccttgcagccccttcctgctggggctccctccttgtagcaccccccttgcggctcagctctggtttcctctcccaggctcacccaggctctgctcaggctgggaggcagagggcacaaaccttataattttttaaatgaaaaaccgctgctgctggctgtggctagagccccctggggctgctggagctgctgcctctgttctggaggacgagccttctccttatctgctgcccatctttccaggaagtcaggatggagtcagaacaactacagtcatcccccgtggtgtctgcacatcactccagccccataaagagtgtcatgttagctgagtcaccatttggcttcggcctggaaatagtgtgattagaacactgatcgtgtgcgaggccaggagatcaagaccatcctgactaacaaacacagtgaaaccccgtctctactaaaaatacaaaaaaattagccaggcgtggtggtgggcgcctgtagtcccagctacttgggaggctgaggcaggagaatggtgtgaacccgggagatggcgcttgcagtgagctgagattgcactccagcctgggcgacaggctcaaaaaagaaaaaaaaaagaacaccgatcatgtgcttcttggatctggtgactgttctctccctgttttcctttctttttgggtgtttgaggagcatggcttagcttgagacacacacagacactgtgtacttcagtgaagggcttaatatacagtttccaaacctgacgactcttcttcttgtaatggctgcccttttcctacctgaggccgtcttagagaaaggggccagtctcctctaatgctcagatttcccatagttggcttttgctgtgtctcctgcctcaggcagtgtcatttctgggagcaggtggttgtagtccaggcccctccccagcagggtctgcccaggctccttcgagcccctttccccgcctcctctcagcctgtccggatgacagtgttcgcctcctgtttagactgtacactcttcaggggtaggggtgccgtcagttcttcaatcagctggcacacacttgtatagtgaaatgtttacatgtgggaaaactccgccttagacaaactaccaaagtacaatcgtgtctctctctagccggaatgctacagagagaaatggaaccttagatttgcaacaaaagtctgtaaactggtctgtttgccaaagtgaacactggatgactaaggagctgaagagaagacgacagaaggggatttgtggtgggttattttattttgcctgtggccaatcttctgtgaaatacaatgtgctgttggtgcaacagatgattcaataaatgtctacagcaga

SEQ ID NO: 81939 - DNA, 2841 bp, Homo sapiens
gaccaggggggacagcacttctttcagtacattttcctgttagactcggggtattagagacccaaagatacccaaggaggagtgagagcgtccctgccttcgaggagcagacagggcaccgcgaggcgtttgcctcagcatggagggcggggccgcggcagccacccccacagcactgccttactacgtggccttctcccagctgctgggcctgaccttggtggccatgaccggcgcgtggctcgggctgtaccgaggcggcattgcctgggagagcgacctgcagttcaacgcgcaccccctctgcatggtcataggcctgatcttcctgcagggaaatgccctgctggtttaccgtgtcttcaggaacgaagctaaacgcaccaccaaggtcctgcacgggctgctgcacatctttgcgctcgtcatcgccctggttggcttggtggcggtgttcgactaccacaggaagaagggctacgctgacctgtacagcctacacagctggtgcgggatccttgtctttgtcctgtactttgtgcagtggctggtgggcttcagcttcttcctgttccccggagcttcattctccctgcggagccgctaccgcccacagcacatcttctttggtgctctacatcttgacccgggccgactggaagcggccttcccaggcggaagagcaggccctctccatggacttcaagacgctgacggagggagatagccccggctcccagtgatgcgcccggccggccctgggggttcgcggggtgtcttcttgcctgcccctgctgaggcgtcttcaggactgcaggctccggagagtggctctggcagcaggcgggcgcgtgggtgcagctgcatctgtttgagtgctgctttctggggtcaggtctccgcctcctctgcttctcctttctccgctgctatagaccagttcattgtgtgtggctcccgtgtctctgttgcccccttcagtgcagaaggctttgggtaggacttcgggtgttcggtcctggtcgcagagcacagatctttaaagaagcgagagaggaggccccaccctcctggcagcagatgcctggggcaaggccagggaaactgggggggcctcagggacaggcctggaaaggccacgatggctgctgaattcaaacaaggagtccctccagcctgaataacacgtggcacaaatgggcccggcctttggcagaggagcaagtgatatgatgtgtaaagtatgttggtggtgaaagcaaggttccccaggagaggggagggactggcccctgggaagctctgagatgaggctgtggcccagctgtagtcctgaccttcctcttctttaaccctttagccctaggatggctttggtgggagaggggatagaagcccatgacttcagacagactttctcttggcagatgcaggcgggcctcctcccaggctgctccagacatgggggttggggatggggggcaccttgcagccccttcctgctggggctccctccttgtagcaccccccttgcggctcagctctggtttcctctcccaggctcacccaggctctgctcaggctgggaggcagagggcacaaaccttataattttttaaatgaaaaaccgctgctgctggctgtggctagagccccctggggctgctggagctgctgcctctgttctggaggacgagccttctccttatctgctgcccatctttccaggaagtcaggatggagtcagaacaactacagtcatcccccgtggtgtctgcacatcactccagccccataaagagtgtcatgttagctgagtcaccatttggcttcggcctggaaatagtgtgattagaacactgatcgtgtgcgaggccaggagatcaagaccatcctgactaacaaacacagtgaaaccccgtctctactaaaaatacaaaaaaattagccaggcgtggtggtgggcgcctgtagtcccagctacttgggaggctgaggcaggagaatggtgtgaacccgggagatggcgcttgcagtgagctgagattgcactccagcctgggcgacaggctcaaaaaagaaaaaaaaaagaacaccgatcatgtgcttcttggatctggtgactgttctctccctgttttcctttctttttgggtgtttgaggagcatggcttagcttgagacacacacagacactgtgtacttcagtgaagggcttaatatacagtttccaaacctgacgactcttcttcttgtaatggctgcccttttcctacctgaggccgtcttagagaaaggggccagtctcctctaatgctcagatttcccatagttggcttttgctgtgtctcctgcctcaggcagtgtcatttctgggagcaggtggttgtagtccaggcccctccccagcagggtctgcccaggctccttcgagcccctttccccgcctcctctcagcctgtccggatgacagtgttcgcctcctgtttagactgtacactcttcaggggtaggggtgccgtcagttcttcaatcagctggcacacacttgtatagtgaaatgtttacatgtgggaaaactccgccttagacaaactaccaaagtacaatcgtgtctctctctagccggaatgctacagagagaaatggaaccttagatttgcaacaaaagtctgtaaactggtctgtttgccaaagtgaacactggatgactaaggagctgaagagaagacgacagaaggggatttgtggtgggttattttattttgcctgtggccaatcttctgtgaaatacaatgtgctgttggtgcaacagatgattcaataaatgtctacagcaga

SEQ ID NO: 81940 - DNA, 2821 bp, Homo sapiens
ccgccgcccggttgccatggcgacgccgtcgcgccacggcccgcagaaccggccaagcgacccgggcgcggcgcggggaggctgaagggacgctcgggtaggcaagcgtttgcctcagcatggagggcggggccgcggcagccacccccacagcactgccttactacgtggccttctcccagctgctgggcctgaccttggtggccatgaccggcgcgtggctcgggctgtaccgaggcggcattgcctgggagagcgacctgcagttcaacgcgcaccccctctgcatggtcataggcctgatcttcctgcagggaaatgccctgctggtttaccgtgtcttcaggaacgaagctaaacgcaccaccaaggtcctgcacgggctgctgcacatctttgcgctcgtcatcgccctggttggcttggtggcggtgttcgactaccacaggaagaagggctacgctgacctgtacagcctacacagctggtgcgggatccttgtctttgtcctgtactttgtgcagtggctggtgggcttcagcttcttcctgttccccggagcttcattctccctgcggagccgctaccgcccacagcacatcttctttggtgctctacatcttgacccgggccgactggaagcggccttcccaggcggaagagcaggccctctccatggacttcaagacgctgacggagggagatagccccggctcccagtgatgcgcccggccggccctgggggttcgcggggtgtcttcttgcctgcccctgctgaggcgtcttcaggactgcaggctccggagagtggctctggcagcaggcgggcgcgtgggtgcagctgcatctgtttgagtgctgctttctggggtcaggtctccgcctcctctgcttctcctttctccgctgctatagaccagttcattgtgtgtggctcccgtgtctctgttgcccccttcagtgcagaaggctttgggtaggacttcgggtgttcggtcctggtcgcagagcacagatctttaaagaagcgagagaggaggccccaccctcctggcagcagatgcctggggcaaggccagggaaactgggggggcctcagggacaggcctggaaaggccacgatggctgctgaattcaaacaaggagtccctccagcctgaataacacgtggcacaaatgggcccggcctttggcagaggagcaagtgatatgatgtgtaaagtatgttggtggtgaaagcaaggttccccaggagaggggagggactggcccctgggaagctctgagatgaggctgtggcccagctgtagtcctgaccttcctcttctttaaccctttagccctaggatggctttggtgggagaggggatagaagcccatgacttcagacagactttctcttggcagatgcaggcgggcctcctcccaggctgctccagacatgggggttggggatggggggcaccttgcagccccttcctgctggggctccctccttgtagcaccccccttgcggctcagctctggtttcctctcccaggctcacccaggctctgctcaggctgggaggcagagggcacaaaccttataattttttaaatgaaaaaccgctgctgctggctgtggctagagccccctggggctgctggagctgctgcctctgttctggaggacgagccttctccttatctgctgcccatctttccaggaagtcaggatggagtcagaacaactacagtcatcccccgtggtgtctgcacatcactccagccccataaagagtgtcatgttagctgagtcaccatttggcttcggcctggaaatagtgtgattagaacactgatcgtgtgcgaggccaggagatcaagaccatcctgactaacaaacacagtgaaaccccgtctctactaaaaatacaaaaaaattagccaggcgtggtggtgggcgcctgtagtcccagctacttgggaggctgaggcaggagaatggtgtgaacccgggagatggcgcttgcagtgagctgagattgcactccagcctgggcgacaggctcaaaaaagaaaaaaaaaagaacaccgatcatgtgcttcttggatctggtgactgttctctccctgttttcctttctttttgggtgtttgaggagcatggcttagcttgagacacacacagacactgtgtacttcagtgaagggcttaatatacagtttccaaacctgacgactcttcttcttgtaatggctgcccttttcctacctgaggccgtcttagagaaaggggccagtctcctctaatgctcagatttcccatagttggcttttgctgtgtctcctgcctcaggcagtgtcatttctgggagcaggtggttgtagtccaggcccctccccagcagggtctgcccaggctccttcgagcccctttccccgcctcctctcagcctgtccggatgacagtgttcgcctcctgtttagactgtacactcttcaggggtaggggtgccgtcagttcttcaatcagctggcacacacttgtatagtgaaatgtttacatgtgggaaaactccgccttagacaaactaccaaagtacaatcgtgtctctctctagccggaatgctacagagagaaatggaaccttagatttgcaacaaaagtctgtaaactggtctgtttgccaaagtgaacactggatgactaaggagctgaagagaagacgacagaaggggatttgtggtgggttattttattttgcctgtggccaatcttctgtgaaatacaatgtgctgttggtgcaacagatgattcaataaatgtctacagcaga

SEQ ID NO: 81941 - DNA, 2247 bp, Homo sapiens
atcgtatctttccaaagtgcagacaaaacaggcatcttcatggtaattttttttaataaataaaagcacggccttcccaggcggaagagcaggccctctccatggacttcaagacgctgacggagggagatagccccggctcccagtgatgcgcccggccggccctgggggttcgcggggtgtcttcttgcctgcccctgctgaggcgtcttcaggactgcaggctccggagagtggctctggcagcaggcgggcgcgtgggtgcagctgcatctgtttgagtgctgctttctggggtcaggtctccgcctcctctgcttctcctttctccgctgctatagaccagttcattgtgtgtggctcccgtgtctctgttgcccccttcagtgcagaaggctttgggtaggacttcgggtgttcggtcctggtcgcagagcacagatctttaaagaagcgagagaggaggccccaccctcctggcagcagatgcctggggcaaggccagggaaactgggggggcctcagggacaggcctggaaaggccacgatggctgctgaattcaaacaaggagtccctccagcctgaataacacgtggcacaaatgggcccggcctttggcagaggagcaagtgatatgatgtgtaaagtatgttggtggtgaaagcaaggttccccaggagaggggagggactggcccctgggaagctctgagatgaggctgtggcccagctgtagtcctgaccttcctcttctttaaccctttagccctaggatggctttggtgggagaggggatagaagcccatgacttcagacagactttctcttggcagatgcaggcgggcctcctcccaggctgctccagacatgggggttggggatggggggcaccttgcagccccttcctgctggggctccctccttgtagcaccccccttgcggctcagctctggtttcctctcccaggctcacccaggctctgctcaggctgggaggcagagggcacaaaccttataattttttaaatgaaaaaccgctgctgctggctgtggctagagccccctggggctgctggagctgctgcctctgttctggaggacgagccttctccttatctgctgcccatctttccaggaagtcaggatggagtcagaacaactacagtcatcccccgtggtgtctgcacatcactccagccccataaagagtgtcatgttagctgagtcaccatttggcttcggcctggaaatagtgtgattagaacactgatcgtgtgcgaggccaggagatcaagaccatcctgactaacaaacacagtgaaaccccgtctctactaaaaatacaaaaaaattagccaggcgtggtggtgggcgcctgtagtcccagctacttgggaggctgaggcaggagaatggtgtgaacccgggagatggcgcttgcagtgagctgagattgcactccagcctgggcgacaggctcaaaaaagaaaaaaaaaagaacaccgatcatgtgcttcttggatctggtgactgttctctccctgttttcctttctttttgggtgtttgaggagcatggcttagcttgagacacacacagacactgtgtacttcagtgaagggcttaatatacagtttccaaacctgacgactcttcttcttgtaatggctgcccttttcctacctgaggccgtcttagagaaaggggccagtctcctctaatgctcagatttcccatagttggcttttgctgtgtctcctgcctcaggcagtgtcatttctgggagcaggtggttgtagtccaggcccctccccagcagggtctgcccaggctccttcgagcccctttccccgcctcctctcagcctgtccggatgacagtgttcgcctcctgtttagactgtacactcttcaggggtaggggtgccgtcagttcttcaatcagctggcacacacttgtatagtgaaatgtttacatgtgggaaaactccgccttagacaaactaccaaagtacaatcgtgtctctctctagccggaatgctacagagagaaatggaaccttagatttgcaacaaaagtctgtaaactggtctgtttgccaaagtgaacactggatgactaaggagctgaagagaagacgacagaaggggatttgtggtgggttattttattttgcctgtggccaatcttctgtgaaatacaatgtgctgttggtgcaacagatgattcaataaatgtctacagcaga

SEQ ID NO: 81942 - DNA, 1343 bp, Homo sapiens
attcggcacgacccctgtcgcccaggctggagtgcaatctcagctctggtttcctctcccaggctcacccaggctctgctcaggctgggaggcagagggcacaaaccttataattttttaaatgaaaaaccgctgctgctggctgtggctagagccccctggggctgctggagctgctgcctctgttctggaggacgagccttctccttatctgctgcccatctttccaggaagtcaggatggagtcagaacaactacagtcatcccccgtggtgtctgcacatcactccagccccataaagagtgtcatgttagctgagtcaccatttggcttcggcctggaaatagtgtgattagaacactgatcgtgtgcgaggccaggagatcaagaccatcctgactaacaaacacagtgaaaccccgtctctactaaaaatacaaaaaaattagccaggcgtggtggtgggcgcctgtagtcccagctacttgggaggctgaggcaggagaatggtgtgaacccgggagatggcgcttgcagtgagctgagattgcactccagcctgggcgacaggctcaaaaaagaaaaaaaaaagaacaccgatcatgtgcttcttggatctggtgactgttctctccctgttttcctttctttttgggtgtttgaggagcatggcttagcttgagacacacacagacactgtgtacttcagtgaagggcttaatatacagtttccaaacctgacgactcttcttcttgtaatggctgcccttttcctacctgaggccgtcttagagaaaggggccagtctcctctaatgctcagatttcccatagttggcttttgctgtgtctcctgcctcaggcagtgtcatttctgggagcaggtggttgtagtccaggcccctccccagcagggtctgcccaggctccttcgagcccctttccccgcctcctctcagcctgtccggatgacagtgttcgcctcctgtttagactgtacactcttcaggggtaggggtgccgtcagttcttcaatcagctggcacacacttgtatagtgaaatgtttacatgtgggaaaactccgccttagacaaactaccaaagtacaatcgtgtctctctctagccggaatgctacagagagaaatggaaccttagatttgcaacaaaagtctgtaaactggtctgtttgccaaagtgaacactggatgactaaggagctgaagagaagacgacagaaggggatttgtggtgggttattttattttgcctgtggccaatcttctgtgaaatacaatgtgctgttggtgcaacagatgattcaataaatgtctacagcaga

SEQ ID NO: 81943 - DNA, 1815 bp, Homo sapiens
gaccaggggggacagcacttctttcagtacattttcctgttagactcggggtattagagacccaaagatacccaaggaggagtgagagcgtccctgccttcgaggagcagacagggcaccgcgaggcgtttgcctcagcatggagggcggggccgcggcagccacccccacagcactgccttactacgtggccttctcccagctgctgggcctgaccttggtggccatgaccggcgcgtggctcgggctgtaccgaggcggcattgcctgggagagcgacctgcagttcaacgcgcaccccctctgcatggtcataggcctgatcttcctgcagggaaatgccctgctggtttaccgtgtcttcaggaacgaagctaaacgcaccaccaaggtcctgcacgggctgctgcacatctttgcgctcgtcatcgccctggttggcttggtggcggtgttcgactaccacaggaagaagggctacgctgacctgtacagcctacacagctggtgcgggatccttgtctttgtcctgtactttgtgcagtggctggtgggcttcagcttcttcctgttccccggagcttcattctccctgcggagccgctaccgcccacagcacatcttctttggtgctaccatcttcctcctttccgtgggcaccgccctgctgggcctgaaggaggcactgctgttcaacctcgggaagtcaggatggagtcagaacaactacagtcatcccccgtggtgtctgcacatcactccagccccataaagagtgtcatgttagctgagtcaccatttggcttcggcctggaaatagtgtgattagaacactgatcgtgtgcgaggccaggagatcaagaccatcctgactaacaaacacagtgaaaccccgtctctactaaaaatacaaaaaaattagccaggcgtggtggtgggcgcctgtagtcccagctacttgggaggctgaggcaggagaatggtgtgaacccgggagatggcgcttgcagtgagctgagattgcactccagcctgggcgacaggctcaaaaaagaaaaaaaaaagaacaccgatcatgtgcttcttggatctggtgactgttctctccctgttttcctttctttttgggtgtttgaggagcatggcttagcttgagacacacacagacactgtgtacttcagtgaagggcttaatatacagtttccaaacctgacgactcttcttcttgtaatggctgcccttttcctacctgaggccgtcttagagaaaggggccagtctcctctaatgctcagatttcccatagttggcttttgctgtgtctcctgcctcaggcagtgtcatttctgggagcaggtggttgtagtccaggcccctccccagcagggtctgcccaggctccttcgagcccctttccccgcctcctctcagcctgtccggatgacagtgttcgcctcctgtttagactgtacactcttcaggggtaggggtgccgtcagttcttcaatcagctggcacacacttgtatagtgaaatgtttacatgtgggaaaactccgccttagacaaactaccaaagtacaatcgtgtctctctctagccggaatgctacagagagaaatggaaccttagatttgcaacaaaagtctgtaaactggtctgtttgccaaagtgaacactggatgactaaggagctgaagagaagacgacagaaggggatttgtggtgggttattttattttgcctgtggccaatcttctgtgaaatacaatgtgctgttggtgcaacagatgattcaataaatgtctacagcaga

SEQ ID NO: 81944 - DNA, 1129 bp, Homo sapiens
gagcctgttttccaggatggagtgcaatctcagctaacaactacagtcatcccccgtggtgtctgcacatcactccagccccataaagagtgtcatgttagctgagtcaccatttggcttcggcctggaaatagtgtgattagaacactgatcgtgtgcgaggccaggagatcaagaccatcctgactaacaaacacagtgaaaccccgtctctactaaaaatacaaaaaaattagccaggcgtggtggtgggcgcctgtagtcccagctacttgggaggctgaggcaggagaatggtgtgaacccgggagatggcgcttgcagtgagctgagattgcactccagcctgggcgacaggctcaaaaaagaaaaaaaaaagaacaccgatcatgtgcttcttggatctggtgactgttctctccctgttttcctttctttttgggtgtttgaggagcatggcttagcttgagacacacacagacactgtgtacttcagtgaagggcttaatatacagtttccaaacctgacgactcttcttcttgtaatggctgcccttttcctacctgaggccgtcttagagaaaggggccagtctcctctaatgctcagatttcccatagttggcttttgctgtgtctcctgcctcaggcagtgtcatttctgggagcaggtggttgtagtccaggcccctccccagcagggtctgcccaggctccttcgagcccctttccccgcctcctctcagcctgtccggatgacagtgttcgcctcctgtttagactgtacactcttcaggggtaggggtgccgtcagttcttcaatcagctggcacacacttgtatagtgaaatgtttacatgtgggaaaactccgccttagacaaactaccaaagtacaatcgtgtctctctctagccggaatgctacagagagaaatggaaccttagatttgcaacaaaagtctgtaaactggtctgtttgccaaagtgaacactggatgactaaggagctgaagagaagacgacagaaggggatttgtggtgggttattttattttgcctgtggccaatcttctgtgaaatacaatgtgctgttggtgcaacagatgattcaataaatgtctacagcaga

SEQ ID NO: 81945 - DNA, 466 bp, Homo sapiens
cccctctgttcttcctaatttgtagctaatcagattctgcctgcagccaggctctctggggatgaatctaataaaggaggcggcgacctggagaggaggacagacaacaagtgaccaggggggacagcacttctttcagtacattttcctgttagactcggggtattagagacccaaagatacccaaggaggagtgagagcgtccctgccttcgaggagcagacagggcaccgcgagggtaaggaggctccgggagagcctggggacagagtgatctgcgcaccgcggtgcctgaggagtggaggcaggggtgtgggcccacagcagggagccaggctgggccatgtccttggattctgtgagcccaggcgtctcctctagagggcctagcaggaacagtgggggctgcagatggaaacgggcaggatcatgccatgcagttggcatttcactggcactcgggggc

SEQ ID NO: 81946 - DNA, 2650 bp, Homo sapiens
  misc_feature (122)..(122): n is a, c, g, or t
  misc_feature (2648)..(2648): n is a, c, g, or t
ggagccgcgccgcatctcaggcgcagtctctaggggctgtgcgcatcctagggggggacatgtgcatctcaggggggctgctcgcatctggggggtgctgtgtgcatctcgggggggctgtngcatctagcggggtggctgtgtccgcatctggagggggctgtgcgcaacccggggggggtgttgcgcgcatctagcaggggcggctgtgcgcatttcgggggggggctgtgcatatctggggggaccgtgcttatctctgggggcggctgtgcgcatcttgaggggtgtgtacatctcggggggcctgtgcgcatcttggggggctgtgtgcatccgcgggggctgtgcgcatctcggggtgctgtgcgctgctcctctgagctctgctctttcttgcagcgtttgcctcagcatggagggcggggccgcggcagccacccccacagcactgccttactacgtggccttctcccagctgctgggcctgaccttggtggccatgaccggcgcgtggctcgggctgtaccgaggcggcattgcctgggagagcgacctgcagttcaacgcgcaccccctctgcatggtcataggcctgatcttcctgcagggaaatgccctgctggtttaccgtgtcttcaggaacgaagctaaacgcaccaccaaggtcctgcacgggctgctgcacatctttgcgctcgtcatcgccctggttggcttggtggcggtgttcgactaccacaggaagaagggctacgctgacctgtacagcctacacagctggtgcgggatccttgtctttgtcctgtactttgtgcagtggctggtgggcttcagcttcttcctgttccccggagcttcattctccctgcggagccgctaccgcccacagcacatcttctttggtgctaccatcttcctcctttccgtgggcaccgccctgctgggcctgaaggaggcactgctgttcaacctcgggggcaagtatagcgcatttgagcccgagggtgtcctggccaacgtgctgggcctgctgctggcctgcttcggtggggcggtgctctacatcttgacccgggccgactggaagcggccttcccaggcggaagagcaggccctctccatggacttcaagacgctgacggagggagatagccccggctcccagtgatgcgcccggccggccctgggggttcgcggggtgtcttcttgcctgcccctgctgaggcgtcttcaggactgcaggctccggagagtggctctggcagcaggcgggcgcgtgggtgcagctgcatctgtttgagtgctgctttctggggtcaggtctccgcctcctctgcttctcctttctccgctgctatagaccagttcattgtgtgtggctcccgtgtctctgttgcccccttcagtgcagaaggctttgggtaggacttcgggtgttcggtcctggtcgcagagcacagatctttaaagaagcgagagaggaggccccaccctcctggcagcagatgcctggggcaaggccagggaaactgggggggcctcagggacaggcctggaaaggccacgatggctgctgaattcaaacaaggagtccctccagcctgaataacacgtggcacaaatgggcccggcctttggcagaggagcaagtgatatgatgtgtaaagtatgttggtggtgaaagcaaggttccccaggagaggggagggactggcccctgggaagctctgagatgaggctgtggcccagctgtagtcctgaccttcctcttctttaaccctttagccctaggatggctttggtgggagaggggatagaagcccatgacttcagacagactttctcttggcagatgcaggcgggcctcctcccaggctgctccagacatgggggttggggatggggggcaccttgcagccccttcctgctggggctccctccttgtagcaccccccttgcggctcagctctggtttcctctcccaggctcacccaggctctgctcaggctgggaggcagagggcacaaaccttataattttttaaatgaaaaaccgctgctgctggctgtggctagagccccctggggctgctggagctgctgcctctgttctggaggacgagccttctccttatctgctgcccatctttccaggaagtcaggatggagtcagaacaactacagtcatcccccgtggtgtctgcacatcactccagccccataaagagtgtcatgttagctgagtcaccatttggcttcggcctggaaatagtgtgattagaacactgatcgtgtgcgaggccaggagatcaagaccatcctgactaacaaacacagtgaaaccccgtctctacggaattccctgtattagtctatatggttctccaagaaactgaatgaatccattggagaagcggtggataactagccagacaaaatttgagaatacataaacaacgcattccgcaggaaacatacagaggatgccttttctgtgattgggtgggattttttccctttttatgtggatatagtagttacttgtgacaagaataattttggaataatttctattaatatcaactctgaagctaattgtacataatctcgagattgtgtttgttcataataaaagtgaagtgaatntg

SEQ ID NO: 81947 - DNA, 2973 bp, Homo sapiens
ccgccgcccggttgccatggcgacgccgtcgcgccacggcccgcagaaccggccaagcgacccgggcgcggcgcggggaggctgaagggacgctcgggtaggcaagcgtttgcctcagcatggagggcggggccgcggcagccacccccacagcactgccttactacgtggccttctcccagctgctgggcctgaccttggtggccatgaccggcgcgtggctcgggctgtaccgaggcggcattgcctgggagagcgacctgcagttcaacgcgcaccccctctgcatggtcataggcctgatcttcctgcagggaaatgccctgctggtttaccgtgtcttcaggaacgaagctaaacgcaccaccaaggtcctgcacgggctgctgcacatctttgcgctcgtcatcgccctggttggcttggtggcggtgttcgactaccacaggaagaagggctacgctgacctgtacagcctacacagctggtgcgggatccttgtctttgtcctgtactttgtgcagtggctggtgggcttcagcttcttcctgttccccggagcttcattctccctgcggagccgctaccgcccacagcacatcttctttggtgctaccatcttcctcctttccgtgggcaccgccctgctgggcctgaaggaggcactgctgttcaacctcgggggcaagtatagcgcatttgagcccgagggtgtcctggccaacgtgctgggcctgctgctggcctgcttcggtggggcggtgctctacatcttgacccgggccgactggaagcggccttcccaggcggaagagcaggccctctccatggacttcaagacgctgacggagggagatagccccggctcccagtgatgcgcccggccggccctgggggttcgcggggtgtcttcttgcctgcccctgctgaggcgtcttcaggactgcaggctccggagagtggctctggcagcaggcgggcgcgtgggtgcagctgcatctgtttgagtgctgctttctggggtcaggtctccgcctcctctgcttctcctttctccgctgctatagaccagttcattgtgtgtggctcccgtgtctctgttgcccccttcagtgcagaaggctttgggtaggacttcgggtgttcggtcctggtcgcagagcacagatctttaaagaagcgagagaggaggccccaccctcctggcagcagatgcctggggcaaggccagggaaactgggggggcctcagggacaggcctggaaaggccacgatggctgctgaattcaaacaaggagtccctccagcctgaataacacgtggcacaaatgggcccggcctttggcagaggagcaagtgatatgatgtgtaaagtatgttggtggtgaaagcaaggttccccaggagaggggagggactggcccctgggaagctctgagatgaggctgtggcccagctgtagtcctgaccttcctcttctttaaccctttagccctaggatggctttggtgggagaggggatagaagcccatgacttcagacagactttctcttggcagatgcaggcgggcctcctcccaggctgctccagacatgggggttggggatggggggcaccttgcagccccttcctgctggggctccctccttgtagcaccccccttgcggctcagctctggtttcctctcccaggctcacccaggctctgctcaggctgggaggcagagggcacaaaccttataattttttaaatgaaaaaccgctgctgctggctgtggctagagccccctggggctgctggagctgctgcctctgttctggaggacgagccttctccttatctgctgcccatctttccaggaagtcaggatggagtcagaacaactacagtcatcccccgtggtgtctgcacatcactccagccccataaagagtgtcatgttagctgagtcaccatttggcttcggcctggaaatagtgtgattagaacactgatcgtgtgcgaggccaggagatcaagaccatcctgactaacaaacacagtgaaaccccgtctctactaaaaatacaaaaaaattagccaggcgtggtggtgggcgcctgtagtcccagctacttgggaggctgaggcaggagaatggtgtgaacccgggagatggcgcttgcagtgagctgagattgcactccagcctgggcgacaggctcaaaaaagaaaaaaaaaagaacaccgatcatgtgcttcttggatctggtgactgttctctccctgttttcctttctttttgggtgtttgaggagcatggcttagcttgagacacacacagacactgtgtacttcagtgaagggcttaatatacagtttccaaacctgacgactcttcttcttgtaatggctgcccttttcctacctgaggccgtcttagagaaaggggccagtctcctctaatgctcagatttcccatagttggcttttgctgtgtctcctgcctcaggcagtgtcatttctgggagcaggtggttgtagtccaggcccctccccagcagggtctgcccaggctccttcgagcccctttccccgcctcctctcagcctgtccggatgacagtgttcgcctcctgtttagactgtacactcttcaggggtaggggtgccgtcagttcttcaatcagctggcacacacttgtatagtgaaatgtttacatgtgggaaaactccgccttagacaaactaccaaagtacaatcgtgtctctctctagccggaatgctacagagagaaatggaaccttagatttgcaacaaaagtctgtaaactggtctgtttgccaaagtgaacactggatgactaaggagctgaagagaagacgacagaaggggatttgtggtgggttattttattttgcctgtggccaatcttctgtgaaatacaatgtgctgttggtgcaacagatgattcaataaatgtctacagcaga

SEQ ID NO: 81948 - DNA, 3082 bp, Homo sapiens
tgcggccgcgcactggactgcggcgccgacccgcaccctgggcccgagggctgcagggctcgcccgccctctcggagccgagcctctcccggtccaggcggcccctgccctggcctgcccgggtgccgggtctctgctgaagttagaaccgagacccccgcttgctggtgaccccgagtttggatctttgctcctgcgccgcgttctagagcaagcgtttgcctcagcatggagggcggggccgcggcagccacccccacagcactgccttactacgtggccttctcccagctgctgggcctgaccttggtggccatgaccggcgcgtggctcgggctgtaccgaggcggcattgcctgggagagcgacctgcagttcaacgcgcaccccctctgcatggtcataggcctgatcttcctgcagggaaatgccctgctggtttaccgtgtcttcaggaacgaagctaaacgcaccaccaaggtcctgcacgggctgctgcacatctttgcgctcgtcatcgccctggttggcttggtggcggtgttcgactaccacaggaagaagggctacgctgacctgtacagcctacacagctggtgcgggatccttgtctttgtcctgtactttgtgcagtggctggtgggcttcagcttcttcctgttccccggagcttcattctccctgcggagccgctaccgcccacagcacatcttctttggtgctaccatcttcctcctttccgtgggcaccgccctgctgggcctgaaggaggcactgctgttcaacctcgggggcaagtatagcgcatttgagcccgagggtgtcctggccaacgtgctgggcctgctgctggcctgcttcggtggggcggtgctctacatcttgacccgggccgactggaagcggccttcccaggcggaagagcaggccctctccatggacttcaagacgctgacggagggagatagccccggctcccagtgatgcgcccggccggccctgggggttcgcggggtgtcttcttgcctgcccctgctgaggcgtcttcaggactgcaggctccggagagtggctctggcagcaggcgggcgcgtgggtgcagctgcatctgtttgagtgctgctttctggggtcaggtctccgcctcctctgcttctcctttctccgctgctatagaccagttcattgtgtgtggctcccgtgtctctgttgcccccttcagtgcagaaggctttgggtaggacttcgggtgttcggtcctggtcgcagagcacagatctttaaagaagcgagagaggaggccccaccctcctggcagcagatgcctggggcaaggccagggaaactgggggggcctcagggacaggcctggaaaggccacgatggctgctgaattcaaacaaggagtccctccagcctgaataacacgtggcacaaatgggcccggcctttggcagaggagcaagtgatatgatgtgtaaagtatgttggtggtgaaagcaaggttccccaggagaggggagggactggcccctgggaagctctgagatgaggctgtggcccagctgtagtcctgaccttcctcttctttaaccctttagccctaggatggctttggtgggagaggggatagaagcccatgacttcagacagactttctcttggcagatgcaggcgggcctcctcccaggctgctccagacatgggggttggggatggggggcaccttgcagccccttcctgctggggctccctccttgtagcaccccccttgcggctcagctctggtttcctctcccaggctcacccaggctctgctcaggctgggaggcagagggcacaaaccttataattttttaaatgaaaaaccgctgctgctggctgtggctagagccccctggggctgctggagctgctgcctctgttctggaggacgagccttctccttatctgctgcccatctttccaggaagtcaggatggagtcagaacaactacagtcatcccccgtggtgtctgcacatcactccagccccataaagagtgtcatgttagctgagtcaccatttggcttcggcctggaaatagtgtgattagaacactgatcgtgtgcgaggccaggagatcaagaccatcctgactaacaaacacagtgaaaccccgtctctactaaaaatacaaaaaaattagccaggcgtggtggtgggcgcctgtagtcccagctacttgggaggctgaggcaggagaatggtgtgaacccgggagatggcgcttgcagtgagctgagattgcactccagcctgggcgacaggctcaaaaaagaaaaaaaaaagaacaccgatcatgtgcttcttggatctggtgactgttctctccctgttttcctttctttttgggtgtttgaggagcatggcttagcttgagacacacacagacactgtgtacttcagtgaagggcttaatatacagtttccaaacctgacgactcttcttcttgtaatggctgcccttttcctacctgaggccgtcttagagaaaggggccagtctcctctaatgctcagatttcccatagttggcttttgctgtgtctcctgcctcaggcagtgtcatttctgggagcaggtggttgtagtccaggcccctccccagcagggtctgcccaggctccttcgagcccctttccccgcctcctctcagcctgtccggatgacagtgttcgcctcctgtttagactgtacactcttcaggggtaggggtgccgtcagttcttcaatcagctggcacacacttgtatagtgaaatgtttacatgtgggaaaactccgccttagacaaactaccaaagtacaatcgtgtctctctctagccggaatgctacagagagaaatggaaccttagatttgcaacaaaagtctgtaaactggtctgtttgccaaagtgaacactggatgactaaggagctgaagagaagacgacagaaggggatttgtggtgggttattttattttgcctgtggccaatcttctgtgaaatacaatgtgctgttggtgcaacagatgattcaataaatgtctacagcaga

SEQ ID NO: 81949 - DNA, 2808 bp, Homo sapiens
cttgctaggagtaggaccatctgcccaggcttaggtgggggcctgtgtgaggagccacgtggctaacaggtgaactcagaggctgcttgttgcctcagtgtgaccaacagtggacctcaaacacagcctggaatttgcaggacacctgacaagaagccctgctggtttaccgtgtcttcaggaacgaagctaaacgcaccaccaaggtcctgcacgggctgctgcacatctttgcgctcgtcatcgccctggttggcttggtggcggtgttcgactaccacaggaagaagggctacgctgacctgtacagcctacacagctggtgcgggatccttgtctttgtcctgtactttgtgcagtggctggtgggcttcagcttcttcctgttccccggagcttcattctccctgcggagccgctaccgcccacagcacatcttctttggtgctaccatcttcctcctttccgtgggcaccgccctgctgggcctgaaggaggcactgctgttcaacctcgggggcaagtatagcgcatttgagcccgagggtgtcctggccaacgtgctgggcctgctgctggcctgcttcggtggggcggtgctctacatcttgacccgggccgactggaagcggccttcccaggcggaagagcaggccctctccatggacttcaagacgctgacggagggagatagccccggctcccagtgatgcgcccggccggccctgggggttcgcggggtgtcttcttgcctgcccctgctgaggcgtcttcaggactgcaggctccggagagtggctctggcagcaggcgggcgcgtgggtgcagctgcatctgtttgagtgctgctttctggggtcaggtctccgcctcctctgcttctcctttctccgctgctatagaccagttcattgtgtgtggctcccgtgtctctgttgcccccttcagtgcagaaggctttgggtaggacttcgggtgttcggtcctggtcgcagagcacagatctttaaagaagcgagagaggaggccccaccctcctggcagcagatgcctggggcaaggccagggaaactgggggggcctcagggacaggcctggaaaggccacgatggctgctgaattcaaacaaggagtccctccagcctgaataacacgtggcacaaatgggcccggcctttggcagaggagcaagtgatatgatgtgtaaagtatgttggtggtgaaagcaaggttccccaggagaggggagggactggcccctgggaagctctgagatgaggctgtggcccagctgtagtcctgaccttcctcttctttaaccctttagccctaggatggctttggtgggagaggggatagaagcccatgacttcagacagactttctcttggcagatgcaggcgggcctcctcccaggctgctccagacatgggggttggggatggggggcaccttgcagccccttcctgctggggctccctccttgtagcaccccccttgcggctcagctctggtttcctctcccaggctcacccaggctctgctcaggctgggaggcagagggcacaaaccttataattttttaaatgaaaaaccgctgctgctggctgtggctagagccccctggggctgctggagctgctgcctctgttctggaggacgagccttctccttatctgctgcccatctttccaggaagtcaggatggagtcagaacaactacagtcatcccccgtggtgtctgcacatcactccagccccataaagagtgtcatgttagctgagtcaccatttggcttcggcctggaaatagtgtgattagaacactgatcgtgtgcgaggccaggagatcaagaccatcctgactaacaaacacagtgaaaccccgtctctactaaaaatacaaaaaaattagccaggcgtggtggtgggcgcctgtagtcccagctacttgggaggctgaggcaggagaatggtgtgaacccgggagatggcgcttgcagtgagctgagattgcactccagcctgggcgacaggctcaaaaaagaaaaaaaaaagaacaccgatcatgtgcttcttggatctggtgactgttctctccctgttttcctttctttttgggtgtttgaggagcatggcttagcttgagacacacacagacactgtgtacttcagtgaagggcttaatatacagtttccaaacctgacgactcttcttcttgtaatggctgcccttttcctacctgaggccgtcttagagaaaggggccagtctcctctaatgctcagatttcccatagttggcttttgctgtgtctcctgcctcaggcagtgtcatttctgggagcaggtggttgtagtccaggcccctccccagcagggtctgcccaggctccttcgagcccctttccccgcctcctctcagcctgtccggatgacagtgttcgcctcctgtttagactgtacactcttcaggggtaggggtgccgtcagttcttcaatcagctggcacacacttgtatagtgaaatgtttacatgtgggaaaactccgccttagacaaactaccaaagtacaatcgtgtctctctctagccggaatgctacagagagaaatggaaccttagatttgcaacaaaagtctgtaaactggtctgtttgccaaagtgaacactggatgactaaggagctgaagagaagacgacagaaggggatttgtggtgggttattttattttgcctgtggccaatcttctgtgaaatacaatgtgctgttggtgcaacagatgattcaataaatgtctacagcaga

SEQ ID NO: 81950 - DNA, 3545 bp, Homo sapiens
gaccaggggggacagcacttctttcagtacattttcctgttagactcggggtattagagacccaaagatacccaaggaggagtgagagcgtccctgccttcgaggagcagacagggcaccgcgaggcgtttgcctcagcatggagggcggggccgcggcagccacccccacagcactgccttactacgtggccttctcccagctgctgggcctgaccttggtggccatgaccggcgcgtggctcgggctgtaccgaggcggcattgcctgggagagcgacctgcagttcaacgcgcaccccctctgcatggtcataggcctgatcttcctgcagggaaatgccctgctggtttaccgtgtcttcaggaacgaagctaaacgcaccaccaaggtcctgcacgggctgctgcacatctttgcgctcgtcatcgccctggttggcttggtggcggtgttcgactaccacaggaagaagggctacgctgacctgtacagcctacacagctggtgcgggatccttgtctttgtcctgtactttgtgcagtggctggtgggcttcagcttcttcctgttccccggagcttcattctccctgcggagccgctaccgcccacagcacatcttctttggtgctaccatcttcctcctttccgtgggcaccgccctgctgggcctgaaggaggcactgctgttcaacctcgggggcaagtatagcgcatttgagcccgagggtgtcctggccaacgtgctgggcctgctgctggcctgcttcggtggggcggtgctctacatcttgacccgggccgactggaagcggccttcccaggcggaagagcaggccctctccatggacttcaagacgctgacggagggagatagccccggctcccagtgatgcgcccggccggccctgggggttcgcggggtgtcttcttgcctgcccctgctgaggcgtcttcaggactgcaggctccggagagtggctctggcagcaggcgggcgcgtgggtgcagctgcatctgtttgagtgctgctttctggggtcaggtctccgcctcctctgcttctcctttctccgctgctatagaccagttcattgtgtgtggctcccgtgtctctgttgcccccttcagtgcagaaggctttgggtaggacttcgggtgttcggtcctggtcgcagagcacagatctttaaagaagcgagagaggaggccccaccctcctggcagcagatgcctggggcaaggccagggaaactgggggggcctcagggacaggcctggaaaggccacgatggctgctgaattcaaacaaggagtccctccagcctgaataacacgtggcacaaatgggcccggcctttggcagaggagcaagtgatatgatgtgtaaagtatgttggtggtgaaagcaaggttccccaggagaggggagggactggcccctgggaagctctgagatgaggctgtggcccagctgtagtcctgaccttcctcttctttaaccctttagccctaggatggctttggtgggagaggggatagaagcccatgacttcagacagactttctcttggcagatgcaggcgggcctcctcccaggctgctccagacatgggggttggggatggggggcaccttgcagccccttcctgctggggctccctccttgtagcaccccccttgcggctcagctctggtttcctctcccaggctcacccaggctctgctcaggctgggaggcagagggcacaaaccttataattttttaaatgaaaaaccgctgctgctggctgtggctagagccccctggggctgctggagctgctgcctctgttctggaggacgagccttctccttatctgctgcccatctttccaggaagtcaggatggagtcagaacaactacagtcatcccccgtggtgtctgcacatcactccagccccataaagagtgtcatgttagctgagtcaccatttggcttcggcctggaaatagtgtgattagaacactgatcgtgtgcgaggccaggagatcaagaccatcctgactaacaaacacagtgaaaccccgtctctactaaaaatacaaaaaaattagccaggcgtggtggtgggcgcctgtagtcccagctacttgggaggctgaggcaggagaatggtgtgaacccgggagatggcgcttgcagtgagctgagattgcactccagcctgggcgacaggctcaaaaaagaaaaaaaaaagaacaccgatcatgtgcttcttggatctggtgactgttctctccctgttttcctttctttttgggtgtttgaggagcatggcttagcttgagacacacacagacactgtgtacttcagtgaagggcttaatatacagtttccaaacctgacgactcttcttcttgtaatggctgcccttttcctacctgaggccgtcttagagaaaggggccagtctcctctaatgctcagatttcccatagttggcttttgctgtgtctcctgcctcaggcagtgtcatttctgggagcaggtggttgtagtccaggcccctccccagcagggtctgcccaggctccttcgagcccctttccccgcctcctctcagcctgtccggatgacagtgttcgcctcctgtttagactgtacactcttcaggggtaggggtgccgtcagttcttcaatcagctggcacacacttgtatagtgaaatgtttacatgtgggaaaactccgccttagacaaactaccaaagtacaatcgtgtctctctctagccggaatgctacagagagaaatggaaccttagatttgcaacaaaagtctgtaaactggtctgtttgccaaagtgaacactggatgactaaggagctgaagagaagacgacagaaggggatttgtggtgggttattttattttgcctgtggccaatcttctgtgaaatacaatgtgctgttggtgcaacagatgattcaataaatgtctacagcagaaaaaaaacacaacggagaagagacacgaaacaaacaaacatttgtgtgggcgcgcactgggcccgagaaaagtttttataacaccacccgtgtgggggcgccgggccccaaaagttatagggcacacatgggccaaccggggcccaaggagaccccgcgccctagacaaagcgggtggggttccccccaatatagaaacgcgccgggggcaaccggggtttggaacaaactccagagggagttcggagggcaacaggggttctaacaaggggggcgccagggaaggccgaaaaaaaatacgccggaccggcggggagacaccgaaaaaaaagaaacagacgaagagaacaggcagaaagagacgaaaggaaatgacgtggccaggtaagcatcgaacgagacagacagagtgaagcagaaatggacaagaacaaagtcacacaccgaaaggaggaaaaacacacagaggagcgaggagcaagaaagaaggacacacagagaaagaaagaagaaaagaacacaacagagagagaacaagagagtaacaatatt

SEQ ID NO: 81951 - DNA, 3404 bp, Homo sapiens
gaccaggggggacagcacttctttcagtacattttcctgttagactcggggtattagagacccaaagatacccaaggaggagtgagagcgtccctgccttcgaggagcagacagggcaccgcgaggcgtttgcctcagcatggagggcggggccgcggcagccacccccacagcactgccttactacgtggccttctcccagctgctgggcctgaccttggtggccatgaccggcgcgtggctcgggctgtaccgaggcggcattgcctgggagagcgacctgcagttcaacgcgcaccccctctgcatggtcataggcctgatcttcctgcagggaaatgccctgctggtttaccgtgtcttcaggaacgaagctaaacgcaccaccaaggtcctgcacgggctgctgcacatctttgcgctcgtcatcgccctggttggcttggtggcggtgttcgactaccacaggaagaagggctacgctgacctgtacagcctacacagctggtgcgggatccttgtctttgtcctgtactttgtgcagtggctggtgggcttcagcttcttcctgttccccggagcttcattctccctgcggagccgctaccgcccacagcacatcttctttggtgctaccatcttcctcctttccgtgggcaccgccctgctgggcctgaaggaggcactgctgttcaacctcgggggcaagtatagcgcatttgagcccgagggtgtcctggccaacgtgctgggcctgctgctggcctgcttcggtggggcggtgctctacatcttgacccgggccgactggaagcggccttcccaggcggaagagcaggccctctccatggacttcaagacgctgacggagggagatagccccggctcccagtgatgcgcccggccggccctgggggttcgcggggtgtcttcttgcctgcccctgctgaggcgtcttcaggactgcaggctccggagagtggctctggcagcaggcgggcgcgtgggtgcagctgcatctgtttgagtgctgctttctggggtcaggtctccgcctcctctgcttctcctttctccgctgctatagaccagttcattgtgtgtggctcccgtgtctctgttgcccccttcagtgcagaaggctttgggtaggacttcgggtgttcggtcctggtcgcagagcacagatctttaaagaagcgagagaggaggccccaccctcctggcagcagatgcctggggcaaggccagggaaactgggggggcctcagggacaggcctggaaaggccacgatggctgctgaattcaaacaaggagtccctccagcctgaataacacgtggcacaaatgggcccggcctttggcagaggagcaagtgatatgatgtgtaaagtatgttggtggtgaaagcaaggttccccaggagaggggagggactggcccctgggaagctctgagatgaggctgtggcccagctgtagtcctgaccttcctcttctttaaccctttagccctaggatggctttggtgggagaggggatagaagcccatgacttcagacagactttctcttggcagatgcaggcgggcctcctcccaggctgctccagacatgggggttggggatggggggcaccttgcagccccttcctgctggggctccctccttgtagcaccccccttgcggctcagctctggtttcctctcccaggctcacccaggctctgctcaggctgggaggcagagggcacaaaccttataattttttaaatgaaaaaccgctgctgctggctgtggctagagccccctggggctgctggagctgctgcctctgttctggaggacgagccttctccttatctgctgcccatctttccaggaagtcaggatggagtcagaacaactacagtcatcccccgtggtgtctgcacatcactccagccccataaagagtgtcatgttagctgagtcaccatttggcttcggcctggaaatagtgtgattagaacactgatcgtgtgcgaggccaggagatcaagaccatcctgactaacaaacacagtgaaaccccgtctctactaaaaatacaaaaaaattagccaggcgtggtggtgggcgcctgtagtcccagctacttgggaggctgaggcaggagaatggtgtgaacccgggagatggcgcttgcagtgagctgagattgcactccagcctgggcgacaggctcaaaaaagaaaaaaaaaagaacaccgatcatgtgcttcttggatctggtgactgttctctccctgttttcctttctttttgggtgtttgaggagcatggcttagcttgagacacacacagacactgtgtacttcagtgaagggcttaatatacagtttccaaacctgacgactcttcttcttgtaatggctgcccttttcctacctgaggccgtcttagagaaaggggccagtctcctctaatgctcagatttcccatagttggcttttgctgtgtctcctgcctcaggcagtgtcatttctgggagcaggtggttgtagtccaggcccctccccagcagggtctgcccaggctccttcgagcccctttccccgcctcctctcagcctgtccggatgacagtgttcgcctcctgtttagactgtacactcttcaggggtaggggtgccgtcagttcttcaatcagctggcacacacttgtatagtgaaatgtttacatgtgggaaaactccgccttagacaaactaccaaagtacaatcgtgtctctctctagccggaatgctacagagagaaatggaaccttagatttgcaacaaaagtctgtaaactggtctgtttgccaaagtgaacactggatgactaaggagctgaagagaagacgacagaaggggatttgtggtgggttattttattttgcctgtggccaatcttctgtgaaatacaatgtgctgttggtgcaacagatgattcaataaatgtctacagcagaaaaaaaaaaaaaaaaaaaaaaaaaagtcgtatcgatggtcgaccgatcatgatggatgatgttcaacccgggaatttcccgacccgttcccctggaggccgtacccaagttttcccttatgatgaagtcgtattaaaaacttggggcgtaatacatggggcattaacctgtttccccccgtgggaaaaaattgtgttttttcccttttcccacattttccccaaaaaaatatttattgaaaacccccggggggcccttaataaaagtttgtaaaacccccccgggggggggccccccttttgggggggcgggggccccaccccctcccactttttttttgtggcgtgggcgcctccttttctccccccccctttttttttctacccggggggggaaaaacactcctccccg

SEQ ID NO: 81952 - DNA, 609 bp, Homo sapiens
gaccaggggggacagcacttctttcagtacattttcctgttagactcggggtattagagacccaaagatacccaaggaggagtgagagcgtccctgccttcgaggagcagacagggcaccgcgaggcgtttgcctcagcatggagggcggggccgcggcagccacccccacagcactgccttactacgtggccttctcccagctgctgggcctgaccttggtggccatgaccggcgcgtggctcgggctgtaccgaggcggcattgcctgggagagcgacctgcagttcaacgcgcaccccctctgcatggtcataggcctgatcttcctgcagggaaatgccctgctggtttaccgtgtcttcaggaacgaagctaaacgcaccaccaaggtcctgcacgggctgctgcacatctttgcgctcgtcatcgccctggttggcttggtggcggtgttcgactaccacaggaagaagggctacgctgacctgtacagcctacacagctggtgcgggatccttgtctttgtcctgtactttgtgcaggtgagtccttccaacaccccgggcctggggccacctaccagggaggtgggaggaggaggggagct

SEQ ID NO: 81953 - DNA, 1049 bp, Homo sapiens
gacttcccacattttattttattagctttttacctcttatatttaagtctttatctggagtttacttctgaagatgatgtgaagcatgcgtctaaacggaagagtgtgatgctctcatcaagtccatgctggtcataggtgtgtcggtattgcagcttgtgagaaggtcaggcacacccagagaagtgcacagaccaggaagtgggatttgtcacttccctcgtgttctactgaattcatggattgacaggagcaattgccagtggaggaaacaagaacataaacagatgtacaccaagcgcactatggaacacttttaatttcctggagacagtatttcttatggcactggcagcctttcctccctgccttgtcaggatcttattaatgtgctgacagattcctttctctcaatgtacctgctgggtgagagctgctattatatggaacacagctacccattatcttctaaatggccttcagaaatgatggagaaactgacacgttatgagtatttcctgccctacatggattttgaacttgaattcccagcctcgcttgcatctagacacagagagaaccaactggaaataacttctttgctgccttaaaccagcagactttattttaggacagagtgagtagtttgttgctaacaactttgggggatactggagaaggaataacccgaaaaggtcctgcatgaggctttgaaattataaagaacttacagcttctgcttgatgatgactcaacagttagagtggggaaggtaaaagtttagtgagctggtggctaaataatcaaataattttggcagtgataagggacacaatagaggtctaaaagtaggcataatgggagcacagaggaagctcttgagtcgtttggagatgtcataccagtgatggcttgcaggagaggatagctgggctgagccttaggaaacaagtagaaatttgcttaatatacaggtggagtaggagtagtacattccaagcaaagtaaaatggagagagagagagagagagagggagagagaaagagag

SEQ ID NO: 81954 - DNA, 395 bp, Homo sapiens
ttcatttagcacgcatttattaaatttttcatgtcttccaggtcctgcatgaggctttgaaattataaagaacttacagcttctgcttgatgatgactcaacagttagagtggggaaggtaaaagtttagtgagctggtggctaaataatcaaataattttggcagtgataagggacacaatagaggtctaaaagtaggcataatgggagcacagaggaagctcttgagtcgtttggagatgtcataccagtgatggcttgcaggagaggatagctgggctgagccttaggaaacaagtagaaatttgcttaatatacaggtggagtaggagtagtacattccaagcaaagtaaaatggagagagagagagagagagagggagagagaaagagag

SEQ ID NO: 81955 - DNA, 323 bp, Homo sapiens
  misc_feature (279)..(279): n is a, c, g, or t
  misc_feature (317)..(317): n is a, c, g, or t
tgtgaagctgcttgttcccacccaattccctccagagatggtgggtgctgcccatcgtgcacaggctgttttcacagtggtgtcgtccgagctgaaggggatgtgttttcacctcccaatgagaactgcaccgtctgtgtctgtctggctggaaacgtgtcctgcatctctcctgagtgtccttctggcccctgtcagacccccccacagacggattgctgtacttgtgttccagtgagatgctatttccacggccggtggtacgcagacggggctgtnttcagtgggggtggtgacgagtgtaccacctgtgtttnccagaa

SEQ ID NO: 81956 - DNA, 113 bp, Homo sapiens
ctgtttctcacagggcagggagaagaggaatctgccagcctttggatcagcgtctgtcccatgggcaaagcctttatccagcaagaagccagctgtgtggcaagcaatggagg

SEQ ID NO: 81957 - DNA, 412 bp, Homo sapiens
ctactaaaaacacaaaaaattagctaggtgtggtggcatgcacctcaggggttctgagggatgagtaggagtttcccaggtagatgggtgttggaaggctattccaaggagagggatgaaaaataaagcttcacaaagttgttcaggactggaccaagagtaggagtcaggggagaggtagaagtggctgctgagaaaccaggcagatgtgagatccaaataataaaacccagattcaatagaaaaaaattagctgggcatggtggcatgtgcctatagtcccacctactggggaggctggggcaggaggatcacttgagcccgggaagtcaaggctgcagtgagctgtgattgcaccactgcactccagcctaggcaagagagcaataaatcttaaataagatttattatc

SEQ ID NO: 81958 - DNA, 543 bp, Homo sapiens
ctactaaaaacacaaaaaattagctaggtgtggtggcatgcacctcaggggttctgagggatgagtaggagtttcccaggtagatgggtgttggaaggctattccaaggagagggatgaaaaataaagcttcacaaagttgttcaggactggaccaagagtaggagtcaggggagaggtagaagtggctgctgagaaaccaggcagatgtgagatccaaataataaaacccagattcaatagaaaaaaattagctggggccgggcgcggtggctcacgcctgtaatcccagcactttgggaggccgaggcgggcggatcacgaggtcaggagatcgagaccatcccggctaaaacggtgaaaccccgtctctactaaaaatacaaaaaattagccgggcgtagtggcaggcgcctgtagtcccagctacttgggaggctgaggcaggagaatggcgtgaacccgggaggcggagcttgcagtgagccgagatcccgccactgcactccagcctgggcgacagagcgagactccgtctcaaaaa

SEQ ID NO: 81959 - DNA, 779 bp, Homo sapiens
tggcctccttacccccagtggcagaagggaggaagggaggtcccctgtggcctcccatccttgtgctcccattagggtcagcatgaagcaggaatgaggctgtctatatcatcatggcattcccaacactaaactctgtgcccaggagaagttctgcaggctgtacaggaagcatgaattggaggcctcaggaaacttacaatcatggaggaaggacgaggggagcaagtacatcttgatatggcagagcaggagagagagagaaggggaaatactacgcacttttaaacaaccagaactcacaagaactcactcatgatagtgaatcttaagaacagcaagaaagaaatctgcccccacgatccaatcacctcctaccagcccctcctcagcatgagatttgggtggggacacagagccaagccatatcaattcctcaataccagggtcaggcttccctgggaaccaagtccatcatggatcaggacaggaccaggaacacagcacccactgtgtctgaccaaagagcctcaactgccagatgtctgtccatccacaccattcaattagcacctactatgtgccagccttaggtctaggggctcaaaaacagggtggacaagacaggaagtgtccctgtcctcatggaccagacaccatctggtggaagagatgagacaattgagtaataatatcaatacaataagatgtcatcacttagtgaggagaggagaggagagctcagtaatggtggtagaggagccatcagagggttggac

SEQ ID NO: 81960 - DNA, 442 bp, Homo sapiens
taagccagagacatttcactgtattaatcttgatactaattactaaggcttttctgtggacattaaatttgatctgtttaattgcaaatacaataaaagtcgtgatttatgcttaatgtttctgctaggctgatgacattttgaaaatggcacttatagcctggtttgtcttggttacaacttttgtggctccagatgctaaaaaaaatctaattgagtaagtaaataatgcagctaagcgtgcctctctcgcttccgaaaagttttttctactcctttttctccctggagaggccctgctgcacactgatgctgatctaaggaaatgcctttgcttctttgccactgagcaatgttagaatcatcttagagggcagggctatcccactggtcactctgtcccagcatatctaccatgaagtcagcagggactacaaactcc

SEQ ID NO: 81961 - DNA, 440 bp, Homo sapiens
aagctgcctcctgcttgggatgctcctcctcagtccctcccctttaagagccagccttagtcttccaggaagccttctcctgccccttcagacctctcttgcttctcttttcatccacacattcagacctgggaagaggcagctgatccaggagaacacccaccctgtggggtggggacactgcttcctggtcctatctgtgactctgtgtgaccataggcaggtgtctgcctcattttggttctgtttcttcatctataaactgggaagaataatacatgttctacctaataccagattggcttttttttcttttttagtagccacacttctccatccatggatgtcggccccctaggccgaagagcagagagagaagcgcagacggaggaacccaccacgcaagcaggcaggcagcaagtgagtggtgtgtctggggg

SEQ ID NO: 81962 - DNA, 1238 bp, Homo sapiens
agctgagtgtgcgagcgccaggggttccagctgcacgtcccaggctctccagcgcgcggcaggccggggcgggacgaggagagctgcggggacaacgcctgtggtgggtccggaggtgcgggtgcggcgcgggacaagcgggcagcatgctcagggcggtcgggagcctactgcgccttggccgcgggctaacagtccgctgcggccccggggcgcctctcgaggccacgcgacggcccgcaccggctcttccgccccggggtctcccctgctactccagcggcggggcccccagcaattctgggccccaaggtcacggggagattcaccgagtccccacgcagcgcaggccttcgcagttcgacaagaaaatcctgctgtggacagggcgtttcaaatcgatggaggagatcccgcctcggatcccgccagaaatgatagacaccgcaagaaacaaagctcgagtgaaagcttgttacataatgattggactcacaattatcgcctgctttgctgtgatagtgtcagccaaaagggctgtagaacgacatgaatccttaacaagttggaacttggcaaagaaagctaagtggcgtgaagaagctgcattggctgcacaggctaaagctaaatgatattctaagtgacaaagtgttcacctgaataccatccctgtcatcagcaacagtagaagatgggaaaaatagaatatttaccaaaatatctgccatggttttattttggtaacaagaagcacaatgtcttttttatttttattttttagtaaacttttactgaagtataccatgcattcaaaaagtggacaaaactgtatacagtctgatagatatttatgtcgtgaacacctgtgtaaccactgccaaagtgaagatgtagaatattggcaacacttcacagcctcattcctgccttttctcagccattacctcccaaacatagcagtttttctgagtttcatcacctttgattcattttgcctgtttttgaactttatataaatggatttatacattatgcacttgtgtgtgtggattatttacctgacagttataaggttaatccacaaattgtgtgtaccattagttcatccattgtcattgctgtattctgttgtataaacataccacaatttattttgatatttggcacagtttctggccactacatataatgctaaaatgagcacattgtatatgtcattaaaatgaggttgaact

SEQ ID NO: 81963 - DNA, 1035 bp, Homo sapiens
agctgagtgtgcgagcgccaggggttccagctgcacgtcccaggctctccagcgcgcggcaggccggggcgggacgaggagagctgcggggacaacgcctgtggtgggtccggaggtgcgggtgcggcgcgggacaagcgggcagcatgctcagggcggtcgggagcctactgcgccttggccgcgggctaacagtccgctgcggccccggggcgcctctcgaggccacgcgacggcccgcaccggctcttccgccccggggtctcccctgctactccagcggcggggcccccagcaattctgggccccaaggtcacggggagattcaccgagtccccacgcagcgcaggccttcgcagttcgacaagaaaatcctgctgtggacagggcgtttcaaatcgatggaggagatcccgcctcggatcccgccagaaatgatagacaccgcaagaaacaaagctcgagtgaaagcttgttacataatgattggactcacaattatcgcctgctttgctgtgatagtgtcagccaaaagggctgtagaacgacatgaatccttaacaagttggaacttggcaaagaaagctaagtggcgtgaagaagctgcattggctgcacaggctaaagctaaatgatattctaagtgacaaagtgttcacctgaataccatccctgtcatcagcaacagtagaagatgggaaaaatagaatatttaccaaaatatctgccatggttttattttggtaacaagaagcacaatgtcttttttatttttattttttagtaaacttttactgaagtataccatgcattcaaaaagtggacaaaactgtatacagtctgatagatatttatgtcgtgaacacctgtgtaaccactgccaaagtgaagatgtagaatattggcaacacttcacagcctcattcctgccttttctcagccattacctcccaaacatagcagtttttctgagtttcatcacctttgattcattttgcctgtttttgaactttatataaatggatttatacatta

SEQ ID NO: 81964 - DNA, 789 bp, Homo sapiens
cacacaggctggaatgcagtggcacaatctcagctcactgcagcttcgacctcctgggctcaaaggatcctcctgcctcagccctccaactagctgggaccacaggcatgcgtcaccacacctggctaattttttgtattgtttgtagagacggggtttgccatgttgccagggctggtttcgagctcctgagctcaggtgattcttgtgcctcagcctcccatgtagctgggattacaagagcatgccaccatgcccagctaatgtttgtatttttagtagtgtcagggtttctccatgttacccaggctgctcttgaactgggctcaagtgatccaccagccttggcttcccaaagtgctaggattacaggcgtgagccaccgcacccggccagaataatatttatttatttatttatttttgagatggaatttcactcgtcacccaggctggattacagtgacttaatcttgtctcactataacttctgcctcccaggttcaagcaattctcttgcctcagtctcccaagtagctgggattacaggtatgcaccaccattcccagctaatttttgtatttttagtagagacgcggtttcaccacgttgccaggctggtctcgacctcttgacctcaggtgatccacccacctcggcctcccaaagtgctgggatgacaggcatgagccaccatgccccgcgcagaatagtggttttaaatgcattagataatatataggaatgcaaagtgaaacaattatattagtatgccattatcaaattataa

SEQ ID NO: 81965 - DNA, 377 bp, Homo sapiens
aattttagttacattcgatatcagatgaaggaaatgtttagagggctccagatacactctgggggcagaaaccttaggagtgagaactaagaacgttgtgtcaatacaatgtatcttccaaatacaaatatggaactcttgtttaggcaggccaacaggagggagcaccttgcctagctgaggctggctcagagagtcccagctttgctactctgtatcctcactgtccttccaatctttactaagcttaattgcagagtacagcatagggatggggaaactggattgtcccagttttatctgaactattgctcagactaaaggatgtttgttttaaagtgttccttctagcttcccctttctgaatttttattgtt

SEQ ID NO: 81966 - DNA, 419 bp, Homo sapiens
cggccagtgtgggtgccgaggccgaggaggcacccagagtgagcgagggctcccaacatgctgtcatctctcaaaaccgtatcactttccaactagactgttcaccgaagaagtagattccatactgctgtttttctttgtaatctgtcttgcctcttttcttcattccctgcctagagaagacaggacccagggttccaacataacaggtgcttcataaatgctgactgagaactttcccaaacttggaccctttattgctatagtttactaacattgttcagccatttgtcatccatttgaatttgccacactacgtgcagaaatatgcttactccattcgtgtggcatcaggctgcctcggacactggagtgcagcacgcattgtgggtaataaaatgaatttgttgactcctagg

SEQ ID NO: 81967 - DNA, 540 bp, Homo sapiens
tggagacaaactgagaagggccttgtcaatgaagttaaagaactgagattttatcccttagaaaagggaatactcttctgagggttttaataatctgaggttttaaaaccaaagagaaagaacatatctgtgttaatgctggtagcagtgcaaatgataggctagagctggggagatcagttagaaaattctaagcaatattccagataggagatgacatgaattcagcctccagaaatgaaaaaaatgttgagactgactagatgtaggagataagggagtgaagctgactgaggtttttagcctaggacactaggtagcgattttatgcctttttgtatcatctacctgtgttaggcatacagtaaacaacagtcttcaattttcacaagctaaggcattggctaaagtgctcatctaggcccaggaatattccttggtgccctggcaacaggtaagctaatttgctgggacttgatccatttaccacccagaatggctgcctcagatgcctcagccatcactgcctgtgttccccag

SEQ ID NO: 81968 - DNA, 383 bp, Homo sapiens
  misc_feature (297)..(298): n is a, c, g, or t
tggagacaaactgagaagggccttgtcaatgaagttaaagaactgagattttatcccttagaaaagggaatactcttctgagggttttaataatctgaggttttaaaaccaaagagaaagaacatatctgtgttaatgctggtagcagtgcaaatgataggctagagctggggagatcagttagaaaattctaagcaatattccagataggagatgacatgaattcagcctcccttgttcccggaaaatcgctgttattctgttctttttcaaggtgcactgatttcatattgtttnnacacacatgcttcacaatcaatgtgtacaatagtggtcctgacgtgatatacatcctcagcttacgaagataacaggattaagag

SEQ ID NO: 81969 - DNA, 457 bp, Homo sapiens
actccttggctacagagcacatggagggaacagatggagtgaatatggagtgaacacccagtcttttctgtggccctcaccccggtttgccctcctttccccatgctccagccacactggccaaattccagatgctcaaaggttctgagctccgcctgcctcaggccttcccacatgctgttccctctctctgaatcactctcttctccctcctctcctcagctgaaatgttgctccccagacctctctttttaaccactcctgtgtttttcttcttagtacttactacagttacagtttattacattctcatgtagtttcttaatgtgtgtctttaccattgacaatagtctgctgggggcagctgtcttgcttacccgagggtactgtgcttcctggagtccagttagctggtcatgcatatttgtttaatgaagttggctggaccggcagggtt

SEQ ID NO: 81970 - DNA, 3854 bp, Homo sapiens
  misc_feature (1125)..(1125): n is a, c, g, or t
agccacctgcagcgcgaggcgcgccgctccaggcggcatccgcagggctgggccggcgcggcctgggggaccccgggctccggaggccatgccggcgttggcgcgcgacggcggccagctgccgctgctcgttgttttttctgcaatgatatttgggactattacaaatcaagatctgcctgtgatcaagtgtgttttaatcaatcataagaacaatgattcatcagtggggaagtcatcatcatatcccatggtatcagaatccccggaagacctcgggtgtgcgttgagaccccagagctcagggacagtgtacgaagctgccgctgtggaagtggatgtatctgcttccatcacactgcaagtgctggtcgatgccccagggaacatttcctgtctctgggtctttaagcacagctccctgaattgccagccacattttgatttacaaaacagaggagttgtttccatggtcattttgaaaatgacagaaacccaagctggagaatacctactttttattcagagtgaagctaccaattacacaatattgtttacagtgagtataagaaataccctgctttacacattaagaagaccttactttagaaaaatggaaaaccaggacgccctggtctgcatatctgagagcgttccagagccgatcgtggaatgggtgctttgcgattcacagggggaaagctgtaaagaagaaagtccagctgttgttaaaaaggaggaaaaagtgcttcatgaattatttgggacggacataaggtgctgtgccagaaatgaactgggcagggaatgcaccaggctgttcacaatagatctaaatcaaactcctcagaccacattgccacaattatttcttaaagtaggggaacccttatggataaggtgcaaagctgttcatgtgaaccatggattcgggctcacctgggaattagaaaacaaagcactcgaggagggcaactactttgagatgagtacctattcaacaaacagaactatgatacggattctgtttgcttttgtatcatcagtggcaagaaacgacaccggatactacacttgttcctcttcaaagcatcccagtcaatcagctttggttaccatcgtagnaaagggatttataaatgctaccaattcaagtgaagattatgaaattgaccaatatgaagagttttgtttttctgtcaggtttaaagcctacccacaaatcagatgtacgtggaccttctctcgaaaatcatttccttgtgagcaaaagggtcttgataacggatacagcatatccaagttttgcaatcataagcaccagccaggagaatatatattccatgcagaaaatgatgatgcccaatttaccaaaatgttcacgctgaatataagaaggaaacctcaagtgctcgcagaagcatcggcaagtcaggcgtcctgtttctcggatggatacccattaccatcttggacctggaagaagtgttcagacaagtctcccaactgcacagaagagatcacagaaggagtctggaatagaaaggctaacagaaaagtgtttggacagtgggtgtcgagcagtactctaaacatgagtgaagccataaaagggttcctggtcaagtgctgtgcatacaattcccttggcacatcttgtgagacgatccttttaaactctccaggccccttccctttcatccaagacaacatctcattctatgcaacaattggtgtttgtctcctcttcattgtcgttttaaccctgctaatttgtcacaagtacaaaaagcaatttaggtatgaaagccagctacagatggtacaggtgaccggctcctcagataatgagtacttctacgttgatttcagagaatatgaatatgatctcaaatgggagtttccaagagaaaatttagagtttgggaaggtactaggatcaggtgcttttggaaaagtgatgaacgcaacagcttatggaattagcaaaacaggagtctcaatccaggttgccgtcaaaatgctgaaagaaaaagcagacagctctgaaagagaggcactcatgtcagaactcaagatgatgacccagctgggaagccacgagaatattgtgaacctgctgggggcgtgcacactgtcaggaccaatttacttgatttttgaatactgttgctatggtgatcttctcaactatctaagaagtaaaagagaaaaatttcacaggacttggacagagattttcaaggaacacaatttcagtttttaccccactttccaatcacatccaaattccagcatgcctggttcaagagaagttcagatacacccggactcggatcaaatctcagggcttcatgggaattcatttcactctgaagatgaaattgaatatgaaaaccaaaaaaggctggaagaagaggaggacttgaatgtgcttacatttgaagatcttctttgctttgcatatcaagttgccaaaggaatggaatttctggaatttaagtcgtgtgttcacagagacctggccgccaggaacgtgcttgtcacccacgggaaagtggtgaagatatgtgactttggattggctcgagatatcatgagtgattccaactatgttgtcaggggcaatgcccgtctgcctgtaaaatggatggcccccgaaagcctgtttgaaggcatctacaccattaagagtgatgtctggtcatatggaatattactgtgggaaatcttctcacttggtgtgaatccttaccctggcattccggttgatgctaacttctacaaactgattcaaaatggatttaaaatggatcagccattttatgctacagaagaaatatacattataatgcaatcctgctgggcttttgactcaaggaaacggccatccttccctaatttgacttcgtttttaggatgtcagctggcagatgcagaagaagcgatgtatcagaatgtggatggccgtgtttcggaatgtcctcacacctaccaaaacaggcgacctttcagcagagagatggatttggggctactctctccgcaggctcaggtcgaagattcgtagaggaacaatttagttttaaggacttcatccctccacctatccctaacaggctgtagattaccaaaacaagattaatttcatcactaaaagaaaatctattatcaactgctgcttcaccagacttttctctagaagctgtctgcgtttactcttgttttcaaagggacttttgtaaaatcaaatcatcctgtcacaaggcaggaggagctgataatgaactttattggagcattgatctgcatccaaggccttctcaggctggcttgagtgaattgtgtacctgaagtacagtatattcttgtaaatacataaaacaaaagcattttgctaaggagaagctaatatgattttttaagtctatgttttaaaataatatgtaaatttttcagctatttagtgatatattttatgggtgggaataaaatttctactacagaattgcccattattgaattatttacatggtataattagggcaagtcttaactggagttcacgaaccccctgaaattgtgcacccatagccacctacacattccttccagagcacgtgtgcttttaccccaagatacaaggaatgtgtaggcagctatggttgtcacagcctaagatttctgcaacaacaggggttgtattgggggaagtttataatgaataggtgttctaccataaagagtaatacatcacctagacactttggcggccttcccagactcagggccagtcagaagtaacatggaggattagtattttcaataaagttactcttgtccccacagtcccc

SEQ ID NO: 81971 - DNA, 2570 bp, Homo sapiens
  misc_feature (1125)..(1125): n is a, c, g, or t
agccacctgcagcgcgaggcgcgccgctccaggcggcatccgcagggctgggccggcgcggcctgggggaccccgggctccggaggccatgccggcgttggcgcgcgacggcggccagctgccgctgctcgttgttttttctgcaatgatatttgggactattacaaatcaagatctgcctgtgatcaagtgtgttttaatcaatcataagaacaatgattcatcagtggggaagtcatcatcatatcccatggtatcagaatccccggaagacctcgggtgtgcgttgagaccccagagctcagggacagtgtacgaagctgccgctgtggaagtggatgtatctgcttccatcacactgcaagtgctggtcgatgccccagggaacatttcctgtctctgggtctttaagcacagctccctgaattgccagccacattttgatttacaaaacagaggagttgtttccatggtcattttgaaaatgacagaaacccaagctggagaatacctactttttattcagagtgaagctaccaattacacaatattgtttacagtgagtataagaaataccctgctttacacattaagaagaccttactttagaaaaatggaaaaccaggacgccctggtctgcatatctgagagcgttccagagccgatcgtggaatgggtgctttgcgattcacagggggaaagctgtaaagaagaaagtccagctgttgttaaaaaggaggaaaaagtgcttcatgaattatttgggacggacataaggtgctgtgccagaaatgaactgggcagggaatgcaccaggctgttcacaatagatctaaatcaaactcctcagaccacattgccacaattatttcttaaagtaggggaacccttatggataaggtgcaaagctgttcatgtgaaccatggattcgggctcacctgggaattagaaaacaaagcactcgaggagggcaactactttgagatgagtacctattcaacaaacagaactatgatacggattctgtttgcttttgtatcatcagtggcaagaaacgacaccggatactacacttgttcctcttcaaagcatcccagtcaatcagctttggttaccatcgtagnaaagggatttataaatgctaccaattcaagtgaagattatgaaattgaccaatatgaagagttttgtttttctgtcaggtttaaagcctacccacaaatcagatgtacgtggaccttctctcgaaaatcatttccttgtgagcaaaagggtcttgataacggatacagcatatccaagttttgcaatcataagcaccagccaggagaatatatattccatgcagaaaatgatgatgcccaatttaccaaaatgttcacgctgaatataagaaggaaacctcaagtgctcgcagaagcatcggcaagtcaggcgtcctgtttctcggatggatacccattaccatcttggacctggaagaagtgttcagacaagtctcccaactgcacagaagagatcacagaaggagtctggaatagaaaggctaacagaaaagtgtttggacagtgggtgtcgagcagtactctaaacatgagtgaagccataaaagggttcctggtcaagtgctgtgcatacaattcccttggcacatcttgtgagacgatccttttaaactctccaggccccttccctttcatccaagacaacatctcattctatgcaacaattggtgtttgtctcctcttcattgtcgttttaaccctgctaatttgtcacaagtacaaaaagcaatttaggtatgaaagccagctacagatggtacaggtgaccggctcctcagataatgagtacttctacgttgatttcagagaatatgaatatgatctcaaatgggagtttccaagagaaaatttagagtttgggaaggtactaggatcaggtgcttttggaaaagtgatgaacgcaacagcttatggaattagcaaaacaggagtctcaatccaggttgccgtcaaaatgctgaaagaaaaagcagacagctctgaaagagaggcactcatgtcagaactcaagatgatgacccagctgggaagccacgagaatattgtgaacctgctgggggcgtgcacactgtcaggaccaatttacttgatttttgaatactgttgctatggtgatcttctcaactatctaagaagtaaaagagaaaaatttcacaggacttggacagagattttcaaggaacacaatttcagtttttaccccactttccaatcacatccaaattccagcatgcctggttcaagagaagttcagatacacccggactcggatcaaatctcagggcttcatgggaattcatttcactctgaaggatgaattgaatatgaaacccaaaaaggcttggaggaggagaaggcttgtatgtgcctacacattggaggatctcctgctctgcatatatcagtgcccagggtggggattctcgagtattagacgtcgtgtgtacacagtaccctgcgccagagcgcgctctctcaacgacggcagtagtagtagagtagtg

SEQ ID NO: 81972 - DNA, 4039 bp, Homo sapiens
  misc_feature (1125)..(1125): n is a, c, g, or t
agccacctgcagcgcgaggcgcgccgctccaggcggcatccgcagggctgggccggcgcggcctgggggaccccgggctccggaggccatgccggcgttggcgcgcgacggcggccagctgccgctgctcgttgttttttctgcaatgatatttgggactattacaaatcaagatctgcctgtgatcaagtgtgttttaatcaatcataagaacaatgattcatcagtggggaagtcatcatcatatcccatggtatcagaatccccggaagacctcgggtgtgcgttgagaccccagagctcagggacagtgtacgaagctgccgctgtggaagtggatgtatctgcttccatcacactgcaagtgctggtcgatgccccagggaacatttcctgtctctgggtctttaagcacagctccctgaattgccagccacattttgatttacaaaacagaggagttgtttccatggtcattttgaaaatgacagaaacccaagctggagaatacctactttttattcagagtgaagctaccaattacacaatattgtttacagtgagtataagaaataccctgctttacacattaagaagaccttactttagaaaaatggaaaaccaggacgccctggtctgcatatctgagagcgttccagagccgatcgtggaatgggtgctttgcgattcacagggggaaagctgtaaagaagaaagtccagctgttgttaaaaaggaggaaaaagtgcttcatgaattatttgggacggacataaggtgctgtgccagaaatgaactgggcagggaatgcaccaggctgttcacaatagatctaaatcaaactcctcagaccacattgccacaattatttcttaaagtaggggaacccttatggataaggtgcaaagctgttcatgtgaaccatggattcgggctcacctgggaattagaaaacaaagcactcgaggagggcaactactttgagatgagtacctattcaacaaacagaactatgatacggattctgtttgcttttgtatcatcagtggcaagaaacgacaccggatactacacttgttcctcttcaaagcatcccagtcaatcagctttggttaccatcgtagnaaagggatttataaatgctaccaattcaagtgaagattatgaaattgaccaatatgaagagttttgtttttctgtcaggtttaaagcctacccacaaatcagatgtacgtggaccttctctcgaaaatcatttccttgtgagcaaaagggtcttgataacggatacagcatatccaagttttgcaatcataagcaccagccaggagaatatatattccatgcagaaaatgatgatgcccaatttaccaaaatgttcacgctgaatataagaaggaaacctcaagtgctcgcagaagcatcggcaagtcaggcgtcctgtttctcggatggatacccattaccatcttggacctggaagaagtgttcagacaagtctcccaactgcacagaagagatcacagaaggagtctggaatagaaaggctaacagaaaagtgtttggacagtgggtgtcgagcagtactctaaacatgagtgaagccataaaagggttcctggtcaagtgctgtgcatacaattcccttggcacatcttgtgagacgatccttttaaactctccaggccccttccctttcatccaagacaacatctcattctatgcaacaattggtgtttgtctcctcttcattgtcgttttaaccctgctaatttgtcacaagtacaaaaagcaatttaggtatgaaagccagctacagatggtacaggtgaccggctcctcagataatgagtacttctacgttgatttcagagaatatgaatatgatctcaaatgggagtttccaagagaaaatttagagtttgggaaggtactaggatcaggtgcttttggaaaagtgatgaacgcaacagcttatggaattagcaaaacaggagtctcaatccaggttgccgtcaaaatgctgaaagaaaaagcagacagctctgaaagagaggcactcatgtcagaactcaagatgatgacccagctgggaagccacgagaatattgtgaacctgctgggggcgtgcacactgtcaggaccaatttacttgatttttgaatactgttgctatggtgatcttctcaactatctaagaagtaaaagagaaaaatttcacaggacttggacagagattttcaaggaacacaatttcagtttttaccccactttccaatcacatccaaattccagcatgcctggttcaagagaagttcagatacacccggactcggatcaaatctcagggcttcatgggaattcatttcactctgaagatgaaattgaatatgaaaaccaaaaaaggctggaagaagaggaggacttgaatgtgcttacatttgaagatcttctttgctttgcatatcaagttgccaaaggaatggaatttctggaatttaagtcgtgtgttcacagagacctggccgccaggaacgtgcttgtcacccacgggaaagtggtgaagatatgtgactttggattggctcgagatatcatgagtgattccaactatgttgtcaggggcaatgcccgtctgcctgtaaaatggatggcccccgaaagcctgtttgaaggcatctacaccattaagagtgatgtctggtcatatggaatattactgtgggaaatcttctcacttggtgtgaatccttaccctggcattccggttgatgctaacttctacaaactgattcaaaatggatttaaaatggatcagccattttatgctacagaagaaatatacattataatgcaatcctgctgggcttttgactcaaggaaacggccatccttccctaatttgacttcgtttttaggatgtcagctggcagatgcagaagaagcgaaactgtggaaaatccctgagacaatgaaagcagttaaaattgcaccgcagagggaaaacccaccacagaggatgcctgggaaaaacaaggacaagggtaacacaaaggcagcaagaagtcctgggacactgcagaagttctgaagcaggagcagccacatggtgaaatcaacataagattaaatatgtatcagaatgtggatggccgtgtttcggaatgtcctcacacctaccaaaacaggcgacctttcagcagagagatggatttggggctactctctccgcaggctcaggtcgaagattcgtagaggaacaatttagttttaaggacttcatccctccacctatccctaacaggctgtagattaccaaaacaagattaatttcatcactaaaagaaaatctattatcaactgctgcttcaccagacttttctctagaagctgtctgcgtttactcttgttttcaaagggacttttgtaaaatcaaatcatcctgtcacaaggcaggaggagctgataatgaactttattggagcattgatctgcatccaaggccttctcaggctggcttgagtgaattgtgtacctgaagtacagtatattcttgtaaatacataaaacaaaagcattttgctaaggagaagctaatatgattttttaagtctatgttttaaaataatatgtaaatttttcagctatttagtgatatattttatgggtgggaataaaatttctactacagaattgcccattattgaattatttacatggtataattagggcaagtcttaactggagttcacgaaccccctgaaattgtgcacccatagccacctacacattccttccagagcacgtgtgcttttaccccaagatacaaggaatgtgtaggcagctatggttgtcacagcctaagatttctgcaacaacaggggttgtattgggggaagtttataatgaataggtgttctaccataaagagtaatacatcacctagacactttggcggccttcccagactcagggccagtcagaagtaacatggaggattagtattttcaataaagttactcttgtccccacagtcccc

SEQ ID NO: 81973 - DNA, 374 bp, Homo sapiens
caaaatagttagttggaatgtacgctttaaattttaaaaagaacaaaattgttccaatactctatataactgtaaatgtcttatattttttctaacaagatttcaaagatagtgctgtaacctcacctcacagggagaaaaggagataactccaggaatttcatgcccatgccagagggagctgcagggaccagcaatcactggtaatgtccaggtggacatctggagccacctctccctcttgcttggtccaggccagcatcaacactgaagcaggtaggggttccaggagcattgtgtcctggcagtggcagcacacagtgtctggcagctgacaacgtggaactttacagggtagattgtccagcatgatc

SEQ ID NO: 81974 - DNA, 613 bp, Homo sapiens
ttctatgtgaaaaggttaataatgcaaattttctcttttacaagaaacattttgccaatctgctccatactccctgaaaaaactttccacttataaatggtgttattgtaaagattagagaatgtatcagatcattattgctattgttgttccagaaaatggccctttatacatatctcgtatatgacaccttgtcaatgtatcacacaaatctgtatctttgtttaagaatgtctttgatgagccattaactataagaagtaaagtgttagtcaaaagataagccattgatcttggttaattccatatctgagatgactgtaataatgtcaattattaacatggatgacttggagaaaaaaaaaagccaaaagtgtgaagaatcttgcagctgcataatacggtttatagggattcttgtaataaacagagttatgaagcaatgcatttttatgactgatactgctattttatatttggatgagcattttatttatttatttttttgagacagggtctcactctgtcactcacgctggagtgcagtggcaggatctcagctcactgcaacctctgctcttgggttcaagtgattcttccatctcagcctccc

SEQ ID NO: 81975 - DNA, 412 bp, Homo sapiens
gcagagtgggtgagaaaaaatgactcaggtggctgaaagacctagaagacaagaatcttttacaatttacaagaggtggaatatgcaggaataacttcagtgataataagcaagatatgttaaatagtaaaatctcaaaatgctatagtcagaagcagtattttagataatcacaaggaataaaatgaagtagaaaataagtttacatgaatggggagccattcattcaatcccatctagatgccactcttcctagaaaaatgtagagctcaaccttcccatagcttcagctgttcactgttaactgggaacccccaagtgctgggaaaaacagatccttttcctatcatgtggtaagtaactagtgtcagacattctgtagagcatactggaagaagaaagtctcttttga

SEQ ID NO: 81976 - DNA, 350 bp, Homo sapiens
gaacaaatcagagctaccaagaaagtcactgtttcagcttcagtagtcattatcctcatggaatcaacacagctgtttaccaccctggtcacaggtaagtaaccatttgttctcatatttagtgggacatagaaatgttggcatagattcagatagaagaaactattctgattcttatgttgacttcttaatttcctcctcttgtgcgtagttatctttaatatctataatactgttgtcatctgattattcatgcttatctatctggctcactgagctcttctgagccagatggggcactgggaatattcaatgaggaatttattctcctctatttctctcggacctat

SEQ ID NO: 81977 - DNA, 1533 bp, Homo sapiens
gaacaaatcagagctaccaagaaagtcactgtttcagcttcagtagtcattatcctcatggaatcaacacagctgtttaccaccctggtcacagacttttacttgttggtggatgtgaaactgctgaagtaggcatgtcaaaagcttctagctgtggcctttctgcctggagagttctttcaggatcaccgtattataagcaggttactaatggtggagacggggttactgcagtaccgaagacactgggattattaaggatgttaagtgtcaagttttacagtcgccagggacaagaacaggatggaatttttaagatgagcctttctccagatgggatgctcctggcagccattcacttctcagggaaactgagcatctgggcgattccatctctgaagcaacaaggggaatggggtcaaaatgagcaggtgttggactaatcttaagtagatgaatgaagagtaagtgggaagatggcagttgatgcgatgaatcttgatataatccacagctgttttcacaatttcaccagactccaggctatgatgaccttaatcctgattggaggctctctactgagaagagaaaaaaaatcaaagataaagagtccttttacccactgatagatgtcaattggtgggcagacagtgcagtgactttagctcgatgctctggtgctttaactgtttcatctgtgaaaactttgaagaatttactgggaaaatcctgtgaatggtttgaaccatcacctcaagtcactgctacccatgatgggggatttttaagtttggagtgtgagattaaacttgcccccaaacgatctcgtttggagactagggctggagaagaagatgaaggagaagaggattctgattctgattatgaaatatctgccaaggctcgctactttggttatataaaacagggcctttacttggtgactgaaatggagcgatttgcaccaccacggaaacgcccacgaaccattactaaaaactaccgccttgtgagtttgcgctccacgacaccagaggaactttatcagaggaagattgaaagtgaagagtatgaggaagccttgtccttggctcatacctacggcctggatactgaccttgtatatcagaggcagtggaggaagtcagcggtcaacgttgcttcaattcagaattatttgagtaaaataaagaagcgatcctgggttctccatgagtgtttggaaagagttcctgaaaatgtggatgctgcaaaagaactgcttcagtatggattaaaaggcacagacctggaggctcttttagcaatagggaaaggagcagatgatggcagatttacattacctggtgaaatagacattgacagtatctcctatgaagagctttcaccacctgatgaagagcctgccaagaataaaaaggaaaaggagctcaagaagagacaagaactactgaaattagtgaacttttccaagttgacactggaacaaaaggaactttgccgttgtagacggaagttattaacctacttaga

SEQ ID NO: 81978 - DNA, 1311 bp, Homo sapiens
gaacaaatcagagctaccaagaaagtcactgtttcagcttcagtagtcattatcctcatggaatcaacacagctgtttaccaccctggtcacagacttttacttgttggtggatgtgaaactgctgaagtaggcatgtcaaaagcttctagctgtggcctttctgcctggagagttctttcaggatcaccgtattataagcaggttactaatggtggagacggggttactgcagtaccgaagacactgggattattaaggatgttaagtgtcaagttttacagtcgccagggacaagaacaggatggaatttttaagatgagcctttctccagatgggatgctcctggcagccattcacttctcagggaaactgagcatctgggcgattccatctctgaagcaacaaggggaatggggtcaaaatgagcagccaggctatgatgaccttaatcctgattggaggctctctactgagaagagaaaaaaaatcaaagataaagagtccttttacccactgatagatgtcaattggtgggcagacagtgcagtgactttagctcgatgctctggtgctttaactgtttcatctgtgaaaactttgaagaatttactgggaaaatcctgtgaatggtttgaaccatcacctcaagtcactgctacccatgatgggggatttttaagtttggagtgtgagattaaacttgcccccaaacgatctcgtttggagactagggctggagaagaagatgaaggagaagaggattctgattctgattatgaaatatctgccaaggctcgctactttggttatataaaacagggcctttacttggtgactgaaatggagcgatttgcaccaccacggaaacgcccacgaaccattactaaaaactaccgccttgtgagtttgcgctccacgacaccagaggaactttatcagaggaagattgaaagtgaagagtatgaggaagccttgtccttggctcatacctacggcctggatactgaccttgtatatcagaggcagtggaggaagtcagcggtcaacgttgcttcaattcagaattatttggtatgtttaaatattttggtaatgtggtaaaatgtatattcatgtaatatcttttgtttatagggcttcattttagagtactttacattgctgacttttctataatacagccaatgaagtacaattttctcagctggaaaaatggtctttttgttagattttattgcccctgcaactggactttgatgctgaatacatgtgaacaaatattcacagataaaccagctaactacttggt

SEQ ID NO: 81979 - DNA, 1426 bp, Homo sapiens
gaacaaatcagagctaccaagaaagtcactgtttcagcttcagtagtcattatcctcatggaatcaacacagctgtttaccaccctggtcacagacttttacttgttggtggatgtgaaactgctgaagtaggcatgtcaaaagcttctagctgtggcctttctgcctggagagttctttcaggatcaccgtattataagcaggttactaatggtggagacggggttactgcagtaccgaagacactgggattattaaggatgttaagtgtcaagttttacagtcgccagggacaagaacaggatggaatttttaagatgagcctttctccagatgggatgctcctggcagccattcacttctcagggaaactgagcatctgggcgattccatctctgaagcaacaaggggaatggggtcaaaatgagcagccaggctatgatgaccttaatcctgattggaggctctctactgagaagagaaaaaaaatcaaagataaagagtccttttacccactgatagatgtcaattggtgggcagacagtgcagtgactttagctcgatgctctggtgctttaactgtttcatctgtgaaaactttgaagaatttactgggaaaatcctgtgaatggtttgaaccatcacctcaagtcactgctacccatgatgggggatttttaagtttggagtgtgagattaaacttgcccccaaacgatctcgtttggagactagggctggagaagaagatgaaggagaagaggattctgattctgattatgaaatatctgccaaggctcgctactttggttatataaaacagggcctttacttggtgactgaaatggagcgatttgcaccaccacggaaacgcccacgaaccattactaaaaactaccgccttgtgagtttgcgctccacgacaccagaggaactttatcagaggaagattgaaagtgaagagtatgaggaagccttgtccttggctcatacctacggcctggatactgaccttgtatatcagaggcagtggaggaagtcagcggtcaacgttgcttcaattcagaattatttgagtaaaataaagaagcgatcctgggttctccatgagtgtttggaaagagttcctgaaaatgtggatgctgcaaaagaactgcttcagtatggattaaaaggcacagacctggaggctcttttagcaatagggaaaggagcagatgatggcagatttacattacctggtgaaatagacattgacagtatctcctatgaagagctttcaccacctgatgaagagcctgccaagaataaaaaggaaaaggagctcaagaagagacaagaactactgaaattagtgaacttttccaagttgacactggaacaaaaggaactttgccgttgtagacggaagttattaacctacttaga

SEQ ID NO: 81980 - DNA, 385 bp, Homo sapiens
gacccttcccattttttccccaaaccagaattggctctgtgaattgtgaaagcaagttcctggaatgtacagggctggaactcagggaacagcctagaaacatgcagcagtggggggaattcaaaaaaagtattaaagtactgacttcatacagacaccactgtatatgtttgcatacctacacacacatgcacacacacacagtattagaaatgtctcccagtttgcaagtcctctgcacctcgggagagccaagccattattgccaagccctggtgttcggcacacaaataaccacgtgaccataaaacagcctgcagagcccagtactgggtttgcaacagtctgcagagatggcctaatggcccagccttcaacacttaaa

SEQ ID NO: 81981 - DNA, 465 bp, Homo sapiens
ccaggaccgggagccttcagtcggcctccaccaatgtcagattcacaaggaagcctcagcccacctcacctgcatagcccttctagttttagttttgtattttgtttttcttagaagccctccataaccgtgtgagccacccacccacaaaaggtccaagctgccctgttcttgcctctctccagatgagggtgcgcgagctgtgaccccgccctcgtcactccgaagggattccgctgtcagaaccggaagtctctctcccagagaccctccaccacaggctgagggggtacgtgtgacaataaaagggtcaattcctcaggaagacacaacaatcaaatgtgcagggacgtaaaggagcttcaaagtgcaggaagcaaaatccggcaaaactaaagggagacagatcaaacgcccagccatggcaataatacccctctctcagcaactgacagaactagaccg

SEQ ID NO: 81982 - DNA, 478 bp, Homo sapiens
atgtgcatgtaggatttgtcattccgttaccaaattagggaaaggttttgattggcctaattatgtttgggtttactcattatacttgctgaccacatgactgaatgcattcagaatttacgtctccatggttttactctggttcatccttgctacaggtttagtcatgcagaaaaacaaagggcccgttaggaagaatctattttctccccccccgcaaaacatctcagtgtttgcatatgtgtcatgaagtgaagtaggaaatcaggattttctggatccagcaaggtcagggtggggagcagattttgatccctgcaaccactgaagctgccagccattcctcaccctaaatgaactctgcactccaagaggtccctaaggaccctgagaatccagggggataggaatcagacagccttgtccaaaagctgccacagcaagctgtgtgactttgactaactcccttcccccactg

SEQ ID NO: 81983 - DNA, 974 bp, Homo sapiens
gggaatgccagtccatgaagttgatggttaggctaagatctactgcagatgaagagcatgaacaaagtggcagagacaggaaagagcttgggacttgaaggggtggagaaattcatagaaaactagcatgaagaatgctatttaatgttactaatactgagtgaggcaaagaatggagtaagttggaaagaaaaaataagccaaatcatgcagggctttgagccatagagaaggctggccaactcatccaaaggatttgaccttacataattaaaggagctaatagagtagtctctgtaagactattgtctttgtttctaatgttggacctgaaatccacagggaagggaagggaagggtagaagctgtgtcagttcttgtcattgaccttggtactgtggatgtcttgcagaaagaagccagtgcccttcttgaagctatatgtggccaagaagtcagagaggctgaaggataatccaggggaagatagagtagttataggcccacctgctgcctcacagtaacaacgttaatctgcacatctgtgacatcacagttgagctacaaaattactactgctttacctctgttgaacaaatttcacccaagactccctcctgtggtccacactaaccagaagtttacaaggaaggcagtcctaggaaatgagcagcctaaccaagttgacacattacaaagtcatcatgctctctaagacccttcaacctggatttcctgccagcaactcaatatatcccaaacagaattcttcaaaacctgcttctccttctgggtcaccctattttgttttttaacagtgccactttccttctatgcttaaaattttctaatcttgttaactcccccttttcctttctcatatacctctcatgctaccaccaatctataacagttctatcatttttacctctgcagtgcccaccccaggtggatgagttcaaactcaacaggtg

SEQ ID NO: 81984 - DNA, 759 bp, Homo sapiens
gggaatgccagtccatgaagttgatggttaggctaagatctactgcagatgaagagcatgaacaaagtggcagagacaggaaagagcttgggacttgaaggggtggagaaattcatagaaaactagcatgaagaatgctatttaatgttactaatactgagtgaggcaaagaatggagtaagttggaaagaaaaaataagccaaatcatgcagggctttgagccatagagaaggctggccaactcatccaaaggatttgaccttacataattaaaggagctaatagagtagtctctgtaagactattgtctttgtttctaatgttggacctgaaatccacagggaagggaagggaagggtagaagctgtgtcagttcttgtcattgaccttggtactgtggatgtcttgcagaaagaagccaaagtttacaaggaaggcagtcctaggaaatgagcagcctaaccaagttgacacattacaaagtcatcatgctctctaagacccttcaacctggatttcctgccagcaactcaatatatcccaaacagaattcttcaaaacctgcttctccttctgggtcaccctattttgttttttaacagtgccactttccttctatgcttaaaattttctaatcttgttaactcccccttttcctttctcatatacctctcatgctaccaccaatctataacagttctatcatttttacctctgcagtgcccaccccaggtggatgagttcaaactcaacaggtg

SEQ ID NO: 81985 - DNA, 323 bp, Homo sapiens
tactagccaaatctgggaggatttgagtatgaaaatagtgatgtcagtggatacaacccattggatgaaaagaaatcaatgaattcatacttacatgaatgaatgagtgagtgagtgagttattgaatgaatagggagaaaggaaaatgcttcttacagtagaatgccaactaataaatgaagaaggactgatagaaatagaaaatctcaataggccatcaccacagtggaagctgattcaggcagagtgctctacagatgctaaggctaacgagtgagggtctgtgaggaacaatatgttggtgtcatttcagaatatctcc

SEQ ID NO: 81986 - DNA, 1576 bp, Homo sapiens
gcgaggcagccagcgagggagagagcgagcgggcgagccggagcgaggaagggaaagcgcaagagagagcgcacacgcacacacccgccgcgcgcactcgcgcccggacccgcacggggacagctcggaagtcatcagttccatgggcgagatgctgctgctggcgagatgtctgctgctagtcctcgtctcctcgctgctggtatgctcgggactggcgtgcggaccgggcagggggttcgggaagaggaggcaccccaaaaagctgacccctttagcctacaagcagtttatccccaatgtggccgagaagaccctaggcgccagcggaaggtatgaagggaagatctccagaaactccgagcgatttaaggaactcacccccaattacaaccccgacatcatatttaaggatgaagaaaacaccggagcggacaggctgatgactcagaggtgtaaggacaagttgaacgctttggccatctcggtgatgaaccagtggccaggagtgaaactgcgggtgaccgagggctgggacgaagatggccaccactcagaggagtctctgcactacgagggccgcgcagtggacatcaccacgtctgaccgcgaccgcagcaagtacggcatgctggcccgcctggcggtggaggccggcttcgactgggtgtactacgagtccaaggcacatatccactgctcggtgaaagcagagaactcggtggcggccaaatcgggaggctgcttcccgggctcggccacggtgcacctggagcagggcggcaccaagctggtgaaggacctgagccccggggaccgcgtgctggcggcggacgaccagggccggctgctctacagcgacttcctcactttcctggaccgcgacgacggcgccaagaaggtcttctacgtgatcgagacgcgggagccgcgcgagcgcctgctgctcaccgccgcgcacctgctctttgtggcgccgcacaacgactcggccaccggggagcccgaggcgtcctcgggctcggggccgccttccgggggcgcactggggcctcgggcgctgttcgccagccgcgtgcgcccgggccagcgcgtgtacgtggtggccgagcgtgacggggaccgccggctcctgcccgccgctgtgcacagcgtgaccctaagcgaggaggccgcgggcgcctacgcgccgctcacggcccagggcaccattctcatcaaccgggtgctggcctcgtgctacgcggtcatcgaggagcacagctgggcgcaccgggccttcgcgcccttccgcctggcgcacgcgctcctggctgcactggcgcccgcgcgcacggaccgcggcggggacagcggcggcggggaccgcgggggcggcggcggcagagtagccctaaccgctccaggtgctgccgacgctccgggtgcgggggccaccgcgggcatccactggtactcgcagctgctctaccaaataggcacctggctcctggacagcgaggccctgcacccgctgggcatggcggtcaagtccagctgaagccggggggccgggggaggggcgcgggagggggcc

SEQ ID NO: 81987 - DNA, 471 bp, Homo sapiens
aaacaggttatctgtggagcctcagcctgagtaactttccacaaatgttttactttgtgttttctgctttcctgaggagtatctaagtcatttatagagaaatgtgtttgtgaaaatagcttggattttaatctatatgttatattacaacctctaaatggaacatcttactctaaggggtgcaaagccaattattacatataattaggtaatatctgcattctcaaaaaaccccagtctccttatgacttggtttctagtagaacagggtttagtttcagatgccttcaattctgccgagtagaagccactgtatttgatatagtttgtgtattctaatcatttccccgtatgtatatgcatctatgcttcaccccaaccacactgaatatttggagagaacagtcggcgacttccagctttgtctcccagtgactagcctgtggcatttgtagagttgttggttgttta

SEQ ID NO: 81988 - DNA, 296 bp, Homo sapiens
cgccctcggtgctgttggggtggtgttctgcaggtgggttgaggccgtgtctttcctcactgatcgtctgtctggcggttctctccgtggttagaagtagggcaccgagtctccctgtcactgaagaactgcttttctccttgtcattctgtctattcttgattcagatattttggggtctcttgttaggagcaggaatattttcgtaggaaaaattcctggtagtgaaattgttgggtcacaatacatggcccttgtatgactaggctgaccttgctggagttgatggagtccag

SEQ ID NO: 81989 - DNA, 682 bp, Homo sapiens
tgctctttgatttttgctattgtacggtttcatgcatttttttaaagggcatttgaggggaggattattgctatgaatgaaaaaaatattttagcttagactaagctacctgccttcaaaatagtttagggaccaccaccatattttattttgtttttatttttgaacatttttctaatgatttggagagaaaactatttacaaaaattccacatatcagtgatacaatttcttgctgtcaccaattttttataatagcagagtggcctgttctaagaaggccatattttttaagttatctttcagggtaacatggaaatactataaagttggatgtcaaactttaatatgttttcagtgttctctaattttttggaatttttgtagactttacacctggaaaaaaagatttgtaaaatcaccggaacaattgtgtgctttattttataggtagtggttattagtattacatccccattttaaaaacaaaaacataataatggttacaacacgtggagttttactaacatacatattaaatcaaagtatattcttaaaagtacttgtgaagtaaaatctttcttgtgcattttcaatacttgtaaactggaaatccagaaaaatatttactatgaacaggaaaatctgacatatagccccttttgatatgtttattaataat

SEQ ID NO: 81990 - DNA, 1994 bp, Homo sapiens
ttttttctcttttagaaatggagtaagaatgcttcaaataaaaaacgtaaaacccatcccatcccataaagggcccactcacgtaaacaggaagcttattaaaagaacttttcttggtttcctggcaaaatccagcttttattttggtggcagcatctattaaggaggagactcattttgtgggcaggatgaaaaattaaacattgcaaatccatcaggtacttgctggattagagttagttgactgacttgttggctacagggaacaaggtagttctgaaaccaaggaacaagctgccaaggaacagtccagccctgcccaaaagatgatggtcttctccatccaggcagcacaaatcaactcgaggttccaagagggccagtagacgccagcctaccttactgtaaagtgtctcacatgcatatctaactgttctctcctttcctttacatttaaatcctgttgtattggcttctctgttttccctttcctggaagcgctgtagcgtaattaaaagagtatgagttttggaatttcaaaacttggtttatagtccagcctctgccaaatactgtgacatgttacctgcttgagccatcattttctgatatgtagattgggactaacaattcttccttaatcagctcaagtttcacaaaatatgggtaaacatcacgtgactcaaaatcaactgaggcaaaaattcagatgtcaatggccctttcttgaattattagaacctccatgagctagaaattcttggaatctgaattttaaactcactcccaagtgatttccatacacacagaagtttgagaaccacatcccaccttgtcttgtgtcaggattaaataaaaccatataggtgaaacttatctgtaaattgcatatcaagacatgcttagctgctctcaatagtatcattttccagatagcccaaagcaccaaagtaaggacagcgggccattttcccaagatctttcttccagcttttccctgccatgccaacagcattcttcatcttcaggtaggcagggcaggttcactgggggttggggtagagctcagcactgtgacacaggcagtacttccgtagaatttcatttatgtgactgtacctaccccacagggtgatataaggattaattcctatttggtaatttactgtgtgtaaaatgccttgagccccttggaggaaagtgctatataaatgtaaaataattattataataataataacctcgactatttaactgatcagtgaattagccagaagatttaggctgccaagggacaaggctgaaaccattataagtagaaacactttacatcatcatatctcaaactgttatcacgaaaaagggaaacaaagggtgaaaattaagataaatccatgttctcaactgatttaaatgacagaggatcactagtaatgattcatgaaagccaggaaatgcaaaaatgacagctgcattgtaattctaactcagccacatgtcctgaggttttgtacactttggtcttttatttgtagggaaaatatctcatcagtgcaacatctaaaatttagcattatgaaggcacttgactatgcttttgcttagttgaaatacgttcataatgtatcccctatttgtaggtaatgatttttctacctaaaaagcattgacattattctatgaagttccaggtaaattttgaatcggttgcttacaatctgcctccccacatacacaccctaagaatacactctaacaaaacaatggtgtatttctagatctaaatttaggaaaccaaaatatatagaagataccttttcttcccaggaagaaaatgctttggtatataaactcacatgagctcaaccgtcttcagctcttacattatttgttttatttatttattagattcatgaagattcttctaccaaaagctcaaggggctgaacccagaactttcatatattgaatgtgaatcacttcttaaaccacag

SEQ ID NO: 81991 - DNA, 887 bp, Homo sapiens
ttgtagtagcccaggtgagaaatgaggctggactggaccaggtagtccaggagaaataagtggatagatctaaaatacatcaaaaaataaaatcaagaggacttaggcatgaccgcaacagagaaacctctgcacttgcacccacactggctgccgcacagtgtggactgggcaaccctgagcacaactgacgatctgggccgcttgaggagcagctggggaaatgtgagcacagcccccagggagaggggcggggaacaggaccctcctctgccatctggaagagagaggggtgtagggccagtagtggaagccacggtgggtggatttttacctccatatgtggtggggatttctaacatcagaagggtccaaatgtgtcatggactgccccagggaattcgggttctcatcactgaagattttcaggcccaggctggacacaacccggtgggggtggtatgactgaggccacacctcagatgggagtcaggaggtgactccaaaggcacgctgactgggtgacgctggctgtcttcttaggaaacctggttctggtcggggacgccaagggcccaggaggtggtgatgagtggggtgcgctgctcaggcacagagctggccctgcagcagtgccagaggcacgggccggtgcactgctcccacggtggcgggcgcttcctggctggagtctcctgcatggacacttctgaaatcttacgcaggaggtttttacttcctctgaattccccacgcattgttcttcttttaaaacactcagcactttccatcttggagaagagttgcagacctgtcctatctctgctgagctctccgagggcaagcattgcctgcttcctgtctgcacacccacagtccctaaccct

SEQ ID NO: 81992 - DNA, 394 bp, Homo sapiens
ggctggggggccgcgggcgggaggcggataaaaaggccccagggcgcccggggagggagcccgttagcgctgctccgccgcggcgcccgcccagccccggactgtccgcgctccatctggtatcttggcctcagctgtccttgaagtcaccatggcgtggtccccaccagccaccctctttctgttcctgctgctgctaggccagccccctcccagcaggccacagtcactgggcaccactaagctccggctggtgggcccagagagcaagccagaggagggccgcctggaggtgctgcaccagggccagtggggcaccgtgtgtgatgacaactttgctatccagcagcaccaccaggacagcagcaccaccaggacagcagcaccaccagga

SEQ ID NO: 81993 - DNA, 3548 bp, Homo sapiens
ggctggggggccgcgggcgggaggcggataaaaaggccccagggcgcccggggagggagcccgttagcgctgctccgccgcggcgcccgcccagccccggactgtccgcgctccatctggtatcttggcctcagctgtccttgaagtcaccatggcgtggtccccaccagccaccctctttctgttcctgctgctgctaggccagccccctcccagcaggccacagtcactgggcaccactaagctccggctggtgggcccagagagcaagccagaggagggccgcctggaggtgctgcaccagggccagtggggcaccgtgtgtgatgacaactttgctatccaggaggccacagtggcttgccgccagctgggcttcgaagctgccttgacctgggcccacagtgccaagtacggccaaggggagggacccatctggctggacaatgtgcgctgtgtgggcacagagagctccttggaccagtgcgggtctaatggctggggagtcagtgactgcagtcactcagaagacgtaggggtgatatgccacccccggcgccatcgtggctacctttctgaaactgtctccaatgcccttgggccccagggccggcggctggaggaggtgcggctcaagcccatccttgccagtgccaagcagcatagcccagtgaccgagggagccgtggaggtgaagtatgagggccactggcggcaggtgtgtgaccagggctggaccatgaacaacagcagggtggtgtgcgggatgctgggcttccccagcgaggtgcctgtcgacagccactactacaggaaagtctgggatctgaagatgagggaccctaagtctaggctgaagagcctgacgaataagaactccttctggatccaccaggtcacctgcctggggacagagccccacatggccaactgccaggtgcaggtggctccagcccggggcaagctgcggccagcctgcccaggtggcatgcatgctgtggtcagctgtgtggcagggcctcacttccgcccaccgaagacaaagccacaacgcaaagggtcctgggcagaggagccgagggtgcgcctgcgctccggggcccaggtgggcgagggccgggtggaagtgctcatgaaccgccagtggggcacggtctgtgaccacaggtggaacctcatctctgccagtgtcgtgtgtcgtcagctgggctttggctctgctcgggaggccctctttggggcccggctgggccaagggctagggcccatccacctgagtgaggtgcgctgcaggggatatgagcggaccctcagcgactgccctgccctggaagggtcccagaatggttgccaacatgagaatgctgctgctgtcaggtgcaatgtccctaacatgggctttcagaatcaggtgcgcttggctggtgggcgtatccctgaggaggggctattggaggtgcaggtggaggtgaacggggtcccacgctgggggagcgtgtgcagtgaaaactgggggctcaccgaagccatggtggcctgccgacagctcggcctgggttttgccatccatgcctacaaggaaacctggttctggtcggggacgccaagggcccaggaggtggtgatgagtggggtgcgctgctcaggcacagagctggccctgcagcagtgccagaggcacgggccggtgcactgctcccacggtggcgggcgcttcctggctggagtctcctgcatggacagtgcaccagacctggtgatgaacgcccagctagtgcaggagacggcctacttggaggaccgcccgctcagccagctgtattgtgcccacgaggagaactgcctctccaagtctgcggatcacatggactggccctacggataccgccgcctattgcgcttctccacacagatctacaatctgggccggactgactttcgtccaaagactggacgcgatagctgggtttggcaccagtgccacaggcattaccacagcattgaggtcttcacccactacgacctcctcactctcaatggctccaaggtggctgaggggcacaaggccagcttctgtctggaggacacaaactgccccacaggactgcagcggcgctacgcatgtgccaactttggagaacagggagtgactgtaggctgctgggacacctaccggcatgacattgattgccagtgggtggatatcacagatgtgggccccgggaattatatcttccaggtgattgtgaacccccactatgaagtggcagagtcagatttctccaacaatatgctgcagtgccgctgcaagtatgatgggcaccgggtctggctgcacaactgccacacagggaattcatacccagccaatgcagaactctccctggagcaggaacagcgtctcaggaacaacctcatctgaagctgtcactgcacactcctagctgctgccgatacaccagatacctcagcttattggagccatgcccttcacagagtcccaactcagaggaaaagggccagtgccaaggggcaccaagaacctgctcaggaagccttttgatggcaagatcaccaatccagatggtattgctccctcaggatggctctgggcctgcccctaagggcctgtggcctatggaatatgtcctccaggctttgctcagctgagctcctcttctgtaaggaaacccagtcatccctgaatcttgccacagagatccgggattcaggagctctcagtttcttagggatggactatggcccagtcccccatctaagtggtgctttgcaaatgtcttggaggagtataggacagaggaccaaaatacacagcaggtagtgttagctctctgctaggagctcaaagcaacacaacttgtatcaaaatcacaactggcagagaagctggtggatccaatcctttcttcatctgttgttatttagaactcacctctcacactctgttctttagtgtccttacctttatcttaccacacacatgggtgtttctattatccttggaagcacagacctcgggcatccccttattgcctgatgggccaacaccaacagttacggagtgcttgagaaggggcaagtttcacagaaatggccagatagggccttcctacagagcagcaagagtaggccaagcagaaagactgctgaggtaacacggaccccagcccctgtcagggcctctgccaaggaaataatatggaccatttacctggcaggcagtctgctctctctcaggatcaccacgcatctcaggattggtctaaacttcaagtctcaaccaagtgtctgaagtgaactttgcattgaataaatttttgccatggaaagaacatcaaacaagccactcatctctacagagataagaaaacaagtttggcagagcaagagacagaagaccgtggagaaatcagaagggggaacagtcagtttagttaaggatggaacctgggaaaggccaccattcctgcttgatggggctctgatttgctcttgctcaagtggaataaaaccccatggtcttcttg

SEQ ID NO: 81994 - DNA, 3658 bp, Homo sapiens
ggctggggggccgcgggcgggaggcggataaaaaggccccagggcgcccggggagggagcccgttagcgctgctccgccgcggcgcccgcccagccccggactgtccgcgctccatctggtatcttggcctcagctgtccttgaagtcaccatggcgtggtccccaccagccaccctctttctgttcctgctgctgctaggccagccccctcccagcaggccacagtcactgggcaccactaagctccggctggtgggcccagagagcaagccagaggagggccgcctggaggtgctgcaccagggccagtggggcaccgtgtgtgatgacaactttgctatccaggaggccacagtggcttgccgccagctgggcttcgaagctgccttgacctgggcccacagtgccaagtacggccaaggggagggacccatctggctggacaatgtgcgctgtgtgggcacagagagctccttggaccagtgcgggtctaatggctggggagtcagtgactgcagtcactcagaagacgtaggggtgatatgccacccccggcgccatcgtggctacctttctgaaactgtctccaatgcccttgggccccagggccggcggctggaggaggtgcggctcaagcccatccttgccagtgccaagcagcatagcccagtgaccgagggagccgtggaggtgaagtatgagggccactggcggcaggtgtgtgaccagggctggaccatgaacaacagcagggtggtgtgcgggatgctgggcttccccagcgaggtgcctgtcgacagccactactacaggaaagtctgggatctgaagatgagggaccctaagtctaggctgaagagcctgacgaataagaactccttctggatccaccaggtcacctgcctggggacagagccccacatggccaactgccaggtgcaggtggctccagcccggggcaagctgcggccagcctgcccaggtggcatgcatgctgtggtcagctgtgtggcagggcctcacttccgcccaccgaagacaaagccacaacgcaaagggtcctgggcagaggagccgagggtgcgcctgcgctccggggcccaggtgggcgagggccgggtggaagtgctcatgaaccgccagtggggcacggtctgtgaccacaggtggaacctcatctctgccagtgtcgtgtgtcgtcagctgggctttggctctgctcgggaggccctctttggggcccggctgggccaagggctagggcccatccacctgagtgaggtgcgctgcaggggatatgagcggaccctcagcgactgccctgccctggaagggtcccagaatggttgccaacatgagaatgctgctgctgtcaggtgcaatgtccctaacatgggctttcagaatcaggtgcgcttggctggtgggcgtatccctgaggaggggctattggaggtgcaggtggaggtgaacggggtcccacgctgggggagcgtgtgcagtgaaaactgggggctcaccgaagccatggtggcctgccgacagctcggcctgggttttgccatccatgcctacaaggaaacctggttctggtcggggacgccaagggcccaggaggtggtgatgagtggggtgcgctgctcaggcacagagctggccctgcagcagtgccagaggcacgggccggtgcactgctcccacggtggcgggcgcttcctggctggagtctcctgcatggacagtgcaccagacctggtgatgaacgcccagctagtgcaggagacggcctacttggaggaccgcccgctcagccagctgtattgtgcccacgaggagaactgcctctccaagtctgcggatcacatggactggccctacggataccgccgcctattgcgcttctccacacagatctacaatctgggccggactgactttcgtccaaagactggacgcgatagctgggtttggcaccagtgccacaggcattaccacagcattgaggtcttcacccactacgacctcctcactctcaatggctccaaggtggctgaggggcacaaggccagcttctgtctggaggacacaaactgccccacaggactgcagcggcgctacgcatgtgccaactttggagaacagggagtgactgtaggctgctgggacacctaccggcatgacattgattgccagtgggtggatatcacagatgtgggccccgggaattatatcttccaggtgattgtgaacccccactatgaagtggcagagtcagatttctccaacaatatgctgcagtgccgctgcaagtatgatgggcaccgggtctggctgcacaactgccacacagggaattcatacccagccaatgcagaactctccctggagcaggaacagcgtctcaggaacaacctcatctgaagctgtcactgcacactcctagctgctgccgatacaccagatacctcagcttattggagccatgcccttcacagagtcccaactcagaggaaaagggccagtgccaaggggcaccaagaacctgctcaggaagccttttgatggcaagatcaccaatccagatggtattgctccctcaggatggctctgggcctgcccctaagggcctgtggcctatggaatatgtcctccaggctttgctcagctgagctcctcttctgtaaggaaacccagtcatccctgaatcttgccacagagatccgggattcaggagctctcagtttcttagggatggactatggcccagtcccccatctaagtggtgctttgcaaatgtcttggaggagtataggacagaggaccaaaatacacagcaggtagtgttagctctctgctaggagctcaaagcaacacaacttgtatcaaaatcacaactggcagagaagctggtggatccaatcctttcttcatctgttgttatttagaactcacctctcacactctgttctttagtgtccttacctttatcttaccacacacatgggtgtttctattatccttggaagcacagacctcgggcatccccttattgcctgatgggccaacaccaacagttacggagtgcttgagaaggggcaagtttcacagaaatggccagatagggccttcctacagagcagcaagagtaggccaagcagaaagactgctgaggtaacacggaccccagcccctgtcagggcctctgccaaggaaataatatggaccatttacctggcaggcagtctgctctctctcaggatcaccacgcatctcaggattggtctaaacttcaagtctcaaccaagtgtctgaagtgaactttgcattgaataaatttttgccatggaaagaacatcaaacaagccactcatctctacagagataagaaaacaagtttggcagagcaagagacagaagaccgtggagaaatcagaagggggaacagtcagtttagttaaggatggaacctgggaaaggccaccattcctgcttgatggggctctgatttgctcttgctcaagtggaataaaaccccatggtcttcttgacatgattcttgatcttttctccactgagacacacttaagtgatgatccttacaggactgacaccctaatgccaataaaagttgctcattatggactgctacaaaaacca

SEQ ID NO: 81995 - DNA, 641 bp, Homo sapiens
aaacactgcatgttctcactcataggtgggaattgaacaatgagaacacttggacacaggaaggggaacatcacacaccagggcctgtcatggggtggggggaggggggagggatagcattaggagatatacctaatgtaaatgacgagttaatgggtgcagcacaccaacatggcacttgtatacatatgtaacaaacctgcacgttgtgcccatgtaccctagaatttaaggtataattaaaaaaaaaaaaaagatgttgcctttagtttctatagggaaccaaacgtcccacgactctaacttccttggctattgttttaagctgctattaccctcttgcttatcaagttgttcatttgcttctcagggccagctaggtgcctggaacttctcttgaaggaactcaagattttcctttatttccatgctgggggcgggggaggccataggcctcaaggggttcctgctccatctgaggtccatgttcaaaagaattgaaagtaggtctcaaaaatatatttctacacccacattcacagctgcattattcacaataactgaaacatggaaacaacccaagtgtacgatgatgaatgaatggatgttagatgttgtgtatacatacaatattgagacat

SEQ ID NO: 81996 - DNA, 481 bp, Homo sapiens
tctgggctcgtgccgttttgatataaatcattcaccagaaaccattaaggaagcctggtgatcatggagtaggaaggtttttgacaagaacgtgaagaattccagatgaacacagcaaaaccaaagctggtgaaattctgtgcaaactagcatgaggcagtgtgctggggagaatagcattctagccaccagtacaatcaatctcatgaccaatggggtaagttgtaacctttccagaaaggtaccgaggcacagagaggttgggtacccaactaagcacagagaaagtgaagaagttgttggacttaagcaataaaagtgatagaaaagataccatgtagtaaatgtgtagttcttcctcacttcaagtaatgtgttccattttaatcatttcatccaaaaagacaaaagagcccccaaaaaaggtctagggaagagcaatggaaaacgttaagtgtacctgcaatcaaataaaggcagg

SEQ ID NO: 81997 - DNA, 964 bp, Homo sapiens
agcggacttccttttaatcttttaggtctcagctcaaacgtcacctcctcaaaatggcttgctaggactgtccctgtcatcctttatcatttacaaaatcctttatgactcatttattgcatccacttctttacttccaacatcaccttcccatcatttattgtgtcacctttatttcctttatagagcttacaataatttgtattaatttggattaaatactggaatgtgggcatgtttgttatttactgtctgtctcccccactgactgtaatttgccaagagcagggaattcagagtcttattcacagctgtatcctcagaatccatcatgggcctgagacttagtaggtgctcaataaacattagtagaatgaatgaatactcattagtttggatggtacaattgtgactatggtactccaagagaagactgatatggtagtcccctattatctgccgttttgctttctgcggtttcaattacttgcagtctgaaaatattaaatagaaatttccagaagtaaacaactcataagttttaatttgctcacctattctgagtagcttgatgaaatctcccacccacccgggacgtgaatcatctctttgtccagtattttcacactgtaccggatacctgcctattagtcactttagtagctgtcttggttatcagatcgactgccgcgctatcctagtgtgcgggcttgaaaaacctttattttgcttcttaatggttccaaagcacagagtagcgatactggcaagtcagatatgccacagagaaagctgtaaaggtgcttccttaaaggtgaagaacaccaaaagttctcagcttaataccgaaagaaaaaagacttataggctgaggttgctaatgtctattgtaagaaccaatcttttagtggtgaaattatgaagaagcaaagagagatttgtgcagggtatatataaggtttgg

SEQ ID NO: 81998 - DNA, 627 bp, Homo sapiens
gtgacaaagagcaacaaagagccacaaagagcaggctgcgggcgggaccatcgggaccatcacagaggcatcagccctgccccggagtggctgcagatgcatccctgagggagggggctggggtgcaggtgctccctcccgaacagggggtttgttagcttcatctgcaaggccctgaagccaggctcttttcaaatcgtcatcatgtgtgcaccgtacactcccttctgactctgggggcctgggcgcctgcttagtgcagccttaaattttttacgtaccagtaaaaatactgcatgtaagattctgttcctaggaggataaagggatggccagagctggctaagcggagtctcgacggactaaaggtatgggaaaatgaagacgtggacctaccacgttctcttctacctggaacttaggatttgtaaattgcatttagatgtcatttgtcacattggtaggctgtgacttaatacactcacaaagaggatttttccaagtatttaaactgtgtagatgctgcaaaaaatcagactgaggcaaagccctgcagccaaccccagcagcaagaggtgaggaccccctgtctgtcctgggccccactcaggcactatcctcatctct

SEQ ID NO: 81999 - DNA, 208 bp, Homo sapiens
atttttaaatcccaggggccaaagttaccccctcattcttccgaattgaaatgtgcaaccttaaagaaatatctatgcttctctcactgtgcctttccaaacggattgaacattttaagactagttcttgaaaatagctaatacagaataattatttgttttgtacagaataaatattatgcattttaaatgcttaagaaaagacatc

SEQ ID NO: 82000 - DNA, 771 bp, Homo sapiens
tttcattaggtcttctattatctcctctgtgccctcactctcccttcccttcttaaatccccatccttctaccttggcctcacctactgaaatctcactccaccttccagttcaaaccaaattccccaccttctgggaatcccttcctcagtagctgcagactacactggcctgtcttttcccagacttctcattccttcatgttagcaccacaatgcttagcaactagtggctttttcaataagaaagatgtagtcttatttatctctttgcacaactcccttctctattgtgttttccacatttacataccactttggggcagaaattggcccagtggccaaatctggcccactttctttttgtatggtctaaagctaagaatgtttttgtattttaaatagtcaaaaaaagatcaaaagaagaaaaatgtttcatgaagtgtaaaaattacctaaaatttaaattttggcatctacaaataaagttttattggaacgtagccacactcatttgtgaagcaggttcactgtgcactggttaccaacttgtctgagtctggtaaggcagaagatccttaaacataacaaattacatgaaacaaatttattatttacagataaacagcaagggataacagaagtgtaggattgattgtgagcttctccccccaaactcagaaaaactgccaggtaaatgaggtctcatctgcatgtgccccacttgcattgctactgagggaccctgaaaagcagacaaccctgggtgtta

SEQ ID NO: 82001 - DNA, 610 bp, Homo sapiens
ctgctgtgtagaagtttcaaccagggatatgcatcaagttagacacaaatacagccacatgtaccttacctaccatagactgagctcaaatctccaggggcagaccctgggcaaggcatgtttctaaaatgtatcccagggaagtgtgatgtgcagatctggttaaaaggctctcctgctgctcttacacaaagaagtgccaagagagaaaagtcagaacagaaaaaccgagcagtgggtccatcctctgtaaacttggcacctccaccccttgtagcacttgaagtcactgagaagacagagacatgccttaaacactggctccatcacattgaagctggttggtcttgggcatgttacttaacctttttgtgcctcagtttcctcatctagtaaataggaggtaatgagatctactttgcagagctgtattgaggactgaatgagattaagacatgtggaatgcttagagcagtgcctgccatgtcatgagactcgacaaatactgctttggtatcaacagcgaggagaatcaccctcatcagactgtgcaacagcatactctccagaactgcacatatccaagggagagccccagatgcggccgcat

SEQ ID NO: 82002 - DNA, 594 bp, Homo sapiens
ccaagtcatttaaagatagtgctcttatatgactctaaactattacctcttccttccttgatataaaggagctttcaccagttgttgacatggttagggattgtttaagtgtaaggacagagttttcagggaaaatcgggattggtagtccatttctaccctcaaaagcccatgcctacctaacagtgtgatatggacagcttagtacatcaacactaattcccagaaatagtgaaacctcaccatatgattattctcaaagcttatgccataaaactgatttgaaattaagtcatatttataacaagctcttttgcccttggtatttctgttgctgacccacattgtataaataccaagataaatactaccatttattgagtcctgctttttatcagttagtattatagcaaatttcaattgtagtttaatcactcaagttaaaaatatatatattgggcacctacttttacaagatactggcatacaataatggattcaatgttgaccagtataagtttcctgtcttcaaagagcttgtagtcaaggagagaagacagatatacaaataatgataatgtataacacagtgtg

SEQ ID NO: 82003 - DNA, 262 bp, Homo sapiens
ccagaagcttcttgccttctctgtgctctcagtggttcccttccctgaagtgcctcccttctcattaattatagcctgtgtctgaacattgtgagctataagaaccctcatattaatggttaagggactgttggaaatgatgtgattttattaaaaatggggtctttgtggaggagtcaggaatggtcaaaatgagcttcaggtatggggcttgctctgtgctcctgataccaagggtctggcaagcacaaaggaaggtgag

SEQ ID NO: 82004 - DNA, 424 bp, Homo sapiens
gcgtggcacaagtaggcattcaatgatatggttgctattatgtcattaatagagataatacatggaagtagaatttctggatttagcataaaagtaagatctgccagagggcacatgtaataaagtgatatatcttgtccaaataacatcttattttttctggaaaatttttgcttgtttgattttgtttattaaagcttaaatatactaaaaagaacctggatttgaactgaacaaaattgccaatgatattcaatggcttttgacctataaaaacaactatttggtatggtttaacccaacacaactcaactctaacatacagacaagaacccttaggaaaactactgtaaaatagggaatatgaaacaaggtatatgatttccaccacacataacaaatagtattttttagaagtttgggg

SEQ ID NO: 82005 - DNA, 369 bp, Homo sapiens
gaatgtataacaatagactgttgttttagaaggcatatgaaaattttttgaaattgcaaagctgcagtggctcacacccataatctcagcactttgggaggccagggcaggagaatcagttgagcccagtgtttgagaatcagcctaggcaatatagtgagaccccgtctctacaaaaatttttttagacagggctgattgtacatgcctgtagtcccagctatttgggagacgaggtgaggaggatcacttgagcccaggaggttgaggttgcagtgagcagtgtttgggacagaaactctgtgtcaaaaaaaaaaaattttttttttttgaaagacagcacaggtaaattgtttaaaataggcatct

SEQ ID NO: 82006 - DNA, 372 bp, Homo sapiens
acatttgagaataagaaattactctcaagaacttcagaaatctgcaacataattttataaatatataaatacatgtatgtatgtcaaaacactacatatacactttcagaaagaataaactttctcaagtcattttaaagttacctaacgttcttcttgaataactaatacagtgggtcaaatattataaaataggcaaacaccaaaatggtattaaatattgaactcctgaccttttcgacacttacctagtaaagtattcttaggcatcatcataacttttcctcacctttattcgaatagaggaataaatgtcttcagttgtctctccattacccctaagttattagtttgtctagtttatatataaag

SEQ ID NO: 82007 - DNA, 602 bp, Homo sapiens
cgtctccttccaaacagaagggagaatgagttgaagtgaaaacaatgcctttacctgctgcacactcgcgactctcatataggagtccaagacgatcaacagaggcacatggatatttttgccttgaaataacttggaggctggaaaacaagtgggtggggaaaagaagcaaagtcacaatccacagcaccccctctcctttttagtctgaaacggggagaaaagtcaaaaaggtgaagaccttcctgaaattctcagctgctttctgccctaaggaaaggatatgggagtttgcggctccttaagagtccgggtttgagcagggtcaaggggaggaggacaaaatttgcaaatgtaaggagggggagaaagtttgcaaaaataaaagcacagtttattttcaagtgattaccgcgctcggagtacgtgaacaccagcagatcctccaggatttggaccagcgtttctatctgttttccttcctggacattgttcagcctgactatcaacttcttcagagtttcctcgtcctcttcgcacccctgacagctgccactagccatggtggcacctgcttccaacccgccgccctcccagcatga

SEQ ID NO: 82008 - DNA, 589 bp, Homo sapiens
gagtaaatgaggggtctacagcacaaacccgggagcactggcattttttgagcttacagtgagctgggggtggggaaagcggcagaggggagtgtcctgagaaggtcccagaaatctccacattgattactccaggtctaaatactagcttgaaaggggaattagactttatgtattgccaaaagctattggtattctcttgctaagcatgtcaccaactgctgaatgttcagagcctactatgaacttgaaagaaaacagagcattgacccctgcattgatccctctctctccaaatatattcttacccacattgctttcctctcatggatagagatgtattcctacaacacccagactttgaacatgttttgcatccttccctctcctcgcctctccctgtctaatatatctctatcaagctttgcgtttgctaggaggcacaccattcatttcagtgatctctgctattgggtcctgcatgaaaaagaagctgagcaacatgatccctttgacccactgctggagcaacaaatttatcagaaatataggcatgagaaatgaaagggaagtaaaacaattccagctt

SEQ ID NO: 82009 - DNA, 974 bp, Homo sapiens
gggaccccatctctgacttgggtgcatcccaaatttagaaggaaacagaaggcatggctgtcagtgaatttttcctcatcactccccatagctctctccccaaaccagggaaggggtcattcttgttcttctctgggaccccacacccacacacatctgggccccctcactctggggatttgattcccggacctgggatcctgtcgtaggctgggaccctgttccaggagttcagcagtcctcatttacaacaacagtgaaaatgctccagtaaggcctggtgccttgtgagctgctcagctgggttggccaggcctgtccccatagggtcttaataaggtgccccattttctaaggttagaagctaaaggggccttttaaaccatcttatctaaccctcttgcttacagatgagcaaactgaggccagaaagggaaaatgactggttcagtgccacagttcatggccaaaaaggaacccacatgtcctggcccttcagggaaggaggcaagaacaggaagctggatccattgacccagacatcctctatcccctttctgtcctctcctacagtgagaggcccagaaattgccccagggcagggctctggggcagaaccaggttttgtgaatcctaagcatatacaatttgggggcatctctttagaaagaatacaaaattagcttcatgataaatctgcatctggcagtcagagtgggcatgatcatgaggtcttagctgcaccagctcaactgtagatggagggcggcccctcaacacacggcacaggaagtggggaagggacagcttcaggagtagttcaggaggctcaaatggtgggtacttgcaaaggccttgcccaatgaccccccgctccagggggagaaggggtaagacccaccccacataaagctcaacaccccttccctcactctgccctaacccacagccccatgcccaggatggtggggcat

SEQ ID NO: 82010 - DNA, 144 bp, Homo sapiens
ctgctacggttcaggttagatgagctgctcccgttggtggtttttatctcttagctacacagctgcctgtagcactctcgtctttcagaatgagttgccaactttccattctggccgtcagaattaaaacaaagaatcatcctc

SEQ ID NO: 82011 - DNA, 564 bp, Homo sapiens
gttggtgaagttagttttgactacttcagatggcattcattgggtttctccattgtgaagttactattttgttcctttattaattggtaatttgtggagagatactttgagattacgcagataatcctgttcctcaccaaattttcacacactggttttagcatccattggtgtttttctaacaccattatttcttctacatttattagttgccattctactgtgagagcttttccttcttccccaacttatttgttcattcatcatttaggtatggactctttgattctcattttattttatgactattatcatcaatctcttgtttagattcccaaaatgtattcagtttggccaatagaggactcttcaagctggcttctttatctttgacatctcattttttgaggacttccatattttgtcttaagaaggtgtttcagactcatattttccctgcctgaattttagagtcagccattttaccaaggaaccctagtttcttttctttggctaggagaacagtatttagaaacccagctctgggtgctagattttcttatg

SEQ ID NO: 82012 - DNA, 447 bp, Homo sapiens
tctggagcaagcggggaagaaggagaaagagcaatcatgcagctggggacaaatctttggtggctttatcagattctcagtcaatcaatgggggttggctagaaccggggtacgcagggggcatggaagagagagaatagtgaaagaaagctccaatattttggcccgagcaactggaaggaccaaattgcctcacaggtgggcagaagcccaatgttggacacatcgcatcacgtgcacacctatcagatatccaagtggagataccaagtgtggagctgaagttgcagaccttggcttcaggggagacacatatttgtgggttaaggcaggcagccttcaagatcccacctcccgcgtccacgcccctgtgtaatcccctctgacactgtgtcagagctggtctgtgtgaccaacagaataagtttcagccattgcacattctgc

SEQ ID NO: 82013 - DNA, 342 bp, Homo sapiens
acagaccaaaatgaaaaatattttcatcatggccgtccaggaagtagaaaatcagctaagtgctaagtggaacattcatttcctctttctagtattttggttaacggaaatacatccccccaaaatgcccccaaaatatagttagagaaatttggtttagaggatggtttctagagtcaggtcatgtgggtcaaaattctggctcccctacttaggacatatccctgtgtaattttgggcaaattacttaatttccttccttgttttagttccctatgctgtaaaatggggataaatggggatgatgataatatctcatattatcatcacatttgaggattc

SEQ ID NO: 82014 - DNA, 439 bp, Homo sapiens
agcatagtgaatcactggctaatctggccttcgaggtagtgaaaggaaaaaagggaaatgaagctgactgtggctgaatgtagtaggtcttgaaggccaaatggggcgatctgatttttattctagaagcagaggagaaactaaagatttttttaggagactatattcaagcttgtatcattagttcatcagacgtttatggaccacccaccgtccgtgcactcacggggcttgcagtctatctggctgaatcactttggcagccagtgtgaggagggcacagaaaggagaccaggtgagaaagccagcctgaccaaagaagatgtggcaactgatgggattggaggaggcggacaatgtcctccagacagctggactggctctctatatatttatttatctcttctacacctccagcccccacctccacactcactaa

SEQ ID NO: 82015 - DNA, 156 bp, Homo sapiens
ggcacaatttttcattgatcttcaatagctcctctttcttattacacatatcttactatacttatatgtctaattgaaaagactcaaaagaccaatagtgataagaagaactgggattgtgtgtgtgtgagagagagagagaaagagagagcaagc

SEQ ID NO: 82016 - DNA, 370 bp, Homo sapiens
cctgagcaacatagggagaccccatctctgcaaaaaattaaaaagttagacaggcttggtggctcatgtggtcccggctattcaggagactgaagtgggaagattacttgagccagggaggtcgatgtctcaagtcagctatgatggctacagtaagccatgatcgcaccactgcattccagactaggcaacagagtgagaccccctcttgcgggagggaaaaaaagaatagaataaaagttgaaaactgcacatgaatataattttgtttgtggattcagagactcactcatcacttaaaactctaggtttaaaattgtgtgggaatagaaactatatatttatgagttttcactctgtctcatacttt

SEQ ID NO: 82017 - DNA, 403 bp, Homo sapiens
gtgaaccaccacgcctggcccgttctcccattcttaggctgagtttggtctgtttttcaaatgagttgtcaactatgaaaagcctgtgtatgccaggagacatttattaagcacctgctatctgccagacgttgtgccaccactttaggtacatcgttgcctgtaaccctaaacgctatgaagtgtaggtactattatcatcattcctgttatacagataaggaaacagtcacatgggcttccagaggacaggcaaactcccctcagagagggcagctggccaagtgatggcaaatggcgtgagcccaccttggggtgaatccacagtagctgttaactcactagacccccgcattctaattgaaatgtgtctgtcccagctgggcgtggtggtgcacctgta

SEQ ID NO: 82018 - DNA, 439 bp, Homo sapiens
ttaagacaatttgccttttaggaccatgtaagtttagacatcgtgctatgtcatgttctggactagaacgctccactagaaagacaggcgttgaccctaagggcactaccctacagtagggtggccatttgtcctgccttgccttggaccatctcagttttagcactaaaagtcccatggtctcggaattccctcagtctcagggaagctgggatggttggtcaccctcacctacactcagccggagccatagaagtgtggctgtgggtagctggccctgttctcatccagacagagaggaccatctccaaatatgattctgaaagcagcctcagagctaggaatgccctgttgaggcaatggctgcctcactgcctattttccagctcacactagcaatttccttacttcccagaggctgcaccccacaaggatttcg

SEQ ID NO: 82019 - DNA, 433 bp, Homo sapiens
cgcaaagcagcacacatgggtctaggattgaggagaatggagctttgggagaataaataaatcctgagcgttgagggcccagtttgggtcactgactgtagttttaatcatactcatctcagtggttctataattttctttagcaggacttggcaatacagatttagacaaagagcaggcttgagcctagtttggagttttgctaaggttgagcctagtttggagttttgctaagaaagtataatggatgagcagaagagttttctcaacttgtttattaaaaaaaaaaaagaataatgggtagagtggctttctttatttgcttagaaatagttcacctttctgcccaagtccaatatcttccatttttctcttgaatttgacatcataaaattatatttttaatagatccccttaagcctaatggcccaaa

SEQ ID NO: 82020 - DNA, 291 bp, Homo sapiens
ttaaaatactccatatatttgagaagcaattgaaaatgcatccatgtatgttatttgagcgttactagaaatttatttatacaaatccatattaatgtgctaataagtgacaaatatatatatagtcatgcactgaataatgatgttttggtcaatgatgaactgcacatacaatggtggccccataagattaaaatagaaccaaaatttcctatggcctagtgatgctgtagccatcataatgtggtagtgcaacccattaccttttctatgtttaaatatacaaatact

SEQ ID NO: 82021 - DNA, 838 bp, Homo sapiens
ggcaagagaatcgcttgaacctgggaggcggaggttgcagtgagccgagattgtgccattgcactccaacctgggcaacaagagcgaaactccgtctcaaaaaaaaaataaaaaaagaaagtgaaccatgaggagggcctaggagaagccaaaggaactaaggaactacaccatttgaaagggaggtggaggagctggccaagaaggcttgaagagcaaccagaggggcaggagaaagccaggagtactcttatgaagaggagggaatgccgaccagctgagcctagtgctgctgacttggtctgacacaaaagatgtgtcctttggtctagtcatgtggaggtcatcagaggaggtcatcagtaacctcggtgagagatgctgtattctcagggtgctgggtgaaaggctaattgtgagacgttgaggagtggacgggggtggggaatggagatagggttggaaacttattccagaagtttggctgtgaagagcaacttgtgttgcggaaccagaggactaactcagcatatcaccctggagtgttgattggacttgaatatttgcgcagactcattattttcatgtgaaaataaaccaatgataagacaatagatatgtcatagattagcgagctctcaggatggaggagagagagaagatggaaatattaggtttgggctaaatattgaggactttccttttgcgaggcactgtaatccctttcacatgttgttatctcacatagtcctcaaaatgagcctatggtgtgtatatctggaattttcctcatttttgtggatgagtaaactgaggcttagagaggcatggttgcaga

SEQ ID NO: 82022 - DNA, 390 bp, Homo sapiens
ttttgggttggggggcaaggtcttgctctttaacccaggctggaatgcagtatcactatcgtagctcacttcagccttgaactcctgggctcaagtgatcctcccacctcaacctcacaatgtgttgggactataggtgtgagccatcacacctggccagatgatggcttttgagtaaagacctcaagcgagttaagagtctagtgtaagggtgtatgaagtagtggtattccagatggggggaacaggtccaaaatcttcctgtttcaggaatagcaaggatgtcattttagttgggtgaattgagtgagggggacatttgtagtaagaagtaaggtccaagaggtcaagggagtgccatatcagaccaatactacttgccttgtagat

SEQ ID NO: 82023 - DNA, 177 bp, Homo sapiens
tgtggaatgggaaaagatgacagtcttctttaaaaggatctttaaggaaaggagagttctatcattttaaggtggctggggaactgtctggcattaagagagaggaatggattacacagatgatttctggtgtttttattagtattgttgttactctggttcaatgattctgtgatt

SEQ ID NO: 82024 - DNA, 741 bp, Homo sapiens
aacggggacggtggtggggggcagtcttcatctaaatacagttggtgttaaaaggagaagcagaggaggagaagggacaggcaaagcagctttctcttctaaaataaatccaaattcctgggaagaagctctgaggtcattcactcccccagatggcccagtgccaccaacctgatagagcccactcagcaggtgcccaaaagctcaactgtgaatccctgacagctgtgatgccaccaactctcttctagctctaggaagcaaaggagctcaggagcaggcagggtgctgcccaagaaataggtatgaacagagacctttcactttcaggacctgggtccttttttttttttttttttttataaacaggaaaaacacattctaaatgaaaacagtctgttccctttggaagtggctaaactagtcttattttaattaactagctgaaatacacctgctaaaaacaacacacctttgctatcttgggaatactctttgaatatctgggttttaaacagcccatcccctcttacatttgaagtgatcaaagcaagacagtcctgtacccagagttttaattcattacactacacttgcatttttcctgtgggcagagaaaggaaaacctccaatgccacccacctgaagtgcatatttgtcttgcagttataccatccactcagtggagttcagggctccatatctggcatcaatagcaaaataaatttccaaacactgtaa

SEQ ID NO: 82025 - DNA, 3985 bp, Homo sapiens
  misc_feature (3920)..(3920): n is a, c, g, or t
  misc_feature (3938)..(3938): n is a, c, g, or t
acccacgcgatcgcggacgcgtggtgtcgacccacgcgtccgaccacgcgtcagcgcccgtgtcgagcctggagccagaacctgtgaagagcggaagggccaagggacgtcttctccacgccgctccgactccaggggagccgtggcctcctctccgccctagcgctgagaaccgtgggtaccgatggatgtggccgagagccctgaacgggatcctcactctccagaggatgaagagcagccacagggactctcggacgatgacattctgagggacagcgggtccgatcaggatttggacggggcgggggtgagggcttctgatctggaggatgaggaaagtgcagccagggggccgagccaggaggaggaagataatcactccgacgaggaggaccgggcaagtgagcctaaatcccaagaccaggactcagaggtgaatgagctgagccggggcccgaccagctccccctgcgaggaggagggggacgaaggggaggaagaccggacaagcgaccttagggatgaggcctcctcagtcaccagggagctggatgagcatgagctagactacgatgaggaggttcctgaggagccagctcccgccgtccaggaggacgaggctgagaaagcgggggctgaggatgatgaggagaagggcgaaggcactcccagggaggaggggaaggctggtgttcagagtgtgggagaaaaggaatccctggaggctgccaaggagaaaaagaaagaggacgatgatggagaaatcgatgatggggaaatagacgatgatgacctggaagaaggtgaagtgaaggaccccagtgacaggaaggtgaggcctcgtcccacctgccggttcttcatgaaagggaactgtacctggggaatgaatgtaggtttatacaccctggagtgaacgacaaggggaactactccctaatcaccaaagccgaccccttcccgcctaatggtgccccgcctctcggacctcacccgctgatgcccgccaacccttggggtgggccggtagttgatgaaattttgcctccaccccctccagagcccccaacagagagtgcctgggaacgaggactccggcatgcaaaggaggttttaaaaaaagcaactattcgaaaagaacaggagcctgattttgaagagaaaaggtttacggtgaccattggcgaagacgaacgggaatttgacaaagaaaatgaagtttttcgagattggaattctcggatcccgagagatgtcagagacacagtactcgagccttacgcagacccttattatgactatgaaattgagcggttttggcgtggcggacagtatgagaatttcagggtgcagtatacagaaacagagccgtatcataattaccgagaaagggagcgggagcgagagagagagaacagacagcgcgagcgcgagcgggagcgggagcgggaccgagagcgggagcgccggcagagggagcgcgagcgagagcgggagcgcgagcgcgacaaggagcggcagcggaggaaggaggagtgggagcgtgagcgagccaagcgggacgagaaggaccggcagcaccgtgaccgcgaccgggagaaggagcgggagaaggagaaggggaagcccaagccccgctccccgcagccgccaagccgccaagctgagccaccaaagaaggaggctgccaccacggggccgcaggtgaagagagcagatgagtggaaggacccttggcgccgatccaagtctcccaagaagaaactcggggtgtcggtctccccgagccgggctcgaaggcgtcggaaaacatcagcctcgtcagcctctgcctctaattcctccaggtcgtcttcgcggtcatcgtcctactctggctccggctcctcccggtcgcgatcccggtcttcatcctacagctcctactccagccgctcttccagacacagctcgttctcaggaagccggtccaggtcccggtccttctcttcgtccccgtccccgtccccaacaccttccccacatagaccttccatcagaaccaagggagagccggccccgccgcccgggaaagcaggagagaagtcagtgaagaagccggccccgcctccagccccaccacaggccaccaaaaccactgctcctgtccccgagcccaccaagccaggagaccctcgggaagccaggaggaaggagcggccagccaggaccccccccaggaggcggacgctaagcggcagcggcagtggcagtggtagcagctatagtggttccagctcccgatccaggtccctgagcgtgagcagcgtctcctcagtgtccagtgctacgtcgagcagcagctctgcacacagcgtggactcggaggacatgtacgcagacctggctagccccgtgtcctcagccagctctcggtccccggccccagcccagaccaggaaggagaaaggaaaatctaagaaagaagacggtgttaaagaggaaaagcggaaaagggattcgtccacacaaccacccaaatctgcaaaacctccagcaggggggaagtcctcccagcagccctcgacaccccagcaggcaccccccgggcagccccagcagggcacatttgtggcccacaaggagatcaagttgacactgttgaataaggcggctgataaaggaagcaggaagcgctatgaaccatcagacaaggacaggcagagccctcctccagccaagcggcccaacacatccccagaccgaggttctcgggaccggaagtcaggtgggagactgggctccccgaagccagagcggcagagaggccagaactccaaagcccctgcagccccggctgacaggaagcgccagctgtcaccccagtccaagagctccagcaaggtcacgagcgtgcccggcaaagcctcggatcccggcgccgccagcaccaaatcagggaaggccagcacgctgtctcggcgggaggagctgctgaaacagctgaaggccgtggaggatgctattgcacgcaagcgggccaagatccccgggaaagcataggccgtgccccgaccggactggacgcatttttatacatagggtaagcgcagccattttggattttgcagttaatgtcttattttggctgtgattctttttaaaaagtaaaaaagaaaaaaaagtttctcagctggaaaagaagccacacaggaaatgacaacgacgctgaatcccagcctccctccccagagcagaagtcccgcaggacagacagacacagacagcgctagtgaccagcacggttctcatgtaaattacaagccccagccgccagccccgccttctcttcctcctcctccgtcttcttccctggccctggtcaggcctgtggagccccagctctgggtccctagcccgggtccaggcagccaggctccctcctgagctgagaaacggaacctcgcgaaccactggtggcacatccttctcctcccccgcccctgatcacccgcccccggatcagaaatatatctatattctcgactaaagtctcatcaggaaatatttcctgtcttttattttaagcatcaaattgttttagttgatttaaaaaggaaaaaatacagaaaagaccaaaaaaaggccaagggtgttgttggggcgtctgtctaatgtggtgggtctttttttgaggggtctcctaaaataaaatattttgataagcaaaaaaaaaaaaaaaaaaaaaaaaaaaaaaaaaaaaaaaaaaaaaaaaaaaaaaaaaaaaaaaaaaaaaaaaaaaaaaaaaaaaaaaaaaaaaaaaaaaaaaaaaaaaaaaaaaaaaaaaaaaaacaaaaaaaaaaaaaaaaaaaaaaaaaaaaaacaaacaaaaaaaaaaccaaacacaaaaacaacccacaacccaaacaaaacaacanacccaccaaaaaaccccnccccaaccaaaaaaaacccaacaaaaaaaaaaaccaccaccacccac

SEQ ID NO: 82026 - DNA, 4007 bp, Homo sapiens
  misc_feature (3942)..(3942): n is a, c, g, or t
  misc_feature (3960)..(3960): n is a, c, g, or t
gtggtgagcgtggagcgggaccgagagcgggagcgccggcagagggagcgcgagcgagatgcgggagcgcgagcgcgacaaggagcggcagcggaggaaggaggagtgggagcgtgagcggccaagggacgtcttctccacgccgctccgactccaggggagccgtggcctcctctccgccctagcgctgagaaccgtgggtaccgatggatgtggccgagagccctgaacgggatcctcactctccagaggatgaagagcagccacagggactctcggacgatgacattctgagggacagcgggtccgatcaggatttggacggggcgggggtgagggcttctgatctggaggatgaggaaagtgcagccagggggccgagccaggaggaggaagataatcactccgacgaggaggaccgggcaagtgagcctaaatcccaagaccaggactcagaggtgaatgagctgagccggggcccgaccagctccccctgcgaggaggagggggacgaaggggaggaagaccggacaagcgaccttagggatgaggcctcctcagtcaccagggagctggatgagcatgagctagactacgatgaggaggttcctgaggagccagctcccgccgtccaggaggacgaggctgagaaagcgggggctgaggatgatgaggagaagggcgaaggcactcccagggaggaggggaaggctggtgttcagagtgtgggagaaaaggaatccctggaggctgccaaggagaaaaagaaagaggacgatgatggagaaatcgatgatggggaaatagacgatgatgacctggaagaaggtgaagtgaaggaccccagtgacaggaaggtgaggcctcgtcccacctgccggttcttcatgaaagggaactgtacctggggaatgaatgtaggtttatacaccctggagtgaacgacaaggggaactactccctaatcaccaaagccgaccccttcccgcctaatggtgccccgcctctcggacctcacccgctgatgcccgccaacccttggggtgggccggtagttgatgaaattttgcctccaccccctccagagcccccaacagagagtgcctgggaacgaggactccggcatgcaaaggaggttttaaaaaaagcaactattcgaaaagaacaggagcctgattttgaagagaaaaggtttacggtgaccattggcgaagacgaacgggaatttgacaaagaaaatgaagtttttcgagattggaattctcggatcccgagagatgtcagagacacagtactcgagccttacgcagacccttattatgactatgaaattgagcggttttggcgtggcggacagtatgagaatttcagggtgcagtatacagaaacagagccgtatcataattaccgagaaagggagcgggagcgagagagagagaacagacagcgcgagcgcgagcgggagcgggagcgggaccgagagcgggagcgccggcagagggagcgcgagcgagagcgggagcgcgagcgcgacaaggagcggcagcggaggaaggaggagtgggagcgtgagcgagccaagcgggacgagaaggaccggcagcaccgtgaccgcgaccgggagaaggagcgggagaaggagaaggggaagcccaagccccgctccccgcagccgccaagccgccaagctgagccaccaaagaaggaggctgccaccacggggccgcaggtgaagagagcagatgagtggaaggacccttggcgccgatccaagtctcccaagaagaaactcggggtgtcggtctccccgagccgggctcgaaggcgtcggaaaacatcagcctcgtcagcctctgcctctaattcctccaggtcgtcttcgcggtcatcgtcctactctggctccggctcctcccggtcgcgatcccggtcttcatcctacagctcctactccagccgctcttccagacacagctcgttctcaggaagccggtccaggtcccggtccttctcttcgtccccgtccccgtccccaacaccttccccacatagaccttccatcagaaccaagggagagccggccccgccgcccgggaaagcaggagagaagtcagtgaagaagccggccccgcctccagccccaccacaggccaccaaaaccactgctcctgtccccgagcccaccaagccaggagaccctcgggaagccaggaggaaggagcggccagccaggaccccccccaggaggcggacgctaagcggcagcggcagtggcagtggtagcagctatagtggttccagctcccgatccaggtccctgagcgtgagcagcgtctcctcagtgtccagtgctacgtcgagcagcagctctgcacacagcgtggactcggaggacatgtacgcagacctggctagccccgtgtcctcagccagctctcggtccccggccccagcccagaccaggaaggagaaaggaaaatctaagaaagaagacggtgttaaagaggaaaagcggaaaagggattcgtccacacaaccacccaaatctgcaaaacctccagcaggggggaagtcctcccagcagccctcgacaccccagcaggcaccccccgggcagccccagcagggcacatttgtggcccacaaggagatcaagttgacactgttgaataaggcggctgataaaggaagcaggaagcgctatgaaccatcagacaaggacaggcagagccctcctccagccaagcggcccaacacatccccagaccgaggttctcgggaccggaagtcaggtgggagactgggctccccgaagccagagcggcagagaggccagaactccaaagcccctgcagccccggctgacaggaagcgccagctgtcaccccagtccaagagctccagcaaggtcacgagcgtgcccggcaaagcctcggatcccggcgccgccagcaccaaatcagggaaggccagcacgctgtctcggcgggaggagctgctgaaacagctgaaggccgtggaggatgctattgcacgcaagcgggccaagatccccgggaaagcataggccgtgccccgaccggactggacgcatttttatacatagggtaagcgcagccattttggattttgcagttaatgtcttattttggctgtgattctttttaaaaagtaaaaaagaaaaaaaagtttctcagctggaaaagaagccacacaggaaatgacaacgacgctgaatcccagcctccctccccagagcagaagtcccgcaggacagacagacacagacagcgctagtgaccagcacggttctcatgtaaattacaagccccagccgccagccccgccttctcttcctcctcctccgtcttcttccctggccctggtcaggcctgtggagccccagctctgggtccctagcccgggtccaggcagccaggctccctcctgagctgagaaacggaacctcgcgaaccactggtggcacatccttctcctcccccgcccctgatcacccgcccccggatcagaaatatatctatattctcgactaaagtctcatcaggaaatatttcctgtcttttattttaagcatcaaattgttttagttgatttaaaaaggaaaaaatacagaaaagaccaaaaaaaggccaagggtgttgttggggcgtctgtctaatgtggtgggtctttttttgaggggtctcctaaaataaaatattttgataagcaaaaaaaaaaaaaaaaaaaaaaaaaaaaaaaaaaaaaaaaaaaaaaaaaaaaaaaaaaaaaaaaaaaaaaaaaaaaaaaaaaaaaaaaaaaaaaaaaaaaaaaaaaaaaaaaaaaaaaaaaaaaacaaaaaaaaaaaaaaaaaaaaaaaaaaaaaacaaacaaaaaaaaaaccaaacacaaaaacaacccacaacccaaacaaaacaacanacccaccaaaaaaccccnccccaaccaaaaaaaacccaacaaaaaaaaaaaccaccaccacccac

SEQ ID NO: 82027 - DNA, 3862 bp, Homo sapiens
  misc_feature (3797)..(3797): n is a, c, g, or t
  misc_feature (3815)..(3815): n is a, c, g, or t
acccacgcgatcgcggacgcgtggtgtcgacccacgcgtccgaccacgcgtcagcgcccgtgtcgagcctggagccagaacctgtgaagagcggaagggccaagggacgtcttctccacgccgctccgactccaggggagccgtggcctcctctccgccctagcgctgagaaccgtgggtaccgatggatgtggccgagagccctgaacgggatcctcactctccagaggatgaagagcagccacagggactctcggacgatgacattctgagggacagcgggtccgatcaggatttggacggggcgggggtgagggcttctgatctggaggatgaggaaagtgcagccagggggccgagccaggaggaggaagataatcactccgacgaggaggaccgggcaagtgagcctaaatcccaagaccaggactcagaggtgaatgagctgagccggggcccgaccagctccccctgcgaggaggagggggacgaaggggaggaagaccggacaagcgaccttagggatgaggcctcctcagtcaccagggagctggatgagcatgagctagactacgatgaggaggttcctgaggagccagctcccgccgtccaggaggacgaggctgagaaagcgggggctgaggatgatgaggagaagggcgaaggcactcccagggaggaggggaaggctggtgttcagagtgtgggagaaaaggaatccctggaggctgccaaggagaaaaagaaagaggacgatgatggagaaatcgatgatggggaaatagacgatgatgacctggaagaaggtgaagtgaaggaccccagtgacaggaaggtgaggcctcgtcccacctgccggttcttcatgaaagggaactgtacctggggaatgaatgtaggtttatacaccctggagtgaacgacaaggggaactactccctaatcaccaaagccgaccccttcccgcctaatggtgccccgcctctcggacctcacccgctgatgcccgccaacccttggggtgggccggtagttgatgaaattttgcctccaccccctccagagcccccaacagagagtgcctgggaacgaggactccggcatgcaaaggaggttttaaaaaaagcaactattcgaaaagaacaggagcctgattttgaagagaaaaggtttacggtgaccattggcgaagacgaacgggaatttgacaaagaaaatgaagtttttcgagattggaattctcggatcccgagagatgtcagagacacagtactcgagccttacgcagacccttattatgactatgaaattgagcggttttggcgtggcggacagtatgagaatttcagggtgcagtatacagaaacagagccgtatcataattaccgaaaggagcggcagcggaggaaggaggagtgggagcgtgagcgagccaagcgggacgagaaggaccggcagcaccgtgaccgcgaccgggagaaggagcgggagaaggagaaggggaagcccaagccccgctccccgcagccgccaagccgccaagctgagccaccaaagaaggaggctgccaccacggggccgcaggtgaagagagcagatgagtggaaggacccttggcgccgatccaagtctcccaagaagaaactcggggtgtcggtctccccgagccgggctcgaaggcgtcggaaaacatcagcctcgtcagcctctgcctctaattcctccaggtcgtcttcgcggtcatcgtcctactctggctccggctcctcccggtcgcgatcccggtcttcatcctacagctcctactccagccgctcttccagacacagctcgttctcaggaagccggtccaggtcccggtccttctcttcgtccccgtccccgtccccaacaccttccccacatagaccttccatcagaaccaagggagagccggccccgccgcccgggaaagcaggagagaagtcagtgaagaagccggccccgcctccagccccaccacaggccaccaaaaccactgctcctgtccccgagcccaccaagccaggagaccctcgggaagccaggaggaaggagcggccagccaggaccccccccaggaggcggacgctaagcggcagcggcagtggcagtggtagcagctatagtggttccagctcccgatccaggtccctgagcgtgagcagcgtctcctcagtgtccagtgctacgtcgagcagcagctctgcacacagcgtggactcggaggacatgtacgcagacctggctagccccgtgtcctcagccagctctcggtccccggccccagcccagaccaggaaggagaaaggaaaatctaagaaagaagacggtgttaaagaggaaaagcggaaaagggattcgtccacacaaccacccaaatctgcaaaacctccagcaggggggaagtcctcccagcagccctcgacaccccagcaggcaccccccgggcagccccagcagggcacatttgtggcccacaaggagatcaagttgacactgttgaataaggcggctgataaaggaagcaggaagcgctatgaaccatcagacaaggacaggcagagccctcctccagccaagcggcccaacacatccccagaccgaggttctcgggaccggaagtcaggtgggagactgggctccccgaagccagagcggcagagaggccagaactccaaagcccctgcagccccggctgacaggaagcgccagctgtcaccccagtccaagagctccagcaaggtcacgagcgtgcccggcaaagcctcggatcccggcgccgccagcaccaaatcagggaaggccagcacgctgtctcggcgggaggagctgctgaaacagctgaaggccgtggaggatgctattgcacgcaagcgggccaagatccccgggaaagcataggccgtgccccgaccggactggacgcatttttatacatagggtaagcgcagccattttggattttgcagttaatgtcttattttggctgtgattctttttaaaaagtaaaaaagaaaaaaaagtttctcagctggaaaagaagccacacaggaaatgacaacgacgctgaatcccagcctccctccccagagcagaagtcccgcaggacagacagacacagacagcgctagtgaccagcacggttctcatgtaaattacaagccccagccgccagccccgccttctcttcctcctcctccgtcttcttccctggccctggtcaggcctgtggagccccagctctgggtccctagcccgggtccaggcagccaggctccctcctgagctgagaaacggaacctcgcgaaccactggtggcacatccttctcctcccccgcccctgatcacccgcccccggatcagaaatatatctatattctcgactaaagtctcatcaggaaatatttcctgtcttttattttaagcatcaaattgttttagttgatttaaaaaggaaaaaatacagaaaagaccaaaaaaaggccaagggtgttgttggggcgtctgtctaatgtggtgggtctttttttgaggggtctcctaaaataaaatattttgataagcaaaaaaaaaaaaaaaaaaaaaaaaaaaaaaaaaaaaaaaaaaaaaaaaaaaaaaaaaaaaaaaaaaaaaaaaaaaaaaaaaaaaaaaaaaaaaaaaaaaaaaaaaaaaaaaaaaaaaaaaaaaaacaaaaaaaaaaaaaaaaaaaaaaaaaaaaaacaaacaaaaaaaaaaccaaacacaaaaacaacccacaacccaaacaaaacaacanacccaccaaaaaaccccnccccaaccaaaaaaaacccaacaaaaaaaaaaaccaccaccacccac

SEQ ID NO: 82028 - DNA, 3598 bp, Homo sapiens
  misc_feature (3533)..(3533): n is a, c, g, or t
  misc_feature (3551)..(3551): n is a, c, g, or t
acccacgcgatcgcggacgcgtggtgtcgacccacgcgtccgaccacgcgtcagcgcccgtgtcgagcctggagccagaacctgtgaagagcggaagggccaagggacgtcttctccacgccgctccgactccaggggagccgtggcctcctctccgccctagcgctgagaaccgtgggtaccgatggatgtggccgagagccctgaacgggatcctcactctccagaggatgaagagcagccacagggactctcggacgatgacattctgagggacagcgggtccgatcaggatttggacggggcgggggtgagggcttctgatctggaggatgaggaaagtgcagccagggggccgagccaggaggaggaagataatcactccgacgaggaggaccgggcaagtgagcctaaatcccaagaccaggactcagaggtgaatgagctgagccggggcccgaccagctccccctgcgaggaggagggggacgaaggggaggaagaccggacaagcgaccttagggatgaggcctcctcagtcaccagggagctggatgagcatgagctagactacgatgaggaggttcctgaggagccagctcccgccgtccaggaggacgaggctgagaaagcgggggctgaggatgatgaggagaagggcgaaggcactcccagggaggaggggaaggctggtgttcagagtgtgggagaaaaggaatccctggaggctgccaaggagaaaaagaaagaggacgatgatggagaaatcgatgatggggaaatagacgatgatgacctggaagaaggtgaagtgaaggaccccagtgacaggaaggtgaggcctcgtcccacctgccggttcttcatgaaagggaactgtacctggggaatgaatgtaggtttatacaccctggagtgaacgacaaggggaactactccctaatcaccaaagccgaccccttcccgcctaatggtgccccgcctctcggacctcacccgctgatgcccgccaacccttggggtgggccggtagttgatgaaattttgcctccaccccctccagagcccccaacagagagtgcctgggaacgaggactccggcatgcaaaggaggttttaaaaaaagcaactattcgaaaagaacaggagcctgattttgaagagaaaaggtttacggtgaccattggcgaagacgaacgggaatttgacaaagaaaatgaagtttttcgagattggaattctcggatcccgagagatgtcagagacacagtccgccaagctgagccaccaaagaaggaggctgccaccacggggccgcaggtgaagagagcagatgagtggaaggacccttggcgccgatccaagtctcccaagaagaaactcggggtgtcggtctccccgagccgggctcgaaggcgtcggaaaacatcagcctcgtcagcctctgcctctaattcctccaggtcgtcttcgcggtcatcgtcctactctggctccggctcctcccggtcgcgatcccggtcttcatcctacagctcctactccagccgctcttccagacacagctcgttctcaggaagccggtccaggtcccggtccttctcttcgtccccgtccccgtccccaacaccttccccacatagaccttccatcagaaccaagggagagccggccccgccgcccgggaaagcaggagagaagtcagtgaagaagccggccccgcctccagccccaccacaggccaccaaaaccactgctcctgtccccgagcccaccaagccaggagaccctcgggaagccaggaggaaggagcggccagccaggaccccccccaggaggcggacgctaagcggcagcggcagtggcagtggtagcagctatagtggttccagctcccgatccaggtccctgagcgtgagcagcgtctcctcagtgtccagtgctacgtcgagcagcagctctgcacacagcgtggactcggaggacatgtacgcagacctggctagccccgtgtcctcagccagctctcggtccccggccccagcccagaccaggaaggagaaaggaaaatctaagaaagaagacggtgttaaagaggaaaagcggaaaagggattcgtccacacaaccacccaaatctgcaaaacctccagcaggggggaagtcctcccagcagccctcgacaccccagcaggcaccccccgggcagccccagcagggcacatttgtggcccacaaggagatcaagttgacactgttgaataaggcggctgataaaggaagcaggaagcgctatgaaccatcagacaaggacaggcagagccctcctccagccaagcggcccaacacatccccagaccgaggttctcgggaccggaagtcaggtgggagactgggctccccgaagccagagcggcagagaggccagaactccaaagcccctgcagccccggctgacaggaagcgccagctgtcaccccagtccaagagctccagcaaggtcacgagcgtgcccggcaaagcctcggatcccggcgccgccagcaccaaatcagggaaggccagcacgctgtctcggcgggaggagctgctgaaacagctgaaggccgtggaggatgctattgcacgcaagcgggccaagatccccgggaaagcataggccgtgccccgaccggactggacgcatttttatacatagggtaagcgcagccattttggattttgcagttaatgtcttattttggctgtgattctttttaaaaagtaaaaaagaaaaaaaagtttctcagctggaaaagaagccacacaggaaatgacaacgacgctgaatcccagcctccctccccagagcagaagtcccgcaggacagacagacacagacagcgctagtgaccagcacggttctcatgtaaattacaagccccagccgccagccccgccttctcttcctcctcctccgtcttcttccctggccctggtcaggcctgtggagccccagctctgggtccctagcccgggtccaggcagccaggctccctcctgagctgagaaacggaacctcgcgaaccactggtggcacatccttctcctcccccgcccctgatcacccgcccccggatcagaaatatatctatattctcgactaaagtctcatcaggaaatatttcctgtcttttattttaagcatcaaattgttttagttgatttaaaaaggaaaaaatacagaaaagaccaaaaaaaggccaagggtgttgttggggcgtctgtctaatgtggtgggtctttttttgaggggtctcctaaaataaaatattttgataagcaaaaaaaaaaaaaaaaaaaaaaaaaaaaaaaaaaaaaaaaaaaaaaaaaaaaaaaaaaaaaaaaaaaaaaaaaaaaaaaaaaaaaaaaaaaaaaaaaaaaaaaaaaaaaaaaaaaaaaaaaaaaacaaaaaaaaaaaaaaaaaaaaaaaaaaaaaacaaacaaaaaaaaaaccaaacacaaaaacaacccacaacccaaacaaaacaacanacccaccaaaaaaccccnccccaaccaaaaaaaacccaacaaaaaaaaaaaccaccaccacccac

SEQ ID NO: 82029 - DNA, 3927 bp, Homo sapiens
  misc_feature (3862)..(3862): n is a, c, g, or t
  misc_feature (3880)..(3880): n is a, c, g, or t
acccacgcgatcgcggacgcgtggtgtcgacccacgcgtccgaccacgcgtcagcgcccgtgtcgagcctggagccagaacctgtgaagagcggaagggccaagggacgtcttctccacgccgctccgactccaggggagccgtggcctcctctccgccctagcgctgagaaccgtgggtaccgatggatgtggccgagagccctgaacgggatcctcactctccagaggatgaagagcagccacagggactctcggacgatgacattctgagggacagcgggtccgatcaggatttggacggggcgggggtgagggcttctgatctggaggatgaggaaagtgcagccagggggccgagccaggaggaggaagataatcactccgacgaggaggaccgggcaagtgagcctaaatcccaagaccaggactcagaggtgaatgagctgagccggggcccgaccagctccccctgcgaggaggagggggacgaaggggaggaagaccggacaagcgaccttagggatgaggcctcctcagtcaccagggagctggatgagcatgagctagactacgatgaggaggttcctgaggagccagctcccgccgtccaggaggacgaggctgagaaagcgggggctgaggatgatgaggagaagggcgaaggcactcccagggaggaggggaaggctggtgttcagagtgtgggagaaaaggaatccctggaggctgccaaggagaaaaagaaagaggacgatgatggagaaatcgatgatggggaaatagacgatgatgacctggaagaaggtgaagtgaaggaccccagtgacaggaaggtgaggcctcgtcccacctgccggttcttcatgaaagggaactgtacctggggaatgaatgtaggtttatacaccctggagtgaacgacaaggggaactactccctaatcaccaaagccgaccccttcccgcctaatggtgccccgcctctcggacctcacccgctgatgcccgccaacccttggggtgggccggtagttgatgaaattttgcctccaccccctccagagcccccaacagagagtgcctgggaacgaggactccggcatgcaaaggaggttttaaaaaaagcaactattcgaaaagaacaggagcctgattttgaagagaaaaggtttacggtgaccattggcgaagacgaacgggaatttgacaaagaaaatgaagtttttcgagattggaattctcggatcccgagagatgtcagagacacagtactcgagccttacgcagacccttattatgactatgaaattgagcggttttggcgtggcggacagtatgagaatttcagggtgcagtatacagaaacagagccgtatcataattaccgagaaagggagcgggagcgagagagagagaacagacagcgcgagcgcgagcgggagcgggagcgggaccgagagcgggagcgccggcagagggagcgcgagcgagagcgggagcgcgagcgcgacaaggagcggcagcggaggaaggaggagtgggagcgtgagcgagccaagcgggacgagaaggaccggcagcaccgtgaccgcgaccgggagaaggagcgggagaaggagaaggggaagcccaagccccgctccccgcagccgccaagccgccaagctgagccaccaaagaaggaggctgccaccacggggccgcaggtgaagagagcagatgagtggaaggacccttggcgccgatccaagtctcccaagaagaaactcggggtgtcggtctccccgagccgggctcgaaggcgtcggaaaacatcagcctcgtcagcctctgcctctaattcctccaggtcgtcttcgcggtcatcgtcctactctggctccggctcctcccggtcgcgatcccggtcttcatcctacagctcctactccagccgctcttccagacacagctcgttctcaggaagccggtccaggtcccggtccttctcttcgtccccgtccccgtccccaacaccttccccacatagaccttccatcagaaccaagggagagccggccccgccgcccgggaaagcaggagagaagtcagtgaagaagccggccccgcctccagccccaccacaggccaccaaaaccactgctcctgtccccgagcccaccaagccaggagaccctcgggaagccaggaggaaggagcggccagccaggaccccccccaggaggcggacgctaagcggcagcggcagtggcagtggtagcagctatagtggttccagctcccgatccaggtccctgagcgtgagcagcgtctcctcagtgtccagtgctacgtcgagcagcagctctgcacacagcgtggactcggaggacatgtacgcagacctggctagccccgtgtcctcagccagctctcggtccccggccccagcccagaccaggaaggagaaaggaaaatctaagaaagaagacggtgttaaagaggaaaagcggaaaagggattcgtccacacaaccacccaaatctgcaaaacctccagcaggggggaagtcctcccagcagccctcgacaccccagcaggcaccccccgggcagccccagcagggcacatttgtggcccacaaggagatcaagttgacactgttgaataaggcggctgataaaggaagcaggaagcgctatgaaccatcagacaaggacaggcagagccctcctccagccaagcggcccaacacatccccagaccgaggttctcgggaccggaagtcaggtgggagactgggctccccgaagccagagcggcagagaggccagaactccaaagcccctgcagccccggctgacaggaagcgccagctgtcaccccagtccaagagctccagcaaggtcacgagcgtgcccggcaaagcctcggatcccggcgccgccagcaccaaatcagggaaggccagcacgctgtctcggcgggaggagctgctgaaacagctgaaggccgtggaggatgctattgcacgcaagcgggccaagatccccgggaaagcataggccgtgccccgaccggactggacgcatttttatacatagggtaagcgcagccattttggattttgcagttaatgtcttattttggctgtgattctttttaaaaagtaaaaaagcccagcctccctccccagagcagaagtcccgcaggacagacagacacagacagcgctagtgaccagcacggttctcatgtaaattacaagccccagccgccagccccgccttctcttcctcctcctccgtcttcttccctggccctggtcaggcctgtggagccccagctctgggtccctagcccgggtccaggcagccaggctccctcctgagctgagaaacggaacctcgcgaaccactggtggcacatccttctcctcccccgcccctgatcacccgcccccggatcagaaatatatctatattctcgactaaagtctcatcaggaaatatttcctgtcttttattttaagcatcaaattgttttagttgatttaaaaaggaaaaaatacagaaaagaccaaaaaaaggccaagggtgttgttggggcgtctgtctaatgtggtgggtctttttttgaggggtctcctaaaataaaatattttgataagcaaaaaaaaaaaaaaaaaaaaaaaaaaaaaaaaaaaaaaaaaaaaaaaaaaaaaaaaaaaaaaaaaaaaaaaaaaaaaaaaaaaaaaaaaaaaaaaaaaaaaaaaaaaaaaaaaaaaaaaaaaaaacaaaaaaaaaaaaaaaaaaaaaaaaaaaaaacaaacaaaaaaaaaaccaaacacaaaaacaacccacaacccaaacaaaacaacanacccaccaaaaaaccccnccccaaccaaaaaaaacccaacaaaaaaaaaaaccaccaccacccac

SEQ ID NO: 82030 - DNA, 3698 bp, Homo sapiens
  misc_feature (3623)..(3623): n is a, c, g, or t
acccacgcgatcgcggacgcgtggtgtcgacccacgcgtccgaccacgcgtcagcgcccgtgtcgagcctggagccagaacctgtgaagagcggaagggccaagggacgtcttctccacgccgctccgactccaggggagccgtggcctcctctccgccctagcgctgagaaccgtgggtaccgatggatgtggccgagagccctgaacgggatcctcactctccagaggatgaagagcagccacagggactctcggacgatgacattctgagggacagcgggtccgatcaggatttggacggggcgggggtgagggcttctgatctggaggatgaggaaagtgcagccagggggccgagccaggaggaggaagataatcactccgacgaggaggaccgggcaagtgagcctaaatcccaagaccaggactcagaggtgaatgagctgagccggggcccgaccagctccccctgcgaggaggagggggacgaaggggaggaagaccggacaagcgaccttagggatgaggcctcctcagtcaccagggagctggatgagcatgagctagactacgatgaggaggttcctgaggagccagctcccgccgtccaggaggacgaggctgagaaagcgggggctgaggatgatgaggagaagggcgaaggcactcccagggaggaggggaaggctggtgttcagagtgtgggagaaaaggaatccctggaggctgccaaggagaaaaagaaagaggacgatgatggagaaatcgatgatggggaaatagacgatgatgacctggaagaaggtgaagtgaaggaccccagtgacaggaaggtgaggcctcgtcccacctgccggttcttcatgaaagggaactgtacctggggaatgaatgtaggtttatacaccctggagtgaacgacaaggggaactactccctaatcaccaaagccgaccccttcccgcctaatggtgccccgcctctcggacctcacccgctgatgcccgccaacccttggggtgggccggtagttgatgaaattttgcctccaccccctccagagcccccaacagagagtgcctgggaacgaggactccggcatgcaaaggaggttttaaaaaaagcaactattcgaaaagaacaggagcctgattttgaagagaaaaggtttacggtgaccattggcgaagacgaacgggaatttgacaaagaaaatgaagtttttcgagattggaattctcggatcccgagagatgtcagagacacagtactcgagccttacgcagacccttattatgactatgaaattgagcggttttggcgtggcggacagtatgagaatttcagggtgcagtatacagaaacagagccgtatcataattaccgagaaagggagcgggagcgagagagagagaacagacagcgcgagcgcgagcgggagcgggagcgggaccgagagcgggagcgccggcagagggagcgcgagcgagagcgggagcgcgagcgcgacaaggagcggcagcggaggaaggaggagtgggagcgtgagcgagccaagcgggacgagaaggaccggcagcaccgtgaccgcgaccgggagaaggagcgggagaaggagaaggggaagcccaagccccgctccccgcagccgccaagccgccaagctgagccaccaaagaaggaggctgccaccacggggccgcaggtgaagagagcagatgagtggaaggacccttggcgccgatccaagtctcccaagaagaaactcggggtgtcggtctccccgagccgggctcgaaggcgtcggaaaacatcagcctcgtcagcctctgcctctaattcctccaggtcgtcttcgcggtcatcgtcctactctggctccggctcctcccggtcgcgatcccggtcttcatcctacagctcctactccagccgctcttccagacacagctcgttctcaggaagccggtccaggtcccggtccttctcttcgtccccgtccccgtccccaacaccttccccacatagaccttccatcagaaccaagggagagccggccccgccgcccgggaaagcaggagagaagtcagtgaagaagccggccccgcctccagccccaccacaggccaccaaaaccactgctcctgtccccgagcccaccaagccaggagaccctcgggaagccaggaggaaggagcggccagccaggaccccccccaggaggcggacgctaagcggcagcggcagtggcagtggtagcagctatagtggttccagctcccgatccaggtccctgagcgtgagcagcgtctcctcagtgtccagtgctacgtcgagcagcagctctgcacacagcgtggactcggaggacatgtacgcagacctggctagccccgtgtcctcagccagctctcggtccccggccccagcccagaccaggaaggagaaaggaaaatctaagaaagaagacggtgttaaagaggaaaagcggaaaagggattcgtccacacaaccacccaaatctgcaaaacctccagcaggggggaagtcctcccagcagccctcgacaccccagcaggcaccccccgggcagccccagcagggcacatttgtggcccacaaggagatcaagttgacactgttgaataaggcggctgataaaggaagcaggaagcgctatgaaccatcagacaaggacaggcagagccctcctccagccaagcggcccaacacatccccagaccgaggttctcgggaccggaagtcaggtgggagactgggctccccgaagccagagcggcagagaggccagaactccaaagcccctgcagccccggctgacaggaagcgccagctgtcaccccagtccaagagctccagcaaggtcacgagcgtgcccggcaaagcctcggatcccggcgccgccagcaccaaatcagggaaggccagcacgctgtctcggcgggaggagctgctgaaacagctgaaggccgtggaggatgctattgcacgcaagcgggccaagatccccgggaaagcataggccgtgccccgaccggactggacgcatttttatacatagggtaagcgcagccattttggattttgcagttaatgtcttattttggctgtgattctttttaaaaagtaaaaaagaaaaaaaagtttctcagctggaaaagaagccacacaggaaatgacaacgacgctgaatcccagcctccctccccagagcagaagtcccgcaggacagacagacacagacagcgctagtgaccagcacggttctcatgtaaattacaagccccagccgccagccccgccttctcttcctcctcctccgtcttcttccctggccctggtcaggcctgtggagccccagctctgggtccctagcccgggtccaggcagccaggctccctcctgagctgagaaacggaacctcgcgaaccactggtggcacatccttctcctcccccgcccctgatcacccgcccccggatcagaaatatatctatattctcgactaaagtctcatcaggaaatatttcctgtcttttattttaagcatcaaattgttttagttgatttaaaaaggaaaaaatacagaaaagaccaggngtctcctaaaataaaatattttgataaggtaaaaaaacacacccccctccatgcgcccgcttggccagtcgattt

SEQ ID NO: 82031 - DNA, 4196 bp, Homo sapiens
acccacgcgatcgcggacgcgtggtgtcgacccacgcgtccgaccacgcgtcagcgcccgtgtcgagcctggagccagaacctgtgaagagcggaagggccaagggacgtcttctccacgccgctccgactccaggggagccgtggcctcctctccgccctagcgctgagaaccgtgggtaccgatggatgtggccgagagccctgaacgggatcctcactctccagaggatgaagagcagccacagggactctcggacgatgacattctgagggacagcgggtccgatcaggatttggacggggcgggggtgagggcttctgatctggaggatgaggaaagtgcagccagggggccgagccaggaggaggaagataatcactccgacgaggaggaccgggcaagtgagcctaaatcccaagaccaggactcagaggtgaatgagctgagccggggcccgaccagctccccctgcgaggaggagggggacgaaggggaggaagaccggacaagcgaccttagggatgaggcctcctcagtcaccagggagctggatgagcatgagctagactacgatgaggaggttcctgaggagccagctcccgccgtccaggaggacgaggctgagaaagcgggggctgaggatgatgaggagaagggcgaaggcactcccagggaggaggggaaggctggtgttcagagtgtgggagaaaaggaatccctggaggctgccaaggagaaaaagaaagaggacgatgatggagaaatcgatgatggggaaatagacgatgatgacctggaagaaggtgaagtgaaggaccccagtgacaggaaggtgaggcctcgtcccacctgccggttcttcatgaaagggaactgtacctggggaatgaatgtaggtttatacaccctggagtgaacgacaaggggaactactccctaatcaccaaagccgaccccttcccgcctaatggtgccccgcctctcggacctcacccgctgatgcccgccaacccttggggtgggccggtagttgatgaaattttgcctccaccccctccagagcccccaacagagagtgcctgggaacgaggactccggcatgcaaaggaggttttaaaaaaagcaactattcgaaaagaacaggagcctgattttgaagagaaaaggtttacggtgaccattggcgaagacgaacgggaatttgacaaagaaaatgaagtttttcgagattggaattctcggatcccgagagatgtcagagacacagtactcgagccttacgcagacccttattatgactatgaaattgagcggttttggcgtggcggacagtatgagaatttcagggtgcagtatacagaaacagagccgtatcataattaccgagaaagggagcgggagcgagagagagagaacagacagcgcgagcgcgagcgggagcgggagcgggaccgagagcgggagcgccggcagagggagcgcgagcgagagcgggagcgcgagcgcgacaaggagcggcagcggaggaaggaggagtgggagcgtgagcgagccaagcgggacgagaaggaccggcagcaccgtgaccgcgaccgggagaaggagcgggagaaggagaaggggaagcccaagccccgctccccgcagccgccaagccgccaagctgagccaccaaagaaggaggctgccaccacggggccgcaggtgaagagagcagatgagtggaaggacccttggcgccgatccaagtctcccaagaagaaactcggggtgtcggtctccccgagccgggctcgaaggcgtcggaaaacatcagcctcgtcagcctctgcctctaattcctccaggtcgtcttcgcggtcatcgtcctactctggctccggctcctcccggtcgcgatcccggtcttcatcctacagctcctactccagccgctcttccagacacagctcgttctcaggaagccggtccaggtcccggtccttctcttcgtccccgtccccgtccccaacaccttccccacatagaccttccatcagaaccaagggagagccggccccgccgcccgggaaagcaggagagaagtcagtgaagaagccggccccgcctccagccccaccacaggccaccaaaaccactgctcctgtccccgagcccaccaagccaggagaccctcgggaagccaggaggaaggagcggccagccaggaccccccccaggaggcggacgctaagcggcagcggcagtggcagtggtagcagctatagtggttccagctcccgatccaggtccctgagcgtgagcagcgtctcctcagtgtccagtgctacgtcgagcagcagctctgcacacagcgtggactcggaggacatgtacgcagacctggctagccccgtgtcctcagccagctctcggtccccggccccagcccagaccaggaaggagaaaggaaaatctaagaaagaagacggtgttaaagaggaaaagcggaaaagggattcgtccacacaaccacccaaatctgcaaaacctccagcaggggggaagtcctcccagcagccctcgacaccccagcaggcaccccccgggcagccccagcagggcacatttgtggcccacaaggagatcaagttgacactgttgaataaggcggctgataaaggaagcaggaagcgctatgaaccatcagacaaggacaggcagagccctcctccagccaagcggcccaacacatccccagaccgaggttctcgggaccggaagtcaggtgggagactgggctccccgaagccagagcggcagagaggccagaactccaaagcccctgcagccccggctgacaggaagcgccagctgtcaccccagtccaagagctccagcaaggtcacgagcgtgcccggcaaagcctcggatcccggcgccgccagcaccaaatcagggaaggccagcacgctgtctcggcgggaggagctgctgaaacagctgaaggccgtggaggatgctattgcacgcaagcgggccaagatccccgggaaagcataggccgtgccccgaccggactggacgcatttttatacatagggtaagcgcagccattttggattttgcagttaatgtcttattttggctgtgattctttttaaaaagtaaaaaagcccagcctccctccccagagcagaagtcccgcaggacagacagacacagacagcgctagtgaccagcacggttctcatgtaaattacaagccccagccgccagccccgccttctcttcctcctcctccgtcttcttccctggccctggtcaggcctgtggagccccagctctgggtccctagcccgggtccaggcagccaggctccctcctgagctgagaaacggaacctcgcgaaccactggtggcacatccttctcctcccccgcccctgatcacccgcccccggatcagaaatatatctatattctcgactaaagtctcatcaggaaatatttcctgtcttttattttaagcatcaaattgttttagttgatttaaaaaggaaaaaatacagaaaagaccaaaaaaaggccaagggtgttgttggggcgtctgtctaatgtggtgggtctttttttgaggggtctcctaaataccaccttttggtaagccccatccaccctccctctccctccccccttccccaccctcgtcacctgctactcccctccccttccccattccgtcccctccctccccccctccttcacaagcttcgccctatcccgccactccctcacgtctcctccacaccccccatctcgactccgtatccgactccgctgctcctacactacccctctccatctctacctcctctcccctccctcacttctcctctccacactcctcttccctcgttcctgcgacccctcgctatcatccaccccccatcctctcttccccttgcctcccactatcccgccatctctctccctcccccacatctcttcactctatccccaccgaccctctcctcactcgactcctccacctcccctcatcctccacttgctctcgtcgacccgccgtcaccctgctacctcctcatctccttctctcatgctcttctcactactcagctgcactctctattccaccacctcactctccccactcactcctctcatccctcccgacattccaccccctcgccg

SEQ ID NO: 82032 - DNA, 2562 bp, Homo sapiens
  misc_feature (2497)..(2497): n is a, c, g, or t
  misc_feature (2515)..(2515): n is a, c, g, or t
gtaccggagcaaggaacgggggaatgtaagagaaccatatgggcagggcagactcaggtgccagtcctgtgtgctttgtgtccgtgttgagtgcacgccagtgaagctacagacctgctgtttccagtctgtctgccgtgtgttcctcaggcattccctgagactgcggaattgctccttgtgtttttaatttccctgtgggctgaggctatctcccttttgtctaagccagggactctgcttaaattccatccttgccgctgttgagtcagctcagtcctgtttcccttcccaaaaagcaacctgacattcgttttgttttttgtttgttttgagacggagtttcactcttgtcgcccaggctggagtgcgatggcatggtctcggctcactgcaacctccacctcccgggttcaagcgatttttttgcctcagcctccccagtagctgggattacaggcgcctgcgaccacgcccggctaatttttgtatttttagtagagatggggttttaccatgttggccaagctggtcccgaactcctgacatcagttcagctgggtctcagaccccattgctcgtgacgagatctgcccatctcagtctcccagagtgctgggattacaggcgtgagcagccgtgcctggctgcaacctgacattgattagtgaaatggggccctggcctagccatggggacgtcccttactttgtaaccctgaaactgcccagtgtccccccaaaatcacacattccgtgggtacatgatccataaatggacactgcgtaaaagtggaccatggagcaccccctgctggcccctccctccagtctggctggggtgtggtgagatgtgcttgtgtgtccaggtccctgagcgtgagcagcgtctcctcagtgtccagtgctacgtcgagcagcagctctgcacacagcgtggactcggaggacatgtacgcagacctggctagccccgtgtcctcagccagctctcggtccccggccccagcccagaccaggaaggagaaaggaaaatctaagaaagaagacggtgttaaagaggaaaagcggaaaagggattcgtccacacaaccacccaaatctgcaaaacctccagcaggggggaagtcctcccagcagccctcgacaccccagcaggcaccccccgggcagccccagcagggcacatttgtggcccacaaggagatcaagttgacactgttgaataaggcggctgataaaggaagcaggaagcgctatgaaccatcagacaaggacaggcagagccctcctccagccaagcggcccaacacatccccagaccgaggttctcgggaccggaagtcaggtgggagactgggctccccgaagccagagcggcagagaggccagaactccaaagcccctgcagccccggctgacaggaagcgccagctgtcaccccagtccaagagctccagcaaggtcacgagcgtgcccggcaaagcctcggatcccggcgccgccagcaccaaatcagggaaggccagcacgctgtctcggcgggaggagctgctgaaacagctgaaggccgtggaggatgctattgcacgcaagcgggccaagatccccgggaaagcataggccgtgccccgaccggactggacgcatttttatacatagggtaagcgcagccattttggattttgcagttaatgtcttattttggctgtgattctttttaaaaagtaaaaaagaaaaaaaagtttctcagctggaaaagaagccacacaggaaatgacaacgacgctgaatcccagcctccctccccagagcagaagtcccgcaggacagacagacacagacagcgctagtgaccagcacggttctcatgtaaattacaagccccagccgccagccccgccttctcttcctcctcctccgtcttcttccctggccctggtcaggcctgtggagccccagctctgggtccctagcccgggtccaggcagccaggctccctcctgagctgagaaacggaacctcgcgaaccactggtggcacatccttctcctcccccgcccctgatcacccgcccccggatcagaaatatatctatattctcgactaaagtctcatcaggaaatatttcctgtcttttattttaagcatcaaattgttttagttgatttaaaaaggaaaaaatacagaaaagaccaaaaaaaggccaagggtgttgttggggcgtctgtctaatgtggtgggtctttttttgaggggtctcctaaaataaaatattttgataagcaaaaaaaaaaaaaaaaaaaaaaaaaaaaaaaaaaaaaaaaaaaaaaaaaaaaaaaaaaaaaaaaaaaaaaaaaaaaaaaaaaaaaaaaaaaaaaaaaaaaaaaaaaaaaaaaaaaaaaaaaaaaacaaaaaaaaaaaaaaaaaaaaaaaaaaaaaacaaacaaaaaaaaaaccaaacacaaaaacaacccacaacccaaacaaaacaacanacccaccaaaaaaccccnccccaaccaaaaaaaacccaacaaaaaaaaaaaccaccaccacccac

SEQ ID NO: 82033 - DNA, 1444 bp, Homo sapiens
  misc_feature (1379)..(1379): n is a, c, g, or t
  misc_feature (1397)..(1397): n is a, c, g, or t
gacctttgggagcagagcaggttgctggcaaggaacccatgtcctctggggcgaggacacggcttctggctcctggccctgctgtcctcactggcctctctcttgtcccaggcggctgataaaggaagcaggaagcgctatgaaccatcagacaaggacaggcagagccctcctccagccaagcggcccaacacatccccagaccgaggttctcgggaccggaagtcaggtgggagactgggctccccgaagccagagcggcagagaggccagaactccaaagcccctgcagccccggctgacaggaagcgccagctgtcaccccagtccaagagctccagcaaggtcacgagcgtgcccggcaaagcctcggatcccggcgccgccagcaccaaatcagggaaggccagcacgctgtctcggcgggaggagctgctgaaacagctgaaggccgtggaggatgctattgcacgcaagcgggccaagatccccgggaaagcataggccgtgccccgaccggactggacgcatttttatacatagggtaagcgcagccattttggattttgcagttaatgtcttattttggctgtgattctttttaaaaagtaaaaaagaaaaaaaagtttctcagctggaaaagaagccacacaggaaatgacaacgacgctgaatcccagcctccctccccagagcagaagtcccgcaggacagacagacacagacagcgctagtgaccagcacggttctcatgtaaattacaagccccagccgccagccccgccttctcttcctcctcctccgtcttcttccctggccctggtcaggcctgtggagccccagctctgggtccctagcccgggtccaggcagccaggctccctcctgagctgagaaacggaacctcgcgaaccactggtggcacatccttctcctcccccgcccctgatcacccgcccccggatcagaaatatatctatattctcgactaaagtctcatcaggaaatatttcctgtcttttattttaagcatcaaattgttttagttgatttaaaaaggaaaaaatacagaaaagaccaaaaaaaggccaagggtgttgttggggcgtctgtctaatgtggtgggtctttttttgaggggtctcctaaaataaaatattttgataagcaaaaaaaaaaaaaaaaaaaaaaaaaaaaaaaaaaaaaaaaaaaaaaaaaaaaaaaaaaaaaaaaaaaaaaaaaaaaaaaaaaaaaaaaaaaaaaaaaaaaaaaaaaaaaaaaaaaaaaaaaaaaacaaaaaaaaaaaaaaaaaaaaaaaaaaaaaacaaacaaaaaaaaaaccaaacacaaaaacaacccacaacccaaacaaaacaacanacccaccaaaaaaccccnccccaaccaaaaaaaacccaacaaaaaaaaaaaccaccaccacccac

SEQ ID NO: 82034 - DNA, 1432 bp, Homo sapiens
  misc_feature (1367)..(1367): n is a, c, g, or t
  misc_feature (1385)..(1385): n is a, c, g, or t
ctcatttccagatgccttggtgcccacatctctcttctcctacttggctctcccctttttatttctttataaaaatgaaggtggtgaactaagcagcctcaggctttagaagtgagtccctggcatcggtgaggccacccacacagccattccctgtacatcaggagggtggtctcactctgtacctatcacccaggttctcgggaccggaagtcaggtgggagactgggctccccgaagccagagcggcagagaggccagaactccaaagcccctgcagccccggctgacaggaagcgccagctgtcaccccagtccaagagctccagcaaggtcacgagcgtgcccggcaaagcctcggatcccggcgccgccagcaccaaatcagggaaggccagcacgctgtctcggcgggaggagctgctgaaacagctgaaggccgtggaggatgctattgcacgcaagcgggccaagatccccgggaaagcataggccgtgccccgaccggactggacgcatttttatacatagggtaagcgcagccattttggattttgcagttaatgtcttattttggctgtgattctttttaaaaagtaaaaaagaaaaaaaagtttctcagctggaaaagaagccacacaggaaatgacaacgacgctgaatcccagcctccctccccagagcagaagtcccgcaggacagacagacacagacagcgctagtgaccagcacggttctcatgtaaattacaagccccagccgccagccccgccttctcttcctcctcctccgtcttcttccctggccctggtcaggcctgtggagccccagctctgggtccctagcccgggtccaggcagccaggctccctcctgagctgagaaacggaacctcgcgaaccactggtggcacatccttctcctcccccgcccctgatcacccgcccccggatcagaaatatatctatattctcgactaaagtctcatcaggaaatatttcctgtcttttattttaagcatcaaattgttttagttgatttaaaaaggaaaaaatacagaaaagaccaaaaaaaggccaagggtgttgttggggcgtctgtctaatgtggtgggtctttttttgaggggtctcctaaaataaaatattttgataagcaaaaaaaaaaaaaaaaaaaaaaaaaaaaaaaaaaaaaaaaaaaaaaaaaaaaaaaaaaaaaaaaaaaaaaaaaaaaaaaaaaaaaaaaaaaaaaaaaaaaaaaaaaaaaaaaaaaaaaaaaaaaacaaaaaaaaaaaaaaaaaaaaaaaaaaaaaacaaacaaaaaaaaaaccaaacacaaaaacaacccacaacccaaacaaaacaacanacccaccaaaaaaccccnccccaaccaaaaaaaacccaacaaaaaaaaaaaccaccaccacccac

SEQ ID NO: 82035 - DNA, 2593 bp, Homo sapiens
  misc_feature (2528)..(2528): n is a, c, g, or t
  misc_feature (2546)..(2546): n is a, c, g, or t
acccacgcgatcgcggacgcgtggtgtcgacccacgcgtccgaccacgcgtcagcgcccgtgtcgagcctggagccagaacctgtgaagagcggaagggccaagggacgtcttctccacgccgctccgactccaggggagccgtggcctcctctccgccctagcgctgagaaccgtgggtaccgatggatgtggccgagagccctgaacgggatcctcactctccagaggatgaagagcagccacagggactctcggacgatgacattctgagggacagcgggtccgatcaggatttggacggggcgggggtgagggcttctgatctggaggatgaggaaagtgcagccagggggccgagccaggaggaggaagataatcactccgacgaggaggaccgggcaagtgagcctaaatcccaagaccaggactcagaggtgaatgagctgagccggggcccgaccagctccccctgcgaggaggagggggacgaaggggaggaagaccggacaagcgaccttagggatgaggcctcctcagtcaccagggagctggatgagcatgagctagactacgatgaggaggttcctgaggagccagctcccgccgtccaggaggacgaggctgagaaagcgggggctgaggatgatgaggagaagggcgaaggcactcccagggaggaggggaaggctggtgttcagagtgtgggagaaaaggaatccctggaggctgccaaggagaaaaagaaagaggacgatgatggagaaatcgatgatggggaaatagacgatgatgacctggaagaaggtgaagtgaaggaccccagtgacaggaaggtgaggcctcgtcccacctgccggttcttcatgaaagggaactgtacctggggaatgaatgtaggtttatacaccctggagtgaacgacaaggggaactactccctaatcaccaaagccgaccccttcccgcctaatggtgccccgcctctcggacctcacccgctgatgcccgccaacccttggggtgggccggtagttgatgaaattttgcctccaccccctccagagcccccaacagagagtgcctgggaacgaggactccggcatgcaaaggaggttttaaaaaaagcaactattcgaaaagaacaggagcctgattttgaagagaaaaggtttacggtgaccattggcgaagacgaacgggaatttgacaaagaaaatgaagtttttcgagattggaattctcggatcccgagagatgtcagagacacagtactcgagccttacgcagacccttattatgactatgaaattgagcggttttggcgtggcggacagtatgagaatttcagggtgcagtatacagaaacagagccgtatcataattaccgagaaagggagcgggagcgagagagagagaacagacagcgcgagcgcgagcgggagcgggagcgggaccgagagcgggagcgccggcagagggagcgcgagcgagagcgggagcgcgagcgcgacaaggagcggcagcggaggaaggaggagtgggagcgtgagcgagccaagcgggacgagaaggaccggcagcaccgtgaccgcgaccgggagaaggagcgggagaaggagaaggggaagcccaagccccgctccccgcagccgccaagccgccaagctgagccaccaaagaaggaggctgccaccacggggccgcaggtgaagagagcagatgagtggaaggacccttggcgccgatccaagtctcccaagaagaaactcggggtgtcggtctccccgagccgggctcgaaggcgtcggaaaacatcagcctcgtcagcctctgcctctaattcctccaggtcgtcttcgcggtcatcgtcctactctggctccggctcctcccggtcgcgatcccggtcttcatcctacagctcctactccagccgctcttccagacacagctcgttctcaggaagccggtccaggtcccggtccttctcttcgtccccgtccccgtccccaacaccttccccacatagaccttccatcagaaccaagggagagccggccccgccgcccgggaaagcaggagagaagtcagtgaagaagccggccccgcctccagccccaccacaggccaccaaaaccactgctcctgtccccgagcccaccaagccaggagaccctcgggaagccaggaggaaggagcggccagccaggaccccccccaggaggactgccaaattttccggtttgccccgggatattatagaaaattattagtatgaataatgcaaataaaacacacctcgtggcaaaaaaaaaaaaaaaaaaaaaaaaaaaaaaaaaaaaaaaaaaaaaaaaaaaaaaaaaaaaaaaaaaaaaaaaaaaaaaaaaaaaaaaaaaaaaaaaaaaaaaaaaaaaaaaaaaaaaaaaaaaaaaaaaaaaaaacaaaaaaaaaaaaaaaaaaaaaaaaaaaaaacaaacaaaaaaaaaaccaaacacaaaaacaacccacaacccaaacaaaacaacanacccaccaaaaaaccccnccccaaccaaaaaaaacccaacaaaaaaaaaaaccaccaccacccac

SEQ ID NO: 82036 - DNA, 1600 bp, Homo sapiens
acccacgcgatcgcggacgcgtggtgtcgacccacgcgtccgaccacgcgtcagcgcccgtgtcgagcctggagccagaacctgtgaagagcggaagggccaagggacgtcttctccacgccgctccgactccaggggagccgtggcctcctctccgccctagcgctgagaaccgtgggtaccgatggatgtggccgagagccctgaacgggatcctcactctccagaggatgaagagcagccacagggactctcggacgatgacattctgagggacagcgggtccgatcaggatttggacggggcgggggtgagggcttctgatctggaggatgaggaaagtgcagccagggggccgagccaggaggaggaagataatcactccgacgaggaggaccgggcaagtgagcctaaatcccaagaccaggactcagaggtgaatgagctgagccggggcccgaccagctccccctgcgaggaggagggggacgaaggggaggaagaccggacaagcgaccttagggatgaggcctcctcagtcaccagggagctggatgagcatgagctagactacgatgaggaggttcctgaggagccagctcccgccgtccaggaggacgaggctgagaaagcgggggctgaggatgatgaggagaagggcgaaggcactcccagggaggaggggaaggctggtgttcagagtgtgggagaaaaggaatccctggaggctgccaaggagaaaaagaaagaggacgatgatggagaaatcgatgatggggaaatagacgatgatgacctggaagaaggtgaagtgaaggaccccagtgacaggaaggtgaggcctcgtcccacctgccggttcttcatgaaagggaactgtacctggggaatgaatgtaggtttatacaccctggagtgaacgacaaggggaactactccctaatcaccaaagccgaccccttcccgcctaatggtgccccgcctctcggacctcacccgctgatgcccgccaacccttggggtgggccggtagttgatgaaattttgcctccaccccctccagagcccccaacagagagtgcctgggaacgaggactccggcatgcaaaggaggttttaaaaaaagcaactattcgaaaagaacaggagcctgattttgaagagaaaaggtttacggtgaccattggcgaagacgaacgggaatttgacaaagaaaatgaagtttttcgagattggaattctcggatcccgagagatgtcagagacacagtactcgagccttacgcagacccttattatgactatgaaattgagcggttttggcgtggcggacagtatgagaatttcagggtgcagtatacagaaacagagccgtatcataattaccgaaagtatgacttcaatatccacatatgaacttcatgatctgttcattcaagttatccctttttatttacagtaaaaaatacagggctttatatgagcttatagagccagcacaatgtaccaatttgaaaaccaaattgattgttacggagaacgaattcagaggcagcgattacattaatggtcatttgaacaaagacttgcctgaaaactg

SEQ ID NO: 82037 - DNA, 3890 bp, Homo sapiens
  misc_feature (3825)..(3825): n is a, c, g, or t
  misc_feature (3843)..(3843): n is a, c, g, or t
ggcagtgcacgctgctgctgctggttgactcttgagtatcccctggagcggttttctctccgccctagcgctgataaccgtgggtaccgatggatgtggccgagagccctgaacgggatcctcactctccagaggatgaagagcagccacagggactctcggacgatgacattctgagggacagcgggtccgatcaggatttggacggggcgggggtgagggcttctgatctggaggatgaggaaagtgcagccagggggccgagccaggaggaggaagataatcactccgacgaggaggaccgggcaagtgagcctaaatcccaagaccaggactcagaggtgaatgagctgagccggggcccgaccagctccccctgcgaggaggagggggacgaaggggaggaagaccggacaagcgaccttagggatgaggcctcctcagtcaccagggagctggatgagcatgagctagactacgatgaggaggttcctgaggagccagctcccgccgtccaggaggacgaggctgagaaagcgggggctgaggatgatgaggagaagggcgaaggcactcccagggaggaggggaaggctggtgttcagagtgtgggagaaaaggaatccctggaggctgccaaggagaaaaagaaagaggacgatgatggagaaatcgatgatggggaaatagacgatgatgacctggaagaaggtgaagtgaaggaccccagtgacaggaaggtgaggcctcgtcccacctgccggttcttcatgaaagggaactgtacctggggaatgaatgtaggtttatacaccctggagtgaacgacaaggggaactactccctaatcaccaaagccgaccccttcccgcctaatggtgccccgcctctcggacctcacccgctgatgcccgccaacccttggggtgggccggtagttgatgaaattttgcctccaccccctccagagcccccaacagagagtgcctgggaacgaggactccggcatgcaaaggaggttttaaaaaaagcaactattcgaaaagaacaggagcctgattttgaagagaaaaggtttacggtgaccattggcgaagacgaacgggaatttgacaaagaaaatgaagtttttcgagattggaattctcggatcccgagagatgtcagagacacagtactcgagccttacgcagacccttattatgactatgaaattgagcggttttggcgtggcggacagtatgagaatttcagggtgcagtatacagaaacagagccgtatcataattaccgagaaagggagcgggagcgagagagagagaacagacagcgcgagcgcgagcgggagcgggagcgggaccgagagcgggagcgccggcagagggagcgcgagcgagagcgggagcgcgagcgcgacaaggagcggcagcggaggaaggaggagtgggagcgtgagcgagccaagcgggacgagaaggaccggcagcaccgtgaccgcgaccgggagaaggagcgggagaaggagaaggggaagcccaagccccgctccccgcagccgccaagccgccaagctgagccaccaaagaaggaggctgccaccacggggccgcaggtgaagagagcagatgagtggaaggacccttggcgccgatccaagtctcccaagaagaaactcggggtgtcggtctccccgagccgggctcgaaggcgtcggaaaacatcagcctcgtcagcctctgcctctaattcctccaggtcgtcttcgcggtcatcgtcctactctggctccggctcctcccggtcgcgatcccggtcttcatcctacagctcctactccagccgctcttccagacacagctcgttctcaggaagccggtccaggtcccggtccttctcttcgtccccgtccccgtccccaacaccttccccacatagaccttccatcagaaccaagggagagccggccccgccgcccgggaaagcaggagagaagtcagtgaagaagccggccccgcctccagccccaccacaggccaccaaaaccactgctcctgtccccgagcccaccaagccaggagaccctcgggaagccaggaggaaggagcggccagccaggaccccccccaggaggcggacgctaagcggcagcggcagtggcagtggtagcagctatagtggttccagctcccgatccaggtccctgagcgtgagcagcgtctcctcagtgtccagtgctacgtcgagcagcagctctgcacacagcgtggactcggaggacatgtacgcagacctggctagccccgtgtcctcagccagctctcggtccccggccccagcccagaccaggaaggagaaaggaaaatctaagaaagaagacggtgttaaagaggaaaagcggaaaagggattcgtccacacaaccacccaaatctgcaaaacctccagcaggggggaagtcctcccagcagccctcgacaccccagcaggcaccccccgggcagccccagcagggcacatttgtggcccacaaggagatcaagttgacactgttgaataaggcggctgataaaggaagcaggaagcgctatgaaccatcagacaaggacaggcagagccctcctccagccaagcggcccaacacatccccagaccgaggttctcgggaccggaagtcaggtgggagactgggctccccgaagccagagcggcagagaggccagaactccaaagcccctgcagccccggctgacaggaagcgccagctgtcaccccagtccaagagctccagcaaggtcacgagcgtgcccggcaaagcctcggatcccggcgccgccagcaccaaatcagggaaggccagcacgctgtctcggcgggaggagctgctgaaacagctgaaggccgtggaggatgctattgcacgcaagcgggccaagatccccgggaaagcataggccgtgccccgaccggactggacgcatttttatacatagggtaagcgcagccattttggattttgcagttaatgtcttattttggctgtgattctttttaaaaagtaaaaaagaaaaaaaagtttctcagctggaaaagaagccacacaggaaatgacaacgacgctgaatcccagcctccctccccagagcagaagtcccgcaggacagacagacacagacagcgctagtgaccagcacggttctcatgtaaattacaagccccagccgccagccccgccttctcttcctcctcctccgtcttcttccctggccctggtcaggcctgtggagccccagctctgggtccctagcccgggtccaggcagccaggctccctcctgagctgagaaacggaacctcgcgaaccactggtggcacatccttctcctcccccgcccctgatcacccgcccccggatcagaaatatatctatattctcgactaaagtctcatcaggaaatatttcctgtcttttattttaagcatcaaattgttttagttgatttaaaaaggaaaaaatacagaaaagaccaaaaaaaggccaagggtgttgttggggcgtctgtctaatgtggtgggtctttttttgaggggtctcctaaaataaaatattttgataagcaaaaaaaaaaaaaaaaaaaaaaaaaaaaaaaaaaaaaaaaaaaaaaaaaaaaaaaaaaaaaaaaaaaaaaaaaaaaaaaaaaaaaaaaaaaaaaaaaaaaaaaaaaaaaaaaaaaaaaaaaaaaacaaaaaaaaaaaaaaaaaaaaaaaaaaaaaacaaacaaaaaaaaaaccaaacacaaaaacaacccacaacccaaacaaaacaacanacccaccaaaaaaccccnccccaaccaaaaaaaacccaacaaaaaaaaaaaccaccaccacccac

SEQ ID NO: 82038 - DNA, 2121 bp, Homo sapiens
  misc_feature (2056)..(2056): n is a, c, g, or t
  misc_feature (2074)..(2074): n is a, c, g, or t
tggaatgtcatacaggggacgcagtttcttggtcgcgatcccggtcttcatcctacagctcctactccagccgctcttccagacacagctcgttctcaggaagccggtccaggtcccggtccttctcttcgtccccgtccccgtccccaacaccttccccacatagaccttccatcagaaccaagggagagccggccccgccgcccgggaaagcaggagagaagtcagtgaagaagccggccccgcctccagccccaccacaggccaccaaaaccactgctcctgtccccgagcccaccaagccaggagaccctcgggaagccaggaggaaggagcggccagccaggaccccccccaggaggcggacgctaagcggcagcggcagtggcagtggtagcagctatagtggttccagctcccgatccaggtccctgagcgtgagcagcgtctcctcagtgtccagtgctacgtcgagcagcagctctgcacacagcgtggactcggaggacatgtacgcagacctggctagccccgtgtcctcagccagctctcggtccccggccccagcccagaccaggaaggagaaaggaaaatctaagaaagaagacggtgttaaagaggaaaagcggaaaagggattcgtccacacaaccacccaaatctgcaaaacctccagcaggggggaagtcctcccagcagccctcgacaccccagcaggcaccccccgggcagccccagcagggcacatttgtggcccacaaggagatcaagttgacactgttgaataaggcggctgataaaggaagcaggaagcgctatgaaccatcagacaaggacaggcagagccctcctccagccaagcggcccaacacatccccagaccgaggttctcgggaccggaagtcaggtgggagactgggctccccgaagccagagcggcagagaggccagaactccaaagcccctgcagccccggctgacaggaagcgccagctgtcaccccagtccaagagctccagcaaggtcacgagcgtgcccggcaaagcctcggatcccggcgccgccagcaccaaatcagggaaggccagcacgctgtctcggcgggaggagctgctgaaacagctgaaggccgtggaggatgctattgcacgcaagcgggccaagatccccgggaaagcataggccgtgccccgaccggactggacgcatttttatacatagggtaagcgcagccattttggattttgcagttaatgtcttattttggctgtgattctttttaaaaagtaaaaaagaaaaaaaagtttctcagctggaaaagaagccacacaggaaatgacaacgacgctgaatcccagcctccctccccagagcagaagtcccgcaggacagacagacacagacagcgctagtgaccagcacggttctcatgtaaattacaagccccagccgccagccccgccttctcttcctcctcctccgtcttcttccctggccctggtcaggcctgtggagccccagctctgggtccctagcccgggtccaggcagccaggctccctcctgagctgagaaacggaacctcgcgaaccactggtggcacatccttctcctcccccgcccctgatcacccgcccccggatcagaaatatatctatattctcgactaaagtctcatcaggaaatatttcctgtcttttattttaagcatcaaattgttttagttgatttaaaaaggaaaaaatacagaaaagaccaaaaaaaggccaagggtgttgttggggcgtctgtctaatgtggtgggtctttttttgaggggtctcctaaaataaaatattttgataagcaaaaaaaaaaaaaaaaaaaaaaaaaaaaaaaaaaaaaaaaaaaaaaaaaaaaaaaaaaaaaaaaaaaaaaaaaaaaaaaaaaaaaaaaaaaaaaaaaaaaaaaaaaaaaaaaaaaaaaaaaaaaacaaaaaaaaaaaaaaaaaaaaaaaaaaaaaacaaacaaaaaaaaaaccaaacacaaaaacaacccacaacccaaacaaaacaacanacccaccaaaaaaccccnccccaaccaaaaaaaacccaacaaaaaaaaaaaccaccaccacccac

SEQ ID NO: 82039 - DNA, 3831 bp, Homo sapiens
  misc_feature (3766)..(3766): n is a, c, g, or t
  misc_feature (3784)..(3784): n is a, c, g, or t
acccacgcgatcgcggacgcgtggtgtcgacccacgcgtccgaccacgcgtcagcgcccgtgtcgagcctggagccagaacctgtgaagagcggaagggccaagggacgtcttctccacgccgctccgactccaggggagccgtggcctcctctccgccctagcgctgagaaccgtgggtaccgatggatgtggccgagagccctgaacgggatcctcactctccagaggatgaagagcagccacagggactctcggacgatgacattctgagggacagcgggtccgatcaggatttggacggggcgggggtgagggcttctgatctggaggatgaggaaagtgcagccagggggccgagccaggaggaggaagataatcactccgacgaggaggaccgggcaagtgagcctaaatcccaagaccaggactcagaggtgaatgagctgagccggggcccgaccagctccccctgcgaggaggagggggacgaaggggaggaagaccggacaagcgaccttagggatgaggcctcctcagtcaccagggagctggatgagcatgagctagactacgatgaggaggttcctgaggagccagctcccgccgtccaggaggacgaggctgagaaagcgggggctgaggatgatgaggagaagggcgaaggcactcccagggaggaggggaaggctggtgttcagagtgtgggagaaaaggaatccctggaggctgccaaggagaaaaagaaagaggacgatgatggagaaatcgatgatggggaaatagacgatgatgacctggaagaaggtgaagtgaaggaccccagtgacaggaaggtgaggcctcgtcccacctgccggttcttcatgaaagggaactgtacctggggaatgaatgtaggtttatacaccctggagtgaacgacaaggggaactactccctaatcaccaaagccgaccccttcccgcctaatggtgccccgcctctcggacctcacccgctgatgcccgccaacccttggggtgggccggtagttgatgaaattttgcctccaccccctccagagcccccaacagagagtgcctgggaacgaggactccggcatgcaaaggaggttttaaaaaaagcaactattcgaaaagaacaggagcctgattttgaagagaaaaggtttacggtgaccattggcgaagacgaacgggaatttgacaaagaaaatgaagtttttcgagattggaattctcggatcccgagagatgtcagagacacagtactcgagccttacgcagacccttattatgactatgaaattgagcggttttggcgtggcggacagtatgagaatttcagggtgcagtatacagaaacagagccgtatcataattaccgagaaagggagcgggagcgagagagagagaacagacagcgcgagcgcgagcgggagcgggagcgggaccgagagcgggagcgccggcagagggagcgcgagcgagagcgggagcgcgagcgcgacaaggagcggcagcggaggaaggaggagtgggagcgtgagcgagccaagcgggacgagaaggaccggcagcaccgtgaccgcgaccgggagaaggagcgggagaaggagaaggggaagcccaagccccgctccccgcagccgccaagccgccaagctgagccaccaaagaaggaggctgccaccacggggccgcaggtgaagagagcagatgagtggaaggacccttggcgccgatccaagtctcccaagaagaaactcggggtgtcggtctccccgagccgggctcgaaggcgtcggaaaacatcagcctcgtcagcctctgcctctaattcctccaggtcgtcttcgcggtcatcgtcctactctggctccggctcctcccggtcgcgatcccggtcttcatcctacagctcctactccagccgctcttccagacacagctcgttctcaggaagccggtccaggtcccggtccttctcttcgtccccgtccccgtccccaacaccttccccacatagaccttccatcagaaccaagggagagccggccccgccgcccgggaaagcaggagagaagtcagtgaagaagccggccccgcctccagccccaccacaggccaccaaaaccactgctcctgtccccgagcccaccaagccaggagaccctcgggaagccaggaggaaggagcggccagccaggaccccccccaggaggcggacgctaagcggcagcggcagtggcagtggtagcagctatagtggttccagctcccgatccaggtccctgagcgtgagcagcgtctcctcagtgtccagtgctacgtcgagcagcagctctgcacacagcgtggactcggaggacatgtacgcagacctggctagccccgtgtcctcagccagctctcggtccccggccccagcccagaccaggaaggagaaaggaaaatctaagaaagaagacggtgttaaagaggaaaagcggaaaagggattcgtccacacaaccacccaaatctgcaaaacctccagcaggggggaagtcctcccagcagccctcgacaccccagcaggcaccccccgggcagccccagcagggcacatttgtggcccacaaggagatcaagttgacactgttgaataaggcggctgataaaggaagcaggaagcgctatgaaccatcagacaaggacaggcagagccctcctccagccaagcggcccaacacatccccagaccgaggttctcgggaccggaagtcaggtgggagactgggctccccgaagccagagcggcagagaggccagaactccaaagcccctgcagccccggctgacaggaagcgccagctgtcaccccagtccaagagctccagcaaggtcacgagcgtgcccggcaaagcctcggatcccggcgccgccagcaccaaatcagggaaggccagcacgctgtctcggcgggaggagctgctgaaacagctgaaggccgtggaggatgctattgcacgcaagcgggccaagatccccgggaaagcataggccgtgccccgaccggactggacgcatttttatacataggaagtcccgcaggacagacagacacagacagcgctagtgaccagcacggttctcatgtaaattacaagccccagccgccagccccgccttctcttcctcctcctccgtcttcttccctggccctggtcaggcctgtggagccccagctctgggtccctagcccgggtccaggcagccaggctccctcctgagctgagaaacggaacctcgcgaaccactggtggcacatccttctcctcccccgcccctgatcacccgcccccggatcagaaatatatctatattctcgactaaagtctcatcaggaaatatttcctgtcttttattttaagcatcaaattgttttagttgatttaaaaaggaaaaaatacagaaaagaccaaaaaaaggccaagggtgttgttggggcgtctgtctaatgtggtgggtctttttttgaggggtctcctaaaataaaatattttgataagcaaaaaaaaaaaaaaaaaaaaaaaaaaaaaaaaaaaaaaaaaaaaaaaaaaaaaaaaaaaaaaaaaaaaaaaaaaaaaaaaaaaaaaaaaaaaaaaaaaaaaaaaaaaaaaaaaaaaaaaaaaaaacaaaaaaaaaaaaaaaaaaaaaaaaaaaaaacaaacaaaaaaaaaaccaaacacaaaaacaacccacaacccaaacaaaacaacanacccaccaaaaaaccccnccccaaccaaaaaaaacccaacaaaaaaaaaaaccaccaccacccac

SEQ ID NO: 82040 - DNA, 3309 bp, Homo sapiens
  misc_feature (3244)..(3244): n is a, c, g, or t
  misc_feature (3262)..(3262): n is a, c, g, or t
gagatggggtttcaccatgttgcccaggttggtctcaaactcctgagctcaggcattccacccaccttggcctcccaaagtgctgggattacatgcgtgagccgccgcacgcagcctaattttgtatttttagtagagactgggttttaccacgtttctgatcttgaactcctgacctcaggtgatccatccgcctcggcttcccaaagtgctgggattacaggtgtgagccactgcacccagcccagaaattttttttaattagctgggtatagtggtgtgtgcctatgatcccagctacttgggaggtcaaggttgaatgagctgtgatcacgacattgcattccagcctggacaacagagatcctgtctcaaaacaaaaaaaaaggatttttgctatttagttgttttaaaagaaagtattaaatcagtccttagattccttgcatagaactctttcatttccaggcagcaggtcgtttatatatttgtcacagttctttgtttcttttgtttgttttgtttctggagagacatggtcttgctgtgttgcccaggctggtctcaaactcctgggctcaagtgatcctcccaccgtggtctcccaaactcgtgggattataggcatgagccaccgcgcctggcctaaatgtttcttaataagtctgaaatgttttaaagacctgacttttgaaaaaaaaaaatggttctcttacattcccccgttccttgctccggtacccaatgtacctggaagacgtggttggtgttttctcgagcagcatatgggcagggcagactcaggtgccagtcctgtgtgctttgtgtccgtgttgagtgcacgccagtgaagctacagacctgctgtttccagtctgtctgccgtgtgttcctcaggcattccctgagactgcggaattgctccttgtgtttttaatttccctgtgggctgaggctatctcccttttgtctaagccagggactctgcttaaattccatccttgccgctgttgagtcagctcagtcctgtttcccttcccaaaaagcaacctgacattcgttttgttttttgtttgttttgagacggagtttcactcttgtcgcccaggctggagtgcgatggcatggtctcggctcactgcaacctccacctcccgggttcaagcgatttttttgcctcagcctccccagtagctgggattacaggcgcctgcgaccacgcccggctaatttttgtatttttagtagagatggggttttaccatgttggccaagctggtcccgaactcctgacatcagttcagctgggtctcagaccccattgctcgtgacgagatctgcccatctcagtctcccagagtgctgggattacaggcgtgagcagccgtgcctggctgcaacctgacattgattagtgaaatggggccctggcctagccatggggacgtcccttactttgtaaccctgaaactgcccagtgtccccccaaaatcacacattccgtgggtacatgatccataaatggacactgcgtaaaagtggaccatggagcaccccctgctggcccctccctccagtctggctggggtgtggtgagatgtgcttgtgtgtccaggtccctgagcgtgagcagcgtctcctcagtgtccagtgctacgtcgagcagcagctctgcacacagcgtggactcggaggacatgtacgcagacctggctagccccgtgtcctcagccagctctcggtccccggccccagcccagaccaggaaggagaaaggaaaatctaagaaagaagacggtgttaaagaggaaaagcggaaaagggattcgtccacacaaccacccaaatctgcaaaacctccagcaggggggaagtcctcccagcagccctcgacaccccagcaggcaccccccgggcagccccagcagggcacatttgtggcccacaaggagatcaagttgacactgttgaataaggcggctgataaaggaagcaggaagcgctatgaaccatcagacaaggacaggcagagccctcctccagccaagcggcccaacacatccccagaccgaggttctcgggaccggaagtcaggtgggagactgggctccccgaagccagagcggcagagaggccagaactccaaagcccctgcagccccggctgacaggaagcgccagctgtcaccccagtccaagagctccagcaaggtcacgagcgtgcccggcaaagcctcggatcccggcgccgccagcaccaaatcagggaaggccagcacgctgtctcggcgggaggagctgctgaaacagctgaaggccgtggaggatgctattgcacgcaagcgggccaagatccccgggaaagcataggccgtgccccgaccggactggacgcatttttatacatagggtaagcgcagccattttggattttgcagttaatgtcttattttggctgtgattctttttaaaaagtaaaaaagaaaaaaaagtttctcagctggaaaagaagccacacaggaaatgacaacgacgctgaatcccagcctccctccccagagcagaagtcccgcaggacagacagacacagacagcgctagtgaccagcacggttctcatgtaaattacaagccccagccgccagccccgccttctcttcctcctcctccgtcttcttccctggccctggtcaggcctgtggagccccagctctgggtccctagcccgggtccaggcagccaggctccctcctgagctgagaaacggaacctcgcgaaccactggtggcacatccttctcctcccccgcccctgatcacccgcccccggatcagaaatatatctatattctcgactaaagtctcatcaggaaatatttcctgtcttttattttaagcatcaaattgttttagttgatttaaaaaggaaaaaatacagaaaagaccaaaaaaaggccaagggtgttgttggggcgtctgtctaatgtggtgggtctttttttgaggggtctcctaaaataaaatattttgataagcaaaaaaaaaaaaaaaaaaaaaaaaaaaaaaaaaaaaaaaaaaaaaaaaaaaaaaaaaaaaaaaaaaaaaaaaaaaaaaaaaaaaaaaaaaaaaaaaaaaaaaaaaaaaaaaaaaaaaaaaaaaaacaaaaaaaaaaaaaaaaaaaaaaaaaaaaaacaaacaaaaaaaaaaccaaacacaaaaacaacccacaacccaaacaaaacaacanacccaccaaaaaaccccnccccaaccaaaaaaaacccaacaaaaaaaaaaaccaccaccacccac

SEQ ID NO: 82041 - DNA, 1745 bp, Homo sapiens
  misc_feature (1680)..(1680): n is a, c, g, or t
  misc_feature (1698)..(1698): n is a, c, g, or t
ggctgtgattctttttaaaaagtaaaaaagaaaaaaaagtttctcagctggaaaagaagccacacaggaaatgacaacgacgctgaatcccagcctccctccccagagcagaagtcccgcaggacagacagacacagacagcgctagtgaccagcacggttctcatgtaaattacaagccccagccgccagcccagaccaggaaggagaaaggaaaatctaagaaagaagacggtgttaaagaggaaaagcggaaaagggattcgtccacacaaccacccaaatctgcaaaacctccagcaggggggaagtcctcccagcagccctcgacaccccagcaggcaccccccgggcagccccagcagggcacatttgtggcccacaaggagatcaagttgacactgttgaataaggcggctgataaaggaagcaggaagcgctatgaaccatcagacaaggacaggcagagccctcctccagccaagcggcccaacacatccccagaccgaggttctcgggaccggaagtcaggtgggagactgggctccccgaagccagagcggcagagaggccagaactccaaagcccctgcagccccggctgacaggaagcgccagctgtcaccccagtccaagagctccagcaaggtcacgagcgtgcccggcaaagcctcggatcccggcgccgccagcaccaaatcagggaaggccagcacgctgtctcggcgggaggagctgctgaaacagctgaaggccgtggaggatgctattgcacgcaagcgggccaagatccccgggaaagcataggccgtgccccgaccggactggacgcatttttatacatagggtaagcgcagccattttggattttgcagttaatgtcttattttggctgtgattctttttaaaaagtaaaaaagaaaaaaaagtttctcagctggaaaagaagccacacaggaaatgacaacgacgctgaatcccagcctccctccccagagcagaagtcccgcaggacagacagacacagacagcgctagtgaccagcacggttctcatgtaaattacaagccccagccgccagccccgccttctcttcctcctcctccgtcttcttccctggccctggtcaggcctgtggagccccagctctgggtccctagcccgggtccaggcagccaggctccctcctgagctgagaaacggaacctcgcgaaccactggtggcacatccttctcctcccccgcccctgatcacccgcccccggatcagaaatatatctatattctcgactaaagtctcatcaggaaatatttcctgtcttttattttaagcatcaaattgttttagttgatttaaaaaggaaaaaatacagaaaagaccaaaaaaaggccaagggtgttgttggggcgtctgtctaatgtggtgggtctttttttgaggggtctcctaaaataaaatattttgataagcaaaaaaaaaaaaaaaaaaaaaaaaaaaaaaaaaaaaaaaaaaaaaaaaaaaaaaaaaaaaaaaaaaaaaaaaaaaaaaaaaaaaaaaaaaaaaaaaaaaaaaaaaaaaaaaaaaaaaaaaaaaaacaaaaaaaaaaaaaaaaaaaaaaaaaaaaaacaaacaaaaaaaaaaccaaacacaaaaacaacccacaacccaaacaaaacaacanacccaccaaaaaaccccnccccaaccaaaaaaaacccaacaaaaaaaaaaaccaccaccacccac

SEQ ID NO: 82042 - DNA, 2854 bp, Homo sapiens
  misc_feature (2789)..(2789): n is a, c, g, or t
  misc_feature (2807)..(2807): n is a, c, g, or t
acccacgcgatcgcggacgcgtggtgtcgacccacgcgtccgaccacgcgtcagcgcccgtgtcgagcctggagccagaacctgtgaagagcggaagggccaagggacgtcttctccacgccgctccgactccaggggagccgtggcctcctctccgccctagcgctgagaaccgtgggtaccgatggatgtggccgagagccctgaacgggatcctcactctccagaggatgaagagcagccacagggactctcggacgatgacattctgagggacagcgggtccgatcaggatttggacggggcgggggtgagggcttctgatctggaggatgaggaaagtgcagccagggggccgagccaggaggaggaagataatcactccgacgaggaggaccgggcaagtgagcctaaatcccaagaccaggactcagaggtgaatgagctgagccggggcccgaccagctccccctgcgaggaggagggggacgaaggggaggaagaccggacaagcgaccttagggatgaggcctcctcagtcaccagggagctggatgagcatgagctagactacgatgaggaggttcctgaggagccagctcccgccgtccaggaggacgaggctgagaaagcgggggctgaggatgatgaggagaagggcgaaggcactcccagggaggaggggaaggctggtgttcagagtgtgggagaaaaggaatccctggaggctgccaaggagaaaaagaaagaggacgatgatggagaaatcgatgatggggaaatagacgatgatgacctggaagaaggtgaagtgaaggaccccagtgacaggaaggtgaggcctcgtcccacctgccggttcttcatgaaagggaactgtacctggggaatgaatgtaggtttatacaccctggagtgaacgacaaggggaactactccctaatcaccaaagccgaccccttcccgcctaatggtgccccgcctctcggacctcacccgctgatgcccgccaacccttggggtgggccggtagttgatgaaattttgcctccaccccctccagagcccccaacagagagtgcctgggaacgaggactccggcatgcaaaggaggttttaaaaaaagcaactattcgaaaagaacaggagcctgattttgaagagaaaaggtttacggtgaccattggcgaagacgaacgggaatttgacaaagaaaatgaagtttttcgagattggaattctcggatcccgagagatgtcagagacacagtactcgagccttacgcagacccttattatgactatgaaattgagcggttttggcgtggcggacagtatgagaatttcagggtgcagtatacagaaacagagccgtatcataattaccgagaaagggagcgggagcgagagagagagaacagacagcgcgagcgcgagcgggagcgggagcgggaccgagagcgggagcgccggcagagggagcgcgagcgagagcgggagcgcgagcgcgacaaggagcggcagcggaggaaggaggagtgggagcgtgagcgagccaagcgggacgagaaggaccggcagcaccgtgaccgcgaccgggagaaggagcgggagaaggagaaggggaagcccaagccccgctccccgcagccgccaagccgccaagctgagccaccaaagaaggaggctgccaccacggggccgcaggtgaagagagcagatgagtggaaggacccttggcgccgatccaagtctcccaagaagaaactcggggtgtcggtctccccgagccgggctcgaaggcgtcggaaaacatcagcctcgtcagcctctgcctctaattcctccaggtcgtcttcgcggtcatcgtcctactctggctccggctcctcccggtcgcgatcccggtcttcatcctacagctcctactccagccgctcttccagacacagctcgttctcaggaagccggtccaggtcccggtccttctcttcgtccccgtccccgtccccaacaccttccccacatagaccttccatcagaaccaagggagagccggccccgccgcccgggaaagcaggagagaagtcagtgaagaagccggccccgcctccagccccaccacaggccaccaaaaccactgctcctgtccccgagcccaccaagccaggagaccctcgggaagccaggaggaaggagcggccagccaggaccccccccaggaggcggacgctaagcggcagcggcagtggcagtggtagcagctatagtggttccagctcccgatccagctcctgagctgagaaacggaacctcgcgaaccactggtggcacatccttctcctcccccgcccctgatcacccgcccccggatcagaaatatatctatattctcgactaaagtctcatcaggaaatatttcctgtcttttattttaagcatcaaattgttttagttgatttaaaaaggaaaaaatacagaaaagaccaaaaaaaggccaagggtgttgttggggcgtctgtctaatgtggtgggtctttttttgaggggtctcctaaaataaaatattttgataagcaaaaaaaaaaaaaaaaaaaaaaaaaaaaaaaaaaaaaaaaaaaaaaaaaaaaaaaaaaaaaaaaaaaaaaaaaaaaaaaaaaaaaaaaaaaaaaaaaaaaaaaaaaaaaaaaaaaaaaaaaaaaacaaaaaaaaaaaaaaaaaaaaaaaaaaaaaacaaacaaaaaaaaaaccaaacacaaaaacaacccacaacccaaacaaaacaacanacccaccaaaaaaccccnccccaaccaaaaaaaacccaacaaaaaaaaaaaccaccaccacccac

SEQ ID NO: 82043 - DNA, 2410 bp, Homo sapiens
acccacgcgatcgcggacgcgtggtgtcgacccacgcgtccgaccacgcgtcagcgcccgtgtcgagcctggagccagaacctgtgaagagcggaagggccaagggacgtcttctccacgccgctccgactccaggggagccgtggcctcctctccgccctagcgctgagaaccgtgggtaccgatggatgtggccgagagccctgaacgggatcctcactctccagaggatgaagagcagccacagggactctcggacgatgacattctgagggacagcgggtccgatcaggatttggacggggcgggggtgagggcttctgatctggaggatgaggaaagtgcagccagggggccgagccaggaggaggaagataatcactccgacgaggaggaccgggcaagtgagcctaaatcccaagaccaggactcagaggtgaatgagctgagccggggcccgaccagctccccctgcgaggaggagggggacgaaggggaggaagaccggacaagcgaccttagggatgaggcctcctcagtcaccagggagctggatgagcatgagctagactacgatgaggaggttcctgaggagccagctcccgccgtccaggaggacgaggctgagaaagcgggggctgaggatgatgaggagaagggcgaaggcactcccagggaggaggggaaggctggtgttcagagtgtgggagaaaaggaatccctggaggctgccaaggagaaaaagaaagaggacgatgatggagaaatcgatgatggggaaatagacgatgatgacctggaagaaggtgaagtgaaggaccccagtgacaggaaggtgaggcctcgtcccacctgccggttcttcatgaaagggaactgtacctggggaatgaatgtaggtttatacaccctggagtgaacgacaaggggaactactccctaatcaccaaagccgaccccttcccgcctaatggtgccccgcctctcggacctcacccgctgatgcccgccaacccttggggtgggccggtagttgatgaaattttgcctccaccccctccagagcccccaacagagagtgcctgggaacgaggactccggcatgcaaaggaggttttaaaaaaagcaactattcgaaaagaacaggagcctgattttgaagagaaaaggtttacggtgaccattggcgaagacgaacgggaatttgacaaagaaaatgaagtttttcgagattggaattctcggatcccgagagatgtcagagacacagtactcgagccttacgcagacccttattatgactatgaaattgagcggttttggcgtggcggacagtatgagaatttcagggtgcagtatacagaaacagagccgtatcataattaccgagaaagggagcgggagcgagagagagagaacagacagcgcgagcgcgagcgggagcgggagcgggaccgagagcgggagcgccggcagagggagcgcgagcgagagcgggagcgcgagcgcgacaaggagcggcagcggaggaaggaggagtgggagcgtgagcgagccaagcgggacgagaaggaccggcagcaccgtgaccgcgaccgggagaaggagcgggagaaggagaaggggaagcccaagccccgctccccgcagccgccaagccgccaagctgagccaccaaagaaggaggctgccaccacggggccgcaggtgaagagagcagatgagtggaaggacccttggcgccgatccaagtctcccaagaagaaactcggggtgtcggtctccccgagccgggctcgaaggcgtcggaaaacatcagcctcgtcagcctctgcctctaattcctccaggtcgtcttcgcggtcatcgtcctactctggctccggctcctcccggtcgcgatcccggtcttcatcctacagctcctactccagccgctcttccagacacagctcgttctcaggaagccggtccaggtcccggtccttctcttcgtccccgtccccgtccccaacaccttccccacatagaccttccatcagaaccaagggagagccggccccgccgcccgggaaagcaggagagaagtgcgcctggtgcagaagtgcgcctgggtgcgcacccaggcgcacttctccctgccaagtcgatccaccctgtctacactacctgcctggccagaagatccaccctgtctacactaccttccttgccagtaatgcacgctatctacactatctgcctggctagcagatccacgctgtctatactaccttccctgtccagtagacccaccctgtctatactacctcctggccagcagatccagcctgtctatactacctgactggccagcagatccacctgtctacactacctgcctgcacagaagtgcgccttggtcaggctc

SEQ ID NO: 82044 - DNA, 486 bp, Homo sapiens
ttctcctccctgtcacctcctcccctaaaccttgacctcacactccctttcccaagacttgctccttaacaaaattcaggcaactcccctgaaccacgtgggcagagtccccttccctccaaatccctgaccctcctgtccccaggagtctttggccaccacagagaccttcaaacagcagaaagttcggatggcaaatgagggcttcgaccccagcaccctgtctgacccactgtacgttctggaccaggctgtaggtgcctacctgcccctcacaactgcccggtacagcgccctcctggcaggaaaccttcgaatctgagaacttccacacctgaggcacctgagagaggaactctgtggggtgggggccgttgcaggtgtactgggctgtcagggatcttttctataccagaactgcggtcactattttgtaataaatgtggctggagctgatccagctgtctctgacctacaaaaaaaaca

SEQ ID NO: 82045 - DNA, 340 bp, Homo sapiens
gcttcaccttgagacgcttattatgttccctcaaaaacttcgggaccccaggcctgtatggcctctccgttctccgttccatgatcgtactggaacccttcggtgaaggggagaatgtgcaacgagtgcgaggtcttcagccctaattcttcagagaggtgaacgtctatggagtcactgtgccaggcatgaaggcagggctggaatggcagccctagttctgcgtcccccccacgctttggaccttatgcagctctacacccacgtgtctgagaacttgccaccttatgcccggccccgattcctcaggctccaggagtctttggccaccacagagacc

SEQ ID NO: 82046 - DNA, 177 bp, Homo sapiens
agggatcttttctataccagacagcccagtacacctgcaacggcccccaccccacagagttcctctctcaggtgtactgggctgtcagggatcttttctataccagaactgcggtcactattttgtaataaatgtggctggagctgatccagctgtctctgacctacaaaaaaaaca

SEQ ID NO: 82047 - DNA, 2398 bp, Homo sapiens
tgcaggctggtactggtcccgaatcctttagatgtccggggccgccccacacccgcactcctcccgggtttctgctctccgcccgtgtggagtggtgggggcctgggtgggaatgggcgtgtgccagcgcacgcgcgctccctggaaggagaagtctcagctagaacgagcggccctaggttttcggaagggaggatcagggatgtttgcgagcggctggaaccagacggtgccgatagaggaagcgggctccatggctgccctcctgctgctgcccctgctgctgttgctaccgctgctgctgctgaagctacacctctggccgcagttgcgctggcttccggcggacttggcctttgcggtgcgagctctgtgctgcaaaagggctcttcgagctcgcgccctggccgcggctgccgccgacccggaaggtcccgaggggggctgcagcctggcctggcgcctcgcggaactggcccagcagcgcgccgcgcacacctttctcattcacggctcgcggcgctttagctactcagaggcggagcgcgagagtaacagggctgcacgcgccttcctacgtgcgctaggctgggactggggacccgacggcggcgacagcggcgaggggagcgctggagaaggcgagcgggcagcgccgggagccggagatgcagcggccggaagcggcgcggagtttgccggaggggacggtgccgccagaggtggaggagccgccgcccctctgtcacctggagcaactgtggcgctgctcctccccgctggcccagagtttctgtggctctggttcgggctggccaaggccggcctgcgcactgcctttgtgcccaccgccctgcgccggggccccctgctgcactgcctccgcagctgcggcgcgcgcgcgctggtgctggcgccagagtttctggagtccctggagccggacctgcccgccctgagagccatggggctccacctgtgggctgcaggcccaggaacccaccctgctggaattagcgatttgctggctgaagtgtccgctgaagtggatgggccagtgccaggatacctctcttccccccagagcataacagacacgtgcctgtacatcttcacctctggcaccacgggcctccccaaggctgctcggatcagtcatctgaagatcctgcaatgccagggcttctatcagctgtgtggtgtccaccaggaagatgtgatctacctcgccctcccactctaccacatgtccggttccctgctgggcatcgtgggctgcatgggcattggggccacagtggtgctgaaatccaagttctcggctggtcagttctgggaagattgccagcagcacagggtgacggtgttccagtacattggggagctgtgccgataccttgtcaaccagcccccgagcaaggcagaacgtggccataaggtccggctggcagtgggcagcgggctgcgcccagatacctgggagcgttttgtgcggcgcttcgggcccctgcaggtgctggagacatatggactgacagagggcaacgtggccaccatcaactacacaggacagcggggcgctgtggggcgtgcttcctggctttacaagcatatcttccccttctccttgattcgctatgatgtcaccacaggagagccaattcgggacccccaggggcactgtatggccacatctccagctggcccaggggaagttgctaaaggatgtcttccggcctggggatgttttcttcaacactggggacctgctggtctgcgatgaccaaggttttctccgcttccatgatcgtactggagacaccttcaggtggaagggggagaatgtggccacaaccgaggtggcagaggtcttcgaggccctagattttcttcaggaggtgaacgtctatggagtcactgtgccagggcatgaaggcagggctggaatggcagccctagttctgcgtcccccccacgctttggaccttatgcagctctacacccacgtgtctgagaacttgccaccttatgcccggccccgattcctcaggctccaggagtctttggccaccacagagaccttcaaacagcagaaagttcggatggcaaatgagggcttcgaccccagcaccctgtctgacccactgtacgttctggaccaggctgtaggtgcctacctgcccctcacaactgcccggtacagcgccctcctggcaggaaaccttcgaatctgagaacttccacacctgaggcacctgagagaggaactctgtggggtgggggccgttgcaggtgtactgggctgtcagggatcttttctataccagaactgcggtcactattttgtaataaatgtggctggagctgatccagctgtctctgacctacaaaaaaaaca

SEQ ID NO: 82048 - DNA, 2366 bp, Homo sapiens
tgcaggctggtactggtcccgaatcctttagatgtccggggccgccccacacccgcactcctcccgggtttctgctctccgcccgtgtggagtggtgggggcctgggtgggaatgggcgtgtgccagcgcacgcgcgctccctggaaggagaagtctcagctagaacgagcggccctaggttttcggaagggaggatcagggatgtttgcgagcggctggaaccagacggtgccgatagaggaagcgggctccatggctgccctcctgctgctgcccctgctgctgttgctaccgctgctgctgctgaagctacacctctggccgcagttgcgctggcttccggcggacttggcctttgcggtgcgagctctgtgctgcaaaagggctcttcgagctcgcgccctggccgcggctgccgccgacccggaaggtcccgaggggggctgcagcctggcctggcgcctcgcggaactggcccagcagcgcgccgcgcacacctttctcattcacggctcgcggcgctttagctactcagaggcggagcgcgagagtaacagggctgcacgcgccttcctacgtgcgctaggctgggactggggacccgacggcggcgacagcggcgaggggagcgctggagaaggcgagcgggcagcgccgggagccggagatgcagcggccggaagcggcgcggagtttgccggaggggacggtgccgccagaggtggaggagccgccgcccctctgtcacctggagcaactgtggcgctgctcctccccgctggcccagagtttctgtggctctggttcgggctggccaaggccggcctgcgcactgcctttgtgcccaccgccctgcgccggggccccctgctgcactgcctccgcagctgcggcgcgcgcgcgctggtgctggcgccagagtttctggagtccctggagccggacctgcccgccctgagagccatggggctccacctgtgggctgcaggcccaggaacccaccctgctggaattagcgatttgctggctgaagtgtccgctgaagtggatgggccagtgccaggatacctctcttccccccagagcataacagacacgtgcctgtacatcttcacctctggcaccacgggcctccccaaggctgctcggatcagtcatctgaagatcctgcaatgccagggcttctatcagctgtgtggtgtccaccaggaagatgtgatctacctcgccctcccactctaccacatgtccggttccctgctgggcatcgtgggctgcatgggcattggggccacagtggtgctgaaatccaagttctcggctggtcagttctgggaagattgccagcagcacagggtgacggtgttccagtacattggggagctgtgccgataccttgtcaaccagcccccgagcaaggcagaacgtggccataaggtccggctggcagtgggcagcgggctgcgcccagatacctgggagcgttttgtgcggcgcttcgggcccctgcaggtgctggagacatatggactgacagagggcaacgtggccaccatcaactacacaggacagcggggcgctgtggggcgtgcttcctggctttacaagcatatcttccccttctccttgattcgctatgatgtcaccacaggagagccaattcgggacccccaggggcactgtatggccacatctccaggtgagccagggctgctggtggccccggtaagccagcagtccccattcctgggctatgctggcgggccagagctggcccaggggaagttgctaaaggatgtcttccggcctggggatgttttcttcaacactggggacctgctggtctgcgatgaccaaggttttctccgcttccatgatcgtactggagacaccttcaggtggaagggggagaatgtggccacaaccgaggtggcagaggtcttcgaggccctagattttcttcaggaggtgaacgtctatggagtcactgtgccagggcatgaaggcagggctggaatggcagccctagttctgcgtcccccccacgctttggaccttatgcagctctacacccacgtgtctgagaacttgccaccttatgcccggccccgattcctcaggctccagaggctgtaggtgcctacctgcccctcacaactgcccggtacagcgccctcctggcaggaaaccttcgaatctgagaacttccacacctgaggcacctgagagaggaactctgtggggtgggggccgttgcaggtgtactgggctgtcagggatcttttctataccagaactgcggtcactattttgtaataaatgtggctggagctgatccagctgtctctgacctacaaaaaaaaca

SEQ ID NO: 82049 - DNA, 2600 bp, Homo sapiens
tgcaggctggtactggtcccgaatcctttagatgtccggggccgccccacacccgcactcctcccgggtttctgctctccgcccgtgtggagtggtgggggcctgggtgggaatgggcgtgtgccagcgcacgcgcgctccctggaaggagaagtctcagctagaacgagcggccctaggttttcggaagggaggatcagggatgtttgcgagcggctggaaccagacggtgccgatagaggaagcgggctccatggctgccctcctgctgctgcccctgctgctgttgctaccgctgctgctgctgaagctacacctctggccgcagttgcgctggcttccggcggacttggcctttgcggtgcgagctctgtgctgcaaaagggctcttcgagctcgcgccctggccgcggctgccgccgacccggaaggtcccgaggggggctgcagcctggcctggcgcctcgcggaactggcccagcagcgcgccgcgcacacctttctcattcacggctcgcggcgctttagctactcagaggcggagcgcgagagtaacagggctgcacgcgccttcctacgtgcgctaggctgggactggggacccgacggcggcgacagcggcgaggggagcgctggagaaggcgagcgggcagcgccgggagccggagatgcagcggccggaagcggcgcggagtttgccggaggggacggtgccgccagaggtggaggagccgccgcccctctgtcacctggagcaactgtggcgctgctcctccccgctggcccagagtttctgtggctctggttcgggctggccaaggccggcctgcgcactgcctttgtgcccaccgccctgcgccggggccccctgctgcactgcctccgcagctgcggcgcgcgcgcgctggtgctggcgccagagtttctggagtccctggagccggacctgcccgccctgagagccatggggctccacctgtgggctgcaggcccaggaacccaccctgctggaattagcgatttgctggctgaagtgtccgctgaagtggatgggccagtgccaggatacctctcttccccccagagcataacagacacgtgcctgtacatcttcacctctggcaccacgggcctccccaaggctgctcggatcagtcatctgaagatcctgcaatgccagggcttctatcagctgtgtggtgtccaccaggaagatgtgatctacctcgccctcccactctaccacatgtccggttccctgctgggcatcgtgggctgcatgggcattggggccacagtggtgctgaaatccaagttctcggctggtcagttctgggaagattgccagcagcacagggtgacggtgttccagtacattggggagctgtgccgataccttgtcaaccagcccccgagcaaggcagaacgtggccataaggtccggctggcagtgggcagcgggctgcgcccagatacctgggagcgttttgtgcggcgcttcgggcccctgcaggtgctggagacatatggactgacagagggcaacgtggccaccatcaactacacaggacagcggggcgctgtggggcgtgcttcctggctttacaagcatatcttccccttctccttgattcgctatgatgtcaccacaggagagccaattcgggacccccaggggcactgtatggccacatctccaggtgagccagggctgctggtggccccggtaagccagcagtccccattcctgggctatgctggcgggccagagctggcccaggggaagttgctaaaggatgtcttccggcctggggatgttttcttcaacactggggacctgctggtctgcgatgaccaaggttttctccgcttccatgatcgtactggagacaccttcaggtggaagggggagaatgtggccacaaccgaggtggcagaggtcttcgaggccctagattttcttcaggaggtgaacgtctatggagtcactgtgccaggtgcctaggcatggaaggtgggggaggcacccagccaccaccccgaattggtagtacttgggcgcagggagcacgaggccttcgtggtggtcagccatggaggggcttactctgtctcccacacccaccagggcatgaaggcagggctggaatggcagccctagttctgcgtcccccccacgctttggaccttatgcagctctacacccacgtgtctgagaacttgccaccttatgcccggccccgattcctcaggctccaggagtctttggccaccacagagaccttcaaacagcagaaagttcggatggcaaatgagggcttcgaccccagcaccctgtctgacccactgtacgttctggaccaggctgtaggtgcctacctgcccctcacaactgcccggtacagcgccctcctggcaggaaaccttcgaatctgagaacttccacacctgaggcacctgagagaggaactctgtggggtgggggccgttgcaggtgtactgggctgtcagggatcttttctataccagaactgcggtcactattttgtaataaatgtggctggagctgatccagctgtctctgacctacaaaaaaaaca

SEQ ID NO: 82050 - DNA, 2425 bp, Homo sapiens
tgcaggctggtactggtcccgaatcctttagatgtccggggccgccccacacccgcactcctcccgggtttctgctctccgcccgtgtggagtggtgggggcctgggtgggaatgggcgtgtgccagcgcacgcgcgctccctggaaggagaagtctcagctagaacgagcggccctaggttttcggaagggaggatcagggatgtttgcgagcggctggaaccagacggtgccgatagaggaagcgggctccatggctgccctcctgctgctgcccctgctgctgttgctaccgctgctgctgctgaagctacacctctggccgcagttgcgctggcttccggcggacttggcctttgcggtgcgagctctgtgctgcaaaagggctcttcgagctcgcgccctggccgcggctgccgccgacccggaaggtcccgaggggggctgcagcctggcctggcgcctcgcggaactggcccagcagcgcgccgcgcacacctttctcattcacggctcgcggcgctttagctactcagaggcggagcgcgagagtaacagggctgcacgcgccttcctacgtgcgctaggctgggactggggacccgacggcggcgacagcggcgaggggagcgctggagaaggcgagcgggcagcgccgggagccggagatgcagcggccggaagcggcgcggagtttgccggaggggacggtgccgccagaggtggaggagccgccgcccctctgtcacctggagcaactgtggcgctgctcctccccgctggcccagagtttctgtggctctggttcgggctggccaaggccggcctgcgcactgcctttgtgcccaccgccctgcgccggggccccctgctgcactgcctccgcagctgcggcgcgcgcgcgctggtgctggcgccagagtttctggagtccctggagccggacctgcccgccctgagagccatggggctccacctgtgggctgcaggcccaggaacccaccctgctggaattagcgatttgctggctgaagtgtccgctgaagtggatgggccagtgccaggatacctctcttccccccagagcataacagacacgtgcctgtacatcttcacctctggcaccacgggcctccccaaggctgctcggatcagtcatctgaagatcctgcaatgccagggcttctatcagctgtgtggtgtccaccaggaagatgtgatctacctcgccctcccactctaccacatgtccggttccctgctgggcatcgtgggctgcatgggcattggggccacagtggtgctgaaatccaagttctcggctggtcagttctgggaagattgccagcagcacagggtgacggtgttccagtacattggggagctgtgccgataccttgtcaaccagcccccgagcaaggcagaacgtggccataaggtccggctggcagtgggcagcgggctgcgcccagatacctgggagcgttttgtgcggcgcttcgggcccctgcaggtgctggagacatatggactgacagagggcaacgtggccaccatcaactacacaggacagcggggcgctgtggggcgtgcttcctggctttacaagcatatcttccccttctccttgattcgctatgatgtcaccacaggagagccaattcgggacccccaggggcactgtatggccacatctccaggtgagccagggctgctggtggccccggtaagccagcagtccccattcctgggctatgctggcgggccagagctggcccaggggaagttgctaaaggatgtcttccggcctggggatgttttcttcaacactggggacctgctggtctgcgatgaccaaggttttctccgcttccatgatcgtactggagacaccttcaggtggaagggggagaatgtggccacaaccgaggtggcagaggtcttcgaggccctagattttcttcaggaggtgaacgtctatggagtcactgtgccaggtgcctaggcatggaaggtgggggaggcacccagccaccaccccgaattggtagtacttgggcgcagggagcacgaggccttcgtggtggtcagccatggaggggcttactctgtctcccacacccaccagggcatgaaggcagggctggaatggcagccctagttctgcgtcccccccacgctttggacaggctgtaggtgcctacctgcccctcacaactgcccggtacagcgccctcctggcaggaaaccttcgaatctgagaacttccacacctgaggcacctgagagaggaactctgtggggtgggggccgttgcaggtgtactgggctgtcagggatcttttctataccagaactgcggtcactattttgtaataaatgtggctggagctgatccagctgtctctgacctacaaaaaaaaca

SEQ ID NO: 82051 - DNA, 754 bp, Homo sapiens
cccataaggccctgacccctgactcccagtttcagatctctgctctctgacaggtggaagggggagaatgtggccacaaccgaggtggcagaggtcttcgaggccctagattttcttcaggaggtgaacgtctatggagtcactgtgccaggtgcctaggcatggaaggtgggggaggcacccagccaccaccccgaattggtagtacttgggcgcagggagcacgaggccttcgtggtggtcagccatggaggggcttactctgtctcccacacccaccagggcatgaaggcagggctggaatggcagccctagttctgcgtcccccccacgctttggaccttatgcagctctacacccacgtgtctgagaacttgccaccttatgcccggccccgattcctcaggctccaggagtctttggccaccacagagaccttcaaacagcagaaagttcggatggcaaatgagggcttcgaccccagcaccctgtctgacccactgtacgttctggaccaggctgtaggtgcctacctgcccctcacaactgcccggtacagcgccctcctggcaggaaaccttcgaatctgagaacttccacacctgaggcacctgagagaggaactctgtggggtgggggccgttgcaggtgtactgggctgtcagggatcttttctataccagaactgcggtcactattttgtaataaatgtggctggagctgatccagctgtctctgacctacaaaaaaaaca

SEQ ID NO: 82052 - DNA, 1136 bp, Homo sapiens
tgcaggctggtactggtcccgaatcctttagatgtccggggccgccccacacccgcactcctcccgggtttctgctctccgcccgtgtggagtggtgggggcctgggtgggaatgggcgtgtgccagcgcacgcgcgctccctggaaggagaagtctcagctagaacgagcggccctaggttttcggaagggaggatcagggatgtttgcgagcggctggaaccagacggtgccgatagaggaagcgggctccatggctgccctcctgctgctgcccctgctgctgttgctaccgctgctgctgctgaagctacacctctggccgcagttgcgctggcttccggcggacttggcctttgcggtgcgagctctgtgctgcaaaatgtggcctcttctgatgctctgctggccctgggcctgctgggcttgcctgccctgacccccggaagggtccccgatcgtgctgtgtggcttgccaggccccttggcccctgggctagccgttctgaccggtggaaaccttgtacgcccaatgcaagtgtcgggccgggccccttggcgaggccaaaccaaacccccgttattctccttccaagttttacaacctaggtggctttctctggcctgggaggccaggccttattttaaaggccgcttaaacccgttcccaaggggaaaggcggggcctcgggggaaagcggcccgttgggccctcggggaaaaggcgcaaagaaggtcttttaagagaacaccccaaaatgggcctagggggccccattttgtgggccagagcacctagtgcctggacccccctctttctacacccagctttaaaccacggatttagacccttggcccagcttaagggggaggacccatttggacgggcgggaaaccccatttgggcggcggagagagaaaacccccccccactggagaaccggggggggagccgggagtggtccagggggaaacccaaaagaggggccccgcgggtggtgcccggggaaaaacgggcgcggcagagcggggcagaaagggggcccggagggcccccgttgtggggggcggcagaacgcggaaacaagaacgggcgtgcccagtagagcaggacctggggggggagtgtcccaacg

SEQ ID NO: 82053 - DNA, 223 bp, Homo sapiens
cctgctgggcatcgtgggctgcatgggcattggtcagtctccccaaccccaccttcattaattcatccagtagacatttattaagcacgtactatggtgtgagtcctccagggtagataatctagaggacggatggggcagagccctactcaccaggagctctgtacaatagggcaatgtcacctgcctagacctacagactgaggaacggtgaggggggcca

SEQ ID NO: 82054 - DNA, 721 bp, Homo sapiens
tttgggagagagcaatggtaccttcccttaacgggaaaacgagaaatattgaggggaagatggactgcgatccaaacgccctggctctcaggcctggactctagggcttagccagatgcctaaaccgcccaagccgagaaacaacttagaagacagacataaccctgggattcagggaaggcgcgagcaccgcccaggacctggtagggtgcgagccgcgagcagtccgggagggagcgcgcctagggcggagcgtaggctgtggggggagggctgggagtccggggccgccccacacccgcactcctcccgggtttctgctctccgcccgtgtggagtggtgggggcctgggtgggaatgggcgtgtgccagcgcacgcgcgctccctggaaggagaagtctcagctagaacgagcggccctaggttttcggaagggaggatcagggatgtttgcgagcggctggaaccagacggtgccgatagaggaagcgggctccatggctgccctcctgctgctgcccctgctgctgttgctaccgctgctgctgctgaagctacacctctggccgcagttgcgctggcttccggcggacttggcctttgcggtgcgagctctgtgctgcaaaagggctcttcgagctcgcgccctggccgcggctgccgccgacccggaaggtcccgaggggggctgcagcctggcctggcgcctcgcggaactg

SEQ ID NO: 82055 - DNA, 2469 bp, Homo sapiens
tgcaggctggtactggtcccgaatcctttagatgtccggggccgccccacacccgcactcctcccgggtttctgctctccgcccgtgtggagtggtgggggcctgggtgggaatgggcgtgtgccagcgcacgcgcgctccctggaaggagaagtctcagctagaacgagcggccctaggttttcggaagggaggatcagggatgtttgcgagcggctggaaccagacggtgccgatagaggaagcgggctccatggctgccctcctgctgctgcccctgctgctgttgctaccgctgctgctgctgaagctacacctctggccgcagttgcgctggcttccggcggacttggcctttgcggtgcgagctctgtgctgcaaaagggctcttcgagctcgcgccctggccgcggctgccgccgacccggaaggtcccgaggggggctgcagcctggcctggcgcctcgcggaactggcccagcagcgcgccgcgcacacctttctcattcacggctcgcggcgctttagctactcagaggcggagcgcgagagtaacagggctgcacgcgccttcctacgtgcgctaggctgggactggggacccgacggcggcgacagcggcgaggggagcgctggagaaggcgagcgggcagcgccgggagccggagatgcagcggccggaagcggcgcggagtttgccggaggggacggtgccgccagaggtggaggagccgccgcccctctgtcacctggagcaactgtggcgctgctcctccccgctggcccagagtttctgtggctctggttcgggctggccaaggccggcctgcgcactgcctttgtgcccaccgccctgcgccggggccccctgctgcactgcctccgcagctgcggcgcgcgcgcgctggtgctggcgccagagtttctggagtccctggagccggacctgcccgccctgagagccatggggctccacctgtgggctgcaggcccaggaacccaccctgctggaattagcgatttgctggctgaagtgtccgctgaagtggatgggccagtgccaggatacctctcttccccccagagcataacagacacgtgcctgtacatcttcacctctggcaccacgggcctccccaaggctgctcggatcagtcatctgaagatcctgcaatgccagggcttctatcagctgtgtggtgtccaccaggaagatgtgatctacctcgccctcccactctaccacatgtccggttccctgctgggcatcgtgggctgcatgggcattggggccacagtggtgctgaaatccaagttctcggctggtcagttctgggaagattgccagcagcacagggtgacggtgttccagtacattggggagctgtgccgataccttgtcaaccagcccccgagcaaggcagaacgtggccataaggtccggctggcagtgggcagcgggctgcgcccagatacctgggagcgttttgtgcggcgcttcgggcccctgcaggtgctggagacatatggactgacagagggcaacgtggccaccatcaactacacaggacagcggggcgctgtggggcgtgcttcctggctttacaagcatatcttccccttctccttgattcgctatgatgtcaccacaggagagccaattcgggacccccaggggcactgtatggccacatctccaggtgagccagggctgctggtggccccggtaagccagcagtccccattcctgggctatgctggcgggccagagctggcccaggggaagttgctaaaggatgtcttccggcctggggatgttttcttcaacactggggacctgctggtctgcgatgaccaaggttttctccgcttccatgatcgtactggagacaccttcaggtggaagggggagaatgtggccacaaccgaggtggcagaggtcttcgaggccctagattttcttcaggaggtgaacgtctatggagtcactgtgccagggcatgaaggcagggctggaatggcagccctagttctgcgtcccccccacgctttggaccttatgcagctctacacccacgtgtctgagaacttgccaccttatgcccggccccgattcctcaggctccaggagtctttggccaccacagagaccttcaaacagcagaaagttcggatggcaaatgagggcttcgaccccagcaccctgtctgacccactgtacgttctggaccaggctgtaggtgcctacctgcccctcacaactgcccggtacagcgccctcctggcaggaaaccttcgaatctgagaacttccacacctgaggcacctgagagaggaactctgtggggtgggggccgttgcaggtgtactgggctgtcagggatcttttctataccagaactgcggtcactattttgtaataaatgtggctggagctgatccagctgtctctgacctacaaaaaaaaca

SEQ ID NO: 82056 - DNA, 2765 bp, Homo sapiens
tgcaggctggtactggtcccgaatcctttagatgtccggggccgccccacacccgcactcctcccgggtttctgctctccgcccgtgtggagtggtgggggcctgggtgggaatgggcgtgtgccagcgcacgcgcgctccctggaaggagaagtctcagctagaacgagcggccctaggttttcggaagggaggatcagggatgtttgcgagcggctggaaccagacggtgccgatagaggaagcgggctccatggctgccctcctgctgctgcccctgctgctgttgctaccgctgctgctgctgaagctacacctctggccgcagttgcgctggcttccggcggacttggcctttgcggtgcgagctctgtgctgcaaaagggctcttcgagctcgcgccctggccgcggctgccgccgacccggaaggtcccgaggggggctgcagcctggcctggcgcctcgcggaactggcccagcagcgcgccgcgcacacctttctcattcacggctcgcggcgctttagctactcagaggcggagcgcgagagtaacagggctgcacgcgccttcctacgtgcgctaggctgggactggggacccgacggcggcgacagcggcgaggggagcgctggagaaggcgagcgggcagcgccgggagccggagatgcagcggccggaagcggcgcggagtttgccggaggggacggtgccgccagaggtggaggagccgccgcccctctgtcacctggagcaactgtggcgctgctcctccccgctggcccagagtttctgtggctctggttcgggctggccaaggccggcctgcgcactgcctttgtgcccaccgccctgcgccggggccccctgctgcactgcctccgcagctgcggcgcgcgcgcgctggtgctggcgccagagtttctggagtccctggagccggacctgcccgccctgagagccatggggctccacctgtgggctgcaggcccaggaacccaccctgctggaattagcgatttgctggctgaagtgtccgctgaagtggatgggccagtgccaggatacctctcttccccccagagcataacagacacgtgcctgtacatcttcacctctggcaccacgggcctccccaaggctgctcggatcagtcatctgaagatcctgcaatgccagggcttctatcagctgtgtggtgtccaccaggaagatgtgatctacctcgccctcccactctaccacatgtccggttccctgctgggcatcgtgggctgcatgggcattggggccacagtggtgctgaaatccaagttctcggctggtcagttctgggaagattgccagcagcacagggtgacggtgttccagtacattggggagctgtgccgataccttgtcaaccagcccccgagcaaggcagaacgtggccataaggtccggctggcagtgggcagcgggctgcgcccagatacctgggagcgttttgtgcggcgcttcgggcccctgcaggtgctggagacatatggactgacagagggcaacgtggccaccatcaactacacaggacagcggggcgctgtggggcgtgcttcctggctttacaagcatatcttccccttctccttgattcgctatgatgtcaccacaggagagccaattcgggacccccaggggcactgtatggccacatctccaggtgagccagggctgctggtggccccggtaagccagcagtccccattcctgggctatgctggcgggccagagctggcccaggggaagttgctaaaggatgtcttccggcctggggatgttttcttcaacactggggacctgctggtctgcgatgaccaaggttttctccgcttccatgatcgtactggagacaccttcaggtggaagggggagaatgtggccacaaccgaggtggcagaggtcttcgaggccctagattttcttcaggaggtgaacgtctatggagtcactgtgccagggcatgaaggcagggctggaatggcagccctagttctgcgtcccccccacgctttggaccttatgcagctctacacccacgtgtctgagaacttgccaccttatgcccggccccgattcctcaggctccaggagtctttggccaccacagagaccttcaaacagcagaaagttcggatggcaaatgagggcttcgaccccagcaccctgtctgacccactgtacgttctggaccaggctgtaggtgcctacctgcccctcacaactgcccggtacagcgccctcctggcaggaaaccttcgaatctgagaacttccacacctgaggcacctgagagaggaactctgtggggtgggggccgttgcaggtgtactgggctgtcagggatcttttctataccagaactgcggtcactattttgtaataaatgggcggggcttaccaattgccttggcttacaaacaaacaaatccgtaatcttttcaatctatcctaaaatggcttacttgccaaccccataggggggtataaaaaagggccggctataaactccgtgtgggaaactctgttccacttaaaatctcggtcccttctcgtgttgtataagaaagacccactatgtcttctacaagtgaccctctctgagcataaatactgacatttgtcctcgtcatgttaaccgctctctcacttgtcctagcctctggcgagattcttattacatctcatcatgtgtggtgctcttgcagaactttgacgctatcctccc

SEQ ID NO: 82057 - DNA, 504 bp, Homo sapiens
tggtactaactctttgaaatctggtatttattttacacttctagttcgtctcaattcaccttgccacaatttaagagctgtatatgcacatgtaactagtatatgctgtattggtcagagcagttctagaggggcatactctcctcctcccccactaaactagtgtgttggtcccctaccccctccctgtcatgcattcttttcaggaagacacttttgagagcatttaatgttttcctcccagattcaacttttgcgctcacagtacactgctagttttcaaatgatcagaaatttttttttttctcggcaactccagttatgaattagctatccagttagtgtttgtgattgttttgagacttggcagtgtttgttcttatgatttatcttcttttctcacacatttcagggatatattagtttcctttatccagtagctaaaaaccttgtttattttattttaatattttagcctaacaagacagtgaaccagctgtagaa

SEQ ID NO: 82058 - DNA, 1705 bp, Homo sapiens
ttcatggtctcctggaagctttggctggagactactcagctcgtcactgaactaacggcttttgggggttcttttttcccagttgagtttctgtgtcttttacacgtttggttttatggtccgttggaggttttttcacgctgagggtgaagattcttagtttcctcaattagcataaaagctgctccaaggctgctgagtcttcagttccattccattcaaaatgttaattcctgagacacgcaacctacgccctactgtcctttgtcccacggcttctcgagattatctctgtgttttaatagataaaacgccttctctccccacccgtggggtgcaaagcacagcgcatggggctggtggcgcccgagagcatcacacaacgcatgcgccagtccgcaggtgtgggcggaggagaaatcgcgtcggcggcaggggatgacgtaaaaaggccgcgctgtactgcggcttgtgccgcttccgcaagaaggtttcctggcctgttgcagccatggtgcattgcagttgcgtgtgttcagaaagtatggaaatttcatcgataagctaagactcttcaccaggggaggatccggtggaatgggttatcctcgtttaggtggagaaggtggaaaaggtggtgatgtctgggttgtagcccagaacagaatgactttaaaacaacttaaagacaggtatcctcggaaacggtttgtggctggagtaggagcaaacagcaaaattagtgcactgaaaggctccaaaggaaaagactgggaaatccctgtgcctgtgggtatttcagtaactgatgaaaatggtaaaattataggagaactcagtaaagaaaatgacagaattttggtagctcaaggaggtcttggtggtaaattacttacaaatttcttaccattgaaaggccagaaacgaataattcaccttgatctaaaacttatagctgatgtaggcctagtaggattcccaaatgctggaaaatcctctttgctaagttgtgtttctcatgcaaaacctgcaattgcagattacgcatttacaacattaaagcctgaacttggaaagataatgtacagtgatttcaaacagatatcagtagctgatcttccgggtttaatagaaggagcacatatgaacaaaggaatgggccacaaattcctcaagcatatagaaagaactagacaactactttttgttgttgatatttctggatttcagctttcttctcacactcaatacaggacagcttttgaaaccataatactgcttacaaaagagttggaattgtacaaagaggaacttcagacaaaacctgcactcttggcagttaataaaatggacttgccagatgcccaagataagttccatgaattgatgagccagctccagaatcctaaagattttctgcatttatttgaaaaaaacatgattccagagaggactgtagagttccaacatatcatccccatatctgcagttactggagaaggaatcgaagaattaaagaattgtataagaaagtcactggatgaacaggccaaccaggaaaatgatgcacttcataagaaacagttgcttaatttgtggatttctgatacaatgtcttctactgagccaccatcaaagcatgctgttactacttccaaaatggatataatttaaatatattaaaaatggtattgatggaacagta

SEQ ID NO: 82059 - DNA, 1217 bp, Homo sapiens
ttcatggtctcctggaagctttggctggagactactcagctcgtcactgaactaacggcttttgggggttcttttttcccagttgagtttctgtgtcttttacacgtttggttttatggtccgttggaggttttttcacgctgagggtgaagattcttagtttcctcaattagcataaaagctgctccaaggctgctgagtcttcagttccattccattcaaaatgttaattcctgagacacgcaacctacgccctactgtcctttgtcccacggcttctcgagattatctctgtgttttaatagataaaacgccttctctccccacccgtggggtgcaaagcacagcgcatggggctggtggcgcccgagagcatcacacaacgcatgcgccagtccgcaggtgtgggcggaggagaaatcgcgtcggcggcaggggatgacgtaaaaaggccgcgctgtactgcggcttgtgccgcttccgcaagaaggtttcctggcctgttgcagccatggtgcattgcagttgcgtgtgttcagaaagtatggaaatttcatcgataagctaagactcttcaccaggggaggatccggtggaatgggttatcctcgtttaggtggagaaggtggaaaaggtggtgatgtctgggttgtagcccagaacagaatgactttaaaacaacttaaagacaggtatcctcggaaacggtttgtggctggagtaggagcaaacagcaaaattagtgcactgaaaggctccaaaggaaaagactgggaaatccctgtgcctgtgggtatttcagtaactgatgaaaatggtaaaattataggagaactcagtaaagaaaatgacagaattttggtagctcaaggaggtcttggtggtaaattacttacaaatttcttaccattgaaaggccagaaacgaataattcaccttgatctaaaacttatagctgatgtaggcctagtaggattcccaaatgctggaaaatcctctttgctaagttgtgtttctcatgcaaaacctgcaattgcagattacgcatatacaacatttaagcctgaaacttgaaagataatgtaagggatttcaaaagagtttctgagagggaactccggggtgaaggggagcctttataacaagggaggggccaaattcctagaggtttgaagaatagtactaaggtgtgatattcggatcaggttctctaactt

SEQ ID NO: 82060 - DNA, 1841 bp, Homo sapiens
ttcatggtctcctggaagctttggctggagactactcagctcgtcactgaactaacggcttttgggggttcttttttcccagttgagtttctgtgtcttttacacgtttggttttatggtccgttggaggttttttcacgctgagggtgaagattcttagtttcctcaattagcataaaagctgctccaaggctgctgagtcttcagttccattccattcaaaatgttaattcctgagacacgcaacctacgccctactgtcctttgtcccacggcttctcgagattatctctgtgttttaatagataaaacgccttctctccccacccgtggggtgcaaagcacagcgcatggggctggtggcgcccgagagcatcacacaacgcatgcgccagtccgcaggtgtgggcggaggagaaatcgcgtcggcggcaggggatgacgtaaaaaggccgcgctgtactgcggcttgtgccgcttccgcaagaaggtttcctggcctgttgcagccatggtgcattgcagttgcgtgtgttcagaaagtatggaaatttcatcgataagctaagactcttcaccaggggaggatccggtggaatgggttatcctcgtttaggtggagaaggtggaaaaggtggtgatgtctgggttgtagcccagaacagaatgactttaaaacaacttaaagacaggtatcctcggaaacggtttgtggctggagtaggagcaaacagcaaaattagtgcactgaaaggctccaaaggaaaagactgggaaatccctgtgcctgtgggtatttcagtaactgatgaaaatggtaaaattataggagaactcagtaaagaaaatgacagaattttggtagctcaaggaggtcttggtggtaaattacttacaaatttcttaccattgaaaggccagaaacgaataattcaccttgatctaaaacttatagctgatgtaggcctagtaggattcccaaatgctggaaaatcctctttgctaagttgtgtttctcatgcaaaacctgcaattgcagattacgcatttacaacattaaagcctgaacttggaaagataatgtacagtgatttcaaacagatatcagtagctgatcttccgggtttaatagaaggagcacatatgaacaaaggaatgggccacaaattcctcaagcatatagaaagaactagacaactactttttgttgttgatatttctggatttcagctttcttctcacactcaatacaggacagcttttgaaaccataatactgcttacaaaagagttggaattgtacaaagaggaacttcagacaaaacctgcactcttggcagttaataaaatggacttgccagatgcccaagataagttccatgaattgatgagccagctccagaatcctaaagattttctgcatttatttgaaaaaaacatgattccagagaggactgtagagttccaacatatcatccccatatctgcagttactggagaaggaatcgaagaattaaagaattgtataagaaagtcactggatgaacaggccaaccaggaaaatgatgcacttcataagaaacagttgcttaatttgtggatttctgatacaatgtcttctactgagccaccatcaaagcatgctgttactacttccaaaatggatataatttaaatatattaaaaatggtattgatggaacagtatttaatgcttaaaaacaaggaaatcctttcatctgtgacaacctggaggacatgttaagtaaaataagccaggcttagaaagacaaatgctgcataatctcactgtggaatcttaagttgaactcatagaaggaga

SEQ ID NO: 82061 - DNA, 1631 bp, Homo sapiens
ttcatggtctcctggaagctttggctggagactactcagctcgtcactgaactaacggcttttgggggttcttttttcccagttgagtttctgtgtcttttacacgtttggttttatggtccgttggaggttttttcacgctgagggtgaagattcttagtttcctcaattagcataaaagctgctccaaggctgctgagtcttcagttccattccattcaaaatgttaattcctgagacacgcaacctacgccctactgtcctttgtcccacggcttctcgagattatctctgtgttttaatagataaaacgccttctctccccacccgtggggtgcaaagcacagcgcatggggctggtggcgcccgagagcatcacacaacgcatgcgccagtccgcaggtgtgggcggaggagaaatcgcgtcggcggcaggggatgacgtaaaaaggccgcgctgtactgcggcttgtgccgcttccgcaagaaggtttcctggcctgttgcagccatggtgcattgcagttgcgtgtgttcagaaagtatggaaatttcatcgataagctaagactcttcaccaggggaggatccggtggaatgggttatcctcgtttaggtggagaaggtggaaaaggtggtgatgtctgggttgtagcccagaacagaatgactttaaaacaacttaaagacaggtatcctcggaaacggtttgtggctggagtaggagcaaacagcaaaattagtgcactgaaaggctccaaaggaaaagactgggaaatccctgtgcctgtgggtatttcagtaactgatgaaaatggtaaaattataggagaactcagtaaagaaaatgacagaattttggtagctcaaggaggtcttggtggtaaattacttacaaatttcttaccattgaaaggccagaaacgaataattcaccttgatctaaaacttatagctgatgtaggcctagtaggttacaacattaaagcctgaacttggaaagataatgtacagtgatttcaaacagatatcagtagctgatcttccgggtttaatagaaggagcacatatgaacaaaggaatgggccacaaattcctcaagcatatagaaagaactagacaactactttttgttgttgatatttctggatttcagctttcttctcacactcaatacaggacagcttttgaaaccataatactgcttacaaaagagttggaattgtacaaagaggaacttcagacaaaacctgcactcttggcagttaataaaatggacttgccagatgcccaagataagttccatgaattgatgagccagctccagaatcctaaagattttctgcatttatttgaaaaaaacatgattccagagaggactgtagagttccaacatatcatccccatatctgcagttactggagaaggaatcgaagaattaaagaattgtataagaaagtcactggatgaacaggccaaccaggaaaatgatgcacttcataagaaacagttgcttaatttgtggatttctgatacaatgtcttctactgagccaccatcaaagcatgctgttactacttccaaaatggatataatttaaatatattaaaaatggtattgatggaacagta

SEQ ID NO: 82062 - DNA, 845 bp, Homo sapiens
ttcatggtctcctggaagctttggctggagactactcagctcgtcactgaactaacggcttttgggggttcttttttcccagttgagtttctgtgtcttttacacgtttggttttatggtccgttggaggttttttcacgctgagggtgaagattcttagtttcctcaattagcataaaagctgctccaaggctgctgagtcttcagttccattccattcaaaatgttaattcctgagacacgcaacctacgccctactgtcctttgtcccacggcttctcgagattatctctgtgttttaatagataaaacgccttctctccccacccgtggggtgcaaagcacagcgcatggggctggtggcgcccgagagcatcacacaacgcatgcgccagtccgcaggtgtgggcggaggagaaatcgcgtcggcggcaggggatgacgtaaaaaggccgcgctgtactgcggcttgtgccgcttccgcaagaaggtttcctggcctgttgcagccatggtgcattgcagttgcgtgtgttcagaaagtatggaaatttcatcgataagctaagactcttcaccaggggaggatccggtggaatgggttatcctcgtttaggtggagaaggtggaaaaggtggtgatgtctgggttgtagcccagaacagaatgactttaaaacaacttaaagacaggtatcctcggaaacggtttgtggctggagtaggagcaaacagcaaaattagtgcactgaaaggctccaaaggaaaagactgggaaatccctgtgcctgtgtacctgtgaaagtagggatcctctagatcacctcagcatcagctgcctgcctt

SEQ ID NO: 82063 - DNA, 411 bp, Homo sapiens
ctgcgtagctgtgctggcaaaggagagcctgggcgtctgggcagttctgagggattgagccataaagggaagggtccctggctgtggaatgactgagcgggcggagaagccctgtgtgggtggtggggaagaagagtccatcccacccaggaactgaagatagacacctcaggggtctgttagacccttgagagagcaggggcagtggcggcttgggtgtaagaaggagatgtgcagaaggagggtgcagtggctgctacttccttgtggggccagtttctccagggatggcggggaccctgaactccatagccctccccagctcacactgctggagtcttcaccaaaccccactcactgccttttaggagcagccctgctgccctaacgagggctggctggaacaactct

SEQ ID NO: 82064 - DNA, 925 bp, Homo sapiens
gcttaagccgtgcgcccaaggcagcgtaggagcgttgctgccaggccttggggcagggattcccaccgagcccctcttccccagcaggagggcaccacccatcttgatggcccaactcactccaggaaacacaatgggtttgctgaccgtggcggatgagagtggcggcaggtgcgaggggagagaacattgagcatttgaagcttcgacttgaggctcggccaccgactttgctgtaatgggtccgctcctgtttctgcctccgcgtgagggttgcggccacagggtgacggcgtggtgggcgacacccccgcgcaggcatgcacagagtggtggtcgttggggggatcctctacacagagccctcagagacccctccctgaggagtccaaacctgtggagatgcccttccaccactgacacaggagaccccacttccgacgccgggccttaccacctgagaggcatgcatgcaacggaggcagctatatgctgcctgtgccgcattgctttgtcttcatggctggcggaggtggtcagaatcacatacataacaccctggacaggcgggtatctggcacaccagcctggcatcatgaccgatgcagacccacttgctggcggcatgttggggcagcatgatgggcaagccacattatacccatctgggtctccaacacgtcacagacacccggaaccatgaccctatggtctggcaccgatccagacacatcttggggtgatttagggcacctcctgtggtcttcccctcctggcattcggtcactggggatacgtcctggtaccatggccttcagtccggacctgattgcaacagcgacgtacaacaatcgaggggcagatgccaaggactgcagacccagcagacagtcgcaagactagtgccacacctgtaccgaaccga

SEQ ID NO: 82065 - DNA, 764 bp, Homo sapiens
attacaggcatataccaccatgcctggctaatttttgtatttttagtagagatacggtttcgccatgttggccaggctggtctcgaactcctgatctcaggtgtgcacccacctcagcctcccaaagtgctgggactacaggtgtgagttaccatgtctggtctgggctttcagtgtaaccatcaccaagtagtgtacattgtacccattaagtaatctctcctccctcaccacctcccaccctacgtagtctccagtgtctcttatttcatactctgtgtccatgtgtatacattgtttagctcccacttataagtgagaacatgaattatttaactttgtttaaaagctttttttaaaaaaaattggtggtagggaaggggacatgtgttttaaacggaatacattaactaatccgatataaacaaattgttaaaaggtttttggctttggttttgttttaatttttttttcttcttttgaggcagagtctcgccgtgtcacccaggctggagtgtagtggcgcaatctcggctcactgcaacctccacctcccaggttcaagtgattctactgcctcagcctcccgaatagctgggaatacaggcacccgccaccacgcccagctaatttttgtatttttagtagagatgaggtttcaccatgttggccaggctgctcttgaacttctgacctcaggtgacccacccgcctcggcctcccataatgttgagattacaggtatgagccaccttgtccggcct

SEQ ID NO: 82066 - DNA, 421 bp, Homo sapiens
gtgaaaaactacaaaatgctgatgaaagaaaccaaagaaaatctaaataaatggagagatagtccatcttcaaagattggaagattaaatatagtaaagatgtcatttctccctaaatttgtatacatatataccatagtttctattaaaatcccagcaaaattgtcgatatagacgatcttctaaaattttatatagaaaagcaaaggaatacctactacaaatctgaaaaagaaagtgggaggaatcactatccaaattctagacttatatagctatagtaatccagactcagtggcgttaccagagggatatatagatgactagaacagaatagggaagccagaaatagccccatataagtatggccaatttgtttttgataaaggtgcaaaacagttccaatggaagaagcatagtc

SEQ ID NO: 82067 - DNA, 683 bp, Homo sapiens
cactcttatatctgtgattcattctgagttttcttgtatagtttaaagtcagagtgggtgtttgtttgcttattaatatatttatagatatttctaattctttctagcaccatttattaaaaagtctctttttttacccattgaattattttttttaaattgttatgtctaaaatcaaattaccaaatacacattgtctattttgaactatttattctgtttcattgatttttatgtgttcctttacacccaatatcattgtcttaattactgtagatttgttggaaatatgggagtcaaatttaaggatttcaattttgtccttttatcaagttgttttggctgttctaggtcctttgccatttccctataacatttggaattaggttgtcaatatttccccagaataaagcctgctgggattttgaacaggattgcatggaatctataaatcaatttagtgagaattaataacatattaagtactctaattgatgaacatagtatcatcttccatttatttagtctttgacttctcggaaatgttttatagttttcagtgtgtaggtcttgaagtttgtaaaattctaagtgttttatggttttgactgtaattgtaaatacctcccattgttcattgttagtacatagaaataaaataaattttgtattaatttgtctca

SEQ ID NO: 82068 - DNA, 767 bp, Homo sapiens
ggtgaaataaaagtattttgatttggaggaaggaacttaatactaaaaatagtctcaatggaatagattgcagggatacctgttattatcagtaattctgtgatagcgaaacaaacataattgttactgtgtattgggtgctcactctgttccaggaaagtactataaagtattgtatttacgtaaattattgtatttaatactcatagtgtccctgtgagcggtaataacattaccattttacagatgggaaaactgagactcagagaattaaataccagcctcaaatcacgtagctaataaagaggtgaatctgctcaagctgtaaaccatgaggccagctaggcataggggatgtgttctgggatgaggattcttttacattcttcctcagtgagactcccctcccctcttcttagaagaccagggagctcttgctttacttttttaccctttccctgcccagggtggatgaatattattccttggactttataaggctgtggccctagatgctgagtccctgtcttctggtgtctgggaagtgtggcggccccttggccagtccatttctttagtcgttctgtcactcttcctcaatggatactgccccagtgtagaggaatccagaacataccccaagcagtccctccctgtacagtttcactttattaaaaggattataattagggtttcattggatgttttattattccccatgcttttttcctgatggaaattatttcgttgttgagacagagcctcgc

SEQ ID NO: 82069 - DNA, 344 bp, Homo sapiens
atatgataaccataagctttatttaactataattttctatattaacaagctcctttcctatttatctaaatcaaatggcttttattccacaccaataacctgcaaatatgactgccttggactcacaactcacccctaaggaatctgccttatgtttggaatcttattttcactgcattaaagcagtacagaaaaaacattaccatatatatgacaaggaataagaagattcacaaacgtaaggatagcataaactcattgttcaggaatgtgattggttaccccatctaacagtctggtgaaaagtgcccagggaaatgaacacacaacacagaaatacagtc

SEQ ID NO: 82070 - DNA, 221 bp, Homo sapiens
aaactcaggcaaacccaaatccagggatgttattcaaaataactggcctgtaatctttaaaagtgtcaagatcatgacagtgaaggtaaaaaggaagaactgtcccagtctgaagaaggatagagaggaagacatgacaaccaaatacaacacatgattctgaagtagatccttattctataaagggaatttgggggcaactggtgaaaatttaatttttt

SEQ ID NO: 82071 - DNA, 768 bp, Homo sapiens
gccgcatccttgaactcctgggctcaagcgatccttcttccgtagcctctggagtagctggaaccacagacacaatgctactgcacctggcttttgttttttcttatagatttgctggacggccacagtggctcacaccttgcctatactttggaaggctgaggtgggaggatcacttgagcccaggagtttgagaccagcctgggtaacacagtgagtccccatctctacaaaagaaatcagctgggtgtggtggtgtgtgcgtgtaatcccagctgcttgggaggctgaggtaggagaattgcttgagctcagaaggttgaggctgcagtgagctgtgatggcaccacttcactccagcctacacaatagagcaagaccctggctctcataacacacacacacaaaagacttgcctcattcatataacatcagtaaaaaccctcctaaattctaaaggcaggcaaagttaatatcattttaggattatattcctgtaatcctagcactttgggaggctgaagtgggaggatcgcttgagcccaggagtttgaaaccagcctgggcaatgtagtgagaccccatctctattaaaaaaatttttttttaattttaaccttgaggtttaagggaaatttattatagaacttttggtattgtatatatatatataagttatatttgtatacgcagcttatggtagatggacattccttatataaccaagatatggtacataaaggcccttttatttttaatgagtatgga

SEQ ID NO: 82072 - DNA, 446 bp, Homo sapiens
gccggctgaccagggggtgggccgcaccacggagctgccacctgacccatgtttcctgtgtcgagagcacaagaaccagtcatataaatggctctttcccagagaagctttgtagaggaaattccatttcagcaaagaaggtggactggggatgctctggaagatgagaaaggaagccaagagtcaaaacagcctccgctggcaggagccctgtggtggcggctgagctggcaccctaataaggggcactgagccctggtgcagggctggctgggcagcactcagctctaccctatctgcttctcccacccacgcttcacgctggctttgttctctcttccacactgagaagaacaaaaccacttatctgtatcaagttcctaaactggggtaggggacaagagtggggaggggcccggtatccagcttgcaatcacagggcgtga

SEQ ID NO: 82073 - DNA, 167 bp, Homo sapiens
taacacctggttgaactttccttttttagtccattagcattcgctgagcctatgaaccacgcttcagttaaaatgcgacacagctcaacagatgcattttgtgaagcaaatcctgagtaaatctgtaaggctggctaagaccaacttataaagtgccacatagacag

SEQ ID NO: 82074 - DNA, 586 bp, Homo sapiens
tctaccagtacggcaactactcctgggacctggcagacgaacagaacgtgagcgctgccaccagcacccaggctgcgggggtaccggagccccagccctggccctgagggagaaggaagtcagggccggggctgccccaatcctgtctcctgtgcgcaggtgaacggattcaacacccttggggaaaacattgctgacaacggaggggtgcggcaagcctataaggcctacctcaagtggatggcagagggtggcaaggaccagcagctgcccggcctggatctcacccatgagcagctcttcttcatcaactatgcccaggtggcagccgcagtcctggtcccaccatccccatgcttccccactcatctctggagggcccactctggggcacctccagggaccagagcccagcatggaaggccccttgggggaaaagcatgaggggcagggggcgggagctggacaggatttcaatggtgatgggaggaggggagcacctgctgactcccctcaccccaccctagaaggggcagcctggggatagtggagaccctccgcccacccctcctggccaccccaccac

SEQ ID NO: 82075 - DNA, 520 bp, Homo sapiens
tctaccagtacggcaactactcctgggacctggcagacgaacagaacgtgagcgctgccaccagcacccaggctgcgggggtaccggagccccagccctggccctgagggagaaggaagtcagggccggggctgccccaatcctgtctcctgtgcgcaggcctacctcaagtggatggcagagggtggcaaggaccagcagctgcccggcctggatctcacccatgagcagctcttcttcatcaactatgcccaggtggcagccgcagtcctggtcccaccatccccatgcttccccactcatctctggagggcccactctggggcacctccagggaccagagcccagcatggaaggccccttgggggaaaagcatgaggggcagggggcgggagctggacaggatttcaatggtgatgggaggaggggagcacctgctgactcccctcaccccaccctagaaggggcagcctggggatagtggagaccctccgcccacccctcctggccaccccaccac

SEQ ID NO: 82076 - DNA, 359 bp, Homo sapiens
tcattagccacaatttttaaaaaattggacgtcatagtttacatgttagagggcgttttgaagctttgtatttttaaattaaatgttatagagtgatgttttcatgtttcataattgttttcatctgtgcatttgtagccaacttgaaaacaaagatccagggattactacttaaaagccagacttcttggaggttatagtgatgattttgatagtatcttgagccgtctcataataacctcagggtgagagatggccaacaggagacagtcgagggacttagaaatctgaatgaaatctgaagttcaaatcttcagacatataccactaaccaagagattggtacctcagtctagtat

SEQ ID NO: 82077 - DNA, 497 bp, Homo sapiens
aaatggaggtgctggcagttggagatcaggctgtccatagcacactgatgtggcacaggcaaggaatatggctgaggcaccaatttgctgctactgctgtctaacaggcattggaagtcttatgtgttcaaaaataaacttctgatttctactcccaaacctgctcttcccacatcttccccgtctcagtaggtggcagctctatttgtccggttactgagaccaaatattagagtcctccttaatttcctctctctcatgcttcacattcagtttattaataaatcctgttgacagcctgggcaatatggcaagaatccatctcacaaaataaataaataagccaggtgtggtggtacgtgcctgtggtccccggttactcgagaagctgaggctgaggatcagttgagcccaggagttgaggctacagatagctatgatcacaccactgcactccagcctgggcatcagtgagagcacatttcttaaaaaaaaaa

SEQ ID NO: 82078 - DNA, 716 bp, Homo sapiens
gttctcttttgcttaatacaataatgataaaatactcaaatttctatcaataatcatgccaaacagcaagtgcccatctgggaggcactggaggttccagcatcatttctgatctgagaacacccagatggaacacagggtctaggcagatccatctggaggagcggtgtgcaggaagattagagtggagggccggcagggcggtgccaccagtcagggggctgttggtgtcacccagctgagacctagggcaggcctggacccagctgagttcatgttcaccaagtagggaggtgccggtggaagcagaagaggcgagcacgtgggagagactgcagaggagagtgaagaggttggagtcacaatgcctatgggagccgaaggaaaggaaagagggctgggattgagaataagggcccaccttaaagcgggaagggagaaaggcagaaaatgaaatgaatgcgcagttaaagggaagagttgtgttttagttgtgttgagttgaaggtgaacgtgggaccctgtctggcaggctgtcggaatatagatctggaggatggaagagagcacgagactgggattatagattggagccattcccatagagaacattatcggatatcaggaaatgtgtgaggtcatccaaggagagggaatacagggagaaaatagcaaatccacaggcacgtgtgtgttctgtggtctggaagaagaag

SEQ ID NO: 82079 - DNA, 1017 bp, Homo sapiens
  misc_feature (12)..(12): n is a, c, g, or t
attcggcaccanggtgggcagggtggaagacagcatgaagaggtgggaacccaagagaatgcaggcccccctgaaatacagtgctgtgatggagtggacttcagagggccgattatacacatctcttcccaaagctcttttcggtgtcctcatcttggtatcaccagatgctgagcctatggaattaaaatagaggtctcctaaaaaagaagaagaatcagactggcatcagatgatccagaaaaaatggagggagaagacaacagagcaagaccttcaaagttatgaaaggactactatatccagtcaaactgtcaattaaataagaaaacaaaaataacctattttgagacatgtgaaaactgcagaggtttacctctcatgcagccctttccataaatttttttgaggatatactccagtaaaataaagaggaagatgtagattgtacaaaatcatagatctaccataactcagaaaagatgcctctgatcacccattctaggtcaattctgacctttctttattacaccaccttggtcatttccttcttaggcttataaaaatctatatttatttcctgtaagtttatttaaaatgtatttcttaacttgcttattcttggcctcacccattagaaggtaagctccataaaaggtgactatgctgtatcaaggaatcttgtatagtgtctggtatttaggtaacagacaataaatattaaagaatgaatagcatatctctattttttaacttgagttaaaccaaactccataggtgagacttctaagagcctttaaaatgctttttgaattttcataatggaggcatagtaagaattatagcctaaacatagaatcctggtagcatcttagatggtggttaatgctttgtgtaacacactctggcacttttaaaattgtaaatcagtttaatttttatcacaaatgtccaacacttttctcttatgaagaagtaagagtcataaatcaattgagagatttctcccaaaaactg

SEQ ID NO: 82080 - DNA, 984 bp, Homo sapiens
  misc_feature (6)..(6): n is a, c, g, or t
  misc_feature (28)..(28): n is a, c, g, or t
cgtcanagttacactccgtcacccgtgnagcagtgcactggcatgatctcggctcactgcaacctccatctttcgggttcaagtgattctcctgcctcagactcccaagtagctgagattacaggtatcaccagatgctgagcctatggaattaaaatagaggtctcctaaaaaagaagaagaatcagactggcatcagatgatccagaaaaaatggagggagaagacaacagagcaagaccttcaaagttatgaaaggactactatatccagtcaaactgtcaattaaataagaaaacaaaaataacctattttgagacatgtgaaaactgcagaggtttacctctcatgcagccctttccataaatttttttgaggatatactccagtaaaataaagaggaagatgtagattgtacaaaatcatagatctaccataactcagaaaagatgcctctgatcacccattctaggtcaattctgacctttctttattacaccaccttggtcatttccttcttaggcttataaaaatctatatttatttcctgtaagtttatttaaaatgtatttcttaacttgcttattcttggcctcacccattagaaggtaagctccataaaaggtgactatgctgtatcaaggaatcttgtatagtgtctggtatttaggtaacagacaataaatattaaagaatgaatagcatatctctattttttaacttgagttaaaccaaactccataggtgagacttctaagagcctttaaaatgctttttgaattttcataatggaggcatagtaagaattatagcctaaacatagaatcctggtagcatcttagatggtggttaatgctttgtgtaacacactctggcacttttaaaattgtaaatcagtttaatttttatcacaaatgtccaacacttttctcttatgaagaagtaagagtcataaatcaattgagagatttctcccaaaaactg

SEQ ID NO: 82081 - DNA, 710 bp, Homo sapiens
ggggctggttcccctaatcgccacattattccggggtcaactattgtttaatcagcatggtcatattgacgtccatgcatgttgttaatacttgagccctcaacagagaatatgtgcacagttcagggatctattgatgtctttctacactgccaggtctctatctctctctccccttcccggtctgtgaaaagtctctgcgtgtctctttgttgccactatcttgagtgttctggatgctgatacaaggccagttgaaggtggattgtccatctgaagtgctcctgtgtgattactaggctacaggacagtcacaaacatctctccttcctttcctcccctaagaagctttgagccctgattcttcaccagggtggtagaggataagtcttagagaaccatgacccctcgtgggaacatattaaaatgaggggggaatatactgggaggaaacaatagtttgataaaagcttcccagttggttctaacaggcctcctccgggttgtagttggatcctctgctcttggtagagacagggaaggtgccatggaattggccatgggtccagatcacctggacatcctcaggcacaggactgggaagtgactgactgagatttaagggataggagaaaagagagaaaagaaggcaggagcccaaggatgtaatttctttttggacccatcttctttttcaggtgcttaatatc

SEQ ID NO: 82082 - DNA, 399 bp, Homo sapiens
gcaagagatgtcgcttattgtctagcaccatgggactgtatcggccaagggtggtgcctgagtggctggtcttgttttctttgcctcctgtttcttttcctctccctcagccaagtctcaggatagatgcgaagtatagtccggttagagaaggtgaatatatgctctgggttatacgcctatgcatgtcaggtcctgggagtgtgtgtgatgcatggtgttccgataggcaggcatgagtctgtccatatgtggttatgaagtttctcaatagctgatggttaggtatcacgagtcaggagtcctgtgagtcctactctgttggacaaagtggtcatcttttttctttgctaactttaagttgaaagtttgtttgaggggctagttggaaaggcattg

SEQ ID NO: 82083 - DNA, 451 bp, Homo sapiens
aaaaaagtcatggcaatgtacagtcactgaatagatcctggatttaaaaataactatacacatttatatatatagttatttcattatatatatagttctataaccattattagaacaatatgagaaatttgaacatagactatatattagataatagtattgagtcaatgataaatttattgagtatggaaatcataatgtgattatacagaagaacatctttgtttcaggagattatgctaaatatttaggtagatggctcagccaaaaaagtatgtgtgagagagggggaaagaaagagagagagagaggcagaaacagggataaaggaagtacaggcacaatggctcatacatgtaatcccagggctttggcaggctgaggtgggaggattgcttgaggctgggagtttgagaccagcccgggcaacatagtaaaatcctatctctac

SEQ ID NO: 82084 - DNA, 356 bp, Homo sapiens
tgttctttagatgtacgggccttgtcccagggtcagtctcttggcttttgcttttccttttgctagaagatttctcaccagatcctgtgtgtctggctccttcttatcattgagtcttaattcaaatgtcagtgtcatatggggagccctccttgaccatgcccatggaatccacaccccagtccctctcaaccccatcactctttcttaatgccccatcactctttcttaatagttcttatctgaaatccttgtatatttatttgattattctctctttctccatcagaatttaagttccatgctggcaaggacgatgtctgttttgttcattattgtcttgccagcacattcta

SEQ ID NO: 82085 - DNA, 668 bp, Homo sapiens
agcggtaattgctgaagctggggaagtaaattattaaaatacttttaaatatttcaaaaatttcataacaaaaattttaaataatcacacacaaagcacagtgggaagatgccatcatcctaaatggaagctaatggaatcaaattcacaaattgtcaatgcgaatataatgtcaattgacattcttattcaagaaaaatattgtaagaatcctaagaaaagcaaggcaaacaaaaaacccatcaaaaggtacttgcttatacttatcaatggcttttaggtactcaatttaatttacttaatataaaaaaaatttttttaggtacagggtcttactctgtcacccaggctggagtgcagtgaagcaatcataattcaccaaagcccaaactcctaggctcaagcaattcctcccacacctcagcctcccagtagctgggattaccagtgggtgccaccacacccagctaattatggttttttagaaacagggtctccctttgttgcccaggctgttctcaaagtccagagctcaatcaatcctcctacttcagcctcccaagtagctgggatcacaggcatgagccaccatgggcacctggctctttatttatttaaaaccgcaaattgatagtttacctgaagatgtgatccaattcccaaggtat

SEQ ID NO: 82086 - DNA, 450 bp, Homo sapiens
ttaccaatcctggtattttttttttttggaccagatctcatccttctgaagtatgaggtacagtgtaacactgagcttggtgctagaggaattatggactctaaagcagtagttctcaagtctagccacacattggaacacccaagggagcttttaaacatggagcctaggactccacccccagatattctgatgtaattagtctgaggtaggacatggactttttgaaaagctccccagagatttcttatgtgcagccagagttgagaacaactggcttaggggaaacccagactctgctttccactctctacaaagaatcccttggccgggtgtggttgctcatgcctatcatcccagcactttgagaggccgaggtgggaggattgcttgacgccaggagttcaagaccagccttggcaacatagcaagatcccatctctacaaaag

SEQ ID NO: 82087 - DNA, 769 bp, Homo sapiens
gggagatggggatgcatgtattgaaattctgccacatggtagatggggctgtctttgaagatgaacatatttgaggtcaatctcactgcccctcctccaatctcaccctccagcgttttgatccaagtgcccacagttctgatgaatgtcaaaggcaagcttgaggagggaagaggaaatgattagtcctttacactccaggtcaatttactaaggatgaattctccaaatgatcagccggattttcaaatggtgtcagaagcggtatccgaagtggagcttctagcgaccactaggagggctgagtgaacacgcaagctacctgcaggacccacttgtctcagattttggagctccgtggatttgtgttttgagctctccgagtttctttgaacaaatttctgatccaaactgggtttggagtcgcaacagaaactggactgggtccaggaatggatttgatccagaaattaactggcttggatcaagttagaggcctcttacgtctgactgggtgagaaaggaacaggtggattttgaacattcacagggatttttgcattatatccctttgtttcatttttcttgcacgcttaggtaggggaaaaaaatcattggctaagttaatcaagagaacctgagcataaagccaatatttgaggtaaaaatgggatccttaatttctggaaaaccgagttccttctggcttatactttaggcctgggaggcagtgaagtcttacagaaacagcaaaatcttactaaagata

SEQ ID NO: 82088 - DNA, 435 bp, Homo sapiens
agtgatgaaattacaggtttgagccaccgcgctgggctggtgtcatagtcttttatgacattgccatttttgagcaatacagacaagtggaatcatctctccgtttaggtttatctgaggtttcctcatgactgcattactgctgaactgatgttgtgttttttaacatatcaggaagcttatgatgttgatttgtcccctctaatgataatgtcaacttgtttcatcctgctgaacccacagttggaatcaccccaaaagccttagcaggggagtttccacaagggagtgccccagaccttttccaggtggggccagttgggattccaagggaagtagcacttagcactaaataaacaacagggtgatcagtccaaagcatttatttattcatttagacagggtctcgcttgctctgttgcccagactggagtg

SEQ ID NO: 82089 - DNA, 429 bp, Homo sapiens
gggacttaattgtacagaacacttacatcgtgttatatataagccatgtacagttgtaaagtctgcataataacctgtggcgctatttatccccattttatagataggtaaactgaaacaggctgaataatttgccaaatgctcacacagctcttaagtggcagagcctggcttcaaatcccatcagctccaacagccatactctcaactgctgctgctttctctagtggagaaagagaaatatttttcgagtgtggggaggacaaggaaagagtagtgcaggggagcgattcataattctagaatagtggtgtaatagaactcaaaattgaatggatatagttgtttagtgtaacaatttatactttcatttgagggaagaaacttatctttgttgggaattggtatgttaccattatgaaactcttt

SEQ ID NO: 82090 - DNA, 138 bp, Homo sapiens
tgtagattggataaattacatttattacaaccaacagcagtttattataaactacactagagatgctattaaagaaatagctgagcaattaggggctactagccagatggcttgggaaaatagaatagccttagacat

SEQ ID NO: 82091 - DNA, 421 bp, Homo sapiens
cttgatctcctgacctcatgatccacccacctcggcctcccaaagtgctgggattacaggcgtgagccaccacgcctggccataaactttagtttttaacttaaaaattttaaaagcctaattcctgaaattaaagtatataattaatgaacatcaaaatgcctaatgttggcgttgctgttatactgtttcgttcattagcaagtaaaataacctttctgggcatcactttaattatacaatgatatgatagctagatcctttttaactctgtgttacacactgtatatgtaattaatgttaaattgtttatgaaagtgaaattaagtgctataaagcatagtggaaggaatattatgcttctgatccaggagttattgagttcaaattctttgtaactattgtgttactttggcttata

SEQ ID NO: 82092 - DNA, 670 bp, Homo sapiens
agagaaataatttggaagttacacttgattatcaatgtgatttatgcagggatgaaaacagaacaccaacagtgaacttatgtcctgagagccagcaactatggcttatgtcaaaaatggcctgaggcctgtatttgtatgaactatgaccttagaatgatttttacattttaaaaggttgtaaaaagaagaaagagaaaaagaagacgcagaagggggtggaggaggaggatctgcagcagcccagcaacagaggccaaacggggctctcaaaacctaaaatatttaatatatagtcctttacagaaaaaaatttggaactccactttatacaatgaaaaggatgttgtcccatattagcagcatatagctagaatatacatctatttatgctttaaattaaaatattccagatatgtatgtccttgtttaaaaagaagataattagcttcggctgatttttaaaatattgctcagtaaatttgatcacattggatataaaattttccactagtagaagtgcatacaaaatacttactctcttattgttcatttaccttattggcttccagtcagttcacctccctttagtggcaggattctaaaggctttattgccagatctcacattttttaatcaccaggcttcctgaatagtgttttgctcctgt

SEQ ID NO: 82093 - DNA, 791 bp, Homo sapiens
ggtaaattttctaacaagatgaactgccttctgatttgaacattctgatcttggtagcataatctgccatgtgtacatatatatattttatgtgattcattattgtaggaataattactgaaatttcctaagttgttatacacttaggattatacacatatgattaaagaccttgttgagacttaatttttaacatctataaactggaaaaatgtgcagacatcttgtttctattaatatattgagaaaagttttcattaatattaatatttcttaggaaatctagctttataaaacatctacatgtttctttcatattttggttggaatggtttagcacctttgtttgcatagcttagtgagaatttagtctttgtggaatccttaaacacttttgacgctacagaaactttagttggctgggcacagtggcacatgcctgtaatcccagcactttgtggggctgaggcaggcagatcacttgagcccaagagtttgagaccagcctggacaacatggcaaaacccagtctctaaaaaaaaaaaaacaaaaaaccaggcatggtggtgtgcacctgtggtctcagctactcgcgatgctgaggggggagaattgatttagcttgggaggtcaaggctgcattgcacttcagtctgggcaacagagtgagactctgtctcaaaaaaacagaaaaccagaccaaccttccccttcaaaactttagtaacttgggattatatgtagccttggaatatttattctgtgctggccaacaatgaacagtgacttct

SEQ ID NO: 82094 - DNA, 460 bp, Homo sapiens
tactacaggaccttaagctatcggtcaatacatgggaagataaactgtataaaactatctgagctgtgaaaagaagtcactgttcggccaggtgcaatgacttaatgcctgtaatcccagcactttgtggggctgaggcaggcagatcacttgagcccaagagtttgagaccagcctggacaacatggcaaaacccagtctctaaaaaaaaaaaaacaaaaaaccaggcatggtggtgtgcacctgtggtctcagctactcgcgatgctgaggggggagaattgatttagcttgggaggtcaaggctgcattgcacttcagtctgggcaacagagtgagactctgtctcaaaaaaacagaaaaccagaccaaccttccccttcaaaactttagtaacttgggattatatgtagccttggaatatttattctgtgctggccaacaatgaacagtgacttct

SEQ ID NO: 82095 - DNA, 454 bp, Homo sapiens
acttttgtgtgtgtgtttgatgtgctggcaactggggacttggtaactggggagggatagctcttctcaggaagagctaattcttagagatacagggagcatgcttttcatatgcaaactactcaaactggagtccacacttccccaacctcctctataggactcttactctcctgcccgatattcccctgctctaatcatcttggggccaggtaccaggcaactcaggacggccactacacctccagagcccactgacattattaaaactagacaattctaagctgcttgccctaccttgaccttattccttttgttgcaaaacgcaataaagggtcttgccacattttccttctgctccctctgcctccggactgaccctggtgctttcctttgtgggccttcgtggcttacctcgtgtttctaggaacctgcaagtgtaaaaacttctttc

SEQ ID NO: 82096 - DNA, 492 bp, Homo sapiens
ttttactccctgctgtaaggtatcagtatcatttgttgaaaagacttttctttgcccattgaattgctgtggcaattttgttgcaatcagttggccatataagtgttggtttatttttagactcttttctgttccagtgatttgtatatctgtctttttgacaatagcacactgtctgtatattatagctttataataaggcttaaaacctggtaatttaagtcctctaacttacctctttttgaaaattgctctggccaggtgccatggctcatgcctgtaatcccagcactttgggaggctgaggcgggtagatagcttgagcccaggaattctagaccagcctaggtaacatggtgaaatccgtctctaaaaaaaaaaaacgaaaattagctgggcgtggtggtgcgtgcctgtatttgggaggtggaggttgcagtgagctgtgattgtgacactgcactccagcctgggcaacagagaccctgtctc

SEQ ID NO: 82097 - DNA, 280 bp, Homo sapiens
tgatacgaatcgaggcggtaccctggcaaatggcagtaataatagtttctataccataggcttgttgtgagaactaatgaattagtttatggagagcacttggagcagtgctgggtatacaggaagctaggctctaagtgctagctgtcacctacattccatagtattctccaaaccttttatttttccagtataattctaagttccttgaggccagggaacaacgcattttacttatagaattgcagtaattgctggcagtgtcatggggcgtagcagg

SEQ ID NO: 82098 - DNA, 654 bp, Homo sapiens
ttatgggaatcatagctggtatttttaacttttttcttccactagctatttcatattctctctttttttcagcaagcacttcagctggttgtggttccttgctcaggggtggaggaagggaatgacgcaaaacttcattcctaaaggggctagacctttaacaattctgcctgtttggggttgttataattttccattaacttttcttacagaatatggtattacttaaaaacacccccaaagttctcctgaattctagacatcttccttaatttctactggtagtaatagctcattttctcctaagaatcaggattaattaccccagccagtatggtaattgtcttttttttttcatgttggtttattggtatgaggagaacaagatggtcaggtggcagtatcagtttccattttaacattggtatgtactttggtggaaacgttcttcctgtggaaactaagaccattatatctgcagagcacaaaggtacaaagaaggacaggaagcaaaattttcactagtggatcattaaagataatattgagagggagccacttccatttctaccacttaattcccaaattcatgaatgctggctgtgtgagaaatagctctcgctggatactaatgttacatcataggaacagcta

SEQ ID NO: 82099 - DNA, 376 bp, Homo sapiens
acaaggggtggaggacgacagaaaaatgtagcatggaaacgacccatgaaaaaatctattttggaggaacaggacacagaagaaaattatatacaacaattaacagagattctatgaaagaagagatcaaagacaagatgacaagacatcagcacaagatgaaagagaggctggcagttgaagaaagaaaatgatgacaaaaataatatcattgcagaagtaataaatatattaaagttataagaggcaaaatccacaaatcaaaaacaatgttgatgatgtggaaaacagtcttcaaaaaactgcacaaaatgcagaggaaaaggacaagtagatgaaagcaagtggagaagatgacagataagaaggtttgaaa

SEQ ID NO: 82100 - DNA, 450 bp, Homo sapiens
cttaatctaaacagagcctcaggcacacttcattgatcatgcctccaggctgaaaggcccccttaatgctggccagcaaatattatgtttctgaggcagccctgtgctgtcaaccacatttcctgatctactctgattagatatataaacagcttcagtaaaacagagcctgagctttgctgttaaaaatataagataaggcttccataaagattcatcaacagcagaggtgctgtctaagttagggctgagccctctgagctgaatttctttttttctttttctttttttcttttctttttttttttttcggtgttgtaagagggtcagtgagcaaacaaccacgatttataatcatgtttgaatagtggctggtgcactcactgactaagggagaccttggggaaaagaaagagttaaaagaattgagcagttcatgaagtggtttgc

SEQ ID NO: 82101 - DNA, 1183 bp, Homo sapiens
ttcctccttcattcctttctctgccccattgcctgccatgaacaacaggttcctggtagcctttgtgctatggttctgttgggaattggtgctctggcacattcctctctccatctgaggagtgtgaagagcctagatcttaaagctgaacagctgaggtgcaagtgatcgttctgttcagtaacagctgggttactttgggctgtttaacctctctgcctccgtttctccataccgcctctgtaaagtgaattctgataattaaaaaaagaataaagtggctgggtacagtggctcacacctataatcccagcactttgggaggcgagaggataacttgaagtcaggagttccagaccagcctgggcaacaagcgagaactcatttcaacaaaaaaacaaaaaaatagctgggcatggtggcacacactgtagtctcagctactcagaaggttaacatgggaggatcatttgagcccaggagttcaaggctgtagtgagctataatcacacaactgagagtgagaccctggctctttaaaaaaaaaaaaaaaaaaaaaaaagtatgacccaggcacggtggctcacgcctgtaatcctagcactttgggaggctgaggcgagcggatcacctgaggtcaggagtccgagacagcctggccaacatggtgaaatctcgtctctagtaaaaatacataaattagccgggcatggtggcgggcacctgtaatcccagctactcgggaggctgaggcacggagaatcgctggaatcagagaggcaaaggttgacagtgagccaagatcgcaccactgcattccagcctgggcgacagagcgagactccgtcaaaaaaaaaaaagtatgtaaagttcttggaatatgtgaatactcaacaaatatcactatcaatttctaaacatactgctaccaagcagatggaagtcccttttctaaggtgagcaagatgggtttcttgttgaggaggaagtttggaaagctcttcatatttattttaaggagcacttgggtagctatctcctacatttgattaaaaccggatgcaagcaagaaacttagtaaaggaaatcagatcagaaagaaaagattggcatgatgtaagtggaaaaactcagggaatacaagttttcttctaaggtcatatgtatgatttgaaagtcacaa

SEQ ID NO: 82102 - DNA, 787 bp, Homo sapiens
ctcctaagaattctctcacctgccttctgcccttaggctctgctagattgcaaatgacctgctttctttctgatcctgggctgcgttcccacccctgtcagatagtaaatcccaagtaaggtaactgctttcggcagctctgagctttcttcttggacacctaaaacccacagtcctccaggctccgatagattgcaaatgacctgctttctttcggatcctgggctgcgttcagacccctgtgggatagtaaatcccaagtaaggtacttgccttccgcagatctgagctttcttcttagacacctaatacccacagtcctccaggctccgatagattgcaaatgacctgctttctttctgatcccgggctgctgagttcggacccctgttggatagtaaatcccaagtaaggtacctgccttcggcagctctgagatttcttcttggacacctaatacccacagtcctccaggggcaagaggatgctattactgcaaagagtacagaggatgtacacccgtctataatatagttggtgatttccagaggctgagaagatattactgacaatcccgtcaacatgctgtgtgaccaccgtggattgtaatatccaggaaaacgttactgctaatgtcacaggacgtgtagaccctgccatcaaattcgtaatatcctagcgggacttcactagtcatttcacaatgcgtgtgcaccctttgatattattcgtattgtcctgaagagatgttactactgatgtcccaatgcaggtacattctctgaca

SEQ ID NO: 82103 - DNA, 280 bp, Homo sapiens
tgggaagaaatttgatatggttcagatctgtgtccccacccaaatctcatgtcgaattgtaattcccagtgttggagctggggcctggaggaaggtggttggataacgggggtggtttctcatggcttaacaccatcccccttagttgccgtcatcacatacttgtgagatctggttgcttaaaaatgtgtatcacctcctccccgctctctttctcctactctggccatgtgaaattacttgctcttccttcgccttctgccatgattggaagcttcct

SEQ ID NO: 82104 - DNA, 644 bp, Homo sapiens
ggcctataggttgtccatcctgactgtccatccctgagattcagatggccctgaactcagtcgcttagcctcagtttccccatttgtgagatcgggggaatggaaaaagtttgcagaaatcagaagtgctcttcctccagggaggtcacaagagaaatttcatcagcggtttgtcctgtggtcctttccaggaaaacatcctccccgccagcctctcacagaagagacctagatttcatctgccacgtggagcaggcggtctcagaatcccacccggagcagggtccagggcaagtcttggaggacagtcaccaagaactgctttggattcgggaacagagctgcctaacccatccgcagccctggggtcctgccctgttcctctggccccttcagggcagcgggggaagcagggaaaacagcctgtcagagatggcagagaaaccgagcaagaataattatcctggaaaagactttcagaagtaaccaccagaaacttcgagtccccagatccaaacagctgagaatgtggggcctgagccacgctctgactccactcccaccacatgaggagaaacaagagctgcttttctggaagacttgaacaacccctgctgtgctctggaaggtagtgtcatttctca

SEQ ID NO: 82105 - DNA, 886 bp, Homo sapiens
ggactacaggcgcccgccaccatgcccggctaatttttttttgtatttttagtagagacagggtttcaccgtgttagccaggatggtctcgatctcatgaccgcgtgatccgctcgcctcagcctcccaaagttgtggaattacaggcgtgagccaccgtgcccagcctattattgagaatttttaaaagaagtttaattttagtctgttcattgtagtcactccatggattcctttgggcaacccagaccagaagataatcagtcagtagtcagaagaatgcaaaagaaatactggaaaactaaacaggtctttatcaaagcaacaggaaaaaaagaggatgagcacttggtggcgtctgatgctgaactggatgctaaacttgaggtttttcactctgttcaagagacatgcactgaacttctgaagataatcgagaaataccagctaagactcaatgttatatcagaggaagaaaatgagctagggctctttttaaaatttcaagcagaacgggatgcaactcaagctggcaaaatgatggatgccactggcaaggcactttgttcttcagccaagcaaagattggccctgtgtactcctctgtctcgtctgaagcaagaagtagcaacattcagtcaaagggcagtatctgataccttgatgacaattaatcggatggagcaggcacgcacagaatacagaggagctctactgtggatgaaagatgtatcccaagagctggacccagacaccttaaagcaaatggaaaagtttagaaaagtatgaaaacgtatccctttccttttcttggtgtatgaaatatgaaactgccacagaataattaagataataaaatttcagatgttttttggtaaatatatgt

SEQ ID NO: 82106 - DNA, 898 bp, Homo sapiens
ccgcaaggagcggtttctggcgtggctgggtcccctgcggcggaagggcgcctcccggccacgctcgctgtagtgaaggagcgcggcagcctggggctcgtttgggtgatttccctcggcggtggaggtcgctcctaatagaggcggcggcggatcacccgaacagccttcaggcgacgtactgtaagacgatattactttaatcatcttcacatcagtatttatggaatagccacaggtgcctcatcctttagtaggagttaattatacatttactggccgagtaaacatctccgaatgtatttttttagataaggaaataaaacatttccaataaagctgaagtctcatcccacccatccgttatcagtcactccatggattcctttgggcaacccagaccagaagataatcagtcagtagtcagaagaatgcaaaagaaatactggaaaactaaacaggtctttatcaaagcaacaggaaaaaaagaggatgagcacttggtggcgtctgatgctgaactggatgctaaacttgaggtttttcactctgttcaagagacatgcactgaacttctgaagataatcgagaaataccagctaagactcaatggtatgaaatcatagttatctatctgataattcccatttaaaataaatattagcattttttaaaatgaaagatttaatgtaaaaacaattttgtgaatagcttcttatggcaaaatatgaatatttacagttacctgttctcaaaggccccagtattctctcttctttcctcagttaatcaaatcctctgacccagatttattttttgctgatattttttttctttgagacagggtctttctctgcactccagcctaggcaacagagcaagactccgtctcaaaaaa

SEQ ID NO: 82107 - DNA, 340 bp, Homo sapiens
cggaaatcaaaattttcaaacttgtacttggatccagtattcaccattaaaatttagtcaccttctatgtatctcattattattttgccattattgactcacttgcatgtaacactagggttttaaaattccttttttaatttagttgagataaaaaaagactaaaattccttttttaatttagttgagattaaaaaaaagactaaagtaacacaatatctatatttacagaggccgacattaacaactgttaacattttgttgtatttctttctagtatttttttagataaggaaataaaacatttccaataaagctgaagtctcatcccacccatccg

SEQ ID NO: 82108 - DNA, 209 bp, Homo sapiens
attgttgggaaggtaacatttttccatggttttgatttttcccaaaagtatttatgtattgatttatttggttctgactcaggcgacgtactgtaagacgatattactttaatcatcttcacatcagtatttatggaatagccacaggtgcctcatcctttagtaggagttaattatacatttactggccgagtaaacatctccgaatg

SEQ ID NO: 82109 - DNA, 477 bp, Homo sapiens
ctttctacatcggaagtaaaaccaaaactgaagcatgtcatagccaagaaaaatagacataatgtttttaaaacagacataatacttagaagaaaatgttatgcttttggggtgcttataacatatatttgtttatagttctttaaattgtcctaataaaatttatatctcaaggtttttcactctgttcaagagacatgcactgaacttctgaagataatcgagaaataccagctaagactcaatggtatgaaatcatagttatctatctgataattcccatttaaaataaatattagcattttttaaaatgaaagatttaatgtaaaaacaattttgtgaatagcttcttatggcaaaatatgaatatttacagttacctgttctcaaaggccccagtattctctcttctttcctcagttaatcaaatcctctgacccagatttattttttgctgatattttttttctttgagac

SEQ ID NO: 82110 - DNA, 1277 bp, Homo sapiens
  misc_feature (43)..(43): n is a, c, g, or t
tatagaacaaatgagacgtgtatacacataggaggaacacaancgcgggggccttatcactgggtctcccaagaggaatcagaactttgtctttcacacactgataaccagccagtgccttcacagagtccaaagaaattaacaagatcccccaacaatggcaaccaagacatgtcagcctggttcaatctgtttgcagacttggatccactttcaaacccagatgctattggacactcagatgatgaacttcttaatgcttgactgaagttataatgtcacttcagtggccttgagacatcaattttgcaacgtatttccttcgtggaaaggatttagattgtaacccgcacacaaaagcacggtgtttgtgaatataacacctgtcagccaactttagacagatggtaaagaccacatttgaataagtacacatctttcatatcttggatttgcagctgttggtactatgtggaaaatattagaaacttctatgtggaaaatattagaaactacagagtttgcgatatttagatactgaaatttatgtcaaaataacggctaggaataattctgtcaatatggagttgagcttatttctttggaaacccttttaagttgccttgctggctgtgagaattttatatgtggataacaaagatagatagatagcatgtaaattgggttgtggtttggggtcagtttttaaatgaaatagtagcgaggaggattttctgttttggaaaacaccattagaaccagaccagctttgttttgggttagagagagtaagatttgagaactcagtttgctttaatgaaatcacagagaaacttggtacttgtttttcttcatttggaggctaaaatgtaatgttttttcattcatacaaaataatggacactccctaattccattattaaatcttgaaggggaagtagcaggataattaatttgctaagcccatcctctgcagaaacagaaaaatctatcttcccatctcctaaaactcagaatgcacagtaatacttaaggcttgtacaagtgtcttcagacccactttttcatacacttgctatatagtagtatgcagtatttatattattcctgaaaataaaatgaggggagaatattccctaagcaactggcaatagtattcctgaaatacctagaaatttctatctgaatgagggagacacttatgaacaccttatccttacatatatttgcatacttatctcatattttgtgacataattatttaacccagaatactt

SEQ ID NO: 82111 - DNA, 2687 bp, Homo sapiens
ggactacaggcgcccgccaccatgcccggctaatttttttttgtatttttagtagagacagggtttcaccgtgttagccaggatggtctcgatctcatgaccgcgtgatccgctcgcctcagcctcccaaagttgtggaattacaggcgtgagccaccgtgcccagcctattattgagaatttttaaaagaagtttaattttagtctgttcattgtagtcactccatggattcctttgggcaacccagaccagaagataatcagtcagtagtcagaagaatgcaaaagaaatactggaaaactaaacaggtctttatcaaagcaacaggaaaaaaagaggatgagcacttggtggcgtctgatgctgaactggatgctaaacttgaggtttttcactctgttcaagagacatgcactgaacttctgaagataatcgagaaataccagctaagactcaatgttatatcagaggaagaaaatgagctagggctctttttaaaatttcaagcagaacgggatgcaactcaagctggcaaaatgatggatgccactggcaaggcactttgttcttcagccaagcaaagattggccctgtgtactcctctgtctcgtctgaagcaagaagtagcaacattcagtcaaagggcagtatctgataccttgatgacaattaatcggatggagcaggcacgcacagaatacagaggagctctactgtggatgaaagatgtatcccaagagctggacccagacaccttaaagcaaatggaaaagtttagaaaagtacagatgcaagtgagaaatagcaaagcttcttttgacaagttaaagatggatgtttgtcagaaagtggatttacttggagctagtcgctgcaatatgctatctcattcgctcactacctaccagagaacactgcttggattctggaagaaaacagctcgaatgatgtcccaaattcatgaagcctgtattggctttcatccgtatgattttgtagctctcaagcaactacaagacacgccaagcaagattagtgaagacaataaagatgaacaaataggcggttttcttactgaacagctcaataagctagttttgtctgatgaggaagcaagctttgagagtgaacaagcaaacaaagatcacaatgaaaaacattctcaaatgagagaatttggagcacctcagttttctaactctgaaaatgttgcaaaagatctacctgtagattcattggaaggagaagattttgagaaggaattctcatttctgaacaacctcctaagttctggttcttcaagtactagtgaatttacccaagaatgccagactgcctttgggagccccagtgccagtctcacatcccaggagccttccatggggtctgagcccctcgctcattcttctcgattccttccttcacaactctttgaccttggctttcatgtggctggagcgttcaacaactgggtctcccaagaggaatcagaactttgtctttcacacactgataaccagccagtgccttcacagagtccaaagaaattaacaagatcccccaacaatggcaaccaagacatgtcagcctggttcaatctgtttgcagacttggatccactttcaaacccagatgctattggacactcagatgatgaacttcttaatgcttgactgaagttataatgtcacttcagtggccttgagacatcaattttgcaacgtatttccttcgtggaaaggatttagattgtaacccgcacacaaaagcacggtgtttgtgaatataacacctgtcagccaactttagacagatggtaaagaccacatttgaataagtacacatctttcatatcttggatttgcagctgttggtactatgtggaaaatattagaaacttctatgtggaaaatattagaaactacagagtttgcgatatttagatactgaaatttatgtcaaaataacggctaggaataattctgtcaatatggagttgagcttatttctttggaaacccttttaagttgccttgctggctgtgagaattttatatgtggataacaaagatagatagatagcatgtaaattgggttgtggtttggggtcagtttttaaatgaaatagtagcgaggaggattttctgttttggaaaacaccattagaaccagaccagctttgttttgggttagagagagtaagatttgagaactcagtttgctttaatgaaatcacagagaaacttggtacttgtttttcttcatttggaggctaaaatgtaatgttttttcattcatacaaaataatggacactccctaattccattattaaatcttgaaggggaagtagcaggataattaatttgctaagcccatcctctgcagaaacagaaaaatctatcttcccatctcctaaaactcagaatgcacagtaatacttaaggcttgtacaagtgtcttcagacccactttttcatacacttgctatatagtagtatgcagtatttatattattcctgaaaataaaatgaggggagaatattccctaagcaactggcaatagtattcctgaaatacctagaaatttctatctgaatgagggagacacttatgaacaccttatccttacatatatttgcatacttatctcatattttgtgacataattatttaacccagaatactt

SEQ ID NO: 82112 - DNA, 2455 bp, Homo sapiens
  misc_feature (2455)..(2455): n is a, c, g, or t
gtctgacatagcaacttggactgaaacttcgtttttgttgaaggccaaacatataagctgagaattaggcttaaaaaatgcctggtttaacctcacttggctatttactgattacatcatctgcatttatagcttaatcatctgttaaattggggttctccacgcacacaggatcatgtggttgtgtttgtatatattaggagatatctataacctgaacatatacatagagagatgggttatgctccctggttaactaaaacgtggaaactttctaaagatgtgagagagctcttaaggcaattataaatagtcttttaaggaagattcatattgtatgttctgtgttgcaggccaagtggcatcagagctgagtgatggacgacctgcagtcccagaacctctccatggacatgactgactcccctcctgccttggctaataacagactggagaatggcatggctcagctgatcaccaccgaggcctggaacatcaactccactgacctggtaaagaaggccctggtgaccgtgccagccccatccattctgaacccccctgccgagtctcagagtggcatggctctgaaggtggcggccactgtgttgcagcccctgtgcctcggggagagcccagtggtgatgcccattcacatgcaggtggagggaagctccgcaccagagctcaatccgaatggcaatgccacctacgtcatgaccacccagggccccgtgcaactgcccgtggtgctggagcagcacgtctttcagcacctcaactcccctctggtcctgccgcaggaggccccatgctcctccagtaccatccacaacaacctcttccagggagcggaggaccccgaggcccagccccagctcctggacctgaggatccccagccagccgcaggagcccactttgccatttgaagctgtgctccagaatttgtttccctcccagggcactctcgggcccccaccctgtcagcctcctcctggctatgcccctgtgcccccacagccttttagctcccccttgtcccccctggtcccaccagccaccctcttggtgccgtatcctgtaatcgtccccttgcctgtgccagtccctattcccatccccatcccggtgcctcagagttctgaatccaagttcagctccagtttccccaagccaccatcttccttcggcctgcacccctttaaaggcacccagacccctctggaaaaagatgaactgaagccctttgacatcctccagcctaaggagtacttccagctcagccgccacacggtcattaagatgggaagtgagaacgaggccctggatctctccatgaagtcagtgccctggctcaaggctggtgaagtcagtcccccaatcttccaggaagatgcagccctagacctgtcagtggcagcccaccggaaatccgagcctccccctgagacactgtatgacagtggtgcatcagtggacagctcaggtcacacagtgatggagaaacttcccagtggcatggaaatttcttttgcccctgccacgtcccatgaggccccagccatgatggatagtcacatcagcagcagtgatgctgctaccgagatgctcagccagcccaaccaccccagcggcgaagtcaaggctgaaaataacattgagatggtgggcgagtcccaggcggccaaggtcattgtctctgtcgaagatgctgtgcctaccatattctgtggcaagatcaaaggcctctcaggggtgtccaccaaaaacttctccttcaaaagagaagactccgtgcttcagggctatgacatcaacagccaaggggaagagtccatgggaaatgcagagccccttaggaaacccatcaaaaaccggagcataaagttaaagaaagtgaactcccaggaaatacacatgctcccaatcaaaaaacaacggctggccaccttttttccaagaaagtaaataacggctttttaaaatttgtatgattataatatggggaaaggtgcattggttttataaaaaggcatttaaaacaaattatctttgttaattattttggggagtagttgggaaatggaaaggtgaattggctctagaggccctgtatgctagtatcattttcttttttaatttttgacttttcacaaatgagtaaataagagcaacctatttttcaagcagattgcacattttttgcagctttaatggaatattgggtgaattagaggggtaaaaaaagctattttcattgccacaaagtgctttgatgatgtaatacctaataaagggtaggatgaatatttcacaataaatgtttgtttgcactaaaaagggggggccggtacccaattcggccctattagtgagtcgaataccaattaaattggcccgtcgtttaccacgctggacttgaaaaaacccctgcgtacccacttaaatggccn

SEQ ID NO: 82113 - DNA, 2496 bp, Homo sapiens
  misc_feature (2496)..(2496): n is a, c, g, or t
aggcaccgcaccgggcagtctccggatctgccgttctgccccggcccggaaaacccggcgccttccaggcccttcgaaagatggattctgttgacgtatctggcggccctggcgagcctggtggaaagttgggttttgccagattgcgccgggctcctctttgtgacgcgcggccagccccgcatcccccccggagccgggcttcccaggaagaatgaagcagtcaacttgcataaggcctgtcttgacttctctcctttgggggaagaggatcacattaagaagggtggcaggcttgcctggacacagaattccactaccaaacagacatcatttctgagaacttcagagtttatgatccaggtttcccagtgattaaattactccttggaaggccaagtggcatcagagctgagtgatggacgacctgcagtcccagaacctctccatggacatgactgactcccctcctgccttggctaataacagactggagaatggcatggctcagctgatcaccaccgaggcctggaacatcaactccactgacctggtaaagaaggccctggtgaccgtgccagccccatccattctgaacccccctgccgagtctcagagtggcatggctctgaaggtggcggccactgtgttgcagcccctgtgcctcggggagagcccagtggtgatgcccattcacatgcaggtggagggaagctccgcaccagagctcaatccgaatggcaatgccacctacgtcatgaccacccagggccccgtgcaactgcccgtggtgctggagcagcacgtctttcagcacctcaactcccctctggtcctgccgcaggaggccccatgctcctccagtaccatccacaacaacctcttccagggagcggaggaccccgaggcccagccccagctcctggacctgaggatccccagccagccgcaggagcccactttgccatttgaagctgtgctccagaatttgtttccctcccagggcactctcgggcccccaccctgtcagcctcctcctggctatgcccctgtgcccccacagccttttagctcccccttgtcccccctggtcccaccagccaccctcttggtgccgtatcctgtaatcgtccccttgcctgtgccagtccctattcccatccccatcccggtgcctcagagttctgaatccaagttcagctccagtttccccaagccaccatcttccttcggcctgcacccctttaaaggcacccagacccctctggaaaaagatgaactgaagccctttgacatcctccagcctaaggagtacttccagctcagccgccacacggtcattaagatgggaagtgagaacgaggccctggatctctccatgaagtcagtgccctggctcaaggctggtgaagtcagtcccccaatcttccaggaagatgcagccctagacctgtcagtggcagcccaccggaaatccgagcctccccctgagacactgtatgacagtggtgcatcagtggacagctcaggtcacacagtgatggagaaacttcccagtggcatggaaatttcttttgcccctgccacgtcccatgaggccccagccatgatggatagtcacatcagcagcagtgatgctgctaccgagatgctcagccagcccaaccaccccagcggcgaagtcaaggctgaaaataacattgagatggtgggcgagtcccaggcggccaaggtcattgtctctgtcgaagatgctgtgcctaccatattctgtggcaagatcaaaggcctctcaggggtgtccaccaaaaacttctccttcaaaagagaagactccgtgcttcagggctatgacatcaacagccaaggggaagagtccatgggaaatgcagagccccttaggaaacccatcaaaaaccggagcataaagttaaagaaagtgaactcccaggaaatacacatgctcccaatcaaaaaacaacggctggccaccttttttccaagaaagtaaataacggctttttaaaatttgtatgattataatatggggaaaggtgcattggttttataaaaaggcatttaaaacaaattatctttgttaattattttggggagtagttgggaaatggaaaggtgaattggctctagaggccctgtatgctagtatcattttcttttttaatttttgacttttcacaaatgagtaaataagagcaacctatttttcaagcagattgcacattttttgcagctttaatggaatattgggtgaattagaggggtaaaaaaagctattttcattgccacaaagtgctttgatgatgtaatacctaataaagggtaggatgaatatttcacaataaatgtttgtttgcactaaaaagggggggccggtacccaattcggccctattagtgagtcgaataccaattaaattggcccgtcgtttaccacgctggacttgaaaaaacccctgcgtacccacttaaatggccn

SEQ ID NO: 82114 - DNA, 2394 bp, Homo sapiens
  misc_feature (2394)..(2394): n is a, c, g, or t
aggcaccgcaccgggcagtctccggatctgccgttctgccccggcccggaaaacccggcgccttccaggcccttcgaaagatggattctgttgacgtatctggcggccctggcgagcctggtggaaagttgggttttgccagattgcgccgggctcctctttgtgacgcgcggccagccccgcatcccccccggagccgggcttcccaggaagaatgaagcagtcaacttgcataaggcctgtcttgacttctctcctttgggggaagaggatcacattaagaagggtggcaggcttgcctggacacagaattccactaccaaacagacatcatttctgagaacttcagagtttatgatccaggtttcccagtgattaaattactccttggaaggccaagtggcatcagagctgagtgatggacgacctgcagtcccagaacctctccatggacatgactgactcccctcctgccttggctaataacagactggagaatggcatggctcagctgatcaccaccgaggcctggaacatcaactccactgacctgcccctgtgcctcggggagagcccagtggtgatgcccattcacatgcaggtggagggaagctccgcaccagagctcaatccgaatggcaatgccacctacgtcatgaccacccagggccccgtgcaactgcccgtggtgctggagcagcacgtctttcagcacctcaactcccctctggtcctgccgcaggaggccccatgctcctccagtaccatccacaacaacctcttccagggagcggaggaccccgaggcccagccccagctcctggacctgaggatccccagccagccgcaggagcccactttgccatttgaagctgtgctccagaatttgtttccctcccagggcactctcgggcccccaccctgtcagcctcctcctggctatgcccctgtgcccccacagccttttagctcccccttgtcccccctggtcccaccagccaccctcttggtgccgtatcctgtaatcgtccccttgcctgtgccagtccctattcccatccccatcccggtgcctcagagttctgaatccaagttcagctccagtttccccaagccaccatcttccttcggcctgcacccctttaaaggcacccagacccctctggaaaaagatgaactgaagccctttgacatcctccagcctaaggagtacttccagctcagccgccacacggtcattaagatgggaagtgagaacgaggccctggatctctccatgaagtcagtgccctggctcaaggctggtgaagtcagtcccccaatcttccaggaagatgcagccctagacctgtcagtggcagcccaccggaaatccgagcctccccctgagacactgtatgacagtggtgcatcagtggacagctcaggtcacacagtgatggagaaacttcccagtggcatggaaatttcttttgcccctgccacgtcccatgaggccccagccatgatggatagtcacatcagcagcagtgatgctgctaccgagatgctcagccagcccaaccaccccagcggcgaagtcaaggctgaaaataacattgagatggtgggcgagtcccaggcggccaaggtcattgtctctgtcgaagatgctgtgcctaccatattctgtggcaagatcaaaggcctctcaggggtgtccaccaaaaacttctccttcaaaagagaagactccgtgcttcagggctatgacatcaacagccaaggggaagagtccatgggaaatgcagagccccttaggaaacccatcaaaaaccggagcataaagttaaagaaagtgaactcccaggaaatacacatgctcccaatcaaaaaacaacggctggccaccttttttccaagaaagtaaataacggctttttaaaatttgtatgattataatatggggaaaggtgcattggttttataaaaaggcatttaaaacaaattatctttgttaattattttggggagtagttgggaaatggaaaggtgaattggctctagaggccctgtatgctagtatcattttcttttttaatttttgacttttcacaaatgagtaaataagagcaacctatttttcaagcagattgcacattttttgcagctttaatggaatattgggtgaattagaggggtaaaaaaagctattttcattgccacaaagtgctttgatgatgtaatacctaataaagggtaggatgaatatttcacaataaatgtttgtttgcactaaaaagggggggccggtacccaattcggccctattagtgagtcgaataccaattaaattggcccgtcgtttaccacgctggacttgaaaaaacccctgcgtacccacttaaatggccn

SEQ ID NO: 82115 - DNA, 1035 bp, Homo sapiens
aggcaccgcaccgggcagtctccggatctgccgttctgccccggcccggaaaacccggcgccttccaggcccttcgaaagatggattctgttgacgtatctggcggccctggcgagcctggtggaaagttgggttttgccagattgcgccgggctcctctttgtgacgcgcggccagccccgcatcccccccggagccgggcttcccaggaagaatgaagcagtcaacttgcataaggcctgtcttgacttctctcctttgggggaagaggatcacattaagaagggtggcaggcttgcctggacacagaattccactaccaaacagacatcatttctgagaacttcagagtttatgatccaggtttcccagtgattaaattactccttggaagggaactcagaccttgggaaaatccagcctgttgcccatccacaggatgtcagtaaggatttcagagagtgaagaaagagaaacaaacaggcttgcacctgcacactggtgggctttggtcttttgggtgtctgcagcagctcgctcttcgactgattatctctatagtggaagctatcttggctgacccctacctcctgggtactcacctccacctatctgtgtgctcacttcgaacccctgcagctctctcctccaagacttcagtactggccctggaagcatgcttagcccaggcacaggacaagcaagaggctctggagcatatgtcaccaggagcagccctcaactgatgatgcaatgtaactggaagacagatgccgctgttttctctccctcagtagggagaaacctgaggttaactcccagtgggacttagccccagttgctcatggcagtcagctgcttattaacgcatcctgaattgtttgccttcctttcctgcctcacttctctattgttccatgggtgctgcctgtggtccccttttacatacactgtatgcactcagatcttggtcacagggtctgcctttgggggaatccaaatttaaccatgctcctccccaaggaaaaatgcttt

SEQ ID NO: 82116 - DNA, 1086 bp, Homo sapiens
  misc_feature (970)..(970): n is a, c, g, or t
aagacagttgaaccttagaagattgagctaagattctttttttggcaacctgcaagtaatgtttcatttttctattacgtgatctctttgcccatacagttggcagatgttttttccccctttttctaccttaaacttttttgtttggagtacagtctaaaccaacatcagttagccttgattttctttcttttttggacaattgtctggttcattgacaaaagtaacaagtttggaactaagagatatgttacaagctgcacttaacaccacctgaaaacccaagaatcatctgaaggttttgtcagtagtaaggtaggttttgtgtgtgtgtgtgtgtgtgtgtgtgtgtgaagatggaatagggtgaaggtgaagaaacagcttgacttgtgcctgttttcagataaaggagtaaagtgatctacaaactgtaactatcttgaaagagaaattgatcatcagatggtcgagtactcttggaatgtctctttgctgtttactgtggcctctttacaatggtgagacttatttctaccctctactttccactattatttttttcccctattggataatactagtctgagcagccctaatactagatgtacctaaacagagatacaagccaagtcattgttcagtgtagtcatttcttagtatctgtttatattttgtcacacatcagaatgtatattttatagagcatgtgtttgtctacttgtttgtctactataatatgtctttaataaagctaaaaacattctgaaaaaaaaaaaaaaaaaaaaaaaaaaaaaaaaaaaaaaactaaaacaaaaacaaacaacaaaacccaaacagcacaaaacagaaaagaccaaaccaacgagaaagggggcggagcacgctacgaacaagccaccccctgaagggggggcaccaacgttaactcacgaacacccccgcgctttacttgagacagaactgaccnagcctgataggggaggccagcgatgacagccggaagcggccgcccggacggagcgacaccgcgggcgcgtcgccaacactagccaagagactgggacgagcccacaactgtggagg

SEQ ID NO: 82117 - DNA, 286 bp, Homo sapiens
ggggaaaattttttaatcaatcaagaagaaacattttatcagaggtacattgtgactgactcagaatgctgaatggtttgctatgtaagtccccattttaatcaatgaaaaccacagaaaaggttcttggggactgaattattaatggctacacaatacttggctaatatggcataataaagtatcatagcaggatttatgtaaaaattattccacaaatttatttactgctgccactatctacttaaaagatgggtataaatttaatcttttcctcatctgaact

SEQ ID NO: 82118 - DNA, 424 bp, Homo sapiens
gaaaaccctgactaacacacctggacagagtgaacgctggcagaaagccgtcttggttcattttcctctgctctgcgggtcctgcacttacctaccctcacgtctgcctgcacagatcctcacccagggtttggaggggacagcctgggacttgtgctcacctccaccactggctggctatgtgagcttggccaagccacctctttcctctttccatgtcctcatctgcagagtggggaaagagcaatgtgcccgtcctccggttgtcctgagcctgccaggacagagtccaggggaacggccatcagtgacctgaacacagcaagggtcaaaaaactggtagctccatttcctgctcctccgtcccctggatccacctccctgtgtcctcctctgggccggggccctgccctcagatacttgc

SEQ ID NO: 82119 - DNA, 962 bp, Homo sapiens
tccctggtgacctaatttccaacatcaaggaaaatgtttcattgcacatttttaaataaactgctgcattttcctgttagctactagatccttttgaaattctcttctctcttaccgtctgtgaaaataatttcttttgatgatatactgaactatctgattagtcttggtctcctctgtgagcccttttgcctctgttaaaagatggttaatctccaaagttctatgtaagttctcctctcttataattctattccctctcactggaagggtagatgaatgcctctgactgtatctacatcagaggatgtatcttttgatctctggagttgcatgtgcaaatgcttctgtacatatctgattgcttacatcacagatctttcacaaccatcatatccaaaactgcacacatcatcttttacctccacccattattgcatactttcattaatggtctcactagctacctaactggtcaagccagaaatcctgtggtcctattgctcctttagtgctactgaaggaattctatctagaatgagaaaactgtgtattttgaagccgaaacaatctggcttaaatacagctcttggactgcttaactggtattctttggcatgtgaaaaacattatttgatcttcaagttcctcttctataaaaatggggcagcagccaggtgcggtggctcatgcctgtaatcccagcactttgggaggctgaagtgggtggattacttgaggtcaggaattcaaaaccagcctggccagcatggtgaaaccccatctctactaaaaatagaaaattagctgggcatggtgacgctatgatgtagtcccagttatgcaggaggctgagtaaggagaatcgcttgaacccaggaggcagaggttgcagtgagccgagattgtgccattgcactttaccctgggcaacaagagtgaaactctgtccaaaaaaaaaa

SEQ ID NO: 82120 - DNA, 414 bp, Homo sapiens
agattccacaaaaaaatctagatttctagcttctctggaaacacaggaatgtgtggtaataagggccaaattttcacatggcaatgatgaactggagctgaattgtcactcctccttttggactaaaccctcagttttcaccactgagcatttaatgctttcttcccttggatcaaatgtaagttgtgtggttcctagatcctatgagcatttgggtttgctaacctgggtgtcatggtaaaatagtaacttgaggtttaacactacctaaagaaaataatattaacaaataattgtatctttacatttaaaataggcaaaataattagttaccagtcatttttattctctataaatgaaatcacatatgaattgtttaaatatgtttacatttaacaaattgtgtttttcatc

SEQ ID NO: 82121 - DNA, 876 bp, Homo sapiens
aaagggcaggctggtacggcccgggagttaggatcgaacatcagagcccgcagctctcggccctgctggtggcagaggctttgtactgtgtgacaatgacctggatatggaagcagaagggagcttctaaggaccggaagctgagagtctgtctcctgtcccggcccggacactggggttcaggaaccagagcctcagtgtctgcaggagttgctggctgtttcctgatgcagttggagcagaatgggatgtcctgggacaacagagatgtttacccatcttgactagtgtggtcatctgaagaatggcctccaaagacatcctgagaacctgggaatgttgcatggatgaaggaatttgcaaaagtgattaagttaaggagcttgaaatttgtggatcatgctgggttaccccagtgagctctaaatgtaatcacatgtgtctttatgaaagggaggcagagggagatttgcagacagatgaggaggaagatgagaaaacaatggacacaagaaagaaaaggtgatgcagttcagggacccaagccaataaatgaggtgacctccagatgctggagaagggaaggaagcagatggactctagagcccccaaaagaagcagggctctgccatcaccttgattttgtcccaatgaaacccattggtcatttagctgccagaactgtgtaagcataaatgtgtgttcgtttaagccatgaaatttgcagtaatttgttaaagctgccatgggaaactaacacaactggagtggtagttccgtgaatgcatgcattcaccaaaccttaacatgtactcttcggatactggcatgataggtccatgaatgcatatgttcacccacacactaatatatacc

SEQ ID NO: 82122 - DNA, 534 bp, Homo sapiens
gtccatttaccctgatgtgattattatgtactgtatgcctatatcaaaatatctcaaatacctcataaatatatatacctactatggacccataaaaaaaaaaaaaaaaaaaagaatatactaaaggtatatcaggctgttatttctaattcctaatacacactttatttttttttcagagggtctcactcggtcactcaggctggagtgcagtggcattatcatagctcactgtagcctctaacacctgggctcaagggatcctcctacctcagcctcttgaatagctaagactacaggcatttaccaacattcctggatcttttttttttttttttttttggagaggcagggtctcgctctgttgcccaggctgatcttaaactcgtggcctaaagcgatcctcccacttcccaaagtgctgggattgcaggtgtcagccaccaagcccagctcaaatacatattttaataagctttactaacactaagtgacataaatgggcaattctttctgataacctactggtagggc

SEQ ID NO: 82123 - DNA, 257 bp, Homo sapiens
ttttttccacaagtatttttgatctgcagttgttgaatgcacagaagctgaacctgaaaatatggagggccaactgtacctaatataaataacacatttttaaaaagaaacttattttcctttaaaaaaaattagtgagtgagggcaagcgtggttgctcatgcctataatcctagcactttgcggggctgaggcaggaggaccacttgagcccaggagtttcagaccagcctgagcaacatagccttcttttattt

SEQ ID NO: 82124 - DNA, 509 bp, Homo sapiens
ggtagttctacttttaattttttaaggaaactccatactgttttccataatggtcttgctaatttatattcctaccaacagtgtataagggtgcccttttctccacttccttgtcaacacttgttatcttttatctttttgttaataaccattctaactggaatgaagttgtatttcattgtgattttgacttgcatttccctggtgattagtgatgtggagcattttttcacacacctgttggccaattgtatatcttcttttgagaaatgtcatttcagatcttttgcccattttttaatctttcttttcttgctatagagttttttcagctttttatatatcttatagatcctagatattaaccccttttggatatggaaatatagtttacaagtattttcttgcattctgtaggttgtatcttcacctgttgattgctttctttgctgtgcagaagttttttactttgttataatcccatttattttgtttttattgcctgtctg

SEQ ID NO: 82125 - DNA, 306 bp, Homo sapiens
cgcacacatgtggctctgaagggaaggacccattccttgaagtcagttcacccacagcctctgtgatgccttccctcatcttccaacttctgcatgcccgtagctctctagttacatcctggacactgggattaggtcatctgccttgattactcccagtcccattagactagatgcctgtagaaggcagggtcctggcaaaatatcaatgtattcaattgcttttatttttttgagacagacttgccctgtcccccaagctagagtgcagtggtgagatcatagctcaccacagcctccatatcc

SEQ ID NO: 82126 - DNA, 454 bp, Homo sapiens
tccctgcaggcccctgctgccttagcactcccatccccaccagccacagtagctcacccacatgggccaaggtgggtcaagtcaacgaggtcaaggcctcatctcccagagggttcccaggaaaggggcctaaagggccttataatcacctaccagacatctccatctttagggcgcatcagagcaggtgagagaatttgtaagctatggtgagtcaagagtgatcacaaaaaactcaaattcttattcttctcataagttctatcacttgtctctttggagctttctacctctaggcaaaaaggagtgaagtctcaacaatgtaatgggttggaccaaactactgagtactcattacatactgagcccaccagtatgggcaccagccagggagtaaatggcaccatttactccatggcctgtggcctctccttttaggtctaacaatggacag

SEQ ID NO: 82127 - DNA, 233 bp, Homo sapiens
gtgtatatctggtgtctccccaaggagaatgtaagctccttaatgatagattgcttacacttctgtgttatcttccctcagtggtaataatggatgttcattcaatagatatttattaagaatgatggctgggtgtagtggttcacgcctgtaatcccagcactttgggaggccaaggtgggaggattgcttgagtccaggagttcaagaacagcctgggcaacatggcgaaa

SEQ ID NO: 82128 - DNA, 557 bp, Homo sapiens
tttgattttgcatgtgctaatcacccgaagacagtaacattaaaaaaaaaaaaaaacaaaaaacccaagcttaagaaagtcaaatagtacaggttactgaaaaagtataggaaaaattgatgtttggtactgttgcggatactgtgtccatattatggtaatatatgccttttcttatgtgagtaatacacagtttagcattcacaattttattaccttatcaatgtagtttacatgtttctgcgagtatcacaattaaagcagtcacagtttttaaagctatattcatgaatttaatctttttcactttcctgtaagacagagtcaagtagacctttaaaagtaatcagtttgcattcaggtactttaagacttgctttaaatcaggtaattttttttcatgtagacataccaatcaattttcattaattgacttgtaaactatcatcagaatgaaatactgtgataactaaagttttcagttatcaagtttgtgttaagtgaagttcttacctcttgcttcagtctttagacttgtcctacatattccttgtaaa

SEQ ID NO: 82129 - DNA, 781 bp, Homo sapiens
  misc_feature (766)..(766): n is a, c, g, or t
ttgagatggagtttctcttttgttgcccaggctggagtgcaatggcgtgatctcggctcactgaaacctccgcctcttgggttcaagctattcttctgcctcggcctcccaagtagctgagattacaggcatgtgccaccatgcccagctagctttgtatttttagaagagatggggtttcactacgttggtcaggctgctcttgaactcctgacctcaggtgctccacccacctcggccttccagagtgctgggattacaggtgtgaaccaccgcgcctggctggaattttcttccttctcaatttgtttgcagtgtggctaggcagatgagataatagatagtctctgtttcagtttttctccaattgtataccctaaggtccttgctaaataaatccagctttgaattaattatcctgtccttccttggcttcccatctttactgtcataaaatactacctgttggctcgagctgctgggtgggtggtcatacatctcttctttcctaggtctgaaggtaactgtggtgttaattatgaaagtactgtcaattgccgaaagtgccccatgctttcccctccccacctttccctcttgttttacaacagtggttgtggggtgaacacaaggagtgtagtctgctttacaagatgtttagtcaatagttgtagacaaatgtaaataacagcaggtgatcaactatgggacaaatgcataggagagaaattgcagaaattgtgtaacttttattttgatcctgtanttttaagcacagctt

SEQ ID NO: 82130 - DNA, 527 bp, Homo sapiens
ttccgcaccatggtagctgtgttcttttactctttgcaataaatcttgctgctgctcactgtttgtatccacactgtctttgtgagctgtaacactcactgcaaaggtctgcagcttcgccaagccagcgagaccacaaacccactagcaggtagaaactctgaacacatctgaacatcagaaggaacaaacttcggacacgccggcctttaagaactctaacactcaccatgagggtctgcaacttcattcttgaagtcagtgagaccgagaacccaccagttccggacacaatgagacttattcactatcatgagaatagcatgggaaagaccagccccatgattcaattacctcccactgggtccctcccacaacacgtaggaattcaggaagacacaattcaagttgagatttaggtggagacacaggcaaaccatatcagtgagtttcattatattttcgtatttaatggctatttgcatgtctgtttctataaattgctggtacattcttttttgccgtaa

SEQ ID NO: 82131 - DNA, 408 bp, Homo sapiens
aagtgctttgagcattgtgttttttttaaaagataactagactttcaagagatttcactctcgcctggggctgcttccgggtatattctcagacttaccagctctccctgccagtccaaccacactcccactcccacgcccaccatgagttcattctggcctaaaattaggagtatttctgtagaggagtgtgaaatgtaaaaagctagatattattatatagaaatattcaattgcatttaaaatttattagcagtagttaccaataggattatcaataaacaagaaagcagcaactctggagtcctgccatgccaggcatatcctagactagaggaattcactatttagaaagacttgaaagtcctaagtgccacaaagattagtttcattgggactaaaaaaaaa

SEQ ID NO: 82132 - DNA, 331 bp, Homo sapiens
ctgagtaggggacactgtaaacaattatctgaaggaatacataaactataaataaaaaaaatacaggggagcttagtaggagcaatctcattaaagtggcatagacagaactatactgccaaaggctatgaagtgaacagaaatccaagtagaggccagagaacacatttaagaagtttagaagaaacagaaaaagaaacagaggaccctagacttgaagaggcacaattaaaagatggttgcttaagatctcagatacttgggcatgttaaaaagctgaaggaaaaagagtcaatgttgtacacaataaatatatataattttacctgtc

SEQ ID NO: 82133 - DNA, 484 bp, Homo sapiens
tggggttcttgtcctaacctgacagatcagaaaactgaagtccttccaaaatggatgacttaccttacctaagatcactaagaattgaacgagtgagaggatgagggtctaagtcttcctgctcaggggctggttgaagaatcagagagaagaaagggggcctcgtagacccacacacagcatgagcaatggtataacatggtgtcaggggaaccttgcatggtttggagaagagccccagtgtgaaaggacccagcactgtgcctcgtacatggcagatgctcagaaaactacccttccccttctttcagccgcaagaaccactgcttcggtttcccacactgcctggccaccatcatgccaccttctaggttaaggggtgtttgggcagatacttggttttggtaggggtgtgagagaagggagacaggttgtcttgtgctccttacccaagtcgggatccatctttcctagctctgattgt

SEQ ID NO: 82134 - DNA, 685 bp, Homo sapiens
agctttctcaacaataattttgactaagattccctttggttactgccacctagaactgatttaacatccctgaactagaggatgagtcccccccaccgcttgaacttatataaaggttgagaaatttctgaaagttttttttatgaccaatgcaagtctgcatatagtgtgaattctcacttgggtattttggattttagaactgaaacttcaaatttgtatgtcaaaacatttacagaaatgttcaaggttttcagttattcttgaataaatgttcctaactaatacccagataaagcctttgtggggaaatgataatctaaatatctggatacttctaactttactttgccagttaaggtttgttaagaaaattaaacatctactatcactaacatttcatataagaaatgaacaagggctgggcacggtggctcacgcctgtaatcccagcactttgggaggctgaggcgggcaggacacgaggtcaggagatcgagaccgtcctggctaacgtggtgaaaccccgtttctactaaaaatacaaaaattagccaggcgtggtggcgggcgcctgtagtcccagctactctggaggctgaggcaggagaatggcatgaacctgggaggcggagcttgcagtgagctgagatcgctactgcaacagcgagactccatctcaaaa

SEQ ID NO: 82135 - DNA, 368 bp, Homo sapiens
tcctgtatccttgtactgctccatgacattgacatgtgatgtgttttatttctgcccgactctttactgaaccctttctacgctcactgaaacctggagtaggtgatggctttgagtaggaaatgactttgtgagtttcttccgtaaaaggcatgtgacagtacagggtcagaaggtggagtgatgcagtaacctgtgtggcaaagttttcaagcatttaaaaatatatgtgaaagccctaaacatagtacttagaccacagaagacaatcagtagatgttaggcttttctcccactcagaatacaaacaaatatattttgatacactatccagtttctaacctcaggtggtctttcaaaaccgaagt

SEQ ID NO: 82136 - DNA, 889 bp, Homo sapiens
cacctggagagtcggggcggcacgttgagaccccaggggtgaagggcgggggatcccaatcccagccctgttttcccctcccctttcacggtgaacactcatgatacatgtgttccaccattggttggaaaaggtgactaggaagttgtccttaggcattataattataagacgtcatttagtagaatagcaagatgagttgacaaggaggatgagttgcgctaggacgtgctaagcgttgttgtagctacgaaagggggaatactactgtagagagtggtcgactcgacagaaaataacattaaaaaaatgtatataaaaaaataaatttggaaaaaagaacacacggccacagtgatagccaaataccaaaaatgaacagatacagcactatacgcaaccaaaccaacaccatggactactaagacaacaaaacaaaaaatacgacgaaaggaagaaactgaagctacaagagaaataacatccaaacgaacgacaacactgaacacacagaaaacccacaggcgaacacagagacgcgacaaacggacacaacaaagacagaacggccaactggcaaggcgacaaacgagacacaaaaaaaagcaaaaaggaataaacgaggaaacactaaatgccctgaagctaggaatgcaacaggcagtaaccaaccacagagcacgcaaaacacccagggatcgaacaaaaataagcaacaagacggaacgatgacagcagaacacaagagatcagaaaatcaacaaacacatagaagaaacaggcgccacgaaccacaacaacaatacacaaaacgataagtagaagaatgacaaaatagagacggagcaagacatcaccaacgaacacagacaataagaagaagagaaag

SEQ ID NO: 82137 - DNA, 1011 bp, Homo sapiens
acctcagcctcccaaagtgctgggattacaggcatgagccaccgtgcccggccttctttacatttttattgctcacagtcaaacattcctattgattgtaaaataagcaaacctagagttgtggagatttatatgtatttatttatttgaattgagacagggtcttaaactcccaggctcaagtgatcctcctgcctcaacctcccaaagtgctgggattacaggcatgagctagctggcctgttgacttttttttttaactctaacaatttctgttttatagtgaacataatagtataagacttagtttatatatttgacttacaaataaatcctggggagaggggagtatgtgtaaaacataattcagagcagccttctttgagaaagtgggtgtgtttggctgtgtaacaaaacaataaggggatgtgtttgctgtgtaacaaaacaatgaaggatttaagcaggatatttttgcctcatatgttaaatccaagtgaggttgctgtggtggttggtttagctctcagtgatgccttttttgtatttttccgctctgctgtccatgacatatttctaacacctttatgattattgttcctgcttgtaaaagggctgatatttacatgagtgcaaggcaggaagaaaaggtagctgtgccagccacttctggcaagcagttctcccaccttagcctcccaagtagctgagaccataggcatgagatttctcaaaattcctcccagcaggctttcacttagtttcattgttgagaactgtgacaggtccatctctagctgcaaaggaggctgagaaagtgaacacagcagtcctccttatccttggggaatacattccaagagtggatccctgaaacagcagatagtactgaaccctatatatactatgtttttgcctatgtatatatacttgatatggtttggctgctacccaacccaaaatctcatcttgaattataatccccaaatccctatgtgttaagggtgggac

SEQ ID NO: 82138 - DNA, 579 bp, Homo sapiens
acctcagcctcccaaagtgctgggattacaggcatgagccaccgtgcccggccttctttacatttttattgctcacagtcaaacattcctattgattgtaaaataagcaaacctagagttgtggagatttatatgtatttatttatttgaattgagacagggtcttaaactcccaggctcaagtgatcctcctgcctcaacctcccaaagtgctgggattacaggcatgagccactgcacccaaccagttagttatttttcataggctcatcttttagtctttctagtcaagatgtgagtagtttacacatcacagttacagtgttacaacattgtgttgttctgtgtgcttactgttaccactgagttttatccttttagatgatttcttattgctcctcagcatccttatttttcagattgaagaaccctctttaacatttaactttagggatgactgattgttgttgaaagttttgttttccaaccagtttttgtaattacgtacttctctgggtcccttttgtagttagacttggatgtgatgatatgcttcctctaacatgttcctttcccggg

SEQ ID NO: 82139 - DNA, 499 bp, Homo sapiens
gtgaaaacagggaagtagatgcccagagagagaatggagaacaaacagagaaggaagccaagaacaacctccaaggaaaacacaacattcaaggtacacgtaaaagaatagaagccagtaaagtagagaaagaaggacaaatcagagaggagaagagccatgagatacctctcagaagccatggtattaaacatctccagtgccccagttaagtcaaataaggtgggaagtggaaactgacgaagtttattggacttggcgctttcgaagtcactggaaattaccaccacagcaatttcagtagattagcaaggtgttgactagagtaccattaagagtgattgaaaggtaaagagatgaagacaacaaacaaaggctattcttctaagaaatttatcatgaagataagaagaaaagcaatgaaatgcagatcgacatcttcattttggacatctagtctctagaactctggaacaataaattcctgttgattataaaa

SEQ ID NO: 82140 - DNA, 1032 bp, Homo sapiens
ccttcatttctccagcactaaaatggagtggagagttggggtggaaataagacatccttaaaaggttaaattgtctgcaaagcacctagcccagtgccgagctcccagtaggtgttcagtaaagcttagtgcctgactttctgaacactgattcctcctgtttggagtcactgggatactctcattgccgttgggatgttcctcactccttcccagttcgtggctgaggcagaacccagactgaagagggaagagacattccagaggaggattgccttcgtcagggtaaggggtgggctgctcaggggccctacccttcacccccttctgtatcagattggccctcccactcccatctcactctgcgtgtacaatcttccatatccgcaagttcactggcactcttctggcacctgggcaagatcccagaacagaggatggagtgactggcctcacagagcttagtgcccgactcaggggaaatgggactggtgcatgggaaatggtcagcctaggataggacacgagagtctgaaattcaaagcaaccagcttgaagtggtttgagaagctggaagcaaacatgggctagagagatagggcagaagtcaagacgaggatctggactgatgtggagaaagtagccacggaagcatgaactgtatcctgcacaaagtccctcttccccgcctcctaattcattatgcccaaaaggccttacgtgaaattccagcccagagtactcatgacttgagagacgtggacagagccagcttctaccttgcctggccgtctctcccctgtcttaatgtctgctcttgctctaagctccagaagagtggcgggccatgtatcttcaatatgtttttgctgtatgggcaggttgtcttattatgtgatcaacagatgtccaggaactaatgagtggaatttaatattattgtcaaataaaacttgatttgtcctatatttaatgaccagtagttactttgctgcatgaccctgctagttggacagtttatataaatcattt

SEQ ID NO: 82141 - DNA, 3381 bp, Homo sapiens
gctgcggctcgccgcgcggctccagctggggcgcggtggtcccgacggtcacccgaatcgcagggagtcgccgctggagaggggctcggcgcccggcggggactgcaggcgatgacccaggatgcagccaggggccacgacatgcacggaggaccgcatccagcatgccctggaacgctgcctgcatggactcagcctcagccgccgctccacctcctggtcagctgggctgtgtctgaactgctggagcctgcaggagctggtcagcagggacccgggccacttccttatcctccttgagcagatcctgcagaagacccgagaggtccaggagaagggcacctacgacctgctcaccccgctggccctgctcttctattccactgttctttgtacaccacacttcccaccagactcggatctccttctgaaggcagccagcacctaccaccggttcctgacctggcctgttccttactgcagcatctgccaggagctgctcaccttcattgatgctgaactcaaggccccagggatctcctaccagagactggtgagggctgagcagggcctgcccatcaggagtcaccgcagctccaccgtgccaagaccctggcagagcttgaggacatcttcacggagaccgcagaggcacaggagctggcatctggcatcggggatgctgcagaggcccggcggtggctcaggaccaagctgcaggcggtgggagaaaaagctggcttccctggggtgttagacactgcaaaaccagggaagctccacaccatccccatccctgtcgccaggtgctacacctacagctggagccaggacagctttgacatcctgcaggaaatcctgctcaaggaacaggagctactccagccagggatcctgggagatgatgaagaggaggaagaggaggaggaggaggtggaggaggacttggaaactgacgggcactgtgccgagagagattccctgctctccaccagctctttggcgtcccatgactccaccttgtcccttgcatcctcccaggcctcggggccggccctctcgcgccatctgctgacttcctttgtctcaggcctctctgatggcatggacagcggctacgtggaggacagcgaggagagctcctccgagtggccttggaggcgtggcagccaggaacgccgaggccaccgcaggcctgggcagaagttcatcaggatctataaactcttcaagagcaccagccagctggtactgcggagggactctcggagcctggagggcagctcggacacggccctgcccctgaggcgggcagggagcctctgcagccccctggacgaaccagtatcacccccttcccgggcccagcgctcccgctccctgccccagcccaaactcggtacccagctgcccagctggcttctggcccctgcttcacgcccccagcgccgccgccccttcctgagtggagatgaggatcccaaggcttccacgctacgtgttgtggtctttggctccgatcggatttcagggaaggtggctcgggcgtacagcaaccttcggcggctggagaacaatcgcccactcctcacacggttcttcaaacttcagttcttctacgtgcctgtgaagcgaagtcatgggaccagccctggtgcctgtccaccccctcggagccagacgccctcacccccgacagactcccctaggcacgccagccctggagagctgggcaccaccccatgggaggagagcaccaatgacatctcccactacctcggcatgctggacccctggtatgagcgcaatgtactgggcctcatgcacctgccccctgaagtcctgtgccagcagtccctgaaggctgaagcccaggccctggagggctccccaacccagctgcccatcctggctgacatgctactctactactgccgctttgccgccagaccggtgctgctgcaactctatcagaccgagctgaccttcatcactggggagaagacgacagagatcttcatccactccttggagctgggtcactccgctgccacacgtgccatcaaggcgtcaggtcctggcagcaagcggctgggcatcgatggcgaccgggaggctgttcctctaacactacagattatttacagcaagggggccatcagtggacgaagtcgctggagcaacctggagaaggtctgtacctccgtgaacctcaacaaggcctgccggaagcaggaggagctggattccagcatggaggccctgacgctaaacctgacagaagtggtgaaaaggcagaactccaaatccaagaagggctttaaccagattagcacatcgcagatcaaagtggacaaggtgcagatcatcggctccaacagctgcccctttgctgtgtgcctggaccaggatgagagaaagatcctgcagagtgtagtcagatgtgaggtctcaccgtgctacaagccagagaagagcgacctctcctcaccaccccagacgcctcctgacctgccggcccaggccgcacctgatctctgctcccttctctgcctgcccatcatgactttcagtggagctctgccctagtgtgggcccagcgccagactggacagaagccctggggcaacctcctcggccacccctccaggacagtccctctctgtggagaactgaatggccctgtgcagagccatagtcccactgtgggtcctgcaatgagcaggggctgggagtagagggtttctggggcctcagggttctgggaaagcaacagctatcagagagagaagggccagaccccatagcctcttagattcctggcagtagaaggagaaggatgggtaaattgacctctgaagtccctgaccattagcatggtctaggatcctttctagaaggaagatctgaggctctggtgctcagggggatggcttgggccttttctctcaaccttggctgagcctaccccttactttgccaaagacttgaggaccctgtatgtctggagttcagtcccctcctctgtggggctcaggtgattgaaatgtggatgaaacatttctctacttcaagaccacctctccctgcaaacaccacacacacatggcatgcatgtacgcacatgcgcacacacacacgcacacacctcaataatttctctcaagtttcctgagttccagaagagtggcgggccatgtatcttcaatatgtttttgctgtatgggcaggttgtcttattatgtgatcaacagatgtccaggaactaatgagtggaatttaatattattgtcaaataaaacttgatttgtcctatatttaatgaccagtagttactttgctgcatgaccctgctagttggacagtttatataaatcattt

SEQ ID NO: 82142 - DNA, 384 bp, Homo sapiens
tgttggaggtggaggtggggatatgactcgtgaggtgtaaaaggacgcatagaagcaaactgctaggcaccctggagggtccacagaacagcttctctgcaggttcgcctgagctccatccgggaatttccaacctgattgtccagtgcttggctccccacgaggcacacggacgatgctgaaggaactgatcagcccatgaactcttttcttcttgacccacagggatctcctaccagagactggtgagggctgagcagggcctgcccatcaggagtcaccgcagctccaccgtgtgagtgctcttgggggacggagaaacagtggggagggagtttgggacccctgcactgttccaccttcaccctcctcccccactcaaac

SEQ ID NO: 82143 - DNA, 3502 bp, Homo sapiens
aagcttactcagcgcatctgctacagcattttatcttcccaagagccccatgaggcgatgacccaggatgcagccaggggccacgacatgcacggaggaccgcatccagcatgccctggaacgctgcctgcatggactcagcctcagccgccgctccacctcctggtcagctgggctgtgtctgaactgctggagcctgcaggagctggtcagcagggacccgggccacttccttatcctccttgagcagatcctgcagaagacccgagaggtccaggagaagggcacctacgacctgctcaccccgctggccctgctcttctattccactgttctttgtacaccacacttcccaccagactcggatctccttctgaaggcagccagcacctaccaccggttcctgacctggcctgttccttactgcagcatctgccaggagctgctcaccttcattgatgctgaactcaaggccccagggatctcctaccagagactggtgagggctgagcagggcctgcccatcaggagtcaccgcagctccaccgtcaccgtgctgctgctgaacccagtggaagtgcaggccgagttccttgctgtagccaataagctgagtacgcccggacactcgcctcacagtgcctacaccaccctgctcctgcacgccttccaggccacctttggggcccactgtgacgtcccgggcctgcactgcaggctacaggccaagaccctggcagagcttgaggacatcttcacggagaccgcagaggcacaggagctggcatctggcatcggggatgctgcagaggcccggcggtggctcaggaccaagctgcaggcggtgggagaaaaagctggcttccctggggtgttagacactgcaaaaccagggaagctccacaccatccccatccctgtcgccaggtgctacacctacagctggagccaggacagctttgacatcctgcaggaaatcctgctcaaggaacaggagctactccagccagggatcctgggagatgatgaagaggaggaagaggaggaggaggaggtggaggaggacttggaaactgacgggcactgtgccgagagagattccctgctctccaccagctctttggcgtcccatgactccaccttgtcccttgcatcctcccaggcctcggggccggccctctcgcgccatctgctgacttcctttgtctcaggcctctctgatggcatggacagcggctacgtggaggacagcgaggagagctcctccgagtggccttggaggcgtggcagccaggaacgccgaggccaccgcaggcctgggcagaagttcatcaggatctataaactcttcaagagcaccagccagctggtactgcggagggactctcggagcctggagggcagctcggacacggccctgcccctgaggcgggcagggagcctctgcagccccctggacgaaccagtatcacccccttcccgggcccagcgctcccgctccctgccccagcccaaactcggtacccagctgcccagctggcttctggcccctgcttcacgcccccagcgccgccgccccttcctgagtggagatgaggatcccaaggcttccacgctacgtgttgtggtctttggctccgatcggatttcagggaaggtggctcgggcgtacagcaaccttcggcggctggagaacaatcgcccactcctcacacggttcttcaaacttcagttcttctacgtgcctgtgaagcgaagtcatgggaccagccctggtgcctgtccaccccctcggagccagacgccctcacccccgacagactcccctaggcacgccagccctggagagctgggcaccaccccatgggaggagagcaccaatgacatctcccactacctcggcatgctggacccctggtatgagcgcaatgtactgggcctcatgcacctgccccctgaagtcctgtgccagcagtccctgaaggctgaagcccaggccctggagggctccccaacccagctgcccatcctggctgacatgctactctactactgccgctttgccgccagaccggtgctgctgcaactctatcagaccgagctgaccttcatcactggggagaagacgacagagatcttcatccactccttggagctgggtcactccgctgccacacgtgccatcaaggcgtcaggtcctggcagcaagcggctgggcatcgatggcgaccgggaggctgttcctctaacactacagattatttacagcaagggggccatcagtggacgaagtcgctggagcaacctggagaaggtctgtacctccgtgaacctcaacaaggcctgccggaagcaggaggagctggattccagcatggaggccctgacgctaaacctgacagaagtggtgaaaaggcagaactccaaatccaagaagggctttaaccagattagcacatcgcagatcaaagtggacaaggtgcagatcatcggctccaacagctgcccctttgctgtgtgcctggaccaggatgagagaaagatcctgcagagtgtagtcagatgtgaggtctcaccgtgctacaagccagagaagagcgacctctcctcaccaccccagacgcctcctgacctgccggcccaggccgcacctgatctctgctcccttctctgcctgcccatcatgactttcagtggagctctgccctagtgtgggcccagcgccagactggacagaagccctggggcaacctcctcggccacccctccaggacagtccctctctgtggagaactgaatggccctgtgcagagccatagtcccactgtgggtcctgcaatgagcaggggctgggagtagagggtttctggggcctcagggttctgggaaagcaacagctatcagagagagaagggccagaccccatagcctcttagattcctggcagtagaaggagaaggatgggtaaattgacctctgaagtccctgaccattagcatggtctaggatcctttctagaaggaagatctgaggctctggtgctcagggggatggcttgggccttttctctcaaccttggctgagcctaccccttactttgccaaagacttgaggaccctgtatgtctggagttcagtcccctcctctgtggggctcaggtgattgaaatgtggatgaaacatttctctacttcaagaccacctctccctgcaaacaccacacacacatggcatgcatgtacgcacatgcgcacacacacacgcacacacctcaataatttctctcaagtttcctgagttccagaagagtggcgggccatgtatcttcaatatgtttttgctgtatgggcaggttgtcttattatgtgatcaacagatgtccaggaactaatgagtggaatttaatattattgtcaaataaaacttgatttgtcctatatttaatgaccagtagttactttgctgcatgaccctgctagttggacagtttatataaatcattt

SEQ ID NO: 82144 - DNA, 3215 bp, Homo sapiens
aattaagttcaattttgaaaagatctttgaaaacaacagctgaaaaatgctcagcagtgaaccccacgctttcccctggaaacctggaccctggagctgttgcttctgtcctggcctcctgtggtcacctcctcgagctctgcctgggcttgaggaggccctggtctcagtggagctgagcaccagcaggcacgaggggggtggctgcactgtggcatgctgcgcacccctgggtgccatagccggtcccctgtgtccccagcaccgtgctgctgctgaacccagtggaagtgcaggccgagttccttgctgtagccaataagctgagtacgcccggacactcgcctcacagtgcctacaccaccctgctcctgcacgccttccaggccacctttggggcccactgtgacgtcccgggcctgcactgcaggctacaggccaagaccctggcagagcttgaggacatcttcacggagaccgcagaggcacaggagctggcatctggcatcggggatgctgcagaggcccggcggtggctcaggaccaagctgcaggcggtgggagaaaaagctggcttccctggggtgttagacactgcaaaaccagggaagctccacaccatccccatccctgtcgccaggtgctacacctacagctggagccaggacagctttgacatcctgcaggaaatcctgctcaaggaacaggagctactccagccagggatcctgggagatgatgaagaggaggaagaggaggaggaggaggtggaggaggacttggaaactgacgggcactgtgccgagagagattccctgctctccaccagctctttggcgtcccatgactccaccttgtcccttgcatcctcccaggcctcggggccggccctctcgcgccatctgctgacttcctttgtctcaggcctctctgatggcatggacagcggctacgtggaggacagcgaggagagctcctccgagtggccttggaggcgtggcagccaggaacgccgaggccaccgcaggcctgggcagaagttcatcaggatctataaactcttcaagagcaccagccagctggtactgcggagggactctcggagcctggagggcagctcggacacggccctgcccctgaggcgggcagggagcctctgcagccccctggacgaaccagtatcacccccttcccgggcccagcgctcccgctccctgccccagcccaaactcggtacccagctgcccagctggcttctggcccctgcttcacgcccccagcgccgccgccccttcctgagtggagatgaggatcccaaggcttccacgctacgtgttgtggtctttggctccgatcggatttcagggaaggtggctcgggcgtacagcaaccttcggcggctggagaacaatcgcccactcctcacacggttcttcaaacttcagttcttctacgtgcctgtgaagcgaagtcatgggaccagccctggtgcctgtccaccccctcggagccagacgccctcacccccgacagactcccctaggcacgccagccctggagagctgggcaccaccccatgggaggagagcaccaatgacatctcccactacctcggcatgctggacccctggtatgagcgcaatgtactgggcctcatgcacctgccccctgaagtcctgtgccagcagtccctgaaggctgaagcccaggccctggagggctccccaacccagctgcccatcctggctgacatgctactctactactgccgctttgccgccagaccggtgctgctgcaactctatcagaccgagctgaccttcatcactggggagaagacgacagagatcttcatccactccttggagctgggtcactccgctgccacacgtgccatcaaggcgtcaggtcctggcagcaagcggctgggcatcgatggcgaccgggaggctgttcctctaacactacagattatttacagcaagggggccatcagtggacgaagtcgctggagcaacctggagaaggtctgtacctccgtgaacctcaacaaggcctgccggaagcaggaggagctggattccagcatggaggccctgacgctaaacctgacagaagtggtgaaaaggcagaactccaaatccaagaagggctttaaccagattagcacatcgcagatcaaagtggacaaggtgcagatcatcggctccaacagctgcccctttgctgtgtgcctggaccaggatgagagaaagatcctgcagagtgtagtcagatgtgaggtctcaccgtgctacaagccagagaagagcgacctctcctcaccaccccagacgcctcctgacctgccggcccaggccgcacctgatctctgctcccttctctgcctgcccatcatgactttcagtggagctctgccctagtgtgggcccagcgccagactggacagaagccctggggcaacctcctcggccacccctccaggacagtccctctctgtggagaactgaatggccctgtgcagagccatagtcccactgtgggtcctgcaatgagcaggggctgggagtagagggtttctggggcctcagggttctgggaaagcaacagctatcagagagagaagggccagaccccatagcctcttagattcctggcagtagaaggagaaggatgggtaaattgacctctgaagtccctgaccattagcatggtctaggatcctttctagaaggaagatctgaggctctggtgctcagggggatggcttgggccttttctctcaaccttggctgagcctaccccttactttgccaaagacttgaggaccctgtatgtctggagttcagtcccctcctctgtggggctcaggtgattgaaatgtggatgaaacatttctctacttcaagaccacctctccctgcaaacaccacacacacatggcatgcatgtacgcacatgcgcacacacacacgcacacacctcaataatttctctcaagtttcctgagttccagaagagtggcgggccatgtatcttcaatatgtttttgctgtatgggcaggttgtcttattatgtgatcaacagatgtccaggaactaatgagtggaatttaatattattgtcaaataaaacttgatttgtcctatatttaatgaccagtagttactttgctgcatgaccctgctagttggacagtttatataaatcattt

SEQ ID NO: 82145 - DNA, 375 bp, Homo sapiens
tgcagtgtttgttaacttgttcctgtctacttgttgcctgtgaactggaagttaaatctaaagccttgattaggccaagcatggtggctcacggctgtaatcccagcactttgggaggccgagccaggtggattggcctgaggtcaggagttcgagaccaacctggccaacatggtgaaaccccatctctactaaaaatgcttggctaatttcttttcatttatatttttttttgtagagatggggtcttgctatgttgcccaggctggtcttgaactcctggtctaaagagagcctctcaccttggcctctcaaagtctcaaaagtgctgggattacaggtgtcagccactgcacctggcccccgtcctgcatt

SEQ ID NO: 82146 - DNA, 425 bp, Homo sapiens
gtgtccaaattagcataggcttgtaagagtgtaaacaaatgatatggccaaaagagtaccggacatgggatcagaagacctggtccagcctagctgtactccttactgcttgtgtggctctggataggacactcctgagcttccacctcactttcctacattgtgagcacaaacacacctacctggaagaattgtaagggctgagtaggttcatgtgtatcattgtacccagcataggaagctttttataagtagttgaaataattgattggtgaagtgaacatagagaattctgtctcttatccttcttgtccctgggagtagaaagcctgcttttggtagatacctaaggcagaaatagttctggggaagtggggagaaacagggtggggcagtgcgtttctcactttgcagatcttcctggg

SEQ ID NO: 82147 - DNA, 471 bp, Homo sapiens
cacctcccacctgccacaggtgtgggtagagtggactgctgaggtcatggacaaaagcctgcaggcaaaaagaagaagatattggcagttagaagtggctctgagcctgctggagggttccagggctatgtggagggcacgaacagcatctgctcccctggggatgatgacaggtgacactgggtgactcagatcttcttgccataacatggagacacatggttagaaagccagtccattgtctcaaggagaagagtcccagtttggtgctaataatcttaacacctttccaacactgttcatctccatctggaaccaagaaagagccagccttgggcctagtgtctttggtaggccgtcgtatgtacctacctgcaattgatgatgttgctttggtttctacttaatgttttccaataaacttaagcatataaagtttgctgttgaaataaatttatatagttaaaaaat

SEQ ID NO: 82148 - DNA, 1023 bp, Homo sapiens
aaaaataaaaagaatgaattataccaggtatttgatagaacaaggtgactaccgtcaaaacaatttaattgtgcattttaaaataactaaaagagtataattgggctgtttgtaacacaaacgaataacacttgaggggatggatacctaattttctgtgataggatcatgcattttatgtctgtatcaaaatatctcatgtacctcgtagtatacctactatatacccagaaaaattaaaaattaaaaactaaagaaagaaataattgcaaaatgtaataatgtctttgaggggaaaataaaaacttcagtgaaatactctaagaggggtttgatgcagagctgggggatgtgggaaagtagagataggaaagttgaggagggagggatgggttacagtttgccaaggacagaattacttgagagggtgggagcaggacacacatgtcagggcctctggaacaggaagaggttggtttatggcagaaattgaaagaatgctctcatacacagctcactttcctccttgctttttgtctgcatagcattattcaatatgtagcataatataagttgaaatcatatatcacctttgtggtcttctcccaccagaaatcaggcattatgaaggcagaagggcagaggtatttgtcgtgtgtgtgtgtgtgtgtgtgtgtgtgtgtgtgtgtgtgtgtgtttgacttttgtatttttgctgccgtattcctggtacctggaatagcacttggcagacaaatgtatgcaaagttattcaaatccagtgggaccagaccacagtgaggacagtcaacaagggagggcagggaatgagcgctgtcagggagggtggagtccaggtcactggggttgctgtaagcatgttctgaatttatatgttatccaaagtataatagaaaacactgcattaaaccagacatgtcatatagttaccatcttttctttttctaaaagagaattattgcaatttatttccttattaagtcaatttagattaggttgcac

SEQ ID NO: 82149 - DNA, 341 bp, Homo sapiens
tctggatgaattaacacttgagttagtaatctgaataaagcaaattgccctccctaatgtggacgggccccatccaatcagctgaaggcctgaaaaaaaaacataaaagctgaccctcttgcaagtcagaaggaattcctcctacctgctgccttcacgttgagacatcggtttttcctgtttccagactctgctatagactgaatgttggtatcccccaaaactcatatgctgaagccctagcccataatgtgatggtctttggaggtggggcctttgagaggttattaaatgagatcatgaggatggggcccccgtgatgggaatagaacactattccc

SEQ ID NO: 82150 - DNA, 866 bp, Homo sapiens
aactgtcgcggccgccgccaacatggccgagaccagcgaggaggtggcggtgctggtgcagcgggttgtgaaggacatcactaacgccttcaggaggaacccacacatagatgaaattggcctgatcccatgtcctgaagctaggtataaccggagtcccatagtcctggttgaaaacaaactgggtgtggagagctggtgtgtcaagttccttttaccatatgtccacaacaagctccttttgtacagaacaagaaagcaatggctgaacagagatgaattgatagatgtcacatgtaccctgctgcttctaaacccagactttaccactgcatggaacgtgaggtatgtcattttcattagtgatatgataaagtttgtccaaatttctgaagacatgtaagccccataagttgttagcttttgaaaacgaaatataaaccattttacacttatttcttctccctattctttatacctgtgacaattctaaataggcattttgcccctttttgtgtggtgtcttcataaactttcttgcctgaaatataaattgtcatgttgagttacagtatactgtttgatacatgcttttattttccttcattttttggggtgggagactaatgggcaatgggcataactggttggcttataaggcatataacattatatcattggtatttgagaagcactgcagtgtagtggaaagtgtatgggatgagaaagagggagtcatgcttgcctctggctttttccctgagcaactgaaaggatggaattgccatttactgaaatggcagtgtctggaagagaaacagatttaggtaggcggtgtttgttataggccaagagttcagattggg

SEQ ID NO: 82151 - DNA, 2752 bp, Homo sapiens
gtaatgtctgctttcttatatttgcccttttgtaagtggtctgtttcttcttttcatatactttgttttgccaatccattacgtattttttgtcacttttgtgtgtcatttttgtatacctttcctttcttacttcaggggtgtgtcttcaagatttctaccccctatttgcaatgaatttcatacctcatctaaaatacattcatataccagaaatatgaagagtggcccttctaaaagtttccctaatgatggaagctgtcagttgtcctatctgtgcagaatgtgagtaatagtggcagaaataagtgtgacaacaatgctttgcctgttgttctttttacttgctaggtaatttgtaaagtggggataaagatgtagggaaagtaaacctctctctcactgttacggaaagcctggacttgagttaggtagactgccttaaagaagaagaaatatgtccttttctttggcatcatggttttgttgagtggcagactgttgaagtgagttgagacttaagaacgccagaaaagttgtctagcctggccccagtagacagaatttgttcttctctcaagtaaaaaattacctttttatagcttttatattatttagatgaaaaaataccattatgaacataattccatggccctttgtgtacaaagcatattttgaattaaatacctcaaggtccacctagactctatgggtaaaatcataagtttatgatttttagctcctgtgagtgtttgggggcaaactacacagagaagacatgggtggttcagcccattccactaaaatatgttgccagattctggcctaactcagtattaccttttttcctaaaaatcatttttcacattttgagtaatagggcttatgctttgatgtgaaaaaatgtcaggaaatgagtgtagacaataccctataaaacactagctaagttttatagtgctccatgcctttgtgtaccttccactgattatcttgcctatctttggtgtgtaaactattttcatatcttctaaggctcttaacccactcttttctgaagccgcacagtcctttaatatgtcttgtttccttcctaaaagtttaaagtagagagcaaaaatgcaaatacccaaaggatactgttagtatgtaacttttgtgtgctgctttatttctagagtttgcattttttaattgttcattcacagaaaatcctaatattgccctatatggttggtttttttcctaagtggttaatatttaaacccgctagctgtagcatgataatgtctttgactgagcttatgtagtagaaaggatgtgtctgttttctgggacttttagtcttcacttatttttctataacaatctaattgttaaaaggaaaagatggcttattgacacatatttcattaaactttcactggaagaacagtgggtcatcctactgtggattaagaatactactgacaagcaaaaagcattaagctctgtaactgtctccaacaccaccttcaccccgcctttagtgtaccttagtgtactttagtgtacctattttggcagtacggtgttttccagattctacttgtgccctgcacattgtgaggactcattaaatatttattaaattaatgaatgactaacaggaagagaaagattgtttgtgagtgttaagaatgagtgatgattgagaaattgatggattagtgcaatggattgggaatgaatgatgctttctagtttcgtaatacttgggaagagctattgcatatagagtaagttgatttagactttttttttcttcatttcattaccttgtttaaacttgttaaatcccagccaagaaatgcagctctgtaattgtcaattaactgtattataatatatattaaaaatttgtagagctaaagaacccacttgcattaagaacaccactttctgttcatttgtgatactagaggacagatcctgcatacagagccgaaactgcttttaatcatctgaagaaattctttgatttcagtgacttactgatctgtacctgtgcacatatcattttatgcttctccttttttccccgcaacttgaactgtgactctttcagatatttcttaaatctgtatgagtcattttttaagcttagggatttgatatgtattaatgtcccctttgtcttctgtagattttagcattttattacctcttaagaaactctgggcccagactttcagtcatatttcttattcctatggtacagttctcacttaaaggcttaattattagtagggttaaatatatacaggttatctctaaaagtacttaaatttttaaataagggcttatgtgatacaagatacggaaacaaaagtttttggatttttatgcagtagtttgcaggaaagcaaatacatagtagatcgtatgccacttaggtatgttcaggtcatgccagtttattcttgttgggccacacacacatgtatgtgtgtgtaaaaggaatttttagtattgaagcaaacaaattgtcagtttaataattttctcttacatagcacaagatggcagataccacctactgtacaacaatctaataatccctaccttagttcccctgagttatagaagatgctaaagatttagttgtaaagggaagtaacatgattttttttttctaaaaagctgttttaagctaactattattttgctactggaaaattatattttaaaacttacagatatttaaagtatg

SEQ ID NO: 82152 - DNA, 2697 bp, Homo sapiens
gtaatgtctgctttcttatatttgcccttttgtaagtggtctgtttcttcttttcatatactttgttttgccaatccattacgtattttttgtcacttttgtgtgtcatttttgtatacctttcctttcttacttcaggggtgtgtcttcaagatttctaccccctatttgcaatgaatttcatacctcatctaaaatacattcatataccagaaatatgaagagtggcccttctaaaagtttccctaatgatggaagctgtcagttgtcctatctgtgcagaatgtgagtaatagtggcagaaataagtgtgacaacaatgctttgcctgttgttctttttacttgctaggtaatttgtaaagtggggataaagatgtagggaaagtaaacctctctctcactgttacggaaagcctggacttgagttaggtagactgccttaaagaagaagaaatatgtccttttctttggcatcatggttttgttgagtggcagactgttgaagtgagttgagacttaagaacgccagaaaagttgtctagcctggccccagtagacagaatttgttcttctctcaagtaaaaaattacctttttatagcttttatattatttagatgaaaaaataccattatgaacataattccatggccctttgtgtacaaagcatattttgaattaaatacctcaaggtccacctagactctatgggtaaaatcataagtttatgatttttagctcctgtgagtgtttgggggcaaactacacagagaagacatgggtggttcagcccattccactaaaatatgttgccagattctggcctaactcagtattaccttttttcctaaaaatcatttttcacattttgagtaatagggcttatgctttgatgtgaaaaaatgtcaggaaatgagtgtagacaataccctataaaacactagctaagttttatagtgctccatgcctttgtgtaccttccactgattatcttgcctatctttggtgtgtaaactattttcatatcttctaaggctcttaacccactcttttctgaagccgcacagtcctttaatatgtcttgtttccttcctaaaagtttaaagtagagagcaaaaatgcaaatacccaaaggatactgttagtatgtaacttttgtgtgctgctttatttctagagtttgcattttttaattgttcattcacagaaaatcctaatattgccctatatggttggtttttttcctaagtggttaatatttaaacccgctagctgtagcatgataatgtctttgactgagcttatgtagtagaaaggatgtgtctgttttctgggacttttagtcttcacttatttttctataacaatctaattgttaaaaggaaaagatggcttattgacacatatttcattaaactttcactggaagaacagtgggtcatcctactgtggattaagaatactactgacaagcaaaaagcattaagctctgtaactgtctccaacaccaccttcaccccgcctttagtgtaccttagtgtactttagtgtacctattttggcagtacggtgttttccagattctacttgtgccctgcacattgtgaggactcattaaatatttattatgatgattgagaaattgatggattagtgcaatggattgggaatgaatgatgctttctagtttcgtaatacttgggaagagctattgcatatagagtaagttgatttagactttttttttcttcatttcattaccttgtttaaacttgttaaatcccagccaagaaatgcagctctgtaattgtcaattaactgtattataatatatattaaaaatttgtagagctaaagaacccacttgcattaagaacaccactttctgttcatttgtgatactagaggacagatcctgcatacagagccgaaactgcttttaatcatctgaagaaattctttgatttcagtgacttactgatctgtacctgtgcacatatcattttatgcttctccttttttccccgcaacttgaactgtgactctttcagatatttcttaaatctgtatgagtcattttttaagcttagggatttgatatgtattaatgtcccctttgtcttctgtagattttagcattttattacctcttaagaaactctgggcccagactttcagtcatatttcttattcctatggtacagttctcacttaaaggcttaattattagtagggttaaatatatacaggttatctctaaaagtacttaaatttttaaataagggcttatgtgatacaagatacggaaacaaaagtttttggatttttatgcagtagtttgcaggaaagcaaatacatagtagatcgtatgccacttaggtatgttcaggtcatgccagtttattcttgttgggccacacacacatgtatgtgtgtgtaaaaggaatttttagtattgaagcaaacaaattgtcagtttaataattttctcttacatagcacaagatggcagataccacctactgtacaacaatctaataatccctaccttagttcccctgagttatagaagatgctaaagatttagttgtaaagggaagtaacatgattttttttttctaaaaagctgttttaagctaactattattttgctactggaaaattatattttaaaacttacagatatttaaagtatg

SEQ ID NO: 82153 - DNA, 1394 bp, Homo sapiens
gtctttgattagccaaactgtgatagacagttctgtgatggagcaaaatcctttgagaagtgagccagccctagttcctccaaaagatgaagaagcagcagtttcaacagaagaaccaaggattaatcttccccatcttctagaagaagaagttgaattcagcactgatcttattgattcctacccaggacatgaaaccctttggtgtcataggtaagaaaagattctacttgtgccctgcacattgtgaggactcattaaatatttattaaattaatgaatgactaacaggaagagaaagattgtttgtgagtgttaagaatgagtgatgattgagaaattgatggattagtgcaatggattgggaatgaatgatgctttctagtttcgtaatacttgggaagagctattgcatatagagtaagttgatttagactttttttttcttcatttcattaccttgtttaaacttgttaaatcccagccaagaaatgcagctctgtaattgtcaattaactgtattataatatatattaaaaatttgtagagctaaagaacccacttgcattaagaacaccactttctgttcatttgtgatactagaggacagatcctgcatacagagccgaaactgcttttaatcatctgaagaaattctttgatttcagtgacttactgatctgtacctgtgcacatatcattttatgcttctccttttttccccgcaacttgaactgtgactctttcagatatttcttaaatctgtatgagtcattttttaagcttagggatttgatatgtattaatgtcccctttgtcttctgtagattttagcattttattacctcttaagaaactctgggcccagactttcagtcatatttcttattcctatggtacagttctcacttaaaggcttaattattagtagggttaaatatatacaggttatctctaaaagtacttaaatttttaaataagggcttatgtgatacaagatacggaaacaaaagtttttggatttttatgcagtagtttgcaggaaagcaaatacatagtagatcgtatgccacttaggtatgttcaggtcatgccagtttattcttgttgggccacacacacatgtatgtgtgtgtaaaaggaatttttagtattgaagcaaacaaattgtcagtttaataattttctcttacatagcacaagatggcagataccacctactgtacaacaatctaataatccctaccttagttcccctgagttatagaagatgctaaagatttagttgtaaagggaagtaacatgattttttttttctaaaaagctgttttaagctaactattattttgctactggaaaattatattttaaaacttacagatatttaaagtatg

SEQ ID NO: 82154 - DNA, 1075 bp, Homo sapiens
acttagtgaaaaatatagaacaaagttgtacatttatcattgctatacctatgtaaaaatatgtgcaagaaaggataatttttgcaggagaatgtaaatgaattatgttaagtgggttggattctgagtgatatttttttccttttgaaaattcgcacacaccgtcaatacttgagatatttgtgaagttaaatgaatagtggcatagaaattttgtttctttcctcggtaaatattaaattagtaccaaaaagcacccaaaaggaagaggttaattagattattccttataggcatatcataaaattgtttgtgtcatcttttaagagagttacacttaccaggagagggtcttgagagtaatcttcatatccttgacagcttagaagagggaatttatcattaaagttagtatgacatgagagatatattagtataatgtgatagagagaaagagaaccttaaaagaatgagaagccaagctttaaattgatagatgtcacatgtaccctgctgcttctaaacccagactttaccactgcatggaacgtgaggtatgtcattttcattagtgatatgataaagtttgtccaaatttctgaagacatgtaagccccataagttgttagcttttgaaaacgaaatataaaccattttacacttatttcttctccctattctttatacctgtgacaattctaaataggcattttgcccctttttgtgtggtgtcttcataaactttcttgcctgaaatataaattgtcatgttgagttacagtatactgtttgatacatgcttttattttccttcattttttggggtgggagactaatgggcaatgggcataactggttggcttataaggcatataacattatatcattggtatttgagaagcactgcagtgtagtggaaagtgtatgggatgagaaagagggagtcatgcttgcctctggctttttccctgagcaactgaaaggatggaattgccatttactgaaatggcagtgtctggaagagaaacagatttaggtaggcggtgtttgttataggccaagagttcagattggg

SEQ ID NO: 82155 - DNA, 815 bp, Homo sapiens
cgaggaggtggcggtgctggtgcagcgggttgtgaaggacatcactaacgccttcaggaggaacccacacatgtgagtcgcgcgcctccgccgcctccgagggtcgtcgggagcgggcgggggcggggccaagcgtccacccgacctcgggcggcgggcggacagcgggtcctggcccacgagcccttctagggaggaggcagagccgtgtcgggcgggaccgttgtcggccgccgctggcccggctttccgctaccgggacgcgctcgcggtcgagtccctagaagtgacctcaaaaaatcaaaacggaactactttctctgtccctccccaccttttcataggagttcacgaaactccagagacgtcccccgtaggtcgacatccttcctgtgtttaaggtactcgggcgcacacaacgatgtgggtccgtgtatgccttgtaaacacaactcttgagattcatcccggacgttggcaagagggggtaaccgatcctcttacttttaatgagcctcaaacccctcagtttactaactaaaggtggtttgaggctgcttttgactttagccttacttgccacaaaattgtaaagtgactccgataatacattgtgttttgaaaggtgaacagaacattctcaagagaagcttctgtgggcgcagtgtggagtctgggataaagcaaatgaaaccttgatactttttagcataagcggattcatagttacaaggagcatgttaactcatttttatcccaacactgctgccctctttaacgggacactgcagaactgacatatgtatctcttccat

SEQ ID NO: 82156 - DNA, 871 bp, Homo sapiens
aactgtcgcggccgccgccaacatggccgagaccagcgaggaggtggcggtgctggtgcagcgggttgtgaaggacatcactaacgccttcaggaggaacccacacatagatgaaattggcctgatcccatgtcctgaagctaggtataaccggagtcccatagtcctggttgaaaacaaactgggtgtggagagctggtgtgtcaagttccttttaccatatgtccacaacaagctccttttgtacagaacaagaaagcaatggctgaacagagatgaattgatagatgtcacatgtaccctgctgcttctaaacccagactttaccactgcatggaacgtgaggaaagagctgatcctctctggcactttaaatccaattaaggatttacatctgggaaaactcgccttaaccaagtttccaaagagtccagaaacatggattcacaggcgatgggtgctacaacagctaattcaggaaacctccttgccttcctttgtgaccaaaggaaacttgggaacaattcccacagaaagggcacagcgactcatacaagaagagatggaggtctgtggtgaagcagcagggagatacccaagcaactataatgcttggtcccatcgcatctgggttttacagcacttggccaagctagatgtcaaggtaggaatattactgtctcctgggcagactgcctgtctgcccttaaaatcttctggtagtagttcattctcagaagagctttgaaggagtagagaaactgatggtctggcaacttgagagaatcgcaacagctgctacctctggaggaaccctgtaattaaataaaaagcttgcattccccactagtgctgtttttggcagtcttaa

SEQ ID NO: 82157 - DNA, 558 bp, Homo sapiens
cgcttacatatagtgaacttatagttaagtaaatgatgatacagctttgcaaagaaacatatatagccactaaatacaaatagaaattaaatataaaccatttaaataatgagacagtcctatttgtccctatgggtaatgacctccaaggtacattaactcaaaaaagcatggaacagaagacagtggataagagtaataccctaacactgaaaaacagagagtgagagagaaaatatatttgttatgcttatgtacgtgggaaatccttctgaatggacacaaaagaaattggccatgattatggttagcactgggaagggaaactgcagggctggggacagagatgagagggagacttttcactgataccttttgtcccttttgaagtgctactatgtgcatatttaacgaaaaattacaatataggctgggcactgtggctcacgcctgtaatcccaggatttgggaagccgaggcgggcagaccacttgaggccagtagttcgagaccagcctggccaacacggtgaaaccctgactccactaaaaatacaaa

SEQ ID NO: 82158 - DNA, 608 bp, Homo sapiens
acacctctgcccatgcgccatggagcatgtgttaggtgcctgccgtgggtcaggcacttgattctcaaaacactgccgagaagctcttaccaacgtgacagttgaggctgagagaggttcatgagcttgctcaaggccacgggtagtaataagaggcatggccttggtgccaagtgcctcccaaacaaacagccggggccgtggtcctgcctaaactctcacatccacggcaccacgctgggcccaggcaacagagataaggagagccctggctcttgggatggggtcgcgccgattcacatgctgtgccacggagccccggcttccatccatgatgtgcccctgtggcgggataattgggaaacaacctttttctgattcccagagaactaatgagctgcaaaaagagattagacagggaagaattgctttcggggagaagccacttactcggctcgccttggtttttgctaacaacgtctccttaaactgctgtcaaatctttttctccctgtgtaggattcatcaatcttcgtatgcaaaagaacaccactgcactgcactgctaaaaattcacacaataaaatggactttaacttgcaaaactc

SEQ ID NO: 82159 - DNA, 530 bp, Homo sapiens
acacctctgcccatgcgccatggagcatgtgttaggtgcctgccgtgggtcaggcacttgattctcaaaacactgccgagaagctcttaccaacgtgacagttgaggctgagagaggttcatgagcttgctcaaggccacgggtagtaataagaggcatggccttggtgccaagtgcctcccaaacaaacagccggggccgtggtcctgcctaaactctcacatgctgtgccacggagccccggcttccatccatgatgtgcccctgtggcgggataattgggaaacaacctttttctgattcccagagaactaatgagctgcaaaaagagattagacagggaagaattgctttcggggagaagccacttactcggctcgccttggtttttgctaacaacgtctccttaaactgctgtcaaatctttttctccctgtgtaggattcatcaatcttcgtatgcaaaagaacaccactgcactgcactgctaaaaattcacacaataaaatggactttaacttgcaaaactc

SEQ ID NO: 82160 - DNA, 335 bp, Homo sapiens
caactcctgggctcaagtggtccgcccagccttctgaagtgctgggattacaggtgcgatccatcttgccctggcagctcctgcttttcaccacagcattcacgggagtttgtaggatttctgtgctggggaaacgtgtactcagttaatagagccaggtggaagttgtactcagaactggtggttttctttggaatgaaaaccgtgcatgttgggggctcttagtgtccccgttcggttgtaggcataacacccttgctttgtgtagggggagggctttgcccgtgccctggtgccccggcgcagggcatcgaggcctgcagatcagaaccgca

SEQ ID NO: 82161 - DNA, 577 bp, Homo sapiens
gacaccagggagtcctgggaattaggaaacaaaacagagaagggaagaaaaaaaagcaggaactgaatttccttcattcattcatttatttttgagaagggtggagaagcccacagatttatatctcggttgggtgaaattgtgttactgtttatctgtacctttttccccctgtggcaagagacgtggagaatagacactcactcccaaagataccaagttccaaagcactgagtcatgagtccacaatgaaatactaggatgcagccatttcctacctttgtttggaaatgaactgattggaccaggcggatgtaagccctcagctgcagggctttacagaaggaaatgcttttggtctctcttaggtactcgatgctgttctgtaacttctttgtatttgactgaaacaaccaatgtgaaaatgtttcctagactatataaaattcagcgcatgcacccttctgtctgtttgtgcacatatactttttatgtgatggtagggaaagcatcaactgcttttaatgcagtgaatttttaatgtaaccttacgtattaaactcttcacaagactgtc

SEQ ID NO: 82162 - DNA, 260 bp, Homo sapiens
tagtagagacggagtttcaccgtgttagccaggatggtctcgatctcctgacctcgtgatccacacgccttggcctcccaaagtgctgggattacaggcgtaagccaccgcacccagccctctgtgtggttatattatcaatttaatatgtaatagcatctgtggtttctgtttatattcattcagttttatttatttatttatttttagacggagttttgctgttgtggcctagactggagtgcaatggcacgatctca

SEQ ID NO: 82163 - DNA, 829 bp, Homo sapiens
ggccatttctcatggaaaatcaggaaaagagaatgaaacattaattttcatgttgagttattacagacatcagcagtatggaccaagcacccatgagataacgagtcctgaactgggcaccaagagagggtcacagatataaagagtttgccttgagtctcagatgaaactttgaatattggacatttgagttgatgctggaacaagttaagagttttgaagactatgggatagaatgactatattcaacactgaaagaacgaagacaatggctcttccagaggaagaaagattatcctgtcctggctatcttgtctattaccaacattccaggatgaagaaatatggtgatacactcaggccactggaatggcctccagtacagcagtgaataccagtggaatgcaacttcttttgctttagaagacaagctcttagcaatgtcaagtttccaggtacgaccgagagatattcaacatattataatttccactaagatgggaaacatttcctaggggttatttctctttgacagcagagaagtatccaagttattctagataataaagcaaagttttcctcaagtcctgtattatatgagactgctgtttctgaaaattatagtcccacagcaacctacgaagtttagagatcaatatttgatttttctatcttgctaaatattcttcaaatcaagtattagttgtccctgtcactcagcatgaagaaaaactgtgttaaagaggacctggagaagtaaactgactactgacttaccagactccagaactataacaagtaaatttctgttgtttataagctacccaga

SEQ ID NO: 82164 - DNA, 636 bp, Homo sapiens
atctccagtcaaagctgatagtttatgattaaaattaaactttatgacctctttgactgctgctttcattttttcctttagagtacatttaagacctaaaatgataggtatctaatttaattgtttgctaaaaggagacaaaaatctctaacataatcaaaaatttctaagatataagaatatgaggaacagttctaggctcaatgtactgaaatcccccaaatattagaccacagcaaccctctccataccatgtatatacctggctcccctacccatgcaagcaaaatccaagtgggtagtctggacttccaccctagtgaggctacaaggtggcatctcaacaccctaactggggtagagtcaaaggctatgtagacaagtagggagccatgataatggtgtcagcggagaccacctagagagcctagatttccacccatacaggaagtaatacggtgttacttactccttctcctagttggctagtatcaaaggaggcctagtggaaagtcgggacttttcccattgcccagaggtgagaagaccactcccactgcagtgtcactggagaccatatgggaaactgaaactgccaccctagcctagcagttgctgtggctaaggaaatagctc

SEQ ID NO: 82165 - DNA, 589 bp, Homo sapiens
  misc_feature (586)..(589): n is a, c, g, or t
aaactcctgacctcaggttatccacccacctcggcctcccaaagtgctgggattacaggcatgagccaccgcgcccggccggacaccattctttttcaatgaaacagtctaattccagagaatgagacttccagtttgaatgcaaagtgtgtggtcccaaagttgaattcttttgaacccaagtacatgcctgcggttgggaggaacacttaaagatgaagcaagttcggaggaaagtgttaactgaactacagagatggtcactgataaaacaagttcttagaagttctcagacacacccagaggtgaagggcagccaaaactatcaacacaatggaaaaatgagctcacccaactgcacacacagagcttctagaagggttaacagctcttgccataggttcctggttgtagtttacaatatctgcctttaccaccctctgtgactgttctatttctgctttgtttaatttgattccaaggatttcagcaacaactttttgaaaacacaggaagacagagtctcttgccttggctgaaacaaagtggctattaaaaccattttcctggcaaaaccgtaaaaaannnn

SEQ ID NO: 82166 - DNA, 472 bp, Homo sapiens
catttgtcaccccctacgctacccagtcatcatgaatccccatctctgtgtcttcttagttttggtgtcttttattcttagcctgttgaactcccagctgcacaatcagattgtgttacaattcacctgcttcaagaatgtggaaatctttaattttttctgtgagccatctcaacttctcaaccttgcctgttctgacagtgtcatcaataacatattcatgtatttagatagtgttatatttggttttcttcccatctcagggatccttttgtcttactataaaattgtctcctccattctaagaattccatcatcagatgggaagtataaagccttctccacatgtggctctcacctggcagttgtttgcttattttatggaacaggacttggagcctacctcagttcagctgcgtcctctttccccaggaagggtgcggtcacctcagtgatgtacactgtggtcatc

SEQ ID NO: 82167 - DNA, 491 bp, Homo sapiens
aatgatggaagagtccccaaatcatcacaaataccatttcattcattcaacatatgtttactaattgctgtctatagaagcagcactgacctaggagctacggaaacaaatgcaacgtgttagaaagactttagaaatgagaactcttaggactcttggtcacaaaacatacccagattcagcatcccaaaagatgtaatgtttttcacttaaaaacgaagagatctttaatttttcgtaagtctctttttaattaaaagaagagccctgcaggtgccaaaacatgttttggtaatctagattataaaaattgttcaagttattggagacaacaatcctgtaattcaagattgagctactggggaaccattaacgctagaagtgagtttctgaaaatgggacgtttataagagaagtgtgagttcgggtcagggtagcagggtcctataaccaaatagcagctgtggttgtgaagaaagggcaaggggctg

SEQ ID NO: 82168 - DNA, 188 bp, Homo sapiens
gctatagagagaaacaatccagctgcctggaaactgttattagtatagaagtggcttaaagaaaagcatcttcaaatacttgactcagcatatctttcttctttagacttacataatgatattcatctctccattagcaattgaatccaggcataaccgggctcagttacacagcttgtctgtgactg

SEQ ID NO: 82169 - DNA, 730 bp, Homo sapiens
ctagaggatccccaagcagtgaatacagacacatacggtttggcttttttcctttttgcttttttttcttttcgcttttacatatattttttattttatgcatgatatttacctattaaaaaaaataaagggtgggagtgtctcactttgttgcttagcctggcttcaagtgattctctcgccttgatcttccaaacttgctggattagaggtgtgcgccaccactcccagcctcttttaacgtttaaattttgaaataaagtgctgttcagaaaggttgtggaggggacttaaatctcctgggtgtgttgcacctgccaggtcgctagtaagtggctaagctggcctgagaacccaggagtcccgtgctgacactgttgcctgctgtgctgcccactgtgcggtggtatgtgggcatctgtcaccttattctactgcagtgtgtgtaagacatctgcccgtctcgtaggcaaagcttgccatcaaagtgctgggtgatgtgtgtctctcctgtgtctgtgtgcccctttctccccagcctgcattttattaataattggtgtaatgtctcatcttgacctttgcctgtctttctgttgggttggtttgtttttcattgctcgctctttctctcctatgggggctaattagggaaataaactgagtagctttttaaaaatgtcatttcccaggcccctgccccagagattctgtgtggatcagcaggagg

SEQ ID NO: 82170 - DNA, 453 bp, Homo sapiens
tctgcacacacgtcccctgtgcctgccatgggaccacagacagaggatgtgctggagcttgcactttctgtgtaatatgccttggaggtctctacatacagacacatacggtttggcttttttcctttttgcttttttttcttttcgcttttacatatattttttattttatgcatgatatttacctattaaaaaaaataaagggtgggaggatcacttgatcctgcagtgagctgtgactgagccactgtactccaggctggacaacagaacaagactgggtctcaaacccaaaaaacctacaaaaaataaattacggaagttggctattagtgttctgtaccttattaggaaatcgcttgaacccgggaggcggaggttgcagtgagtcgaggtcgcaccattgcactccagcctgggcaacaagagcaagactccgtctcaaaaaaaaaa

SEQ ID NO: 82171 - DNA, 402 bp, Homo sapiens
ctcctcggttcacgccattctcctgcctcaacctcatgagtagctgggactacaggcgccggccaccacgcccagctaattttgtatttttagtagagatggggtttcaccgtgttagccaggatggtctcgatctcctgaccttgtgatcctccctccttggcctcccaaagtgctggggttacaggcttgagccaccgcgcccggcctcagggtttcttttataactgtgatcaggaagatgtgcttttctttctacttggttaagcaactaatcaaactcagcacaacaaaacaaagattctccttttctcccaagaagttcaacagttctagcgttgtagaacatttcacaaataaaaccatcctagtttccttttcccataaacagttgaacacatc

SEQ ID NO: 82172 - DNA, 668 bp, Homo sapiens
ctgtggggaaatagtgctttaactgcttcaactggatgagtcaatgcatggtgcggggacaactggatatccatgtgcaaactaataaatttggatccctacttcatatcatacacaaaatttaactcaaaatagttcagagacctaactgtaagaattaaaactataaaactcttagtaggaaaatagctataaatctgcatgatcttggattaggcaatgggttattttagatatgataccaaaagcataagcaacaaaattaaaaacaaataagttgaacttcatcaacatataaaaaggacaccatcaagaaagtaagaagacaacccacagaatgggagaaaatgtttgccaatcacacgtatttgataagagtccactatctagaatatataaaggactcttgcaactcaacaatataaagagcacctgattaaaatgaagacaaatgatctgaatagatatttctccaaaaaaaaatacaagtggccatttaacacatggaaagatgctcaacatcattaatcattaggaaaatgcataccaaaaccacaatgagataccatttaacacccagtagaatggctataattttcttaaaagaataataagaagtattggtgagaatgtggataaattgaaactcctacgttgctggtaggagc

SEQ ID NO: 82173 - DNA, 972 bp, Homo sapiens
aaaagatttggatcagaaagattctttgctggctagagttccttttcggatggtagttcaagcagtctttaatcatatttttgttgattatttattagtttccctgggaaatcaaagactcagtaacgtaaaatgtgttttccttaagatattttatgaatcagaacccacagtaaagaaataatgggaaatacatttcctttgctgatatggactaattgagaattaaaatccctttctctagtcattatcccacatggaaatgctgaatgacccaactggcccaattgcaccaaccacagtttctgcctagacaaaactcttatgccactagtagataaagagagagctttctcagtaaatcaaaactgcagagaactagaactaatttaagtgaaaggataggctccaagcccgctgtttgggtaaacccacactgaaccaagtgagcgattgatgaaacttaatatatgtgtattccagtcatcagcctggagtatgtgtaatgcaagcccatggtgtttgtcactgtgagaaatggaaaggcagaccttcattctcaactgtgtggggctgctagcctgtggcagctttggtcaacatcgggcttgcttttgggtgagccagactttggctggtttcctgatggaggttaggggaattgtgaaatgtgtctccttacacagatcgtcctgatcaaatgaaataaaaaggtattttaaaaataatttgcttagtgaaatacaaaggaaataggatgcatttcatactattaaggccgatatggttttgggggatacgaggtgtacatacgtgaaaaatttgaaaacaattcagagtgaaaaagaatggtcgtataacctaatgtaaatgacgagttaatgggtgcggcacaccagcatggcacatgtatacatatgtaacaaacctgcacattgtgtacatgtaccctaaaacttaaagtataattta

SEQ ID NO: 82174 - DNA, 261 bp, Homo sapiens
tctaggttgggttactgggtgatgatggtgcccctccaaccttgggagatccaaggctggggtgaatggcgaggttgttttctgctatttcaaatttggggtgcctgtgagatagcaggaggcctcagatttgaagtctggagctcaagagtccagacccagatagtgtgtcagcatcgcactgacgcagcgaagtgcatgtctatgaggtggtccaagtcacacggggagaaaccaaggacaggccctgaggcacagcag

SEQ ID NO: 82175 - DNA, 221 bp, Homo sapiens
aaattttagcattagtcaggcacagtcccagctacttgggaagctgaggcaggaggattgcttgagcccaggagttcagggttgtagtacactatgatcatacctgtgagtagccattgcactatagtctggacaacatagcaagacccagtctcctaaaagggggaaaaaaggagaagaaacaggggaagcagccaaaatggccgaatagaaacagctca

SEQ ID NO: 82176 - DNA, 535 bp, Homo sapiens
ccgctcccgcccctgccgctcattcctgtccggacgcacctgcagctccccggggagaagaggacgccccccatccgctcccccacacaggcttgcgcccagagacgcggccagccggggccagagagcaactggaagaacatgcaggccgtgcaagaccaatgaacgaggcaatctacgcctaggatgcatagcgtagagacgaacggatgcttcgagagaatcggagcagacgcagcagctctaggccaatgatgattgcgacggaaatagaaccaatgtaataaacagaatacaagaacagttagaagcacgaaaggcacgagacaacgcaggacaccggacagagcagaatgtgccacagcgagatgacgcaagcgcgaaacgaatcaacaagcagacccatgtgagacaggagccacaatgaggaagaaacacaggaataacagagaccgaagcgtaacgggatggcacaacacataaagtcacaaaacatagaaacatacagagatatccgtaaagggagcacacatga

SEQ ID NO: 82177 - DNA, 438 bp, Homo sapiens
tgggcagtgctctttggatccgatgtgctgatgtctaggactgactgtttttggtatgggagcttctgtctgcagtgtctagaatgggggttggagggactatggggaacagaggtggccccagagcttggacatctgggttctcatgctggccttgctgctcataagcaggtaacacagggttgagttcctcctttgcctggccagccaacctggaagacctagccttctggctgtcagtgtccagagctctggagaatccctgaggctacatctctgggtgggggaaggtcctctctgtatagatggccctccaggggaagtctgcaaggatccagacttcagaataatagagttaagtattaactaatccaagtggtcctagcacatttagcacatatggcatgctcaagggtgtgcaattgtgcagtcatcaaa

SEQ ID NO: 82178 - DNA, 997 bp, Homo sapiens
  misc_feature (47)..(47): n is a, c, g, or t
  misc_feature (379)..(379): n is a, c, g, or t
  misc_feature (618)..(618): n is a, c, g, or t
atcaacagccaagaatgtggggattgcagtcagggcttccttctcantcctgctctacatctactgaatcctcaaccacactcctttccaatttccagaatctacttcttctctacatttctgcctcccttcccttaatgcagttcctcctccctttggtctcagtagcagcctcagaatgggctgtccctgccggcattttgtcatcctccagataaaggataaacttattcagatgacttccaatgccaggcacctccgaatccccacttgccatgtgagcctcatgccctccacctcctcctccatatcgtaaaataagatgtcctgacttcctgtgcgtgaggcttgccaggacccgcaatgctccctctctcanttcagggcttatcacttgctcttttcctctccctggaaacctctcctttcataagttttgtaaacaccttctaacaatcacttgggatgcagttctggcatggcttcatcctagaaacctttttcaaccaccgtcctacagcccaggatgtgggcttagagcccctctcctaggctctgcagcacccaacacaggcacctgttaggacccttcacagaatattacgcaatggccctttnggttcacattcccattttatgtttttaactagagatgctggggaaagtttttttaaccttttccaaaatgacctacatgtttgtgattctttccacgtttctttctgtcaattcacttttggaaaaaaaaaaacctttattggagtataatttacatagcataaaattaatatgttttggcatggtggctcatgcctgtaatcccagcactttgggaggccaaggcgggtggatcacctgaggtcaggagttcgagaccagcctggccaacatggtgagaccccatctctactaaaattacaaaattagctgggtgtggtggcggacacctgtaatcccagctacttgggaggctgaggcagaagaattgcttgaactc

SEQ ID NO: 82179 - DNA, 390 bp, Homo sapiens
tggtatcactgttctgttacgtaatgttcagtaaatatttaacaatattcagataaagagtcatcaattagaaatctttaccaaacttcttacccataaaggttgtctattggaatgcatgtccagtgtttaaaattgaacttttcatccatgtgtgtatcattgagatttcactttccttagccagctgaacattgagaccagcttattctgtagacttttaaaataattttacctattttccccttagacttagaataattgatcttacaatatttattctatgtcataatttccttctgtgttatttattataacattacattaaccatacatatattttaaaataatagtggtttagttttaaattactatttttattttgttttt

SEQ ID NO: 82180 - DNA, 658 bp, Homo sapiens
cacttaaggagctcgggccagcgcgagggggagcagggaggaagcccggctgctgcggacctcctcggacccggacccagccccagcccggccccagccagccccgacggcgccatgcggggtccgagcggggctctgtggctgctcctggctctgcgcaccgtgctcggtggcatggaggtgcggtggtgcgccacctcggacccagagcagcacaagtgcggcaacatgagcgaggccttccgggaagcgggcatccagccctccctcctctgcgtccggggcacctccgccgaccactgcgtccagctcatcgcggcccaggaggctgacgccatcactctggatggaggagccatctatgaggcgggaaaggagcacggcctgaagccggtggtgggcgaagtgtacgatcaagaggtcggtacctcctattacgccgtggctgtggtcaggaggagctcccatgtgaccattgacaccctgaaaggcgtgaagtcctgccacacgggcatcaatcgcacagtgggctggaacgtgcccgtgggctacctggtggagagcggccgcctctcggtgatgggctgcgatgtactcaaaggacccaaacgaggtgccgacttgcacccagaaagctcccaagtggctcatcagccca

SEQ ID NO: 82181 - DNA, 1316 bp, Homo sapiens
cacttaaggagctcgggccagcgcgagggggagcagggaggaagcccggctgctgcggacctcctcggacccggacccagccccagcccggccccagccagccccgacggcgccatgcggggtccgagcggggctctgtggctgctcctggctctgcgcaccgtgctcggtggcatggaggtgcggtggtgcgccacctcggacccagagcagcacaagtgcggcaacatgagcgaggccttccgggaagcgggcatccagccctccctcctctgcgtccggggcacctccgccgaccactgcgtccagctcatcgcggcccaggaggctgacgccatcactctggatggaggagccatctatgaggcgggaaaggagcacggcctgaagccggtggtgggcgaagtgtacgatcaagaggtcggtacctcctattacgccgtggctgtggtcaggaggagctcccatgtgaccattgacaccctgaaaggcgtgaagtcctgccacacgggcatcaatcgcacagtgggctggaacgtgcccgtgggctacctggtggagagcggccgcctctcggtgatgggctgcgatgtactcaaagctgtcagcgactattttgggggcagctgcgtcccgggggcaggagagaccagttactctgagtccctctgtcgcctctgcagggtgacagctctggggaaggggtgtgtgacaagagccccctggagagatactacgactacagcggggccttccggtgcctggcggaaggggcaggggacgtggcttttgtgaagcacagcacggtactggagaacacggatggtgagtgggggaggggcacgggcccagaggagcagggagtcaggccaggccggcttggggcagggaccctagatggcagagttgggatcaaacgccctagtgcagtgctgctctgagtctctgggtgaccttggacaagtcccacagtctccgagcctcagcactcccagctgcaaaagagcagaggcaggtgtcaccagtggagtgcccactgcccacagggcaggagaagggggccagcgagcagctctgctctgctttgatttgaatatggcattgggttctggttccacctgaagatgagggtctgattttttaagcaatttgcaaaccccttctgcatttattgctggaattctgaaaaatttgtttttgctcatcagttattttatatgtggaggtacaatttgtataggaaagttagaataaaatactttgtttctttctccttattttcttgttttcagaataaatgagttgcttcactatca

SEQ ID NO: 82182 - DNA, 876 bp, Homo sapiens
  misc_feature (838)..(838): n is a, c, g, or t
cacttaaggagctcgggccagcgcgagggggagcagggaggaagcccggctgctgcggacctcctcggacccggacccagccccagcccggccccagccagccccgacggcgccatgcggggtccgagcggggctctgtggctgctcctggctctgcgcaccgtgctcggtggcatggaggtgcggtggtgcgccacctcggacccagagcagcacaagtgcggcaacatgagcgaggccttccgggaagcgggcatccagccctccctcctctgcgtccggggcacctccgccgaccactgcgtccagctcatcgcggcccaggaggctgacgccatcactctggatggaggagccatctatgaggcgggaaaggagcacggcctgaagccggtggtgggcgaagtgtacgatcaagaggtcggtacctcctattacgccgtggctgtggtcaggaggagctcccatgtgaccattgacaccctgaaaggcgtgaagtcctgccacacgggcatcaatcgcacagtgggctggaacgtgcccgtgggctacctggtggagagcggccgcctctcggtgatgggctgcgatgtactcaaagctgtcagcgactattttgggggcagctgcgtcccgggggcaggagagaccagttactctgagtccctctgtcgcctctgcagggtgacagctctggggaaggggtgtgtgacaagagccccctggagagatactacgactacagcggggccttccggtgcctggcggaaggggcaggggacgtggcttttgtgaagcacagcacggtactggagaacacggatgaaagtccatcacnaaggcaaacatggaccatatctgagtttggcgaaggcg

SEQ ID NO: 82183 - DNA, 1303 bp, Homo sapiens
gcgagggagactcacttgtcactgcgcaccgttttctgctatctgatttttttactatgatatctgagtcctgcaaaatcaatgattagtattttttttttaacattattaggaaaacaaggtgaatccctggcctgggaaagggggagagccctgggctctggttgggctcctgggacagatgagaaggacagcacagccctctggggcttggggtggggccccaggccatctggtaggtgtcccgagttctttgctgagcaggccagctgggccaggcttggctgagccacatttccttgcaggcccaggaggctgacgccatcactctggatggaggagccatctatgaggcgggaaaggagcacggcctgaagccggtggtgggcgaagtgtacgatcaagaggtcggtacctcctattacgccgtggctgtggtcaggaggagctcccatgtgaccattgacaccctgaaaggcgtgaagtcctgccacacgggcatcaatcgcacagtgggctggaacgtgcccgtgggctacctggtggagagcggccgcctctcggtgatgggctgcgatgtactcaaagctgtcagcgactattttgggggcagctgcgtcccgggggcaggagagaccagttactctgagtccctctgtcgcctctgcagggtgacagctctggggaaggggtgtgtgacaagagccccctggagagatactacgactacagcggggccttccggtgcctggcggaaggggcaggggacgtggcttttgtgaagcacagcacggtactggagaacacggatggtgagtgggggaggggcacgggcccagaggagcagggagtcaggccaggccggcttggggcagggaccctagatggcagagttgggatcaaacgccctagtgcagtgctgctctgagtctctgggtgaccttggacaagtcccacagtctccgagcctcagcactcccagctgcaaaagagcagaggcaggtgtcaccagtggagtgcccactgcccacagggcaggagaagggggccagcgagcagctctgctctgctttgatttgaatatggcattgggttctggttccacctgaagatgagggtctgattttttaagcaatttgcaaaccccttctgcatttattgctggaattctgaaaaatttgtttttgctcatcagttattttatatgtggaggtacaatttgtataggaaagttagaataaaatactttgtttctttctccttattttcttgttttcagaataaatgagttgcttcactatca

SEQ ID NO: 82184 - DNA, 506 bp, Homo sapiens
gcggccgcacttaaggagctcgggccagcgcgagggggagcagggaggaagcccggctgctgcggacctcctcggacccggacccagccccagcccggccccagccagccccgacggcgccatgcggggtccgagcggggctctgtggctgctcctggctctgcgcaccggtgaggccccgctgtgagagccaaaggcgggcgggggtcccggggcgccgcggcccggctgagcaggtcccggggctggaaatgtgcctgagcctgcggctccggggcagtgagacgggggaggcaggggctcggggtcgagtgaggacggcggagggaactagcactgaagcgcagacggggaagtctggaaggcttcttggaggaggcggcctcgaacacccgaggcttccgacgctccaaggagaagcgcgggctgaggcgtggtggggaggcctcggggtgtggagaggagctcccggagggcggcccctcccgacgggcgcaggaactcag

SEQ ID NO: 82185 - DNA, 560 bp, Homo sapiens
attgaaagaatataatttcagctaaaatcctagaagagggtttgaaataatttaaagaaaatgaccaagtttttttaaaacctacgtttcaaaatctaaatggatatgtgttatttgggacacttattcattatgattatataagaagacaattcttgtttcccttataagtatggactgtatacattaaggaaaacaatgtttaatccttattttttaatacagaagtctcaaggttcttgtcaaattttgcctttataagcttattacaaaattacaacttactttactgaagtttataatggaagaagtccatatagcaaaagagctgttttaaatcagaaggaaaaaaggttactctggttgttaatctgcttggcaaatattccttcataatttgtgaaaagaatgcaaatcagcattttaatatgaattttgaaatgaggtatggttttttgtttgtttttttcagaactcagtctgaaaaacaactgtgagtgtagcatgggtcaaatttggtttttagtccatttgctttatcaacatcacggcttcagaaa

SEQ ID NO: 82186 - DNA, 355 bp, Homo sapiens
gaaagggacactgagggtaggaaagaccatcttgaattgctgacgccacccctcccccaaccccaggcagcactgactgcagcaatgcaagtgactccttctgcttgaggagacgagagcaaggagtaaaaaggactttgtgttgtatcttggataccagctcagccacagctacaacagggcaccggcagagtcgtgaggtcgccattccaggccccagctccaagatgacatttttagatacactctggcccagaaggaaacccactgccttaaagggaaagacccagtcctggaaggattaatcttggcttaatcttaacctgctgactaaagagcccttgaaccttgaata

SEQ ID NO: 82187 - DNA, 509 bp, Homo sapiens
ttttacagacgtgtgaataatattcatttttgaatcaagagcttaagaaattaggatggctaccctagtctaggatcctcatattactaatttcttccgcctccacaaacactctgggtagggagattctgccattaactagctctgctgtcctaagcaggtggcttctttctgcctcacagccctgttcctcctctttgaggtgtaggtgctggacaggatctcctatgcctccagccctaacgttcctctgcctgtctgcagggggatgcaggagggtggctgcgggaccactgccttcagaccggggacgcctttctcatcgtcttctcagtcaccgaccgacggagtttctccaaagttccagagaccctacttcggctccgggctgggaggccgcaccacgacctacccgttatcctcgttggaaacaagagcgacttggcccgctcccgggaggtatcactggagggtgtgtatcctgaacagattccatacttgcgatctca

SEQ ID NO: 82188 - DNA, 407 bp, Homo sapiens
cggcgtgggcaagagcaccctagcaggcacttttggtggtctccagggagacagtgctcacgaaccggagaacccagaggatacctatgagagacgcatcatggtggataaggaggaagtgactctagtcgtttatgacatctgggaacagggggatgcaggagggtggctgcgggaccactgccttcagaccggggacgcctttctcatcgtcttctcagtcaccgaccgacggagtttctccaaagttccagagaccctacttcggctccgggctgggaggccgcaccacgacctacccgttatcctcgttggaaacaagagcgacttggcccgctcccgggaggtatcactggaggagggccgccacctggccgggacgctgagctgcaagcacatcgagacgt

SEQ ID NO: 82189 - DNA, 1057 bp, Homo sapiens
gttggggcgtgtgtatgtgtatttggggggactgaagggtacgtggggcgaaacaaaaccggccatggcagcagcggaggaggaggacgggggccccgaagggccaaatcgcgagcggggcggggcgggcgcgaccttcgaatgtaatatatgtttggagactgctcgggaagctgtggtcagtgtgtgtggccacctgtactgttggccatgtcttcatcagtggctggagacacggccagaacggcaagagtgtccagtatgtaaagctgggatcagcagagagaaggttgtcccgctttatgggcgagggagccagaagccccaggatcccagattaaaaactccaccccgcccccagggccagagaccagctccggagagcagagggggattccagccatttggtgataccgggggcttccacttctcatttggtgttggtgcttttccctttggctttttcaccaccgtcttcaatgcccatgagcctttccgccggggtacaggtgtggatctgggacagggtcacccagcctccagctgacaggattccctcttcctgtttctcgccatcttcttctttttttggctgctcagtatttgagctatgtctgcttcccgcccacctccagccagaggagaatcagtattgagggtccctgctgacccttccgtactcctggacccccttgacccctctatttctgttggctaaggccagccttggacattctccaggaaggcctggggaggaggagtgaagtctgtgcatagatgggagagccttctgctcagaggctcactcagtaacgttgtttaattctctgccctggggaaggaggatggattgagagaatgtctttctcctctcctaagtctttgctttccctgatttcttgatttgatcttgaaaggtgggcaaagttccctctgactcttcccccactccccatcttattgatttaatttaatttttcactccccagagtctaatatggattctgactcttaagtgcttcctccccctcactacctcctttaatacaaattcaat

SEQ ID NO: 82190 - DNA, 974 bp, Homo sapiens
gttggggcgtgtgtatgtgtatttggggggactgaagggtacgtggggcgaaacaaaaccggccatggcagcagcggaggaggaggacgggggccccgaagggccaaatcgcgagcggggcggggcgggcgcgaccttcgaatgtaatatatgtttggagactgctcgggaagctgtggtcagtgtgtgtggccacctgtactgttggccatgtcttcatcagtggctggagacacggccagaacggcaagagtgtccagtatgtaaagctgggatcagcagagagaaggttgtcccgctttatgggcgagggagccagaagccccaggatcccagattaaaaattctcatttggtgttggtgcttttccctttggctttttcaccaccgtcttcaatgcccatgagcctttccgccggggtacaggtgtggatctgggacagggtcacccagcctccagctgacaggattccctcttcctgtttctcgccatcttcttctttttttggctgctcagtatttgagctatgtctgcttcccgcccacctccagccagaggagaatcagtattgagggtccctgctgacccttccgtactcctggacccccttgacccctctatttctgttggctaaggccagccttggacattctccaggaaggcctggggaggaggagtgaagtctgtgcatagatgggagagccttctgctcagaggctcactcagtaacgttgtttaattctctgccctggggaaggaggatggattgagagaatgtctttctcctctcctaagtctttgctttccctgatttcttgatttgatcttgaaaggtgggcaaagttccctctgactcttcccccactccccatcttattgatttaatttaatttttcactccccagagtctaatatggattctgactcttaagtgcttcctccccctcactacctcctttaatacaaattcaat

SEQ ID NO: 82191 - DNA, 783 bp, Homo sapiens
  misc_feature (746)..(746): n is a, c, g, or t
  misc_feature (757)..(757): n is a, c, g, or t
gttggggcgtgtgtatgtgtatttggggggactgaagggtacgtggggcgaaacaaaaccggccatggcagcagcggaggaggaggacgggggccccgaagggccaaatcgcgagcggggcggggcgggcgcgaccttcgaatgtaatatatgtttggagactgctcgggaagctgtggtcagtgtgtgtggccacctgtactgttggccatgtcttcatcagtggctggagacacggccagaacggcaagagtgtccagtatgtaaagctgggatcagcagagagaaggttgtcccgctttatgggcgagggagccagaagccccaggatcccagattaaaaaattccagccatttggtgataccgggggcttccacttctcatttggtgttggtgcttttccctttggctttttcaccaccgtcttcaatgcccatgagcctttccgccggggtacaggtgtggatctgggacagggtcacccagcctccagctgacaggattccctcttcctgtttctcgccatcttcttctttttttggctgctcagtatttgagctatgtctgcttcccgcccacctccagccagaggagaatcagtattgagggtccctgctgacccttccgtactcctggacccccttgacccctctatttctgttggctaaggccagccttggacattctccaggaaggcctggggaacgtggtaaatcttttgcctggggaaagaggattggatgangagatgctttntcctttctaagctttgctttcctgaa

SEQ ID NO: 82192 - DNA, 1008 bp, Homo sapiens
gttggggcgtgtgtatgtgtatttggggggactgaagggtacgtggggcgaaacaaaaccggccatggcagcagcggaggaggaggacgggggccccgaagggccaaatcgcgagcggggcggggcgggcgcgaccttcgaatgtaatatatgtttggagactgctcgggaagctgtggtcagtgtgtgtggccacctgtactgttggccatgtcttcatcagtggctggagacacggccagaacggcaagagtgtccagtatgtaaagctgggatcagcagagagaaggttgtcccgctttatgggcgagggagccagaagccccaggatcccagattaaaaaattccagccatttggtgataccgggggcttccacttctcatttggtgttggtgcttttccctttggctttttcaccaccgtcttcaatgcccatgagcctttccgccggggtacaggtgtggatctgggacagggtcacccagcctccagctgacaggattccctcttcctgtttctcgccatcttcttctttttttggctgctcagtatttgagctatgtctgcttcccgcccacctccagccagaggagaatcagtattgagggtccctgctgacccttccgtactcctggacccccttgacccctctatttctgttggctaaggccagccttggacattctccaggaaggcctggggaggaggagtgaagtctgtgcatagatgggagagccttctgctcagaggctcactcagtaacgttgtttaattctctgccctggggaaggaggatggattgagagaatgtctttctcctctcctaagtctttgctttccctgatttcttgatttgatcttgaaaggtgggcaaagttccctctgactcttcccccactccccatcttattgatttaatttaatttttcactccccagagtctaatatggattctgactcttaagtgcttcctccccctcactacctcctttaatacaaattcaat

SEQ ID NO: 82193 - DNA, 421 bp, Homo sapiens
tcctagtgattttgctgtttaaaatgcctccctcctccgaagcttggtattgaagtagtgtccagtattcctaagcagaaggctgtgaagtgccttacagagaaaatacgtgtgttagataagctttattcaggtaggagttaaggtgctttagttctgagttcaatggtaatgaatcaataatatattaaataaggtttatttaaacaaacacataaagcaaggttatgtcttgattgatagaaatgttgtgatcgacgtttgcaggaacccaacactgtatttctcctggggatccatggttcagtgttccctaattcagtgtttccattatgttcagtaggaacataactaccaagaatagattgtaacaccttgggtgggtcaaagaaattgattggacacttcagtgtttctcatc
